United States Patent Application Publication US 2024/0084332 A1 - sequence listing, part 5

SEQ ID NO: 18006 - protein, 374 aa, unknown
  TnpB Polypeptide
MVNDSIRKGLTNDTSSLRGLSLLAYSQLSRYDSPSYYKLCAISRAAGILAARKKSIRRGYASKTPYSVKPQLISCYGFKIENRSLRIPVSRRKRFRIPLTNHTLAVISQTGVTVRSFTLTPHSLSLSIAREPPEIECIHTVGVDRNLRNLTAGNDEWVSCYDLSETVRIVRTTGRIVASFKRDDARLRRLVSSKYGERRRDRTSQILHNTTKTIVAKAVERREAIVLEDIRGIRSLYRRGNWQGRKHRDKMNAWSFSQAQKQIEYKARWTGLPVIRLSKRETRGSSLTCPRCGERLQGDKRLERKLWCEKCRMVMDRDRVAAINLARRGRVRFARSRPPINEAQGGAVEAVKGNPTPTVIPGVDAPKLTYPPIS

SEQ ID NO: 18007 - protein, 560 aa, unknown
  TnpB Polypeptide
MAMVKNQQPVITVKIPINWEMMTTRAQQRLRQMVGRDTRVIRAFFRIIEENEEQLLRGVNRKRIDESKLHTLTMTAERVSGDGKQRLIVEHDLKARFPRISANELSECRRVAAANYESYLALRRGGGRHSRPSQVNRDRRIPRRIFIPYRARLVKHENTVATWWLELRDSLDSVAEGRQVHDRLTVPLKTAPFHLQQLERGNEKSVQVFTDRRGKWWAAVAIRIPETMVEKRGLPPAILGIDLGINRAVCTTLLTPTRVSETRYFVQHDKVRLMRRYDRQVANLQHEADTRRDRGLRYDNVVRKLKGLRSKRENVSKEYDRLTVSWLLSYIGGLSERYVVHVAIGRLKGIRNTARKGNYQGKRFRGLMHRWCFGRVTRTLKHGLEQLGWRTEGKQSRFHVIPENWTSITCWKCGHQGIRPRQSLFVCHTCGFRTNADRNGSLNIARRLITLIPSLWSENGLGRWATPERRLGSVPKAVRGARSPKQKSSLPRKGSASSPRESAVVRSAQTSVLEFGDEDGDGDDDRAVENAVERLTAPRKDATGIKQEKEVRAVGGTVSR

SEQ ID NO: 18008 - protein, 402 aa, Escherichia sp.
VKRLQAFKFQLRPGGQQECEMRRFAGACRFVFNRALARQNENHEAGNKYIPYGKMASWLVEWKNATETQWLKDSPSQPLQQSLKDLERAYKNFFQKRAAFPRFKKRGQNDAFRYPQGVKLDQENSRIFLPKLGWMRYRNSRQVTGVVKNVTVSQSSGKWYISIQTESEVSTPVHPSASMVGLDAGVAKLATLSDGTVFEPVNSLQKNQKKLARLQRQLSRKVKFSNNWLKQKCKIQRLHSRIANIRRDYLHKVTTTVSKNHAMIVIEDLKVSNMSKSAAGTVSQPGRNVRAKSGLNRPILDQGWYEIRRQLEYKQLWSGGQVLAVPPAYTSQRCAYCGHTAKENRLSQSKFRCQVCGYTANADVNGARNILAAGHAVLACGEMVQSGRPLKQEPTEMIQATA

SEQ ID NO: 18009 - protein, 423 aa, Firmicutes sp.
MERNQIFLPNGTYFPAEEYERKIERSIRRLKTRIALLESSKKRAIQKLEWLKKFPPKRIVFGGKKQYQKKDNPKVNREQWKQEFFEFRHASMSLPGRHTSKNCNFLVRKEGSNLIVKCMDGKETVFKQFHLARQQKIWEEMLQAEKQERKAICYNFQLKREKTGRRYLIVSVTLLLENKYCNESLEKGCVSIDLNYDHVAVSELDEKGNRLSGTVLRFSSELKTKGQISEEIGRVMAKVGRYCTERKKPLIMEDLDTTLAKHGMKYGCKKKNRHASLFAYRKMTTCLENQAYKQSFGIYKINPAYTSQMGKFLYLRPFGLSIHEAASYAIGLKGMGMREKLLPDERLLALLPEKTKEKLKNGTDIVSIIPAWKQLTKAFRGVSFHSFYRELPYEVLEERKKGTLKSIASEMKKWTQNNRYEYV

SEQ ID NO: 18010 - protein, 378 aa, unknown
  TnpB Polypeptide
MEQTLVVKLDTTIEQHDKLLGTMERFNEACNFIAGVAFKLHTAYKIRLQHEIYHEVRERFSLSSQMAVRAISKVCEVYKRDKSKRSHFKMMGAMVYDQRIMSWKGLDKVSLLTLGGREIIPIRIGEYQEGRLKNHIRGQVDLIYRKGKFYLAVVVDAPEADEFDAVGALGVDLGLNNLAVDSDGDSYSGRDVDTVRVKTDRFKASLQRKGTKSAKRHLRKLSGRENRFRRNTNHIISKRLVAKAKDTRRAIALEDLGGIRGRTTVRKAQRRRHMSWSFFQLRFFIEYKAKLAGVPVEAVKPEYTSQECPICGCVCRENRPFRAWFQCVTCGFAGSADHIAAINIAARATVKVPIAAGLVSHHAGPLSSCKPPILMGGT

SEQ ID NO: 18011 - protein, 404 aa, unknown
  TnpB Polypeptide
VQTVRIYRLKDLDRRTRAQMLAAQMEAARVWMYCLERHQQARSAHVPWPSRDDLQRETRGGKFALHSQSIQMVCHQFLANVETIKQLRQSNPRHRYPYHPKKYMTVEWPAQAVSRQGKRLILPMGRGRKSLSLHLGELPEQIGAVSLVWNGGYELHLVVAAPSVASPLASCDASPDKLLRATADLGEIHQVALTTTSGKGLIVTGRGIRSLKRQHNQTLGQLARLQARCQKGSKRWRRLQYTLARASGKHTRRVRDLRHKGTHRAVDFCYTEGVQTLYVGDPHGVRNENKGRHHNQRMAQWEYGKDKDYLQQKCAQVGIVCFSGSERGTSSHCPRCDWRKKPKGRNWICRRCGFVGHRDIVGSMNMHPLAFGSRISYPSSLTYRRPGPLRDRRQDKELSPSGTS

SEQ ID NO: 18012 - protein, 206 aa, Eisenbergiella sp.
VNVRNNTNDGVGIDLGLKDLAIVSNGKIYKNINKSARLKKLEKRLRREQRCLSRKYDNRKKGESTQKNIQKQRLKVQRLHHKIENIRTDHINKTIAEIVKTKPSYITIEGLNVSGMMKNRHLSKAVASQKFYEFKIKLKAKCEDNGIELRVVDRFYPSSKLCHCCGRIKKDLKLSDRIYKCECGYIEDRDYNAALNLRDAVTYEVA

SEQ ID NO: 18013 - protein, 447 aa, Acidimicrobiaceae sp.
MTTAVIERTSTSTKSTVTRAYAYAIDPTPEQAKLLRSHVGGSRFAYNALLGLVKDNWDENRAKKESGVEVVEDDWVDTGHFGLNNLWSEHRDELAPWWSENGASTYNDAAQRLSKAFANWRKGRAKFPTFKKRGQGGSVRFTNQAVRLFDSHHVRIARIGEVKTYESTRKLFRHLERGTGKIVAATVSERAGKWQMSFTVEVTRQVPVTRAPERIIGVDVGITSLYTGATADGEHVLDVANPRHFVKAEKRLVHAQRIASRRQGPKPGAAPSNRWLKANGRVQKIHTATRNARKNLIHETTTRLAKNYDVIVIEDLHVADMVKNRSLAKHISDAAWAEFARQLEYKTKWYGSSVVKVDQFYPSSKTCSQCGTVKATLSLDERTYHCGTCGLTLGRDHNAAINLARQGLPGTDSGTGRGGEVSPAQQSLAATAHPTKRQPNRHQKSTV

SEQ ID NO: 18014 - protein, 404 aa, Okeania sp.
LITLTYQYKLKPSKQQETEINQILDVCRTVYNYALRERKDWLSSRKVAINSCSILTEYIIPADAPYPNYNHQAKNLTIAKKIHPRLKSVNAQVLQQTLKTLDRAFYEMKSLGKGFPRFKKKLRSFVFPAMLKNCLGNSRVKLPQLGWIKIKQSRPYPESFQAKQARIVRKATGYYLMITFSSSESVPDNPVGNKSLGIDAGIESFVATSTGKLIKSPKFLLGQLRELKLLQRRLKKKKKGSNNWLKLQNTIAKLHEKIADARRDWHFKLAHQICDLTDNIFVEDINFKSWSKGIVRKKSLDSGIGQFINEILPYICWKRGKYYAKVDKNYTSQECPKCGHIGKKKLSDRKHNCSHCNYQENRDVAAAKIIKNRGLIAVGHTVKEKACGNGLTGVQLNLFDLLSS

SEQ ID NO: 18015 - protein, 405 aa, unknown
  TnpB Polypeptide
MNKVITGTIHAGDFETLKQLMRNWSSCMRYAYQRIHKDGLKGNDVVKASKPLYMAKLNQRYIADAVLKAKGIDKEHVIFGGKKSWGRMLSGLITKQEWHTVRDSELYSRGDVTKQGNPNIRVIRTPEDYKLRVGLPGARQFLMFTLYIPEKFQEEFDLNSECYDVRIKYRDNKFYAFIGIAIPDASPYYKYESGAIGIDTNPDGLAVVNIGQDGNLLEHFYLHADRLQFTRFEKRKNDIEALAVKIVDYAISKEKGIVLEDLKFNNKKPSKSRKFNRMKHNFIYASLLQAIERRAVKYRVEVKKINPAFTSKVGILKYQEQYSLNRHTAAALVIGRRGMGIIETVRVRLEPGENKKLNLAGRGLKIALTVKAYSYLKYLYKVIEIKTPAVTPPCLTPVLGNYGTG

SEQ ID NO: 18016 - protein, 373 aa, Deltaproteobacteria sp.
MKKTFLYRARLSRETEKSYLAWLETCRQLYNLALEQRVIAWKEYRKNISGYDQVVQLPSLKKAFPEFKVVGSQCLQDVVERLDRAFNAFFRRVKKGEKPGYPRFKSYLRYKSFTLKQAGWRLNGRHLYINHIGRFKLFLSCPIEGDIKTVTIIRKSTGKWFVSFSCDDVPEKKLSPTGKDIGIDVGIKAFCVDSDGNKVDNPRFLKKSLKLLKRRQRSLSRKKKGSARRHKARYLVARTHEKIANQRKDFLHKTANQYIKHYDKIFIEDLQIKNMVRNHHLAKSISDASWGMFFNLLAYKAEEAGRELVRVLPNNTSQICSGCGEKVPKSLSIRIHKCPFCGLVLDRDENAAINIIALGQRVQALTSALANVA

SEQ ID NO: 18017 - protein, 542 aa, Natrinema sp.
  misc_feature (86)..(86): Xaa can be any naturally occurring amino acid
  misc_feature (163)..(163): Xaa can be any naturally occurring amino acid
  misc_feature (265)..(265): Xaa can be any naturally occurring amino acid
  misc_feature (350)..(350): Xaa can be any naturally occurring amino acid
  misc_feature (514)..(514): Xaa can be any naturally occurring amino acid
MAWEVTRTVRIRLDVPDDRKIDLHATNDKFQYCANRTSDWAWRYPDEDCVTSKSEAEDAIYDDLREETDYLHANLVQKAIKRATDXEDAIYDDLREETDYLHANLVQKAIKRATDDIDNCVDRLADSKNTSKPEYDTFSIVYDKRAATYYRDKVSLATVNGRXEYDTFSIVYDKRAATYYRDKVSLATVNGRVECEYDLPEYTKGTPHGEYLLNDDYSFSTSTVHYDSEADEFYLHAVMERELDVERPEKAEHSKVLGVDCNVDXHIAVTSTGAFVGNADYLNHQRREFEKRRASLQQTGTRNAHLTVQRIGDRFSRWSKDYLHQCSKAIVEAARRHECTHIAFENLEQXHQCSKAIVEAARRHECTHIAFENLEQIRERISDEKKFQQWAFNALQTMVEYKAKACGIVVETVNPQYTSQQCSKCGCTLEENRNDQHFECLDCEYTANADYNAAKNVARKLTLKLQRGQKSPVGGAFCQYALKSGMMTVNATEVASDTPVSVERESTGKPTPEXNATEVASDTPVSVERESTGKPTPEGVGS

SEQ ID NO: 18018 - protein, 534 aa, unknown
  TnpB Polypeptide
LRGADFGDAGRADARYGLQVIIGAGFHFVRRVQPRSFQLLRERGIVKRQVKRGFRNFSRLGSFHRYWVGPLSTAWCLSAVIFRAFQRREVSARNEEFRVKARRFQVRLGDDIAGPKIFFRRYQQRRNDFIFHEIKQGDCLVYGAEELLPVCRRRTPTFRMMLTLRSICGYNVSIVKLTAQVKLLVSPEQADALKRTMQAANAVCNSLSAWAWENQVFQQFPLHKGQYAAQRAASGLTAQVVVRAIAKVADSYKLDKRTQRTFQPLGAVAYDDRILNWYVEREQVSIWSVDGRLKLPFVCGEYQRGLLAFRQGESDLAFVGGNFYLMATVSIPDPPLIETDGVLGVDLGIVQIATDSEGNQYSGEAVKACRRRARAHRAGLQKTGTKRARRTLKKMSRKASRFCKHVNHVISKQLVQSALSSRKALALEDLKGIRERATGFNREMRWQMGNWAFDQLKTFITYKAKAAGVPLVFVDPRNSSRTCSVCGHCDKANRKSQSCFLCLQCGFQANADRNAACNLEARGIVSFPKVAAFG

SEQ ID NO: 18019 - protein, 371 aa, unknown
  TnpB Polypeptide
METTRTIVLKLRPTPEQTSELDATLSAFASACDFIADIARREHTTNKVLIQRVCYKEVRKRFGLSANLAIRAIARVCAALKVPEKAHSAFKPTSIDYDARIFSFREWDWTVSLTLLGSRQRIETVPGEHQRQVLKGTKPTAAQLVKREGRFFLHIQISGEAPEPIEPEDFIGVDMGIANIATDSDGKRHSGANVDKIRKKHNLQRKRLQKKRTKGAKKKLRRVAGKEARFRRHENHVISKSIVESAKRTDRGIAVEDLKGIRGRIRARGGDARNRLSGWSFGQLYSFLAYKAQSSGIPMVQVDPRNTSRTCSACGHCEKANRKDQSVFLCKHCGHSQNADVNAARNIRALANRNVATGLAINDPGCGPGRD

SEQ ID NO: 18020 - protein, 189 aa, Ruminococcus sp.
MQQTITIRLKLKTKAEDEALFFSTMTAYREACNYVSAYIFNTHDLKQGSLSKVLYYQLREKFALRSQMAQSVIKTVIARYKTVLTNQKDWIKPVFKKLQYELVWNRDYSLTNNCFSVNTLEGRLRLSYCNKPFEKYFNKDTYQFGTAKLVCRDNKYYLHIPVSYDVKECTADDVCHITVGLSMMCYTFF

SEQ ID NO: 18021 - protein, 453 aa, unknown
  TnpB Polypeptide
MIVTRRATFRLYPTVTQEQELYRWRRMHKDLYNAAIANRQTQYKRFGHSVDYFEQQNCLPAFKQTWPEYIALGSHTLQATLKRVDLSYQRFFQGIGGLPKFKSIRHYSGWTYPDRAGWKAHTIGDNGYLELSNLGQIQIRGKAKTWGTPTTCTIVHRHGKWYASITINCEPISRELGTGSIGIDLGTKTAAAISDGENGYFIENPRWYQQMLPKIKKASRDKRRKRVPNRRKKIKASRRWKRATKKVAKLQRQAAFRRQNWVHHQAIQLVSGNSLIASEKLEVKNMTRKAKKSSKLHRQKAGLNRSILDVGWRMLTSAIKYKLEEGDGVFVEVPTKKVKPSQTCPKCLHQQKKELDERIHNCSNCRYVQDRDLAAAEVMILWATNSGAFGTSVLTRRANGSTTSTKERKNCGSMRQLGAKKRGAGDAPPPVRSITLLTGIQKPRPRVAGRGSS

SEQ ID NO: 18022 - protein, 253 aa, Deltaproteobacteria sp.
VSINAGTCTTRVGRSAGPNSYKRAGSSICTSPRPRPTPRLTSQPASWGVDLGIVNVAADSEGETYSGATVQRVRERRFQHRQRLQSCNTRRARWRLRQLARTGARFQRDVNHCISKRLVHKARTSRKALAVENLDRIRQRASVRREQRRVRHSWAFRQLRIFLTYKAAQVGVVLVAVDPRNTSRTCSVCGHCEQANRPDQAHFRCLRCGHTAAADTNAARNIAQRAARQTAYGAAPRSGGGASTSPPASATGI

SEQ ID NO: 18023 - protein, 312 aa, Lactobacillus sp.
MIRTQKVRLYPNSTMKKALDELCDYRRFCWNQGLALWNEMYDASLLLDDKKLRPSERKVRDEMVHNKQDWQYQLSARTLQLAISDLGKAWKNFFARSQLNWGKPKFKSKKDPRQGFKTDRAKIINGKLRLDKPRGVQIPGWQDIKFIGAKNLKGELKVVSVYRENGCYWASLPLETRLELKAKTHHQTAVDVNVGHFNYTAGKINTLPKHLQKLYKRIKYYQRQLARKRNVNGRKATRTNNYEKTRAKLQRDYRRVSNIQHDLIQKFTTKLVDDYDQIVIEDLDVTQMKMSHVASKGVPTFPLWLLSSNFNL

SEQ ID NO: 18024 - protein, 386 aa, unknown
  TnpB Polypeptide
MGYAAYKLWNVGNYEKKNHKELGMEKFPNWYDQKKRLKDNFFYKNLPSQTAQDVLSQLHEAWNSYFIVKRTGGAINPQPPRFRHDRMDITYLKDGIKQTGSMVRLSIPKQLKEYLRTLGMDANYIYLKIKRFSNIHIKELQLKFSGKKLIAIAVYEREDTPVRTDNGRYLSIDLGIHNTMTCYDSKGSSFIIRGFMEATHYYDKKIAYLQSISDRQAMALGEKYPKKTKRELSLYRKKKNSLTDFIHKTTRMLTDYCVENNINTVVIGDIKGIRENKDIGRNNQQLHGLPYEQIYKKLIYKLSVNGIRLIKQKESYSSQCSPDSPKVSRKYSCKKNRQCRGLYVEGNVIYNADSVGAYNILRLYLQNEQAPIPYHHGLSAPVQVSV

SEQ ID NO: 18025 - protein, 411 aa, unknown
  TnpB Polypeptide
MQQAITIKCKLKLQSPLDESALAKSLENYRQACNAVSQYMFNHSFEMAQAKLNRALYHQLRKDYGLKAQMAQSAIRNVVAHYRTVKTQLAQKPYRYNTGRQDQYGNDIWENESRTLDWLWYPISFKRPQLDLQRNRDWSLKDNHVMSINTVNGRIKAPFTCQGFDQYLDGTWQFGMAKILHVGSKWYMHISATKELPDYLKEQSQHVVGIDRGLRFLATAYDEQGKTLFFQGQEVMRKRRKFKRLRQQLQSKGTKSAKRRLKKIGQRENRWMTDVNHQLSKTLVNRYGADTLFVLENLVNVRFATEKVAKAKRYEQVSWAFYQLGQFLTYKARLVGSEVVQVSAKYTSQRCPKCGRIWKNNRNHQEHLYVCDRCGYKSNDDRIGAMNIQLLGTQYISGNERPSFSKLITNE

SEQ ID NO: 18026 - protein, 406 aa, unknown
  TnpB Polypeptide
MARKSYKYRLYPIKKQEQRLEKALDQACFLYNQMLDIHKQIFLSEEKSLSYFDMNKIIKDFETKQLHSQVKQNISKRLSDAFKNFFRRCKNGETPGFPKFHKRVFYNSITFPQFKAKIKDNKIKLPRIGNISIVEHRKIEGKIKTLTIKKENNEWYSIFSCDEVPVEEVKTEFKSKVEGIDVGIKKFLVCSNGKEVESPNFLRKSEKKLRRLNKKHSKKKKKSKNKIKSRIKLSKQYVKVRRQREDFHKKLARKLAMEIKYIGIEDLNIKGMVRNHCLAKSISDAGWGQFTSYLKYYKTIFDGEIIKIGRFEPTSKTCSNCGNKQDMPLNKRTFKCSGCGLKIDRDLNASINIKKLTIKKLVEKIKSNTDGQSEIYVCGDSIRPVFEFTQEKAIVGETENYREIIC

SEQ ID NO: 18027 - protein, 266 aa, unknown
  TnpB Polypeptide
LEGPKDFRSFTYIQSGFEFDSKNGQPVLSLSKLADIPLIKHRAIPDAETVKEITIKKESTGEWFASFTVGDKETPEKPTDPDRCVGIDVGILKYAHDTDGTAVESLDLSDERERLERAQHDLSQKERGSANWERQRQVVAERHADLKRKRRDFLHKLSNYYATEYDLVAVEGLDARSCWSNSPETHGIGRERRGERSFECLSTSANAKEHTLPKSIQGTRRKRARLAASRRTSRCGFVNTRVPRVGLRRTGTRTQRGTFFLAVLKI

SEQ ID NO: 18028 - protein, 283 aa, Streptomyces sp.
FVSFQAEVKRDLMRVARPGVAVGIDLGIKTLAVLADSTGEIRTVDNPRHLDAALKQLRRTSRVVSRRQGPDRRTGRKPSKRWEKANAARNKVHHRVANLRTDALHKLTAAVAAEYGTVVVEDLNVAGILRNRRLARRIADAGFGEIRRQLTYKMRRRHATRLVAADCWYPSSKTCSGCGAVKAKLPLHVRTYACDSCHLVIDRDDNAALDLAALAAAAVTGTGVAGDQDTPKRVSKPRGADRKTRATRPRRKAEAGRAGGATPPHQRQEEARDRTQAEALTLW

SEQ ID NO: 18029 - protein, 381 aa, unknown
  TnpB Polypeptide
MKAIKVKIYPKKWQKDLIEKHFGCCRVVFNYGLERKIKTYTETKKNISVYSIQKELPKLKEEKEWLGEVNAQSLQQSLVDLDSAFSHFFRKNNSFPRFKSKRNPKQSFRVPQSFEVNEAHKAIKLPKLKWIKFRDKFNIPEEVEFRNITISRDGNEYFASICYDDRKETPAPSPIKENKTLGIDLGTRYLAIFSDGTKIENPKHFKKYEEKLSLEQRRLSRKENEDGKSYQKQKEKIQKIYKKIRNVRKDFLHKLTTGLIDSQDWTSYAMEDLAVKQMEQNNPTQMSKAIGDAGWRMFRQMMEYKCRDMGKNLLVIGQFDPSSKTCSVCGNVYQDLKRGEKEWVCQKCQTYHDRDVNAARNIKNFGLIKSLGKDFGERKLA

SEQ ID NO: 18030 - protein, 324 aa, Lyngbya sp.
MQRAFKTKLKLNNKQKTLMVRKAPTGKHSNLIRVNLSAQHAGYSRWVWNWALNLWRQAYDAGLKPSVNKLKKFYTNHVKPYYPWMKTLSSRVYQFAFMHLGEAFSRFFKGLAKYPKFKKKGRNDSFTLDNCGKVMQFSGTRLKIPFIGWVSTYEPLPEINTKRITISRTAENWYLSVAYEFEPERTEKSREYLGVDVGIKVLATCSDGTVFANPRAYKKATQKLARLQRELSRKQKGSNNRNKARLKLTKVHERVADIRKNTIHKLTSWLCKNHAVIGLEDLNVSGMLKNHKLAGAIADSAFYEIRRQVEYKADWYGSIVVFAL

SEQ ID NO: 18031 - protein, 401 aa, Chroococcidiopsis sp.
MQVTRTLKLKFHRLNVVKASMFAETTIACTELANELLKMPIKERKKLTTAKVVTSLKSALANQVIRQVSGDAGKRTKEFKLLPPEINYQNWQLFKKGETYSVSFPTLQGVKRVPIEVKSNHWQSLIDRLLSGDKTISKGTLKLYSKKGKWYALVSCQVEVPDKNSNNRIGVDRGQNLLATAVPKQGFGLLFSGKQVKHRRRQFQKRRQLLQKSKKYRAAKKLEQKENRWMRAVNHTISRRIVNFADSRDADLVLEDLSGCRETMKQSKKSRADNGESRHAWAYYDLQTKLEYKQTINGRRVHYRPPHYTSKTSSVNGIIGTRNDNWFKCTSGATLQSDFNAGRNLAIWDYRSCPIDSRKAESVMDSANMSGGVIGSPPNLMNAVQGRAEHVQLSLFDCTSY

SEQ ID NO: 18032 - protein, 337 aa, Chroococcidiopsis sp.
MWGKHLSCAKLQAHIAKLRKRNSFWQLVGSQAVQDICQRIEKAYQLFFNYHKQGVKPPGFKKVKKYKSFTLKQAGYKFLGDNRVKIGSRVYQFWKSREIEGTVKTLTIKRTLLGELFMVVVVDNATEPEIKFETGRIAGFDFGLKTFLTYFDATNTEKIESPQFLAQLLNTVQKASKQLSRKLKGSANRERARKHLVRQHEDIANRRRDWFWKLTHELTNRFDALCFETLNLKGMQRLWGRKVSDLAFGEFLQILEWVATKKGKKVIFVDRWYPSSKTCSSCSHVLEKLDLSTREWRCPSCQLVNGRDENACRNIQMVGASTTGLGNVRQSPTAIAA

SEQ ID NO: 18033 - protein, 334 aa, Photorhabdus sp.
MLRATKVRIYPTPEQAEFLNAQFGAVRFAYNKALHIKKQAYQRHGVSLSPRKDLKPLLAVAKKSRKYAWLKEYDSIALQQAVINLDVAFSNFFNPKLKARFPAFKSKHGKQSSYHCVGVKVLDSAIKIPKVSPIEARLHHEITGTLKSITLSRSATGKYYASILCDDGTEAPAKPTLISNVTGLDMGLSHYAIKSNGDKTPNPRHLINASRNLRRKQKALSRKKKGSANRRKARIQLAGVHERVANTRADFQHKLSRKIVDESQAVIVETLKAANMIKNHICTCYRRCRMVWVHHKTGIQGRRERCASGETGSMVCQFKNLSLLWSQNAGNAVK

SEQ ID NO: 18034 - protein, 396 aa, Symploca sp.
MRTSHQYRIKPNKKQREIIDNTLDMLRCQYNYQLAQRFDWYEQNRCSIDRCRLVCHLPELKDRPSKASQEKSLVQLKKDRPWYKKIHSQVLQAVPDKVDKAFDRWLKGDCNGKKSGRPRFKGVGQYKTFTYKQFKQHHFVGDKITLSKIGDVKVIVHRPIPDGFAIKTVSVTKKADGYYVTLSLDDKSVPTIKPDLNADNIVGIDVGLIDFYVDSDNNRIATPKHLRKAERKLKSAQRKVSRRRKGSNRRKKAIQRLGKQHKKVADTRKDFHFKTAKKLLNKYDVVAVEKLNIKGLIRTRLAKSIHDAGWGQFLSILTNKAENAGLLVIPVKPHGTSQECSNCGHIVKKPLSQRMHNCPVCHTSLCRDLNAAINIRNRGTHDLSKQAQFMSSKTSR

SEQ ID NO: 18035 - protein, 491 aa, Symploca sp.
MILSYVYKLRPSGSQSAKMDLWLNMLRSHYNWCLSDRIQTYHQQFLQGDYCHLRSKAEACPLTCCVVKNGATGNPWQNSGKKRNAGTIQDAALVELKAARPWYKSIDSDVLQRNLARLNIAYQNFFNGRGFPAFKNRSNFRSFEYKPKGVKLMGNKVYLPKIGWMRFFNSRSIPDGFAAKSVTIRKKTDGWFMSVRLEDQSVPKLLALPISKIKTAIGLDLGLSKLVHCSDGSDIANPRFATNKTTKRLLKIRQRRLSRTKRGSRNRKKQAVRIASLHGQIANRRNAYQWFVAHKVVKKADAVVVEDLNIRGMSKRCQPKPEAGTGRFLPNGAAAKRGLNRSILDASWGNLIAKIEYVAEKSRKVLLKVNPRHTSVTCSACGFVDKTSRVRERFICSNCGHFDHADKQAARNIKHKAVVEYGLNLIKVRRDSAKPKQLELFETPSAELTAPQRRQSDALLGNRRVPGNLGRQLNLFSQDISDIPPVESPFF

SEQ ID NO: 18036 - protein, 386 aa, unknown
  TnpB Polypeptide
MQYKAFKYRLYPTKEQQVLIDKHIGACRFIYNLALETKQTVYAGYQRNLSCFDLMKQLPELKQENEWLKEINSQSLQQTIVYVDSAFTNFFKGHADFPKYKSKHKSKQSFGIPQKIKVKDNKLFITKFKEGIKIVLDRDLTGKIKQATVSKTKTGKYFVSILTEHDIPTIKLPIVKSETTIGIDLGIKDFLTTSNGDKIANPKFLKAKLDKLKFIQRKLSKHKGKKAKRKFVILHEKIANQRKDFLHKISKKLISENQTIILETLKVKDMLQNQDLSREISDVSWRMFVSMLEYKSNWYGVNLIKIGQFEPSSKTCSCCGNIKKDLTLNDREWTCTKCHTKHDRDINAAINIKNFGLRNWVSGVDTQNQNELPTLVGVMTSEAKLI

SEQ ID NO: 18037 - protein, 366 aa, unknown
  TnpB Polypeptide
LNKSFKVRVYPTEEQQILLEKTFGANRFVYNYFLNLKSKLYEFYKIRLSYNNSCKALTELKRQKSWLKEIDSVSLQQALRDLDSAYQNFFSGRGKYPNFKKKQDKNSYRTNSNIRIDNRYITIPKIGMLRFRDNYKLEDKNILKVYNVTISKTSSGKYFASISAEVNIEHFEKTNQNVGIDLGLKDFAILNNGVKINNPRILKHLEERYRRLAKAVSRKVKGSANYKKARIKLSRFHEKISNIRKDFLHKLSANLVKSYDIICIETLNIKGLMKNHKLSKSFQDVSLYEFIRQLEYKAEWYGKTISKVDRFYPSSQICSNCGFRNRDVKNLNIREWTCPECGTYHDRDINSSINILNEGLRILEII

SEQ ID NO: 18038 - protein, 430 aa, unknown
  TnpB Polypeptide
MMGLLSRKVLYRMYPTPAQESALLAMLGAHQQLYNTALAQRISVWQRAHEKRIGFADQCRDLTELRADDETYATLNAQSAQVTLKRLELAFTAFFRRCKSGKTPGFPRYKSFDRYSGWGYKAHGDGYRFTSGDGNQHGTLRLSGVGNVKLRGRARTSGEVTTCEIQRKAGRWYASVTVRCIPKRTGGAGAIGHDWGISTFATYAYEDGSFEEVANPRFFSKHQAAIARAQRTLEAVTVKDAIGRPTNAKDPRRRAARVALGRAKGREANARKDFLHQTSAREVAENALIVTEKLAIRNLTRSAKGTIRNPGRNVAQKSGLNREILATSPATYNAMRRYKAEEAGSWYIETPTQTLKPTQRCSGCWELPRQRKALADRMHQCEQCGLTLGRDRNAARVNLAWAFTMLSAAFSLLGQELAGNAIPEVLNWAA

SEQ ID NO: 18039 - protein, 430 aa, unknown; identical to SEQ ID NO: 18038
  TnpB Polypeptide

SEQ ID NO: 18040 - protein, 371 aa, unknown
  TnpB Polypeptide
MVQRAYKFRFYPSEAQKLSLAQAFGCARFVYNHFLAARSAAWQERKEGSTYAKDCKALTALKQEPDKSWLGDVSNIVLQQSLRHLSQAFQNFFSGRGRYPAFKSKHDRQAVTLMRHGFRLREGQLFLARVEGPVQVRWSRGLPGVPSQAVVSRDSAGRYFVSFLCEVAVAPLPKVGAVKAIDLGLESFITDQAGEKLAPPKFLAQRRERVQRASQALSRKARGSKNRAKARQRLARLHARVADARQDFLHQLSAKLIRENQAVFAEQLNIKGLVRTRLARSISDAAWGELLRQLAYKAAWYGRTFWQAPSTSPPASSAMPVERRTPGSRCRSADWRCVCGVEHDRDTNAARNLLLAGLAATGLGTAGLAGR

SEQ ID NO: 18041 - protein, 390 aa, unknown
  TnpB Polypeptide
MTHPTLDIPAIRAFKFRLLPSKGQHRRLRDALDHSRELYNSALEERISIYRRTGKGVGYISQCRGLTELRQDAAFAKFAVSLQRWPLKRLDDAFAGFFRRVKTVKKSAGFPRFQGRDWFKSFGFADHDGWKLDGAHLYMKGIGRVKVRMHRPIPSAPLSCQIKRDSKGWVVLLCCEVPMQRAEHTGRSIGIDLGITSFIATSDGDTVPGFHAARRAQAELRRRQRALARCKRGSRNRRKAKERVAAAHEKIARSRRTFLHQVAAKLVRENDLIAIEDLNVRGLVRSMLARDVNDAGWATFTTLLIEKAESAGRTVVKVDPRHTSQACSSCGAIVPKALSVRTHDCPHCGLVLDRDVNAARIVLHRAGNCPGELKTGGYAISAHGNMCEAA

SEQ ID NO: 18042 - protein, 454 aa, unknown
  TnpB Polypeptide
VPYTYKELCDLLGAKYTNATNKKVEFLEELESYCEYERVDSKHFIITNIYDNPLPTLCNGYYYKTIIIPVKCSKEDYDYLMQCSKWAGDCWNKIVEADHSFHEQNDRWMKKCELQNFVKGLTPLHAVGNQHVYIKYETSRDAMFRSIESEHSGSNKVRLPYKKKKYFVVGWNVFCSQIDYKNHILKLAKKADENRRQQKPIVCYFKTMPKHVVEIELIYRNGLCLAIKYKEPKTNDTIQYNNVAAIDLGEIHSITSIDNNGNAIIITGRRIRSIKRLQNKEQAKLRSKRDKLTKGSRQYKKYSRAIYKLKIKSDRQILDCVHKISKLYLDYCIENNISKVYYGDLDSCTRNTKERTGKLVGQKLNDWCYGLLTQQLENKLSRYGIEMIKISEAYSSQTCPHCGNKYKPTNRNYQCKCCGYVQHRDLVGAMNILSFNEKDVHIEKYSNLKYLRIA

SEQ ID NO: 18043 - protein, 392 aa, Helicobacter sp.
MLAKAMLLSHKIELNPNNKAKTHFKKAFGCARLAYNWGLAKWKENYANGINSNHFALKKEFNALKKTQYPFVYEVTKYATAQPFTHLNLAFQKFFKDLKLGKLSYPRFKRKREYQGSFYIGGDQIKVIQGGTKDYLKIPNLPKIKMTERLRFKSKINGATITQKGDKFFVSLQVDTIQEEFNRTHKPIKNNCTLGVDTGIKAFASLSNGLQIFATKPLNRLTRQLKRISRQLSKKQHPKTKGDKTRKSANYLKAALRLNRLHTRIANTRTDFLHKLSTALIRHTKTLCLESLKVKNMLKNSRLAKALSDVSISTFNTLLEYKAKYYSREIKRADAFYPSSKTCSRCGNVKKDLTLNDRVYHCGACGVVVDRDFNASVNLVRHLVSGVPTELA

SEQ ID NO: 18044 - protein, 368 aa, unknown
  TnpB Polypeptide
MYKAYKYYLLPNLQQKELIQKTFGCCRFVYNQTLVYRQNLYETQNKFMNKFDCNNYVNRILKKKYPWLKEVDKFALTNSVHNMDTAYQKFFKEHTGFPKFKKKNNNRKSYKTDYCNNNIEVSFEKNKIKLPKLKWIKAKVHRQFIGKIKAAYVSQNPSGKYYVSILVETGHTPLYSTRSIVGIDLGIKDLLITSDGEKFENIQITKKYADKLAKEQRKLSHKIKGSNNYNKQRIKVAKIYEKIHNVRIDNLHKISHKLICENQVIVSENLAVSNMIKNKNLSKSIQDCSWYELTRQLEYKTKWNNRQYIKVDRYFPSSQLCHVCGYQNSDTKDLTVRDWICPECGTHHDRDINAAINILNEGLRILNA

SEQ ID NO: 18045 - protein, 370 aa, unknown
  TnpB Polypeptide
MMEHSYKFRLYPNEEQANLIQRTFGCARFVFNHYLANRIEVYKESGKSPTRFAQDKDLTSLKRQEETVWLREVDKCALQNAIRDLDAAYKNFFRRVKDGEKPGFPKFKSKRNHSQSYRTNSNIKVFDKSIQLPKLGKVKCRVSKQVKGRILSVTVSQNPSGKYFVAICCTDVEMEPLPKVGATIGLDMGVKSFAVTSDGVEYLNHKYLSKSEKKLAKLQRSLSRKTKGSNRWNKARIKVARAHEHVANQRRDTMQKLSTQLIRENDVICIEDLAPKNMVRNHSLAKSISDAGWGEFRRQLQYKADWYGKKVVAIDRFYPSSQLCSCCGTQWVGTKDLSVRNWVCPVCGTRHDRDVNAARNILNEGLRLLA

SEQ ID NO: 18046 - protein, 375 aa, unknown
  TnpB Polypeptide
MKGGDYMLKAYKYRIYPNKKQIILINKTFGCCRFIFNYYLNKRIESYKTENILLNYYDNAKDLTNLKKENKWLNEVDSVSLQQTLKDLDKAYQNFFRRIKQGKTPGHPKFKSKKNKKQSFRSQYNKNNIRIINNKIKLPKLGFIKYINSKEFNGQIKSATISKTSTNKYYISILVETEINQLPKVNKSVGIDLGLKDFAITSDGIVYKNPKFLKSLEYKLKFQQRKLSKMKLGSGKWKKQKIKVARIYEKITNKRKDFLQKLSSKLINENQVICLEDLQVNNMLKNHNLSKAISEVSWSEFRNMLEYKANWYGRIISIIDKYFPSSQLCSDCGFKNKDVKNLGLREWICPNCGEKHNRDINAAINIRNEGLKLLA

SEQ ID NO: 18047 - protein, 262 aa, Metallosphaera sp.
VLKGWRRRAEKGKASLRKPKLKRVYVRVKSTLRKVDGENVRITVRPYEYLSFSWHQAWFSPRVKGLELGEPVIKEDKVHLPFRHRLPWFTPLDYLAIDSNLYTLDAYDGEKFVTFSLRELYSLKFGMELKRGRIKSFASKHGRKGKVLMRKYSHRERDRVLDYVHKFVNKLLEMYPLTTIAVEKLNKQDMFQDADDKLSKKISRTVWRSIHRVLKYKAPLYGSLVKEVNPHLTSKSCPRCGWVSRKAGLSGVRGVGSPWTDN

SEQ ID NO: 18048 - protein, 500 aa, Halomonas sp.
VRRHSYRRSNWATTAHRSRAFCGCWGGSAYGSCGWRHPSGCLPMQIPRLLADSSPANAHGHPRRRTPPVPPRSRRRRWRRYCARRRGFPCIIDDMQRIQAFKYELMPDGDQQRQMRRFAGSCRFVFNKALALQKDNYETGGKFIGYVAMAKQLTAWRNDAETAWLKDAPVHPLQHTLKDLEKAYKNFFEKRADFPRFKRKGQSDSFRYPDPKQIKLDQANGRIFLPKLGWLRYRNSREALGELRNATVSQSGGKWFVSIQTRRDVEPPFPQGGAVGIDMGIARFATLSDGTFYAPLNSFKRHETALRKAQRAMSRKTKFSNNWKKAKARVQKIHSRIGNARRDYLHKTTTTISQNHAMVCIEDLQVRNMSRSAKGSAEQPGKQVRAKSGLNKSILDQGWFEFRRQLDYKLAWNGGHLIAMPPRNTSRTCPCCGHVSADNRRAQERFACVECGFEENADLVGAINVLRAGHARLACEVSGEVMPPAAGTHRSDSVAAQCRA

SEQ ID NO: 18049 - protein, 442 aa, unknown
  TnpB Polypeptide
MKRANPFDVRLRSEKEREVFLRWLDASASLWNETNYARRQAFLSDESVWEVDTGALEGQYKGVLSSSVAQQLIRKNSEAWRSFFDLNEKYHAGKLDEKPSPPGYWGNEEDGRVLRTYVRNDQYTIEYGERSRLEIPIGSDLKDELGLNRNQRLRVEVSGDPKWSGEQGRLEIVYDELADTFKAFQPVTVDDSRLDSPLASEEAALDVGANKLVACTTTTGSQLLYEGRGEFNRFRETTERISGLQARLEDQRKSSKRIDRLYRKRTNRRNHAQDALVRDLVERLYDDGVSTLYVGDIKDVLSTHWSPRVNEKTHNFWAYRRFISRLEDVCEEYGITVKEESEAWTSQECPECGEREDTVRHEDSLTCPCGFEGHADLVASESFLRQQIEVGPMARPVYLKWNNHSWRVHHSPPSLVETTANEEYTNQSTASSGNVALGDSDD

SEQ ID NO: 18050 - protein, 483 aa, Bacillus sp.
MTKEKAYATYQIWIKKGHKLYPYFLEMCQNAKNLYNTTNFYIRQVYTALHTEKPLQPLQQEVLHTLQEHIEVMNENQLHAYQKRVQKQKEKPMKEQKGMKCNLFTFPTKEKSFLSYHFLDCLFKTMKQQDYMNLPAQTNQAVMKKLYQNWKSFFASIKAYQKHPSTFTGRPRIPKYMKSSMKEIVFTNQVCKLQDKYIRFPKTSMKLNIGKLFWQIGILKEVRVSPAYGKFKVEIVTEQSEPAPEHIDNQRYMSIDLGITNIATLTTNTGAIPVLVKGNVIKSINQYYNKKKAYLLGILRRGKEPKEGSHTSKRLERLHEKRFLKIKDLFHKMSHHIVDFAVQHEVSTIVIGKNTSWKQNSDMGKQQNQSFCHIPHNLLIEMINYKAKRQGITVQVVEESYTSKSSFLDNDKIPTYGEEDIPICSGKRIKRGLYCTKERIILNADVNGSYNILKKAVPKAFADGIEGLCHQAAVSTPLVLSIF

SEQ ID NO: 18051 - protein, 599 aa, unknown
  TnpB Polypeptide
MIKGILQLLTYFSTEVIYMEISRTINSDKRYYLDEKTIENAASFLETMRVFNDAKMDLYNALYDQKYFGTGPLLEHAYPVFLKERYQTNDYYNAAIYSAASGQLSSQKELKKYYKTTIAADLKTRDEKIQSVKEQLDKKKAVKNSIRLYIKTKKWITPYPKCQLKVRGQKIILFNKTIVNLDEYEREVEADIRKLKTRLALVTEAKKRKAKKLENLENLPPERIVFGGKKLYSEKDAIEVTKSADLSNEKEQKISKKASDEWKQDFFEKRHQSMALPGRHTSKYGNFLCKYDGKDLSVTCIDGSVTTFHDFKLPRCEERFQKNFTCKPEDRQSLCYNFILKRDKENKQYFIVSVTLKLHAYENSYYGNGAISMDINYDHFALAELDETGKLLDQKLIRFDLMKKSTGQITNILGTAVKEVFNWCAEKDKRLIVEDIDLTIKLASRKYGNRKGNHHMTLFAYQRIASSIENQSLKQEIAFCKVDPAYTSQMGKFLFMRKYGISIHQAAAYTIGLVGLGLYEKLAPDSRMRNLLKTKEGIEPEFSKETYKNIWARITNTFSGIPKHFFYRRIPYEVLNERKRPSLRTLAAEMKARYMPVFE

SEQ ID NO: 18052 - protein, 364 aa, unknown
  TnpB Polypeptide
MKIYKSYTCLISGNSCKVEYLSSQLEIIEDLSWYIFQLKQRFGANWWFDQKKLYHQCRRMFPELNSKVVQNFIRFSYRIKKGMKLPKKPVKPSIILDQAFYVEESVKTKLTNYWLKFHRKYFPLFGKRILRKVDLNKIKLVQIYNKNNKLYCKMSEVNELPEPTGGSKTIGCDVNYKRIVLSDNKFYNIKKLAHRKIEHKKNNQTKRNLTNYSKDFLHKLTTQISNELQQKGIDVLILENLKDLRKSASRKLGTSKGKLINYIINSFPYSMFQNFLKYKCLDRGIKVEHINPAYTSKTCSRCGSRNTKRTNSKQDLTTCNDCNFRLSSDLNGSRNIELFYRQLNGLPVNITQVKTLKLTKAVTL

SEQ ID NO: 18053 - protein, 270 aa, Lactobacillus sp.
  misc_feature (206)..(262): Xaa can be any naturally occurring amino acid
VLSPHHLRIGKKNGITLRTSSLHNLRNVRIQKAVISYRQDLDRYYISFSVVKDKRQLAQYQVKSKKTGKAVGIDVGLGKEWLVTSDGKRFGVPDTFKLEKEMLKRQSHCDRNRTAIEKRAARFNHEHEEKIDKHDYANWQKLRKTKSKYQLKIRNIRYDYLQKVTTELVKGYDVIAIEDLKTKNLQKNHHLAKSIANASWRMFRQXXXXXXXXXXXXXXXXXXXXXXXXXXXXXXXXXXXXXXXXXXXXXXXXXXXXXXXXXAIIVALSH

SEQ ID NO: 18054 - protein, 375 aa, Brasilonema sp.
VYPELELHKKWKTWLSASRYCYNKAIAALKAGEKITSAYNLRNFILSSELPDWVKESPVHPRENAIFDAWDAWNQAKSVGGEASFKSCRQPSQAIKFHVRNFNGETWFPSLVKGLKFITSEPIPDAEYATQIIRDRKRWFACIPVLEEVQRPPELSKVIAVDPGVRTFLTGYDGDSFQEFGKADIGRIQRLCSHLDELIGRASKAKNRKQKRRMYLAAQRLRIRIRNLVDECHKQVVNYLTSEYKVILLPTFETSQMVVKSKRKLHTKAARQMLTWSHYRLKCHLKQVAQKRGVVIIDVNESYTSKTCTKCGYKHDKLGGSKTFKCPVCNHEHDRDWGGARNIMIRALRDGSFSLALSSEGIAIAYALFVQGCTA

SEQ ID NO: 18055 - protein, 401 aa, Microcystis sp.
MFVLEYKLRGKPSQYQAIDEAIRTVQFVRNKCLRYWEDNKGVGQKDVYKYVTQLRDEYPFVKDLNSTACQQACERTWTAILRFYNNCKNKIAGKKGYPKYSKRTHSVEFKKSGWKLNRNSKRITFTDGKNIGELKLIGSRDLFYFQEWQIQRIRIVKRADGYYCQLMLKLDARDITPQSESTGHCLGLDMGLKYLYADSNGNTVEPPKYYRKAEKRLNKLNRRKSKKFKRGQKQSNNYKKASQKYAKGHLKVSRQREEFAKKLALRLIQSNDLIAYEDLKVKNLVRNRKLAKSINDAGWSQLRKWIEYFGIKYGRLTIAVNPAYTSQECFNCGRLIQKSLSVRTHVCSCGYVEDRDKMAALNILKKATIGHIGSWSSDLNAWGDLSSILVGSNTCQDNLSQ

SEQ ID NO: 18056 - protein, 428 aa, Microcystis sp.
MLVVEAKLKNGTPEQYHRLDEAIKTSQFVRNSCVRYWRSNQGTTRNDLQKLCAVLANNKETPWVNKLNSQARQSAADRAWQSITRFYHNCHAKIPGKKGFPRFKKHNRSVEYKLTGYKLSDDRRKIKFTDGFKAGEFDLWCSQKTLVYYSEQQIKRVRVVRRADGYYCQFLIDVERQEYHKPTGQITGIDLGLKEFYTDAQGNTVENPRYLRKSEKRLKKAQRRLSKQFRKGKKQSNNYHKQRIKVARLHLKVSRQRKDKAIKDALALVQSNDLVVYEALKVRNLVKNRKLAKSISDASWYQFTQWLNYFAKIYRIVCVAVPPHFTSQDCSVCGTRVQKTLSTRTHQCPNCKTVLDRDHNAAINILKKGLQYLGNYLNGTVGQTETDPNALGESGLWILNGDIENLSCLVEQGISNSNVERIPRHSVA

SEQ ID NO: 18057 - protein, 318 aa, Actinobacteria sp.
  misc_feature (255)..(255): Xaa can be any naturally occurring amino acid
VKIVVQVRLLPDAGQAAALASALRAVNDAANLVSAVAFDRRVFREYALRKLVYGDLKARGLGAQAAQLVIKKTCHAYQTLQANIRAGNLGSPGSKRRVKAESEPVTFRPDGAQPYDDRCLSWQLETRTVSIWTTSGRLRGVRFACSADALTTLARHRHGESDLVHRDGRWFLLATCEVPQARPYEPDGFLGIDLGIVNIATTSDGQVMAGRPVNRYRRRQLRLRRKLQAKGTRSARRLLKKRARTEARFARDINXCPGGPDGHPRQGTAPQAPTGRAQQLGVRPARVVHRLQGAPRRGADRLGRSGRDIAHLRGLRSR

SEQ ID NO: 18058 - protein, 441 aa, unknown
  TnpB Polypeptide
MLTGGEGELTVTVRMKVSPEPESQQALLDLMKRYRDALNYSVRAVIVSRALSLTKAHRLLYEDLKERYGLPSNIAVGCYREAIAIAKSWLRNPRRGAVPTARRLSMWLKHEQGYRVKGDYVDLTWDYRLRVIGWDRRYDDFPNRDATLVFRDGEFTLYISKRVPRPAKYVPKGALAVDVNERQIVVGNSSVEQRVETPVERALRYRRLAERLQGKYSFSRYRAWLRRSGIRRRIRHFRRKAKNILEDWARKTAHTIISLAKQGQLTVAREDLTGLIESLRRLPKEHKTALIILGYRRLGLWVDWQAEKNGVPILIVEPVGTSSTCPRCGTKLVEIGYRRLRCPRCGFEADRDTIAILNIERRALSKMGGSLATPTAPQVTDVNPNRWGEPPHPKGMEEEARVELPQELYNCLEEEARRRQTSKAEFIRELLSQACEGGEKK

SEQ ID NO: 18059 - protein, 369 aa, unknown
  TnpB Polypeptide
MKTYKYPLYDQLSCIRLGNLLDDMWQVHEYFHKWQRQRYKDGLPYAGYEAMCLRVTELKRTTHPHWKALPSQAIQEELKRTHLAYERFFKKLGGRPKIKKRHRFKSFTLKQTGWSLKENRFTLNFRKWEKGKWRHNKVAYTFHKHRKFYGNISRITIKRDACGDYWLYLITDFVETKPLPTTGQSVGADFGMKDAYLTLSTGEKKQHPQPLKHSLNALRSLNKALSRKQKGSNGWWRCVRQIARLYRKISNQRKDFHWQLASELCKRFDTIAIETLNLDGMKRLWGRKVSDLAFYQFVEILKYKCLKHGRKLFQVGRWTATTKPCSNCGFHNETLTLNDRQWTCSECGSHHDRDINAAINILRAGIATT

SEQ ID NO: 18060 - protein, 304 aa, Candidate divison MSBL1 archaeon
MYRDKTSDSIAYDKRTLTVWLDERKCSFSTIDGRIKTDFAIPEELNDYYKKYLEDGWQVCQSTIEKHEYEDGEPYYLHLGLEKETPENNSPNPTVMGVDLGIENLAVTSTGEFFSGTEFFHKRERFEEIRGELQAEGTRSAHLTIKSMSGREKRFACDTLHRVSKRIVQEAVGKSVDVIVFENLEEIREDISNGKKFQSWAFRKLKEYVEYKAEEQGIETRTVKPMYTSQRCSKCGHTSSGNRNNQHFKCERCGYEVDSDYNASKNIGMKAVLGGQKSQSRMGNGQLALKSGVLKPNGNYFPTH

SEQ ID NO: 18061 - protein, 350 aa, unknown
  TnpB Polypeptide
MNKEFKTHENYKLTFSQPANCTLRLLDKNWKSYFVAIKDWKRNPSKYLGIPKLPKYLKKDGRFLWMIPNNQLHYNYEKGTIHISNRLVNDYEWKCRCLGRIIQVRFIPKGSCYVMEIVYEIEIPDINKESKNIVAIDLGVNNLVTMTNNIGSNPIIINGKGVKSINQYYNKRLAKEKSLLKIRHNKDWSKKLDIITFKRFQRIKNYMHNTSHYIINWCIENNIDTLIVGKNDKWKQESIMSKKSNQNFIMIPYQILLRQLKYKCENVGINYIEQEEGYTSGTSFLDEENPIKENYNKNRRIQRGLFKSNSGLLINSDVNGSFQIMKKAFPNAISRYGIEAILTPIVINVA

SEQ ID NO: 18062 - protein, 183 aa, unknown
  TnpB Polypeptide
MKLRTALQECGTRSAKKHLKRLSGLDARFRADINHTIAKRIVEKAKCTGRGIALEDLTGIRDRVNVRKGQRAQHGSWAFFQLRAFVTYKAIMAGVPLAIVDPRNTSRACIMCGCCDKRNRRSQSEFVCQSCGFSANADFVAAVNIARRARVNAPIVSSDDAGNAAPLATRVQVELRRKPHAEA

SEQ ID NO: 18063 - protein, 489 aa, Moorea sp.
MKKKPTTLTYCKALPQLSERMNALGCSDFEMFLFEYSQIFRQAKIETVTQLRSGDFNKGQWNTYLQQTYGINKRHANGVIASAKGAVDSAAECRQNHIEQLSGKFKSAKDCLRKAQKRLANGRKFYAKKNWQNSKTGCKFPLSCSLRYRDTNWQNLRFQIHHKKRYIAHLERKIEGLKVAQLQVKVPYGQVFVVGSKDETWGNQVCQWDGETIRFRVPKCLESKYGQYVSAVIGDFDRNINRLPDDGSRTWHFYRKDHKWVAAVQFTPAKLQRVSQHSRYGCIGIDLNPSSVGWAYVDADGNLKAHGQIPLQQGLPSGKQDAQIVDACLQLVTLAKTYQCPIVHETLDFGKKKEAFRELGRKYARMLSGWAYSRFFELLNSICSNRGVYVFTVNPAYSSLIGMVKYARMYGLASDEVAALVIARRGMGLSERLPSALTALIGVNPSKHVWYWWNQLNKQIQASAVINRRHDYYSISNWGFLVKPSAIAQ

SEQ ID NO: 18064 - protein, 412 aa, Ignisphaera sp.
VGGEEPVVVEALKMRALPEGSCDKLLEFLKLYRDALQMVVDRVWSINENLSKKKLHKLFYSDLMRLCFRAHHAKEIYVYAESVVKSARSKNGRKPILRKLSARVDRYDYRLDLDSMTLTLKLHSGYEAKLKLVASSERVEKFKSWSNYEMVVKCDGSGFWVSVYFRRAIKPLKPRTVMAIDLNFDNITLAVLTSNGKLLGLKRFKTPHRKVLTHRIWVERIQKRYPRSWRFIKGVRKAVDRHGERIRSISWVYAHRVGDLVAELALKYRSAIILEDLEKLRENNKKGKRFNKRLGLWIYHRIQFCIEYEARERSIEVTKANPRGTSSKCPKCGGKLAENKHRILRCSKCGFVGDRDVIAAINLYKKFISKHSRCGVSGVAPNAPKPDENPSGVQGNRDEAMTTSSYINLYES

SEQ ID NO: 18065 - protein, 89 aa, Clostridioides sp.
VVVVEKAYKFRMYPNKKQQELINKTFGCCRFVYNKYLAKRIDVYKNDKETFTYKQCSSDLTNLKKELKWLKEPDKFSLQNALKDLDNAY

SEQ ID NO: 18066 - protein, 374 aa, Halomonas sp.
MTRRAYKERFYPTPEQAELLAQSFGCARFVWNNTLQYRTEAYQQRGETVSHAAAEKRLVALKAEYPWLADVSSVILQQTLRDQKAAFDNFFNPKLRARYPRFKGKDGRQSIRLTKAAFRYRDGEITIAKTKTPLPIRWSRPLPSEPSSITISMDRAGRYFISCLCEFSPEALPITPTMTGIDLGLTDLFITSDGGKYGNPRHLKRYEAKLAYLQRRLAKRQKGSKNRAKAKQRVARLHAKIADCRRDAVHKATRTLINENQVICVESLNITGMIKNRSLAKAISDAGWGEIVRQLEYKAEWAGRQVVKVSQWFPSSKLCHGCGHKVEKLPLSQRHWHCASCGQAIDRDINAARNIRTAGLAGLACGATGSGAAA

SEQ ID NO: 18067 - protein, 367 aa, Halomonas sp.
MIRTDKWPLQATPQQRHLMRLTLAEYRQFCRALSVVVLTNWPSLQQAPSFATAVERLMHPTAKNPSPRHRYFIRRFYKFPSYLRRAAIEFVKGQVSSYLTRYRAWQVGERKHRHARPPRFNPVAGCYPVMYRGQLVKFDTEFTTASLKLWDGKEWLWHDVAIKAVRQRHRLGTVKSPTLVLNRRCHLAVPVAMAPEALPDQQHACAVDVGINTLATASIVTPDGTVVARRFFHPAADIDRRDKRATLIRRKARKTAKLCRGFGRTWYRKAQHINEHMAQQTSRRLVDFALTHGADVIVLEDLKGWRPKAGKKRSGLRQRFHHWLHRRLATLIEQKMAEAGGRVVTVYPRGTSSWAFDGSGRIKRDKA

SEQ ID NO: 18068 - protein, 270 aa, unknown
  TnpB Polypeptide
MRFRLYPTPAQEVLLSEQCSHARYVWNLGLEQRLMWARWKGPTPGYVEQSRQLTEARAAQPWLAQGSQTVQQQALRDLDQAWRNFFAGTHNRPTWRKRGAHEGLRIVGPQALRIRQDNGRWSAALVPKVGWIPFRRTRAVVDWKSYRINRDRAGRWHLAFAMVPEPVPGPGTGGVVGVDRGVIVAVALSSGEMTSPSKLAAKESERLLRLQRHLARAKRGSNRRARVTTQIARLKARETGRRKDWSREDLHRPRPPVRRDPGRGRSTPPA

SEQ ID NO: 18069 - protein, 484 aa, unknown
  TnpB Polypeptide
MSISRGLQTRRQTSLPRQLSPSLDSTPTQTSPRGQNTEAANTNYSDPSGRKELADSRLGSPTRPCSLLRVSRPINSPTQNCESYQGPQQQHASQRVSRTTQATESVDSKLLLLHGRECVERDDTQIHRGAKQEMKAKKVIKCKVFALTERKRRVLDAEYNGLQTYLQTGKDSGLCKTNMRQAKRFYKKILANHEYPLTIRKDLVRFQTNNCKLSKFWVSIPIGGPTRIWLPVQPHASVPEGAILCESKITRGRDGVFWVHLVVEKDVPYHTDFTNVLAVDLGERLPATTVLYANGAFKEPRFYGREVRGIRRHYAWLRKRLGEKKALNTIRKVGRTEHRKVNDACHKISHAIVEQASRERAVIVLGDLKGIRNSTKWKGRRMNRIVSNMPYYKLTQQIMYKAAWLGVPVYQISERNTSKTCHRCGSMNTTRIKQPVFECKACGLVYNADLNAAKNLAKRFHDHAVVERGILAMPVTPHEVKLNE

SEQ ID NO: 18070 - protein, 382 aa, unknown
  TnpB Polypeptide
VEAVKSYRIPVEEPLDLIEAYFEVKRRALEAILSYVKSNGKAHLDFKSNDRRRLRDELLKDWRYSKHYVDSAINSVIGLVKGWITLYNRGRAEKLPEITKRTVYIKSTLFSLKNGVLKISIEPNKRYLEVDLNRYFWIPKDFDRIGGLILTERGLIITVKKEVEPKADKWASFDVNLTNVTALINGRIERYDLKELYHIHRVYEAKRQRIQRLSKFKAKASRKLLQKYSSRERNRAKDFTHKLTTEIARKLKESSSGAIMEGLKGIKHKVLNGSRKQNRKLSKWNARTFHSMLEYKLKWLGLPVRYVNPRNSSKTCPLCSGYLVAYEGRLMRCEKCNLVMDRDVVAVLNLQMRGEGFPQRALDELIEGEGLSRGNEPPLIST

SEQ ID NO: 18071 - protein, 485 aa, unknown
  TnpB Polypeptide
MGRFEILEGWTVQAYRFALDPTPAQEAALCSHAGARLFAFNTMLAAVKANLDQRAAERTYGRAGDELTPVLGWSMMALRREWNHRKHILAVREDGTPWWPENSKEAYTSGCQALADALRNWEQSRKGERKGPRMGFPGFKSKRRSAKKFTFTTGAIRVEPDRKHVTLPRLGRIKTHESTRKLARRVENDTARITRATVRIEQGRWLVSFTCLVQRETGRRPAHVRAGAPVVGIDVGVKDLIVVATPACAELERLPAPRELKQAQRRLRALQRKAARQHGPWNEHARTRREPSAGWARTQGEISKVHARVANLRADRLHKLTTRLAQAHPVIGVETLAVKNMMSAGGARKHGLNRAIADAGLGHLLRMLGYKTPWYGSTVVKADRWHPSSKTCSGCGSVKAKLALSERTYACTACGLAIDRDTNAAANLARLALAATMDPSAGFDTGGADRKTAPSGAAGGHETRTRPGDSTAAAGGSVSPEDEAA

SEQ ID NO: 18072 - protein, 399 aa, Clostridium sp.
MRKLLKAYKTEINPTEIQKQKINQEIGVCRYLYNSYLAKNKELYQQYKDGLIDKKQSFMNANDFDKYINHEVKTLDEYIWINSCGSKARKKAIENAETAYKKFFKGESKFPRFKKKKNQDVKIYFPKNNKGDWKIERHKLMIPSLKNVRLKEFGYLPVGANVVSGTVSKKANRYYVSVLVKVEEKYQVNSNEGLGIDLGLKDFSIMSNGITKKNINKTKRVKKIEKKLKREQRKLSRKYESLKLRNKNIKKEGGNATRQNIQKQIVKVQKLHQALGNVRENYLNQSVNEVVKQNPSFVTIEDLNVRGMMKNKHLSKAISKQGFNMFRVKLTNKCNEYGIELRIVDRFYPSSKLCHECGSIKKDLKLSDREYICECGYKEDRDLNASLNLRDAKIYKIAN

SEQ ID NO: 18073 - protein, 403 aa, unknown
  TnpB Polypeptide
MVVSRKVAYRLYPSRSQGVALLSMLGAHQRLYNAALEQRIAAWRLRRYGMSYANQCRELTELRAADELYQNVNAQSAQVTLKRLDWAFKAFFQRCKRGEMAGFPRFRSFERFSGWGYKTHGDGFRFVPGDGNMHGRLRLSGVGVIPVRGRARTLGEVATCEIGRKAGRWYAWLTMQCEPKRTRGTKAVGLDWGVQTFLTIAHEDGSFAEVANPRLVRRAKAELEAAQQNLGRKQRGSKNRYKAKNIVAAIHHKTANRRADFLHKESAKLIARANLIAAETLTVKNMTASARGNLENPGRNVAQKAGLNREILATAPSAFLAMLRYKAAEAGIEYVEVPSRTVKPSQRCSACWDVRKKTLAQRRHVCSCGLALGRDENAARVTLFWALARTGREPTWCLASIAS

SEQ ID NO: 18074 - protein, 393 aa, unknown
  TnpB Polypeptide
MQLTYRYRIKDKHAKRLNSQAQAINLTWNYCNETQMKAARDGRKWLSGYDLWKLVAGCTKQGLDLHSHSAKRVCLQYDKSRRQHKKPWLRWRSRRSLGWVPFSTGHVAHRDGGFVFRGERYEVWLHRPLPKGARIGAGSFSQDTRGRWYINCPVEVSEGVCLPGSRRWTRRVGIDLGLKDLTTLSTGEKVEVPKFYRKSEERLATVQRARKTKRARAIHAKIANRRKDFLHKASAKLAEEYGFIFVGDVSPSKVAQTRMAKSVHDAGWSRFRNMLAWKLRLRGGGMLLKVSEHLTTQTCSECGPLPSSRPRGIAGLGIREWTCDDCGTAHDRDVNAAKNILRCGLTALAEGALTSRLGSPAFRPRSSHVLATGAPKRQRDIDGVLLLKLMPPL

SEQ ID NO: 18075 - protein, 407 aa, unknown
  TnpB Polypeptide
MILTYRFKLAPTKAQYAALAELSENQRLLYNAALQERIEAWKKNGLSITKLDQFQSLTQIRSFDEAYSSVPVKLSRWTISRVDDAFQGFFLRVRRRAKAGFPRFKSRSRWRSFGFKEWSGIRLISGKLFFNGLIGGLKVCFHRSLPDACPMKACTFTKNGRFWFVTIQMDVPVVEGHARPDTMVGIDVGIEHLAFLSDGTHIENLKIGAKHQHKVRIAQRALARCKRGSKRRAKVREKLALLKRRTANSRSTHLHQVSAKIARDYAFIAVEKLNVKNMTGSAKGNAEEPGKNVRQKAGLNRAMLDVAVSKLISFVDYKAERAGGLMVKVNPYRSSQECHSCRAIVKKTLKDRQHRCSCGANLHRDFNSAIVILERALSAQGRAMPPRDGNAGHEPTRRPGKMVAEAA

SEQ ID NO: 18076 - protein, 191 aa, unknown
  TnpB Polypeptide
VGDHSSSTGFYSSKDVDRRSNSGDYPKFYRKAEAKLKKEQRKHSKRKKGSKNREKQRQKVARLHEKVVNQRKDFLHKRSRQIANAYDAVVIEDLNMRAMAQGLHLAKSTNDNGYGMLKTFLGYKLKERGKQLIIIDKWYPSSKVCHVCGTKNSQLTLDDRVWTCSCGAILERDINAAINIKNEGWRILGVA

SEQ ID NO: 18077 - protein, 391 aa, unknown
  TnpB Polypeptide
MLLVERHKIKTTPEIVELCKNSKELYNKCNYFMRKQWFANLKTEDWTVPLPDITTLIRLVQQELCFKKLHNTKTAKQTVRRCLTDWSNFRKAQTAYKKNPSSFVKKPRPPHYKDQLAQVIFYNETIKKKPLKQGIITPTNGCFSIKSIRDFKQVVITPKKFGFVVDVQYEQESPHKVKGKGICCIDIGLNNLAAITSDQFSPILVNGRILKSINRHFNKCRRKRNGLKRYFRIENYFHHVSKMIVELCQKHDCGTIIIGKNDGWKQKMNLGEKTNQNFQSVPFFKLIEKINYKAALAGVRVVFTEESYTSKSSFLDRDPLPVYQDGAELAFSGKRVKRGLYRSADGRLLNADCNGSANIGRKVIQNIEFLDRLDRSLAARPVRINPLKTFA

SEQ ID NO: 18078 - protein, 352 aa, Archaeon sp.
MRKTSFLPSDIVEEARKDVWAKRKTIKKGFIRCSIRLNRRWFKFFMTDRGTPSFKITYSPRKHFVIPIRIDGSYNRFKQELKSGWNIKTISLLNGKIAVSIEKEYLEVPDNKRNIVGVDIGSSTLAAVTVYAPRKARVIKQLYFGRALANRQRKYEARIAKLRSHADKGSEKAKKYLKKLKHKQANFVKTRSAQIAKEIVTLATKYNASIAVEKLNIRGRKHRMNKKANRKINHIPYAQFREFIKSNSSKYEIPFQTVDAYHTSKWCPGCGALNKGHSSNNYAIYKCSRCGMIVNSDRKASLAIAIKSALVRESFQDFTNPKLFSQLTRAGVAVNQLFRPDDRVLSGAVHYT

SEQ ID NO: 18079 - protein, 446 aa, unknown
  TnpB Polypeptide
MDQVQRKITYRLYPNAMQIALLLEWLALHCRVYNTLIEEHIRRFEAKEPGFTFAAMCRALTTWRGATPALDALNGHSLQVTAKRVSLAFSAFFRRVKLGEAPGFPRFKPLQRFAGWGYKEYGCGWKLFQGPAGAHGQVRLSGIGLIPMRGRGRFTGTPKTAEVIHRSGKWYLSVTYNVAPNEVARPRGMEAAAFDWGLETLLTLARADGTLEMVDNPRWLKHQLHALKALQRAVSEEEIKAKAQLGLAADEPLKKGQRLPVTARLKRLYAQVRAVHGKIARQRHDFYHKLTSTLVSRFAFLGTEQLAVKNMVKAPKAKPDPDHPGEFLPNGATQKAGLNRSIHDAAPSKLIGMLLTKAAEAASVFALADTRKVKPTQRCHCCGELVKKALSERRHVCACGADCGRDENAARTLLRWLLEGEFWLGTSQKAGASLPSETMTTAALAV

SEQ ID NO: 18080 - protein, 432 aa, unknown
  TnpB Polypeptide
LSDTLFEKAIRIGKHAISFARCRANSVTAQSTCCAIDTLKSNWFLVEKSLMWPSSFNMSATIEPCPRLLLLKDRVKWLLNNSKLLLKRRLNTTNIRKISWQTRVARLQAKVSNFLRWTQRLPNTKLSTDHHGRRGHRLFADEAVIGDLRIVPMGNTFIVELTYRVRREEKDLSKSVSLDSSEALFCDLGIDNFATFVSTKPGVRPFLIKGKVLKSLNQNYNKQVAELRSKGHRAHICTKGVKRYWRLHDLLHKASRLVINYCLAYDVGHIVIGVNQEWKQEVNLGKRNNQNFVMLPHRKFVEMIRYKAEDYGIRVTVREESYTSKASALDFDEMPTFDKKESGAKPVFSGWRIKRGLYRSAKGQLINADINAAANIGRKELGDEWLKKLLELDGGVLVDTPAVVRNLHTSKNIRQWLELGTRSQETAHVSGR

SEQ ID NO: 18081 - protein, 415 aa, unknown
  TnpB Polypeptide
MQLVEQHVINRNDPRFAMIDEAAFKSKNLYNAANYEIRQTFIHEGRYLNYNEIQRRMQSHEAYKALPAKVSQQVLVLLDKNWTAFFEARAAYEEDPSKFTGRPRLPKYKHKLEGRNILVYTVQALSKPGIRDGLIRPSGLPITIETEHTVVDQVRIVPRNSYYVVEVIYTKEPVQANVDPSFCVAIDLGVTNLAAITANRAGWVPRLVNGRPIKACNQWYNKRMKELKMCLPKEDRERVTKQMERITNARNRRINHYLHAASKRIIDFLAKEGVGTIIVGKNPLWKQETGMGRRNNQNFVQIPHARFIDILTYKAELVGIQVEVREESYTSKASFVDLDPIPTYTPNDEEEHIFSGKRIGRRNRLYRTKDGRKICADVNGSYNILRKSKPDAFADAGVKGIAAYVVQPVRLAITV

SEQ ID NO: 18082 - protein, 419 aa, unknown
  TnpB Polypeptide
MWVNQAFRFELEPNAAQLQAILRHIGAARFAYNWGLEIVRKSLEKKEKIPSAPELHKMWNIWKKDNAPWWKEVSKCAPQEAFRDLERGIKKWKSKQSRLPKFKKKKLIPDNSVRFTGSVRVFTNYVQIPRIGRVRSKEPTEKLLRLLEEGKAKILSATISQEADRFYVSIACMVKRQEPKMKEVRSEDDIVGVDLGLSSFAVLSDGTKVDAPKPLSKKIKLLKRRSKRFSRKQKGSNNSKKAALKLARFHRKIKNIRQDFLHKLSTWLARTKPVVVVEDLNVKGLSRGPLSRSVADVGWGTFLRMLEYKAKWYGATLIVAPRSFPSTRLCSRCGHLHGKMPLSQRVFQCEACGLEMDRDLNAAINLKKYGLAHLTGSTGSSPGSYACGDPSGGGTALLGWSTSYGSWKQEVAHRHLSVK

SEQ ID NO: 18083 - protein, 363 aa, unknown
  TnpB Polypeptide
LKRRANCTTRSCTPNKEEEYRKNKRSMSRNELRQLALDLRKQNPEFQALYSQVAQQVADRLYQARKRFFEGLANKPRVKKPHKYLSLVYPQSGRRLSNIRDVGHGENKKKRARLYLSKIGFFTLVIHRGFPLSRVCQVCIKLNPSGRIYVVFLVEEGEVEAPNEQKCAGEPKKAVGLDVGITRLVTLSDGRFLENPRRLERSLGRIQALQRSLSRKRKLSKNWFKAKRRLAKEHEYVKDFRRDLFFKLGALLAAEYDLLVLEDLDVLGLIQKGETRKRRLRLYDSSFSELRRILEWQFRKQGRAVLAVPSYNSSRECFLCVEVNHSLTLKDRVFSCPYCGFTLDRDLNASLVLCKRAGVGATL

SEQ ID NO: 18084 - protein, 429 aa, unknown
  TnpB Polypeptide
MQVMTAYRYRLDPTPEQRGFCVRTAGACRALYNAALDQRNFSYQISRRCRPTPGRFAQDAELKELKRVPGLEWLAEAPHHCLQQTLGDLDRAFANFFKGFADHPSFHKKFVNDSFCFPDAAQIKLLPSRHGWVFLPKLKWVRFHQSRQLPIEGRLCSATVSREGEHWYVSFQCQVEIADPICPSGNTVGIDLGITNSIALSSGEVIRLPKFGKREQEKLAILDRRVASKQKGSANRRKALVKRHAYYRHLASRRKDAQHTATTLLAKSHGELVIEDLRVRKMTASAKGTVEAPGTNVAQKAGLNRSLLNEAFGEFRRQLTYKCAWYGSGLTIVPAMNSSRECSACGHTEAGNRPSRDEFRCLACGHEAPADWNAAETIKNRAQRGERLVLAAPTALPTVGTTEHRAGTPGVRLDEADRLGQEMPPAKAA

SEQ ID NO: 18085 - protein, 286 aa, unknown
  TnpB Polypeptide
MRSVAPSVVGMASILPPRSVLGTRVPHPRPGEGPPRRAQRGTEGLRGHSGHRFGHERRFPRRRRGRRRGYPSPDPALRRRPSGPGHALPTPTSSGEEEGPRPKGAAEAPGPGGEMGTEPGEATSPRREQGSRRSGEILEIRVLEDLTLHGAGGKSRRMNRRLSSWPRREVHRQIEYKAALERVPVIKVNPQWTSKTCPVCGARRRDRVGQEFVCLMCDWEMDRQINAGMNILKTALASNEALARAVRFQPGALRDDVVSSLYDPPRGGAGARDEPSGVELGVSKIT

SEQ ID NO: 18086 - protein, 471 aa, Micromonospora sp.
VKVTRIACSTRLNPGKYAALLEQARRLGRVRSEVWQRYGSINGVGSGLRDRQVRDWWLVDGTHQRFGVLANAWKETVRDAMADMTANMAAAKVNVRRAIVRRTDDPAERKRMLTALKSDRWAGDPFLARQMRKHWKRGKNCTHDQIVVRADQHHTVADGRGRLWLAVPGLERRRMVRIPLSTTVAPTGTLRLILRGGRVEVHYQIDASQLRSSQRPCGDRMIGVDKGYTEALTDSEGEQHGVRLGKLLAVESDRVKERNRRRAKLRSVANNAARRGDHAKAHRITVNNLGSVKRDRRAARHRAQVRTEIFTAVHRVVDKAATVVAEDVTKTFTGRKTLGRNVNRRLAAWTKGVTAEALTNVSERRGSVLVHVNAAYTSQACHRCGRLGRRSGDRLHCTSCGVVWQADVNAAINILHRAGDPDIALHTPHHRVKQILQDRTDRHRTRLPVQDSSPTNLGRRAKHPNRTTTSH

SEQ ID NO: 18087 - protein, 448 aa, Halonotius sp.
VKRTNTFAVRPLTGDDEQVLRQVLDASAALWNEINYQRLIRYNDEDGFEGEDVWDADTGQLEGQYKGVLGASTAQQVIAKNSEAWRSFFRLKEQFHDPDNQQVTEHPEPPGFRGNEDDGRVLKGVIRKDAYTVEWGDRSRLEFVVGEELRDKHSSPKGRFRLEIVGDPNWPEYDEQSRLELWYDETDEVFRASQPVTVSDDTQATPLAEESAALDIGANNLVACTTTTGEQYLYEGRELFDRFRDTTREIARLQSKLKEGRYTSQRIRQLYHQRTRRRDHAQAALCRDLTERLYDEGVDTVYIGGLTDVLDTHWSVETNAKTHNFWAFKQFTGRLATTAEEYGIAVEVRSEAWTSQECPRCGSTNRTHRREDLLMCQCGFEGHADLTASETFLARQTEQAVRPMARPVRLEWDSHEWLETSHSHRPKQQRTDQSTVTSDGNLAAGESA

SEQ ID NO: 18088 - protein, 438 aa, Halonotius sp.
VTELTKTLELKLVDPNVHKRQKLRETRDAYQQALQDAFDAGCDTQAAANDVVVEYDLSGYAKNALKKYVPQLCGNSYDADELHDDHPVRFTNEGVRLDHQPQNAIEWYVKIPHHEDYHLWMPARANPEQREWLEALYADDAEMGESRLFERDGMWYLHVTATRNVEDESEVSADERTPIGVDIGEASLVTVCHRNDSGSPVRPRLWADEGKTVRRLRKTYFTAKRRLQQRGSERIAECYADALWNQIDDVFHRVTSEVVAHAESVENPVLVLEDLTYIRENMDYGEYMNRRLHGWGFGKLHAQIRYKAAEQGIPVETVNPRNTSKACHACGEVGSRPRQATFRCSNDDCWLGEYQADVNGAINIADRYRSGESHRQSDRASRQKVGDDDSATDGASLTGPRDSHAVNESRSDSFAHQKSKISGDDAETQQPTLGTNAS

SEQ ID NO: 18089 - protein, 397 aa, unknown
  TnpB Polypeptide
MQRTNVVELVASKQQKKLLLELMTLSSCVWNMANYNFRQAIFKKEKIKSFYKQQQAIQTKDDYQKLGRSYALPMLQKHSFLVNAFFRLIKSKTQEKVGLPKYLKNRKTNTTIPSILRIDSGQYYFKKDKVHLPLSRKMRKETSLKGIVLEYKGKPRWEGKQGQAEIHYNKTKKKFYLHQSVKIKDPKQRHGNKTLAIDIGIKRGIAGFDNKKAYLYPSQIVKKWKQITKRIKRLQRIAKTRNNRYSTTQINTLYQKRCLMMDDYYKNIVSWAIKDANPDKIIVGDVKDILAKPQKNRKANQMTHNLWSFDLLYKRLANKCEEKGIELAKVPEPYTSQLCPACGSFNKPIDREYECDCGYKQDRDINGAINIYHQNIDGKVYLHPAVENHRLLVRGCK

SEQ ID NO: 18090 - protein, 397 aa, Streptomyces sp.
VIVMQLRYAFRLYPDAAGEPFPSAGQLSKELITRAKQTVERAWLGEVSAVVLQQSLRDVEGAYRNFFASLKGTRKGARVGSPRFKSRKDSRQPIRFTANARWSITDNGWLNLPKIGEAKVKWSRSLPTAPTSVTVIKDAAGRYFASFVIDTDPAADAMAVPDTDQMVGIDLGLTHFAVLSDGRKIDFPRFLRRAEKKLKRAQRDLSRKQKGSQNRTKARLKVARPHAQVADARREFHHQLSTKLIRENQAIGVEDLAVKGLARTRLAKSVYDAGWAQFVNMLEYKAVRYGRTLVKIGRYEPTSQVCSACGFKDGPKPLDVREWTCAACGAVHDRDHNAAKNVRTAAGPAVSACGAQVRPGSVPAQRDEAGSHGFTPEPRAAQRHSNESEGQNPRASA

SEQ ID NO: 18091 - protein, 351 aa, Lentibacillus sp.
MEQTITVKIKLLPDTEQENYLANISRMYIETVNKLVSVMVETERVLKWTSKDVHVPMPSAVKNQAIRDAKSVYRRSKTIGKVPILKKPVCIWNNQNYRIRDDTIQIPVWLNGRAERISIKGILTDYQRQLLKHHRGTLRITKKSNKWIAQISVRMKRPKQKSTGIIMGVDLGLKVPAVAVTSNGKTKFFGKGRQNKFVRRKYAARRLVIGKSKKPVAYRKINDKEKRWMKEQDHKISRQIIDFAVDNHVSVIRMEKLKGIQKTARTSRKNEKNLHNWSFYRLCSFIEYKGNLAGIKVEYVDPKYTSQTCPQCHKRNKVRDRNYHCSCGFRSHRDRVAGMNIIHAPVMDGVV

SEQ ID NO: 18092 - protein, 221 aa, Natronomonas sp.
MNYNYRYRIEPSEAVEAELEYHIDTCRQLYNHFLYELRTTDKYLSYTAMQNMLPGLKDWWDQLNDVYSKVLQMVARRISDNINRLKEKKENGQSVGKLVWKRPREYRSLTYNQSGFELKNTSEQTVLSLSKIGEMPIHLHRDIPDDSRVKQVTIKQEKTGKWYAIFGIETEQDVPEKPALDDVDRNAMVGIDVGILKYTHDTDSTMVGSLDLEAEVRTART

SEQ ID NO: 18093 - protein, 356 aa, Natronomonas sp.
MKNQLCWKDLNAQSSQKVIEELSDAFQSWFDLRQNDPEANPSGYRKHGDTRPRSTVTFKADGLKHDRENNRVRLSKGSNLKESRPDFILCDYQTHPDVDLTEVNKVQNVRAVWNGDEWELHFVCKVELETNDSAGGEVAGIDLGIKNLATVAFPDQCVRYPGNSLKQDKHYFTQAEYDKEGENSPSEKSMWARRKHADRVTNFYHVLTDTVITECVERGVSTLAVSWPEDVRESDWGKTDNKKLHSWAFDRLYQYLEYKGETHGVEVLKENEWNTSKTCSGCGDDTKSNRVGRGLYVCSSCELVGNADCNGAENMRQKITPSPHGEDRSNGCVAQPSVHRFDRESGMFRTREQVVS

SEQ ID NO: 18094 - protein, 399 aa, Natronomonas sp.
MGSVSETVTKTLQATLATPTTGKEQRLQRLLDIYRQALHDAFDNGADTMSAVNEVVTPYKLPYQAKDALKSYVPKLCSTFNAEELDEEHPIRLVNRAAKFDYSEEREHGYVWQVPQPGRGTNFWIPLRINPEQESLWFDLLSEGANAGELRLQRHRTSWELHVTVEYSVEGPTDSDDTDETPVGFDIGESALITGCALKRDAPRKPLLVSGSRAQQLRKEMFTTLRRLQSRDAAEWRLDERFNHYQNALTDIVEKASRQAIEYAQQFKNPVIVLEDLSYIRERLDYGKFMNRRLHAWAFARLQGRIEDKATEAGIRVEYVNAAYTSQTCHACNRLGRRSQQAEFVCSNDDCHVSGFQADINAAANIASRVNPWGESVRWEPGRDDSPQDGCACDSATVH

SEQ ID NO: 18095 - protein, 272 aa, Natronomonas sp.
VVTRAVTTTFHNPSRERRRECQRATHLYRDTKQFCIDGWEAGEFGMRVTTASINNDLYSAIQNQAIREAKADYNKDGTVKYHASQPFAINNQNWEIDRTENGSVVVGFPCISGWWYTPIDVYDDIADDVARLVDGDADKSRLQVYRRGEDWYCTFTVESDAELGDGTAIGVDIGHNHLLAADAERGESLLMSGREAKYVRRKYRSLRESLQEAGALRARNRVGNKEQRRIRDLNHTASRRLIDWAQQFENPVLKLEDVEGIRAGSDWRGVHS

SEQ ID NO: 18096 - protein, 409 aa, Natronomonas sp.
MRYNYRYRLKPTDELHERLAWTVDTCRQVYNHFLHRLNRVDDTSAYSEQSILPDLKGEWPDLQDVHSKVLQKVVQRLYDNLSTLKGRKANGYRVGELKWKSPQEYRSITYSQTGFELNNTSGRPVLSLSKIGDIPLVYHREVPDDASIKEVVVKQEPTGEWFAILGIETENDAPTKPENPEKCVGIDVGILTYAHDSDGTAVDGPDLSDERERLERAQRNLSRKDHGSNNYRKQQRVVARRHADLTRKRRDFLHKLSNYYAREYDLVAVEDLDVKGLMELPSNSRNRAGAAWGTFLRLLEYKCEREGTHFVAVDPRGTTKECSECGVSTDKPLWVREHSCPSCGFEADRDLNAAYNILSRGLDQVGVVHPDSVPAETALPVGTDSVPAKRVVETGSPVLSEAVRPRRVG

SEQ ID NO: 18097 - protein, 411 aa, Natronomonas sp.
MTDAEALVKTLDFQLDIQSDNESLLYDACLEARSVYNETIRLAKQGVDWDIIPDRVADDADLVKNTIQRVVAKALGAMENYYEYDDFGQPSHTKDGAYPLRANYEEGYNLSLTDDGGLAFRISAKPYKHVKGVLDGCDAHLDILKIALTNNEWKIGTAEALFHDDTAELHVTVTNTKQTVRNKQASQSVVGVDLNEDNVALTALSKDGVEDTLVIDFPEIKFERHRYFTMRKRVQNAGKSSIQDALEGREERFVRDRLHKLSRHIVEWSCQFEKPCIVFEDLKAMRDSLDYGTRMNRRLHHIPFRALQFYTSYKASFEGIPTVWINPEYTSQRCPMCGHTERANRNKKRFKCRSCGQQDHSDRGASVNIAVKGAKKLDWTVPALNSLPTVRKVRRQASGAVDAPTVTHPTV

SEQ ID NO: 18098 - protein, 428 aa, Natronomonas sp.
MFIKHHPPREGVAAVRNIQVKLEVPEETHDVLEETFEQFRGAAQHVADYGWSDEPTEIISDQGDLNAATYDEVREQTDLHSNHVQSARRLAADALKTCQDRIFDGKKTSKPTFRGSVIVYGSRTITYNDDYCTLATVDGRVRAHYVIPEDETGTPFAEYWDRDEWERKEATLHKRDGEFYLHVAVEQELETAASTVENGVVLGVDLNVDGYLAVTSTGRFLGNADYLNHKRAVYERRRGRLQQTGTRSARLTIQSIGDRFARWSDEYLHQVSKAIVQEARRHDCAAIAFEDLASIRTGISNLPKFQQWAFRTIQRFTEYKAEANGISVERVSPAYTSQRCSHTACGFTHEKNRTSNRFECLKCGKELHADYNAARNIGWQLVQHWHMSGAGRANCQVALKSGTLNGNGKFRPAVIDGQTRSPLTSPPH

SEQ ID NO: 18099 - protein, 418 aa, Natronomonas sp.
VTVVRNIQVKLDVPADAHSVLDATFEQFREAAQYVADYGWADDPCDITTDQRVLNAATYDEVRAQTDLHSNHVQSARRLAAEALANSQDRLFEGATTSKPTFRGSVVVYGHRTITYNDEHCTLATVDGRVRADYVTPADETGTPFEEYWDREEWERKEATLHKRNGEYYLHVAIEKEPETDVSTVENGVVLGVDLNVDGSLAVTSTGQFLGNADLLNHKRREYERRRGRLQQTGTRSAHLTIQRVGNRFGRWSDDYLHRVSKAIVQEARQHDCAAIAFEDLTNICERISSASKFQQWAFRTIQQYTEYKAEEHGILVATVAPAYTSQRCSHSTCGFTHEHNRDGDEFECLECGKELHADYNAARNIGWRLLQGWHTSGPGGADCQVALKSGTLHANGEFTPATDTGGQSGSPLTSPPL

SEQ ID NO: 18100 - protein, 412 aa, Natronomonas sp.
LDASASLWNALNYERRQNFFAGESVWDTADYRKQYVGVLGSATAQQVIRKNSEAWRSFFAARENGEDTAPPGYWGNEEEGRELRTYIRNDLYTLEIGERSRLEIPVGQDLKAEYGLGYHERQRLEVAGNPKWDGEQGRLELSYDEVDDTFRTFQPVTVDDSRRDSPRAEESAALDVGANTLVACTTTTGQQYCYEGRDLFARFRETTEEIARLQSKLPEDRYSSRRIRRLYRTRTRRRDHAQDALVRDLIERLYDEGIATVYVGDLREVLSAHWSAEVNEKTHLFWAYRAFIDRLATTAEEYGITTEVTSEAYTTMECPACGERNQTERRGDVFRCPCGFEGHADLGASRTFLEQQAGEDVVRSMARPVRLQWDNHEWRSTTDAPPIRWPNPNEERTNQSTPEGKLATGGTA

SEQ ID NO: 18101 - protein, 418 aa, Natronomonas sp.
VTVVRNIQVKLDVPADAHSVLDATFEQFREAAQYVADHGWADDPRDIITNQRDLNAATYDEVRAQTDLHSNHVQSARRLAAEALLNCQDRLFEGGTASKPTFRGSVIVYGDRTITYSEDHCTLATVEGRVRADYVMPEDKTGTPFEDYWNREEWERKEATLHKRNGEYYLHIAIEKEPETDVSTVENGVVLGVDLNVDGFLAVTSTGQFLGKADYLNHKRREYERRRGRLQQTGTRSSHLTIQSIGDRFARWSDDYLHCVSKAIVQEARRHDCAGIAFEDLSAIRDRISNASKFQQWAFRLIQQYTEYKAEEYGVLVETVDPAYTSQRCSHSTCGFTHENNRDGDEFECMDCGKELHADYNAARNIAWRFLQDWHTSGPGGADCQVALKSGTLHANGEFTPATDTGGQSGSPLTSPPL

SEQ ID NO: 18102 - protein, 413 aa, Natronomonas sp.
VEYSHRYRAYPSEEVAERLEHQLDVHRQLYNHVRWDYENNPEDNKPSEYDQNNKLPDWKQKWSLFADTYSKAAQATVARFHRNLSNLRKKKEKGYAVGRLKRQAPSDYRSVTYNQSGFDLDDKRGQDGYAYVRFSKVGWLKIRYSRPLPEHASIQEATFKKERTGEWFVTFSLKTDDEHLPEKPDVDSLDSSNSVGIDLGILNYIHTSDGTIVNWLDLEDEYERLSRDKRELSRKDYGSHNYEKQRRKVASIKRRIRRKVLDFQHKLTTWLVNEYDAVFVEDLDVVGMLQSDGNARKKQDAAWRQFLTLLEYKGDLYGTHIVQVEAAGTTKECTRCGVETTKPIWVREHSCPACGFEIHRDANAAMNVLQRGFSELGLGWPESTPVETVAATDTEEFSEVSASHVIETGTPCP

SEQ ID NO: 18103 - protein, 463 aa, Natronomonas sp.
MLLPVDTPMLEFKYEHEWSGRMVVEARRTVRIPLEVPAERIDDLHATSHWYRYCQNRTATYCWPTRPTRPSDLTTNTREVERTLYDRLREETAGLHSNLVQKAIKDAVAAVSSCQTHWKNGDRISKPSFDARTDGSYAMTYDKRAATFQKYTVSLATVNGRVQCRYRLPTELAGTPYERYVLDRRWSFSTSKLVYDGEQFWLHAVLKRTYTDASTSSTPRSDTPEDLTRVLGVDVNVDGYTAVTSVGGFHGNADALTHRRQAYETLRAELQQTGTQSAHRRLQARRGVERRYYTQYCHDVANEIVADAVRVGATHVVFEDLTRIRDHISNRPKSQQWLFRQIQTYTAYKLAEHRIDVERVDPRETSIACSRTDCECSDDESRAGKEFRCVDCGYAVNADYNAAKNIGLRFLEASESIPTGHTCSSGRATSQLALMSGTLTPAGEFVSREWVSTDKPTASAVGR

SEQ ID NO: 18104 - protein, 402 aa, Tolypothrix sp.
MLVFEAKLEGQGEQYRKLDEAIRTARFVRNSCLRYWIDNKGIGRYDLNKFCAVLAASTELPWVAKLNSMARQASAERAWSAIARFFDNCKKSKPGKKGFPKFKKEQTHGSVEYKTCGWRLSSDRRYITFSDGFKAGTFKLWGTRDLHFYQLKQFKRVRVVRRADGYYGQFCIDQDRVEKREPTGKTIGIDVGLSHFYTDSNGETIANPRHLRKSEKSLRRLQRKMSKTRKGSQNRIKFRNKLARKHLKVSRQRKDFAVKTARCVVKSNDLVAYEDLQVRNMVKNHHLAKSISDVSWSLFREWVEYFGKVFGVVTVAVSPHYTSQNCSNCGQVVKKTLSTKTHVCPHCGLTLDRDSNAARNILEKALSTAGHVGTNASGETDQYLAEETPSSKSTHRKRKPKQ

SEQ ID NO: 18105 - protein, 389 aa, unknown
  TnpB Polypeptide
VTKAFKYRLYPTRKQVKRIRETLTTCRMLYNNALEQRISTYKETQESLTYYDQANALVTNKNDYQKQVHSQVLQNTLKRLDTSYGNFFHRVKERKLGKNIKVGFPRFKPDQRYNSFCYPQSGFRLTNDCRRIKLSKIGDVRLIYSRPVEGKIKTCRVVRDVDQWFVVLTCEQEQPQVTKSTNPTVGVDVGIKTFVVLSDGECVENPRHFKKSEQQLAKQQRRLSRKVKESQNRNKQRTKVARVHRKIRRQREDFLHKVSRSLVENYGCIVFENLNIKGMLRNHKLAKHISDCAWRKLIEYTTYKAEEAGVEVRLVNPKNTTQICSGCGELVPKTLADRIHCCPHCGLEVDRDLNAAINIRSVGITQSYAYGDLTSTQGYCVPEQAKSLK

SEQ ID NO: 18106 - protein, 407 aa, Cyanobacteria sp.
VIKVLKAIKVRLYPTPEQEFILAKSFGCARWYWNFALNACIQHYQETGKTLKLATYKGMLPKLKKEFPWLKEDCYSAVLQSVAINLNKAYTNFFQGRARFPRFKSKQGKQSIQYPQNVTVNGDKLVVPKIDELKAVFHREITGTIKTVTISKTPSDKYFASILCETQDSQSQTSGDKTLGIDLGLKDFAIVHDGEEVTKYSNPKHLKRHEKNLARKLQLLAHKTKGSKTRDRYRLFVAKVHEKVSNTRQDFLHKLSRKLVDKSQVIVVENLNVKGMVLNRKLSKAISDVGWGMFVNFLAYKLERKEGKLIEIGRFFPSSKKCSCCGHVVDELSLDIREWDCPTCGTRHDRDGNAALNIRTEGIRIMAMDGGNPVLAVQRRSKTNKPQGGKASVNEAGSPHLLEEKCG

SEQ ID NO: 18107 - protein, 426 aa, Aeromonas sp.
MHDENTVPTASNVIDIFHRPKYIEGMQRLQAFKYELMPDGQQQRQMRRFSGSCRFVFNKGLALQKELHEQGEKKLSYAGLCKSLTQWKQVESTSWLSDTPSQALQQTLKDLERAYSNFFAKRADFPRFKKKGQSDSFRYPQGCKLDQTNSRIFLPKLGWVRYRNSREVLGAVKNVTVSQSGGKWYVSIQTEREVETPLHQGGAVGIDMGIARFATLSDGTFYAPLSSFKRQEIALRKAQQAMSRKTKFSANWKKAKAKVQRIHARIGNARRDYLHQTSTTISKNHAMVCVEDLQVRNMSKSAAGTAEKPGKNVRAKSGLNKAILDQGWFEFRRQLDYKLAWNGGHLIAVPPKNTSRTCPCCGHISADNRQTQAKFECVECGFGENADVVGAINVLRAGHARLACEVSGTIMPPAAGTHRGELGACA

SEQ ID NO: 18108 - protein, 423 aa, unknown
  TnpB Polypeptide
MQLTERHLIKPSHELYPVLDDLTFKAKNLYNHGLYLYRQSYFEHKKSPESPILSWADIDKNLRTQGHADIRALPSKVANAVLKNLGENISSFWKLVRLKNKGELAQKPRLPHYLHKTEGRYPLSFNYQTFGAKRGSNNELFLCPKGINLPIPTKVANPKQVRIVPNHDNFIIEVIYDAQERAPKSTSKYAGIDLGVDNFATITFTTQNQPLIIKGLELKSINQGYNRLISKAQELLPDSLKTSKPIHRLWSRRSWILRTKIHQMTAFLATLFDEMQIEKVFIGKNAGWKQNLPFGKKVKQRFAFLPYETFIEQLRYKCQLRGITVVVQEESYTSKASFLDNDNIPVYGEVDDPQFSGRRIKRGLYCSSDGRLINADVNGSYNILRKGLMNNRLSFNVGSPIIHPLVVKGIGEESNDKLVHLYM

SEQ ID NO: 18109 - protein, 398 aa, unknown
  TnpB Polypeptide
MATEIRRTVQIKCRFENHAKSLLKRTIDEYRRAANHVVDTVWNPESDQPSTLNTNEIHEQTYGPVRSQTDLHSSHVQLARDRAIEAMTGVQEQREQGTDTGRPQFSSDFLDYHDRCITYGTDSATLATVDGRVHADFVLPEDNDTPHHQYFLNPEYSPARSTLVPKQDRYYLHTVLKKPAEHKNREDGTILGIDLGISNIAVSSTGRFWSGDRITHWRNEYQENQRRLQERGTRWAHQTLKSVSRRTHDKVQQYLHTVSNEIVEEAAEHDCSIIAFEDLSGIHSKVQEWPNMRSWAYRTLIQYTEYKAETEGITVTQVDPENTSKRCSTCGHTDLKNRTSQTRFHCRNCDYENHADYNAAKNIGLTSLRRSQNGSSGGAPAGVRTNSGIITQNGYKPL

SEQ ID NO: 18110 - protein, 359 aa, unknown
  TnpB Polypeptide
VDCTKTLRLRIKDKHARVLSAMAREVNQVWNFCNETSRRAIRERHQWLSGYDLQKLTNGYSKCDGIHIGSPTVQQVCEDYAKARKQFKKAKLRWRVSNPQSSKYSLGWIPFKARALQYKAGQIAFAGQKFSLWDSYGLADYELRAGSFSEDSRGRWYLNVVVKVQAKGSSATASVGIDLGLKEVAVASNGQRIEGRFYRKLEADLGIAQRAHKKRRVKAIHAKIANQRKDALHKFSTALVRENAAIFVGDVASSKLVKTKMAKSTLDAGWASLRAMLEYKSHQAGIVFEVVNESYTTQTCSCCGIIPASSPKGRAGLRIREWVCSGCGAVHDRDINAARNILAAGHRRLAEGITVSSGR

SEQ ID NO: 18111 - protein, 355 aa, unknown
  TnpB Polypeptide
LKFATQSKLSKLGMILDEYGRVVNGFIDLFWEACPSKAELLKPVVDSVDSWFSARLRKVAAREAIDMIHASKKRRAEKARKPVHRGARMCVSSTTASLNAKKSSKEFDAYLHLSSIGHGVIFDLPIKFHKHYNKLAAVGKRLESYVITRNSVQFCFEIETGLKREPDRCVGIDTGIKALASTSTGKQFGKDIESGISRILRCEHGSKGQRKASRALRQRMDEVAKEVVEGHSLVVVERLKGITLNMKKTPRRRLGKNMRRVVGRWNVRYWLETLQRKCEDNRVAFRTVSPYYTSQTCSSCGQIDKSNRAGETYSCKNCGHTLNADINAAKNILARFLTGKYGSGCKPVDGHICLS

SEQ ID NO: 18112 - protein, 400 aa, Bacillus sp.
VSYLKLNSIGGCANKIGRTGQTLKNLDKTMIFAKKVRLRPTKEQEIQLWKSVGTARWAYNWALSKQEESYKNGGKFISEGLLRKELTVLKQTDELSWLFEVSNNITKQAIKDLCRAYKKFFKGLADKPRFKSRKKSKPSFYNDNVKLLVKGNKVLIEKVGWVVASEIIQDVKFYNPRISHDGKYWYLSVGIEELKPTVELTDVSLGIDVGIKELAVCSDGTRKKNINKTSTVRRSEKRLRRLQGQVSRKYEMNKEGNRFVKTSNIIKIEKKIQHIYRRLSIIRLNHLHQSTCEIVKTKPCRIVIESLNIKGMMKNKHLSKAIAKQCLFEFKRQIQYKCEKYNIALVEANKWYPSSKTCSSCGKLKKDLKLSDRLYKCECGYEIDRDLNAAINLSRYKLVI

SEQ ID NO: 18113 - protein, 426 aa, Mycobacterium sp.
MAATPAVEAVGKPRARKRARGAPTRVRSWPLRPTPTQCRQIGTRLFTGVRVYNAVLGEFIGRSRAVKADPAWQAARELPRRTAAERKKRGAAFGAVQAGHGFTADAAQSFASSLRTSWVREHLPAQETQNLGARAFDAVRQWHVGKKGKPRFKNARRGLHSVAAKDGNGALRPNTDDAWRLVGLQWGAGLVIPIAPVAMGGRRGREQRAELGEIEVLIAAGKVLSTRIVRTVIDGRDTYRMQLVCDGRPTQRHPVGAGRVSFDLGPSQIAIAVQRGDGSWSGWVEPLADGIRLDTKRLRRAQRRLDRQHRAGSPECFRADGTHTWVRCGWQRSAAAMRTTRQVAELHRRLAEHRKSLHGALGNRLLGHGADIACERLDYVSWQKSFPRSVRDRAPGLLVDRLRRKAESAGGQQLYEYNPRTTALSQ

SEQ ID NO: 18114 - protein, 364 aa, Microcoleaceae sp.
MFAVKRALKLNNNEATLMARHAGFRRVVFNFGLSLRTQMYSEGKFTDSKVINEVKKVLTNYVKKKPEFGWMNQLSSRVYQNALIDLKDAFSRYRSGSSGHPKFASRRDGQSFTVDSSNGKVLLNAGKTIKIPTLGTFRLFEPLECSFVSQTFTISKEGNRWFVSFCVDAERLPVPQPESSVGIDVGIKSFATLSNQQVFDAPKPLIASAKTKLATLQRQASKQVKGSKNQRKTYNKISRLHARIARIRLDFLHKLTTYLAQTFKLIKMENLKVKGMMANPKLAGAISDLGFYEFKRQIDYKCRMYGARLVLVDQWFPSTKTCSNCGSKKDRPLSVRTFDCPACGISLDRDFNASVNILNWEPSA

SEQ ID NO: 18115 - protein, 362 aa, Cohnella sp.
VQITFQFRLYPTPEQEQQMNRTLDLCRKLYNRAKEQRDTANNQEGKTVTNTMQQNELPAFKKEFPAYKEVHSQVLQDCLRRLDHAYQRFFRGEAGFPHYKSADRYLSFTYPQPGAVTKTFAKGGYVYLPKIGLVRMRAHRPFDRANVTQINVKRYADGWMAGIGVKVETAEASQTMETAVGIDVGLRTFPALSDETKVNSPRHLRKAEKRLRRAQRRLSRKQRGSRNRQKAKRKVARIHQKVARQRKDFLHKQSHRIVRSHDLIAVEQLKVKNMIRNRRLSKSISDAGWRKFITYLSYKAERQGKRFVQVPAHGTSQTCVCGANVPKTLATRLHECKRCGLVQDRDIVSAKVILQRALEIAA

SEQ ID NO: 18116 - protein, 392 aa, Sporolactobacillus sp.
MVTKGLKLRIYPNKQQRQQLAQNFGCTRFVWNQMLAMLNERQENNPKSSFLNAYALNNLLPLLKKEHPFLKEAESTSLQVTNQHLIAAFHAFFRKEKGHPKFKTKHAFKQSYTSKFVHGNIQPVGDHGIRLPKLGIRLPKLGILRFKAGQRIPETIKQVTLSRTPTGKYFAVLIVEGENQAFPKTSKTVGYDLGVKDLLVGSAEGLRWPTTRFDHGLACKLRLWQRKLARRQRLAKKAIAWDHHQKLPVPRTLADFKNVAKARLQVALIHEKIANQRADKLHKLTAQLVKTYDRIAMENLKTKNLLRNHTLARAIANQAWGELRRQLTYKCAWYSKELVLVNPYKTSQLCSTCGYDDGKKALAIREWTCPQCGTHHDRDVNAAKNIEHLAFG

SEQ ID NO: 18117 - protein, 405 aa, unknown
  TnpB Polypeptide
MEIQRTAVVKLSVPDERRDDLKRTMNTFRAAAQRFADRGWEGDDNGYVITSRSRLQPHVYDDIREETGLHSDLTVAAVNHAADALTGCVDKMKEGERTSKPVFTSNTTVYNTSAISYFDGYCSLAAYGSGRVHAEYVYPDDSLQAEYMESDGWTKQGAKLRYDRETDTYYLHVSVKQEREDSSEETESRAVLGVDRNVDGYLAVTSTGAFIGNADLLNHKRREYERRRARLQQQGTRSAHLTIQSIGDTFANWSEDFLHRASKELVKEAVSQNCTTIVFEDLENIREGISNASKFQQWAFNELKRQVMYKANAEGLTVETVHPAYTSQRCSETGCGFTHEDNRDGDVFICQKCGKELHSDYNAARNIAHKFIQNRRKSGSGGATNHLALKSGTVNGNGDYSPSTV

SEQ ID NO: 18118 - protein, 440 aa, unknown
  TnpB Polypeptide
VKKRYAYRAYPTPGQQKSAARLFGCCRVVFNDFIAARELAHSNNLPFESATTLQARLLTQAKRTPERAWLARVSSVALQQAVRDAERAYRNFFDSLSGKRKGPKVGRPRFKKRRGRQSARFTAAAAFTVRQTTHGVGKVFLPKIGWVRFVLSRPLPADPSSVTIMLNADGTYEVSFVVEVSVTATVVENPGRVAGIDLGLIDFASVVYSDGTREKITNPRHLKKAQKRLTRAQRALARKVGPDKRTRHQPSNNWRKQSRRVARVHADVAHVRTDFQRKLVSRLNHENQVVVVEQLKVKNMSKSARGTVSQPGKRVRQKAGLNRSILDAAWGQFLRILVEVLGEDRVVLVNPAGTSQQCSGCGWTPPKGTPRKGLSVREWDCPGCGARLDRDYNAALNIMVAAGLAETLNACGGGARPRPAEPPGTAVETGTHRNEMGLAA

SEQ ID NO: 18119 - protein, 625 aa, unknown
  TnpB Polypeptide
VITTHRHTGCGNAGKNQALLGLFNPYVAALRQLQQITLRELRAGKPLRKWRAMPGGPGFDTPLSARMLKSVQNKLAESTKAWLVLVADQVRTYITNSTLDGHQRTVLYRINANHAWWAKELVLPWRSDTDGELIVVAATTAAKADPDTIVWQPVDAADLALARVLARQAIRCAAGVPRFDRLDSIELDAVVAEAQPAATSTHFDWWVDSATLVRGHRVRIPLRNNPYFTRQYARDATVAGRLQLHRVRDQHGVPAGVDASIVVRRPDTPARAGGVEVGVDFGMRNALFATSDGQLLGARMLHTLAQWDVRLTAIAADRQRRGVSLKTDSEYTRLNRRIRDYVTNEIGRLLNQLAAREGEHRIRTLVVEKLDFRAQGMSRAMNRLITRTGRAVVKQRLAMLTPKHGITVVEVGSAWTSAQCSSCGYTHKTNRRGDTFRCRFCGRKLHADINAAKVIAQRRSLSNQGDHKLKTARNHTLQQLDTLHRQRWKMPTIGADSGVTGDQRPHTGAGLELPDCTPPAPPATPVSPAASSSPGTKHATETFVYYPEQVEAYWKAFDAAGGVLRDALDAQARTQLLLGQLSSDPGAGGQGGVGGHQCGDPRCGTGQGTPHRGGPGRGGNVPDSE

SEQ ID NO: 18120 - protein, 366 aa, unknown
  TnpB Polypeptide
MNKAFKFRIYPNESQKTLIHMTLGHNRFLWNKMLEDKQKYFELTKNIIHPTPAQYKDAYPFLKEVDSLSLANTQLNQEKAFKQFFNHKQDFPKFHSKKQDYGYTTNRVNNNIVLLKGYIKLPKLGEVKIKQHRSIPSDMTLKNVTVSKSSTGKYYVSILYEYQKEIKKKDVKESIGLDFSMTHFYIDNEGFKLDYPKDIQTDFNKLRVLQRSLSRRLKGSSNYHKKVLEIALLHERIRHKRDDFLHKQSNAITKRYDLVSVEGLNLKDMSIDNTYYAKQISRFGWTRFISFLKYKLETQGKTLMVMDEWYPSSKRCSCCGDIKTDLKLSERVYHCPNCELHLDRDHNAAININKEGFRKYKLAFQL

SEQ ID NO: 18121 - protein, 203 aa, Aneurinibacillus sp.
VVERLDKAYQAFFRRVKRGEKAGFPRFKGRNRYHSFTYPQSGFSLEGKYITLSKVGTIRIKLHRQVQGIIKTCTVLAKNGRYYVCLSCEEEPKIQATGGSVGIDLGVRHLAITSDGDFHDAPKYLRKSERQLKKLQRIVSRRKKGSNRRKKAVALLAKKHEYIANQRRNNAHRCPSCGFECDRDINAAKNILKRAVQQRQNVS

SEQ ID NO: 18122 - protein, 454 aa, Mycobacterium sp.
MSVMASTGGVLRRITDPVVAAGPAGVRIRTRIHLSAGEAAALAGIGSFLGSVYRTELAARVERGRLDHKAHAGWRAQRKQALTAVSSSRWAGAITRAVEDQYQLGMRALAAHVADLGSAITVLEQRCALRPGEQETIPDVGGGRSRRRRGYRSAGERFAKTRRLAILRERLAVAQEAWDAGRPSVTMGGKRLWRSRTHLVEAAMTEPQWRARWDAARMFVTADGESGKAGGNETIRVDAACRLRVKVPAALAQRYGTHLDVGAPVAFSHQGGKWAVRVAGRRAVRYDISYDSSRGRWYLDASWKQDIVVSPSIEQLRTGPVLGVDLNADHLAGCVLDGSGNPVGGPITIPVATAGLAASRRDGRIRAAITALLDVAAHAGCSAVVVESLDFADARAWPRDDGPRQAWERVSPHGGRNSYREIPGPPDRDGGAARCRGHRRGSGLHQHVGQPALD

SEQ ID NO: 18123 - protein, 259 aa, Cuniculiplasma sp.
MEGIEYRGESTIPSNIKQVVVTKDVNRYYASIQYESEEELPKGTGITGIDMGIRAFLTTSDGLQIESLNALRKNEKKLKREQRRLSRKRKGSKNRKKQIAKVQKLNQNIRDARKDFNHRVLTAIARHYGTVVIENLNIQGMQRNHHLAKSMIDQGWYQFKRMLQYKIEWRDAELIEIGRFDPSSKMCSKCGNIKHDLKLSDHKYHCNVCNLSIDRDLNAAINIRNMGSIKVGKGIPALTPVESATAAELSKGGLRVATL

SEQ ID NO: 18124 - protein, 413 aa, Aeromonas sp.
VLFGLRCRLYPNAEQRAFFARSFGCTRFVYNEALAHCQAEHAAGRKHPSAITLQSRLPAIKGAYPWLAAVDSQALKESCRDLDKAFAAFFRRAKAGKTPGFPRFKSKHGREQSFTCTQTLAADHEARRIKLPKCGWVSCRGLRPFAGKIKRITVRQSASGKYFASLLIEDGHAEPLPAPLPSHEAVIGVDMGCKTDGNRQQLATLSTGQVILMPAYLKVAQRRLARAQRKLARQSKGSNNRRKQRQRVARLHERVANQRRDFLHQTTHRLTRENQALAVEDLNVQGMMAAPAPKPDEQGGFLPNGRAAKRGLARSLTNVALGEFARQLRYKALWRGVALLECGRFEPSSKTCSGCGHQLDTLPLAVRAWTCPGCGAEHDRDVNAAINIKHFAIKAVGAGSPELTPPECGTAAR

SEQ ID NO: 18125 - protein, 403 aa, Halorussus sp.
VADTEYFRRTAVTGLSVGPAEAERLRGLIEEWKRGCQLAVNEAWGVCHTRSEVQQLAYDTLREETTLGSQHVVLATHRAAEAIKRAQDRDGSKPEFTSPSVTFDTRTMTVFDDRTVSLTTTDERVRCDLSLSADGGYQAQFLDDEQWEPAKSTLHYRDGEFVLHLGFRTPRPEVEPPTEGATVLGVDLGVENLAVTSTARFFSAGELNHRREQFEQVRASLSATGTRSASRTLKQAGYSVDQFVRGRLHEVANGIVDEAEQYDCQLVAFGELSEVVDILPEADPFHEWLFSQLLSLVEYRAAARDISVVQVNPEYTSQRCMECGFTHPENRNLDEGQFECLKCEASANDDYNAAKNIAFRCVRRGPLSSRGLGASACALRSGLISPNDGFTPYAELTDAPRSD

SEQ ID NO: 18126 - protein, 420 aa, Halorussus sp.
MKRTNIFNIVPRSDADSELLHRLLDASASLWNELTYERRQRFFDDESVWEAPNYYDQYKHVLGAPTAQQLKRKNDTAWKSFFAVLEENPEKANPPGYWGNEAEGRELRTYIRSDRYSVAWGKRSRLEISVGQKLKAEYDLGYHEQLRLEIAGRPKWEGKQGQLELYYDETTESYRAIQPVTVDSSQKEPQRGGAVAALDIGVNNLVACTVSNGEQYLYHGEKVFEEFRETTERIAYYSSKMSGRRRTSKRIDRLYRKRTNRRNHAQDALVRDLCTRLYENEVADVFVGDLSNVLSTHWSVRVNEKTHNFWAFRRFITRLESVCEEYGISVHEESEADTTRECPACGEKNRTTRNGDVFWCPCGHEGHADLDASKLFLVKQANIEVGPMARPVRFEWDNHDWRSTTDVPLSWTNPKEARTN

SEQ ID NO: 18127 - protein, 429 aa, Halorussus sp.
MEYTHRFRARPNEEVAAALTRHIDIHRQAYNHTRYEYENLPSDTDTIGSAYKHHKRLTEWKDRFPVFSEVHSKALQRTVTRFYDNLGNLSDRKAAGYNVGKLRWKPPREYRSMTYSQSGFELKNTSGQTATLWLTKIGDIPIRYHRDIPDEAVIKEVTVKHEYTGEWFVSFALEVDDADLPEKPPIDELEAGECVGVDLGILNYIHTSDGLSVGKLDVEAEYGHLRKAQRTLSRREQGSENWEEQRRRVASIKRRIRRKVLDFQHKLTTWLVTEYDAVFVEDLDVKPLLEDSQNARNKQDAAWRQFITLLQYKADLHGCHVKQVDPENTTKQCHECGVKTDKPLWVREHSCPSCGFLLERDWNAALNVLERGLRKLGLGQPEVQRLLETGAAVDATHRESVSASAVVEAGSPTERKGSPGLNEAAVTAE

SEQ ID NO: 18128 - protein, 427 aa, Halorussus sp.
VAEEYQRRTAITRLQASEEQSKLLEQTISDYTKACQLAGNKAWPDCTSKRRVQSVAYDSIRDTTGLGSQHAILASHQAATAVAACQSRLENGYAASKPSFTAPTIRYDSRTMTLFEDGTVSLSTIESRIRCSLVLPSEADGYQHRFLESDSWELTESTLTRRDGGWFLHLGFRGPRKDTEDSTVENGTVLGVDLGIENLAVTSTGRFGSGAELTHVREQYEQRRSNLQKTGTRSAHRTLSTMSRRERRFANDTLHCTSNELVEEAQSQQCGIIAFENLEGITDRLPGATTFHTWAFRRLREFVEYKAEEVGIRVVTVNPRNTSKQCSQVSCESVSAKNRPVQHRFECTECGYEVHADYNAAKNIGLRAVRDGHKSSSWTGVSQCALKSGAIAPSGEYFPHHGDKERLTDKPSQVDGSSERDSDRRGS

SEQ ID NO: 18129 - protein, 175 aa, Streptomyces sp.
VSPDPSPRFLRRAERKLKKAQQGLARKAKGSTNRRQAVARVARLHARVADARRDHHHKLSTALVQENQLIAVEDLAVSGLARTRLAKGVHDAGWAQFTGMLEYKAARYGRALVRVDRWFPSSQTCSVCMAVDGPKPLRVRTWTCGVCQTTHDRDINAARILLAAGRADKQNACGG

SEQ ID NO: 18130 - protein, 528 aa, unknown
  TnpB Polypeptide
MKLIKQLHYPLRFKLKHCLNTTEEQIKISEYLRKQLQHMQMQSNLYFQSKEYDVVIEKLQEKDNEYLKHTNLNKMGRELEILPFEKTFHQSYNFAEMFRNNILQVSFGYLQKLALQVALQQCIKNTKSTDTNALPKIEDILLEYENRFPLLTTPTSIILKKTLENRDKVVKPHCHKPTLPFYATDGHYTKITLKHEEENNYLFFRVSLPDRESVELKFKIPIGKRFHKDKIKKICKPVVYINERNELIFNFAVEVVVKDTNEKPNKQNNVLGVDLGKVEPFVASLTTSSDSDCNSNLHFPFFANKKINQLTKQIDELYDLFEKIVAKEEVCIKCNQKRKADVLANESKLILAKIQRLKQEQATQISVNINQIAEKYNAIIAFENLAWLEHKGGKWNHSEIQSKTEYLSTNKIVKVSAAYTSQNCSYCFKHNNTKNKINYDSKTRQTKCKHCKKILDRDVNASRNIAYLGLISLKNKSNSKNKSCIQNKNPDLESIKNAINGNRTLSHQPVKSTENVNKTTTDKFVQFE

SEQ ID NO: 18131 - protein, 537 aa, unknown
  TnpB Polypeptide
MIFFLQERDLIDQANIQPNCFTKDELSHRFRGHFTKKLAELVDKNYLDWELNNKAKYFRMFSLHLRQDFKSLDYKQKITNVLAKYNFDISNKENNDKIREELKELDLYPTKQEINNICRCHNNKLNLQIDNNDENVSSKLHSIPLDFTLGQDKQTIIQPDLKQPVFHINFNGNWIWLNFTEKLNRPALKYFKNKIDSDKFVRFAKPKFVFNYDENCWFVIITIESEVKVEIKEELENDWLVYRLAGVDIGQVKPYSCVVMSHMLPKNLTKEVVALEEAAALEKFSEAISKNTVSLLRSCDITCKNETIDVNNKLNRVKSHLSDVYRKLNVYSGIIANNKNSQFTQQILEKRELLIIQKRGLRRKRKELQKRKSYLAVRDLLKQLNFYNVKQVNIERLNWVEHTGGSWDFSQQQEILERKAIEFGINVTKVYAANTSKENPFSPIDSKQKKILGVINSKTRLVRFKKKWRQGSYEIDRDILGAINIGLRVKLKMKIKCEREAESETKIKDESKFVNLKMRLDFNENKKILNKILIKTY

SEQ ID NO: 18132 - protein, 370 aa, unknown
  TnpB Polypeptide
MKRTISLKLVLSEEQKKALLETQVDFSTACNEIVPFVVENRCWNRVVLHHMCYYKVRDSLSSLGSQMACNAIKKVCSAYKALKIKKSQDVPTITFKDTGSVHYDKRTYSLKGDTLSLFTVTGRIKCQFTTGDFQREYLQSGVAKEAELVRKGKRWFFNLVLDLPDTDLRKEGNVFAVDVGENNLATTSNGTIHGGGKLRHERDKFLARRAKLQSNGSRSAKRCSKRISGRERIHVKETNHIVSKQIVAEALDSNAKSIALEDLTNIRKRIKGNRRMRSRLHRWSWYELQQFVEYKARAKGISVVFVNPAYSSQICSKCDCLGSRHKHLFKCSNCESYQHSDRNAAINLLKLGESVVSSMASVNMPMVAVS

SEQ ID NO: 18133 - protein, 617 aa, unknown
  TnpB Polypeptide
MKKKKLKEKFQEFRNNEKSAYKTFKIPIKSILVNRETVQPLVNNLVFEMNDLMIHTYQFIRLYVLDKYIKNLPLPEMNESFILYCIKCLGTRDNRGKKGKDTELLEILEIFYKTEYQPLLNHEKTDLKNTTYLLPYLATQIHTSLHNNLQEHFIQHFLRFINKTTNEITEDKATLFSFKKNLMDLAETDTMFSNWKKTHLPHILPTEIKKSIHYDVKVRPFEYLKGMLYMNSILEALDNKLFQPLPLRNNIIPKHIIIDTASLVSLFCPENSKKGELLKKIKENQHDIWNNFLNLNHKIFKNTHYQFHHQIQTDGISCCLLFIRKDLKDKKWGSRVPVLQEQEFHTIEDLSKEQLDSLKDRIIVGCDPGKRSLVYMMDKNGNKLQYTAPQRKRESKAKTNQRILLEERKQNGIIEKETQLSFQNRKSVDYKKFKLYLVEKDKLNKETTEFYKREVWRKMKFRQYSYGKKSIDTFLNKIKKTFGENILIGYGNWSRSSQMKHFMPTINKGLRKLIHKKYYTITINECNTSKKCCECNNDLAYYKNNKGNNQFRLLVCSNCVRQEVKQTVFRTRDANSAINIMKLTQSWIENQERPLCFQISSFTSSNKQKEEEKARPS

SEQ ID NO: 18134 - protein, 410 aa, unknown
  TnpB Polypeptide
MMQLTQQVRIEPTREQEKVLWDLSEKCRLIYNFALKERKDGHKYGHKIGYVKQQNDLPAIKKKYPEYNWIYSKVLQYALRNLDADYRSFFALKKNGDKDAQLPRYKGRKYFTTMVYNQSGFGIKNGRIELSHKHPSGTRLSLKMMKPYNFSRIYQISIYKKDDRFFASIIYEKLNKEYADNGLYQAFDLGSMKHTAVNSRGRFVEFINRRPDKYWEKKLSNIQSRRDHCKKYSRKWKMLNRNYNRMRQKSANQLKDFQHKLSRKIINNTKANTIIVGKLEVKKLSRKNKYQKGLHKSMHNTGNISRFVRFLTYKGERAGKRVIENDERGTTRTCCMCGNKQNMPLYKRVYSCDCGNHIDRDRNSAVNIMSDFLSQNALWTGYRQFADNLRQTGLDISSRYTQEAPSERVV

SEQ ID NO: 18135 - protein, 376 aa, unknown
  TnpB Polypeptide
VRRSYTYRAYPTKDQAAAMEMMVETHRHLYNRALAERKDAWEQAQRGVSYGDQSATLKAQRVVNPYLALTNFSSCQATLRRLDTAFQAFFRRVKAGEKPGYPRFRGRGRYDTVVFPSYGDGCKLRDSRAYFQHIGAVKLKLHRPLEGRIKTMAFKHEADGWYVVCSCDLGDVAVEPSANPVVGIDLGLKAFLTTSEGERVPPPKFYRAAHRKLRRAQRHLSRCQKGSQRRQKAKARVARLHQHIGNQRRDWHHKTALGLVRQYGTIARETLNIQGIARTRLAKSTLDAGWRQFLNILESKAASAGVRVVGVAARNTTQACSDCGCLPAVPLTLRDRVYHCASCGYTADRDLNAALNIRNRLGWSRQTLTGAIAPVV

SEQ ID NO: 18136 - protein, 360 aa, Deinococcus sp.
MARKDPDLNWVPIKATSYSTIDQLFRQNLLKPSNATLSGPKGICTLQLSSDADLQVTSDQSITIAGQELIADVYRQPTHAYRALVEASPAFRQYPDLEHLYLLVRQKPYWNQQEVLEELARLTRAGRQPLREPQLVVTPTTYIATWQPAETYLRQLLNGHWFLGLTYRVTYRPAQQALHKVKVGLDLGMAPRTAVYTSTGESKLFEPTDIVPASYLVESGRLPQNQKELLTQLLYTSGREDAEKVVAWLNYYANRVTAEKLTHNRMNDRFIFVGRDHAIHDHHFSALSQYLNASRMDFLRVDPARTSQECGHCLEKTGKVVRGHRWRQIFTCPVCGVTRNAHENAAHMVLLRGEQRRRAG

SEQ ID NO: 18137 - protein, 370 aa, unknown
  TnpB Polypeptide
MRKAHKFKLQNQSNTIKIGNMLDDMWEIHVHIMLLQRRYYRMFGKNLSASRLNAHVAKLKKRTKPHWADLPSQVVQDVVLRYGKAQDAFFENIKDRKAGLTTRKVGRPKIKPRHKYCSMTFTQAGYELKDNRIKINCIETWFSFHKHREIKGNIKTITIKRDKCGDYWICFSCENVDASEPKPKTGKSAGFDYGNKTFLTSDEGDKIQSPQFFKQSLRTLRSLSKSLSRKVKGSNNYYRACRALARQHRTVARQRADWQWKLATQLCSEYDILIFETLNLDGMKRLWGRKVSDHAFYQFIQILEQKCAKHGKKLKRINQWTATTKPCSDCGYHNKVLSLSDRQWTCPECGSYHDRDVNAAINIKRAGLAA

SEQ ID NO: 18138 - protein, 585 aa, unknown
  TnpB Polypeptide
VEAKLKRKRPDVTARRATNAGTTVSVVKTTLNSFCKEEGKALPWESVLQDMNKAVLEAYVLANIHVVRLCQANLPIEPLNNTFFYRCLSAVVSDKQKFRDCEQLKQSAVLYNEWRATNVDRAKNKYISSGWQQNASLQMARNTSNAVNFNFYQRFHKHLKRKYDFDGRHVYGKMKRILDPEYDGDDPVVLEWRARIPRREFDGKLDSRPHLLLPLTYLFLFDIEERNRENKAAPDYVQIRSFSLLPYKRGFECSHFKMCKAGLWALLRRAEIKVPHQGTGWNEVADEWWRELFHVDKFETVNRKFAGEIVTDGKSVSISMRKPKREPVIRELNAKDYDVMWGLDPGRTDLFVASNQNGEKVSCSAREFYEDARYKKRNQKIRVWQENRPDVLEATRNMPTKKTSSLERLKEYVEFMIPRMDLLLKFAMVKPFRKLKLRSYIFAKKKLRELCLKLTAQAGRRTLVGFGDWSNQDIGGLIKKCPAGPVKPFERMLRQYCRVEPIDEFRTSKLHERCHSPLVHQYSKRMCRDGVERTLKVHGVLHCKNNGCHGMTVNRDENASKNMLLLLQRKIQGEERPSEFCRART

SEQ ID NO: 18139 - protein, 489 aa, Nocardia sp.
VTRFEIPQGWVVQAYRFALDPTPGQKQALASHAGGGRFAHNHMLALVKAVMDQRAAERSYGITDAELTPSLGWSLPALRKTWNTRKGVHAPWWGENSKEAYNTGLDGLARGLDAWAKSRKGERAGKTVGFPRFKTARARRSVRFTTGTIRVEPDRHHVTLPRVGTIRSHESTRKLARRIEAGTARILSATVSQDSSTRWYCSFQTLVAADAKTRPAHTRRSPHPVVGVDVGVKADSLLVVATASGAEVTRVPAPKSLTTAQTRLRVLQRKAARRRGPYDQSTRIRQHPSKRWRRTQARIGKTHARAANVRRNVLHKATTELARQHQVIVVETLNASGMRSKGGAYKRGLNRALSDAALAEIRHMLSYKTCWYGSTLVAADRYYPSSKLCSGCGGRKPNLTLAERTYQCERCGLSIDRDRNAAVNLARLGETHKLGEQSPADSGSVAGRGATRESEPARAGQAGGCETSTRHNPHRVDQTGTVVSQGTAA

SEQ ID NO: 18140 - protein, 508 aa, Allochromatium sp.
MSKRCQTPSFVLEVPLVVTPDDERVLLARLEAGRRLYNAVLGDALKRLAAMRAEASWADACALPKGTSARTAAFRACRERHGFSENALQACATAHKNAAGFQDRLGAHETQTIATRVWKAVEAYALGRRGRPRFKGARRPLRSIEGKSAGSGLRWNRDIGVLIWGKRYLPAKLPTAAQDAYLHAGLQARTKYARLVWRMVGGRRRWYAQLIQEGTPPVKAHHLRREGRVGLDVGPSTVAIVAENAVALQPLAPSVVQPWAEIRRLQRAQDRSRRAINPEHYDAQGRVKPGPKRWVCSGRYQRRAARIADLQRRLAAARKRDHGELANRILAQGATIQTETLSYRAFQRCFGRSVQVRAPGAFVATLTRKAESAGGRVVLLDTRRLCLSQYDHVTGSCTKKPLSQRWHALGGGPVLVQRDAYSAFLARAVEDGAHNPSRLTESWAAAEPLLRRAGLCTEPSASGRPPACPTVLLPSEPIARRRGLASGHGQAPVGPGDPVGFGPRTPRL

SEQ ID NO: 18141 - protein, 336 aa, unknown
  TnpB Polypeptide
MPDTVKADLPDGSNYVLESLKHEIKYCELERLWFKSGWRYYANVYFDGDAPKKLQPGRGTMGIDEGPSTAAAVSEDLAILEELAPKCKDYNKQIARLQRQIDASTRKTNPEKFNEDGTVKKKSEYKGKRWTFSKTCLRKKAIVRELYRRKSEYSTHMHGNIVNRMVKNASMFITEPMDFKALAKRAKETRRQNKATIIKKADGTEQAVYKYKRKKRFGKSVTDRSPAELMIILQRKCNQYELFYYEVDKWEYRASQYDHTTNTYIKTQLSQRFKTVGGNNVQRDLYSAFLLACRWHSKKPSRKKCRELFPHFVKMQNLLIKQMKENGISRPACFGF

SEQ ID NO: 18142 - protein, 452 aa, unknown
  TnpB Polypeptide
MRNVSEEERLAKNAKIREHGKETREKHSTWKLTIVECKLNEKSFSKLQKEHLQMQFVEAKWLWNDWIGKTDKQSQNYDEQFDTTKEKWQYRPLANQKVQVMTKDKIFEERNCSHIGTQIAQDVINTLRSNIKTISTLKKKGLQTPGGINYTSEVTSLNLRQYGVTYSFPTQKKIKIQGIKKPFRIRGLEQKMYKIPVWKEFKNGNIDFANAKLVHKPTGYFVQITAFIKPDLLKEKLKIKKALGIDFGCSCSFITSEGEHIDVKIEESEHLKMLQKKLARQQKGSNSRTKTIQLIRKEYQKQTNVKNDKAKQTVAKFLRYETVVIQDEQLQNWQKSGHGKAVQHSILGRVKSKLTQSLNVVVLNKTAPTTKLCTKCGCYHDEIKVWHRVFKCDCGVEMERDLHAAKNMLWFYKNNIGVERTKFKRVEIEALVKAALNSSEPTSSKKLENICL

SEQ ID NO: 18143 - protein, 561 aa, unknown
  TnpB Polypeptide
MRRVAAPLVVAPPTGARIRTRLRPSEWDEAVVQAVGEQLGRLAGQDLRLRCEIGPGPDQRAIRKQAMTAACSSRWAGAITRTSNDQWERGFKNLLDARVGLQRAARKLRARLAVPAGARQGRTRGYQSRAERFQKQRRLRHVQARLAEVQERILTGRVSVCRGGRRLAKLRHTLDRDDTALTVTAWRAWWEAERLFLTADGEADKLWGNQTIRVHPDQGWLEIRLPTPLAHLSNTSGRAPTYRLSCPVAFTHRRDEWAAQAASGAVRYDISLDPAKGGGTGKGRWHLDASWRLPARPVPALDELRQQRSLGVDLNADHLAGWILNPAGNPLGQPHTILLDLDGQPASTRDGRLRAAVAELLRLANAHGCRSLTVENLDFADARHTGRETLGRGRRGKAFRRVVAGIPTRAFRDLLVGMAANAGLWIIAVDPSWTSVWGGRYWQQPLNSSTTRQVTVSRHHAAALVIGRRGLGHRARRRGWRGLSPPEDGQGRAADSAGRPTTLDAAASAPRVVPEPTAQGPGGPGGQRAGPHAYKTRPPESDTASDQAAQDRSGPPISANR

SEQ ID NO: 18144 - protein, 231 aa, Cyanobacteria sp.
LRAKDERVTEPLALDQIKSAIGIDVGLKEFLTTSEGKTIPIQQTYRQAQNHLARQQRRLKNKQKGSINYQKQQNKIAKIHQRIQRQRKDFQYKIANWLTRCYDLIAIEDLNIKGLSRTQLAKSILDAAWGQFIMILEAVAVKCGVRVVKVNPHGTSQDCSSCHAKVLKTLSVRFHECPKCGLIMDRDENAARNILHRALEEIQAVGRIASAGGGLDNSQPAKQETLKGEWV

SEQ ID NO: 18145 - protein, 377 aa, Kitasatospora sp.
LEVSAYQADALAATLRACNRAANHVSRIAFDSGEKRRNGLQPKVYRHIKDEFDLSAQPACRVVKKVCDAYATLNATVKAGRLGPSGDKRRNRAESKPISFREYAAQAFDDRCLSWNTDQRTVSIWTVSGRLKGIRFTCSDGAAKVLAEHRRGESDLVHRDGRWYLFATCDVPAPAAYLPSDWLGVDLGIVNIATTSDGTVLSGRRLERYRKRMVHLRAKLQMKKTKSAKRRLKALRRREQRFATDTNHSISKTIVTTAERTSRGIALEDLTGIRERVKAKHDQRYRLHSWAFAQLGAFVEYKAKRAGVPVVRVNPAHTSRQCSACWHTHRHNRVNQAAFACRACGTTLHADVNGSRNIRHRAADAWTRGAVNRPTSA

SEQ ID NO: 18146 - protein, 423 aa, unknown
  TnpB Polypeptide
MADKVVTRTYTASIRNQSRVQNGLDSLGFAASKLWNVGRWVCDRIWSEIGHIPGHNELTSYLKRHERYADLHSQSSQRVLQELAEAFNGWYGKRHNGNTRANPPGYRKHGNDHPRSTITFKAAGFKLDTKYERVRLSKGSNLKDDWSDFILCKYQTRPNVDLSAVESVQQVRAVWTGAEWELHFVCKVEVEVAESPGEKTVGVDLGINTFAALAYDDGHSELYPLNCLKQDDYYFSKRIARCDDSDSEQATRLNQKKSARRTHYFHTLSKHIVQQCVDEGAGTIVVGDLSGIREDEEDGESKHWGTHGNLDLHSWAFDRFIDLLEYKAEIEGITVKRVSERDTSKTCSCCGRKRDANRVERGLYMCDECETVANADVNGAENIRQKVSPSPSEDRSNGWLAQPSTFLFDKETGVFAPQEHVTS

SEQ ID NO: 18147 - protein, 372 aa, Clostridioides sp.
VIAVEKAYKFRMYPNKKQQELINKTFGCCRFVYNKYLAKRIEVYKNDKETFTYKQCSSDLTNLKKELKWLKEPDKFSLQNALRDLDNAYKKFFKEKAGFPKFKSKKINRFSYKTNFTNGNIVYCGQHIKLPKLGMVKIRDKQVPKGRILNATISKEPSGRYYVSLCCTDVDIEVFENTNNHIGLDLGIKEFCISSCGEFIENPKYLKKSLNKLAKLQRELSRKTIGSLNRNKARLKVARLQEHIANQRKDFLQKLSTKLIKENDIICIEDLQVKNMIRNRKLSRLISDVSWSEFIRQLEYKANWHGRQIVKVGKFFASSQICNKCGYKNEEVKNLNIREWICPSCNETHDRDINASINILKEGLRLITIQNK

SEQ ID NO: 18148 - protein, 194 aa, unknown
  TnpB Polypeptide
VNKAFKIRIYPNQEQIILINKTFSQVRYIYNFILNLKEKMYTNFNISLNFTYISKILTEIKRHKPWLKEVDKCSLQNAVKDLDMAYQKFFNGAGYPKFRSKKRGHNSYRTNGYLFLDKDTKRIKIPKVGWIKFRDKNNFDNLKKIYNITISKTSSGKYYASISAEIDIKAFSKTKKSCGIDLGIKDFCILNNPE

SEQ ID NO: 18149 - protein, 418 aa, unknown
  TnpB Polypeptide
MYLTIKQQVKHLKKEEYNALRELCKIAKNLTNQAIYNVRQHYFQEKQYLRYESNYHEMKHLENYKLLNSNMAQQTLKDVDQMFKSFFALIKLAKQGKYNFRHVKLPNYLPKNSYSNLIIAQFKIKDNGVLTIPYSNTFKKKHEVTKIQIKVPQALENKKIKEIRIIPKFSARFFEIYYTYEIQEKEIKLNTNNALAVDLGVNNLCTCVTNTGKSFIIDGRKLKSINQFFNKYNAKLQSIKDKQNIKRLTMQQYLIFNKRKNRVNDYINKTCRYIINYCLANDIGTLVIGYNQSFQNKTNLGKRNNQIFTQLPFGKIREKLEYLCKRYNINYILQEESYTSKASFFDNDELPIYNMDNPQEYEFSGKRVKRGLYRTKSGYRFNADCNGALNILRKSKAVDLTILCRRGELDTPKRIRIS

SEQ ID NO: 18150 - protein, 367 aa, unknown
  TnpB Polypeptide
LHKSFKVRIYPNKEQQILLEKTFGANRFIYNYFLNLKSKLYEFYKINLSYNNSSKALTELKKQKKWLKQVDSVSLVQTLRDLDTAYQNFFTGRSKYPSFKRKQDKNSYRTNKNIKINNRYITIPKVGMLRYRDKYKLEECNISKIYNITISKTSSGNYYASISAEVDIIAFEKTNRSCGIDLGLKDFLIFDTGEKINNPRILKSLEKKYKKLAKAVSRKVKGSNNREKAKIKLIKFHEKVVNIRKNFLHKLSTRLIKEYDIICIEDLCFKAFMKTDNAKSYQDVAQSEFVRQLEYKVNWYGKIISKIDTFYPSSQLCSECGYKNVALKDTSIRKYDCPECGTHHDRDINAAINILREGLRILEENNI

SEQ ID NO: 18151 - protein, 408 aa, Nostoc sp.
MIIYELKVKGKDKQYRAIDEAIRTSQFIQNKCLRYWMDNKNVGKYDLSKYCAILAAEFPFADQLNSMARQSAAERSWSAISRFYNNCKKKINGKKGFPKFKKNCRSVEYKTSGWKLSKTRKAISFSDKKGIGTLNLKGTYDLNYYDIKQIKRVRLVRRADGYYAQFVLDVDVKVKTQPTNQVVGIDLGLKYFIADSRGNVEPSPQFYRKSEKQLNRANRKKSKKFNQAKNKAKLRQSNNYYKARNRYARKHLRVSRQRKEYCKRLAYSVIQSNDLVAYEDLNVKGLVKNRHLAKSISDAGWSTFRSWVEYFGHKYGKVTVAVPPNNTSQNCSNCGKKVNKSLSTRTHICTHCGYVEDRDVNASINILNLGLSTVGHTGNYAWGDLPSWGIGVNQLSNGESLNQESLSL

SEQ ID NO: 18152 - protein, 225 aa, Nostoc sp.
MKLGFYPVLGKSDFVRSNVTSKGEVVDNPKYYRTHHRKLRKAHKKLSRSVKGSSNRVKAKTKLARTYERITNLRDDFLHKLSTRLIKENSIIFIEDLRVANMVKNHKLAMSIYDASWSKFVAMLEYKAKWHDRIVQKVSTFYPSSQTCNHCGFINPLVKDLKLREWSCPSCNNYNLRDTNAALNILAEGLRILTAAVGAPNALNACRELVSPGLLQAEIVEAGIA

SEQ ID NO: 18153 - protein, 376 aa, Rhizobium sp.
LNDIAQARELTALRAEFDWIAAVHVTPQQGPARSGQGLCQRLGGARRISLAPQEGRERRLPLSGAGDRGQAPERQVVRRAPSQDRLGEVPRHAAPAWQDPECDVSLAANGWHIAFACEIDHAVAANDLPAVGIDRGVANTLTLSTGEHWWMPAGLAEIERRKRRAQRVLARRKRGSRRHAKARRRVAALQARAARIRQDWRHKASLDIARRFATVVLEDLATRNMTRSARKTVDAPGTHVCQKAGLNRAILAQGWHGFETVLAYKLEERGGYLCKVDPRHTSQSCSACGAVDRQSREGQASFRCCQCGLRAHADHNAAINILRRNTASMIVEEGQPLSVEAITIGGASRHLGNPRLQAGEDVNAPELPGGLPAWRG

SEQ ID NO: 18154 - protein, 366 aa, unknown
  TnpB Polypeptide
MKQNKAYKFRIYPNEEQKILFAKTFGCTRFIYNKMLSDKIDYYKQTKQKLNNTPAQYKIEFEWLKEVDSLALANAQMNLQKAFTNFFTNTKSGFPKFKCKHKNKKSYTTNNQRNTITLENGFLKLPKLVDLVKVKQHKQIPKDYKIKSVTISQTPSEKYYASILCEYDNQIQTIEPKTFLGLDFSMKELYVASDETSADYPRYFRKSQEKLAREQRKLSRCVIGSKNRAKQRLKVAKLHEKVSNQRKDFLHKLSRQIANAYDCICIEDLDMKAMSQALNFGKSVADNGWGIFTTFLKYKLENLGKQLIKIDRWFPSSKTCSNCNHIKEDLSLNDRIYHCDCCGITINRDYNASINIRNQGIKLVIS

SEQ ID NO: 18155 - protein, 526 aa, unknown
  TnpB Polypeptide
MHGRPRSSDIVECMPRGLFNARYISESSRTTRAPSTRITDASGSTRVPSSVTSCPSTSTRPSRIIFSASRRDAIPACDKTFCRRTPWGSPLSTITVSPWVGTPAFLAARDTDPDLGAPATPSGVGGGGYLAGVSRFRLLPTPAQQVVLVEHCRHARFVWNLAVEQQQWWQPGRHAPGYNEQCAQLTQIRAEYDWLAAGSHTVQQQALRDFAQAMQNFFAGTHRRPSWRKAGVHEGFRQVALKTRHIGKINRSYARIWVPKVGWVRFRSTRAVPQGVKSYRISRDRAGRWHIAFAHIPDPIPGPGDGSVVGVDRGVAVSAALSTGEMLHAPSLTPGERIRLRRLQQRLARAKHGSNRRRRTKLAIARIKAREADRRRDWVEKTTTDLARQFDTIRMEKLDVRAMTRSARGTLAQPGIQVAQKRGLNRAIGRQGWGQLVARLNHKALGRIELVPAAYTSQRCSVCGHIAPENRKSQAVFACVACKTGPCNADVNAARNIAAGRAVPAQGDLAAGRSVNCEPQLSSPAA

SEQ ID NO: 18156 - protein, 309 aa, Bacillus sp.
  misc_feature (195)..(198): Xaa can be any naturally occurring amino acid
MTKQNKAYKFRLYPTEDQAHLMRKTFGCVRFVYNRMLAERKEAYKKHKDDKDQLKKQKLPTPAKYKAEFEWLKEVDSLALANAQLNLQTAYKNFFRGQNDFPTFKSKKDRKSYTTNVVNGNIMLLNGHIKLPKLKMVRIKQHREIPQGHIIKSCTISMTPTGKYYVSILTEYEKEIVHKEVEIVVGFVFAMDHLXXXXWDSAKHLEGGAIENPNMKGISQALHFGKSVADNAWGMFTSFLAYKLNEQGKQLVKIDKWFPSTKTCSSCGNVKNMSLSERVYSCICGVNLDRDYNAAINIKNEAIRLLALA

SEQ ID NO: 18157 - protein, 411 aa, unknown
  TnpB Polypeptide
MKVQRAYRTELRLNGEQRRRCLRSAGTARFAYNWGLRRKIDDYRETGRSPDAMRLHRLLNEQKKTEFPWMYEVSKCCPQEALRDLDRAFLNFFRRVKKGGKPGFPRFKSRKRGIGGFRLTGSIRLEENAIHLPRLGRLRLKERGYLPAGKHVLSATVSERAGRWFVSALVEEEIDPPAHYGGAVGIDVGLEKLAVLSDGSVYKNPRALEGALVRLRRLGKSVSRKCEGSNNRRKAILRLSRQHYRVACIRRDAIHKATTAITKQYGLIGIESLNVRGMIRARHLSRSLSDAGLSEFRRQIKYKALWRGGRVIEADRFFPSSKTCSRCRTIKKDLSLGERTFRCGACGLVLDRDLNAAINLKDTAVSSTVEACGDASGGGIPVVRESTSHASRKHEAEEGGYCPRAIFVYTL

SEQ ID NO: 18158 - protein, 435 aa, unknown
  TnpB Polypeptide
MLEVHRTYVASIRNHSQVADSLDRHGWSASKLWNVANHYAHNQWEDTGEIPDHKELKHELKDHPKYNGLHSQSSQRVLEELAESFNSWYSSDDPRDNSPGYRKQNYYDDEGRRVHEEHPRSTVTWKQKGFRHDLKHNRVRLSKGANHKEHPRAREYILVEYEFRPDVEVENIQQVRAVYDDSREEWELHLVCQHERETPDLPGHETAGIDLGISNFAAVAYSTEEADLYPGNRLKQDGYYFPKEIAKCDDSGGERATRLHRKWSERRAHFFHALANHIVQRCVEKGMGRINVGDLSDIREDEDNEAKNWGRHGNLDLHGWAFDRFTSILTYKAKEQGIEVEKVDEKDTSKTCSVCGWEDDSQRVERGLYVCEACDAAFNADVNGAENIRLGINNKSNSKSPAGDRSTGWLAQPAVHLYDLSHGFQPRNEVVDCKP

SEQ ID NO: 18159 - protein, 410 aa, Aliterella sp.
MLVFEAKLRGTDGQYRALDEALRTARFVRNSCLKYWMENRGIGRYDLNKYCKVLADNSDFPWVKKLNSMARQSSAERAWSAIARFFDNCKKQSHGKKGYPRFKKHQTHASVEYKTSGWRLSDDRREITLTDGFEAGTFKLWGTRDLHYYQVEQIKRVRVVRRADGYYAQFCLDVVRQEKREPTLKTIGLDVGLTHFYTDSNGETIANPRHLRKSEKALKRLSKRMSKTKKGSNNRVKFRNKLARKHLKVSRQRKDFAVKTARCVVQSADLVAYEDLKVRNMVRNRLLAKSISDAAWTQFRSWVEYFGKVFGVVTVAVSPHYTSQDCSGCGKQVKKALSVRTHVCHHCGHTQDRDWNAARNILEKALRTAGHAGAYASGETDQYLGEATPSSKSTRGKRKPKERSLESPSL

SEQ ID NO: 18160 - protein, 143 aa, unknown
  TnpB Polypeptide
IGVDIGVKRLATLSNGRRYEGPKPLKKRQSKLNRLQRQLSRKQKGSMNRNKARRKVAKMHYRITCIREDALHKLTTYLTTEFGSIATEELNVKGMISNRRLAGSITDMGLHEFRRQIGYKAKLRGNHVEVADRWFPSSKKCSG

SEQ ID NO: 18161 - protein, 141 aa, unknown
  TnpB Polypeptide
VISKALVAKAAASCKELALEDLTGIRGANVRHEQRAEHHSWSFYQLRTFVTYKAAAAGVHVVLVDPAYTSQACSGCGHCERANRRSQGFFLCRSCGVTMNADWNGARNIAYRAAVNQHMVPDALPCKPWVWKNHGAERRQG

SEQ ID NO: 18162 - protein, 530 aa, Chloroflexi sp.
LTSEQAFHILRFMSNRRSSSPVYTVEFGLQVAPAERRVLVSRFEAARHAYNAALSECHKRRRLLVESRSYTAAVAMRRGPARTKCLRKLQRRYGLTEYEMDRWSTKKLSGTWIANHLHAQARRSLATRALTAVLKHHYGVTGRPRYKGPNQLDCIAGEDPDAGIRVRGARLEWRPLSLRLLCRNGGASADQLTSEIRQIRVLRRRIRGKTRFFAQLIVAGIPPNTQLPGTQLIGIDPGLSYMAISTTTSGTIVDISDTRDRRVKIAGLSRAIQRKRKAARVGMSSGLERRPSKRQRKLQTQLADLHRRLVSERRSRHGRIANALLTLGIRLRIERNSFRAFQRRYGRTMGAAAPSSFIRHLVRKAENAGGQVVFLPASLRLSQTCHSCGLVLRKDLGTRLHECACGIGPVQRDIYSAWLAIMTKPDPKGSTWSLDADQARRAWSGAGLRLPAASRVLSVERFVDWTRAEVASGDDPSFASPSPGTERLAGAARAMHDEARNDVGARPRVRESRAGRRQMRRETARPLVTA

SEQ ID NO: 18163 - protein, 368 aa, Nonomuraea sp.
VAQIVKRAYKYRFYPTPGQAEELARTFGCVRLVYNKALEERTRAYTMEGRRVSYVESSAALTEWKRSGDYDFLFEVSSVPLQQALRHLQAAFANFFAKRARYPTFKSRKKARASAEYTRSAFRWRDGTLTLAKMDTPLDIVWSRPLPQTAEPSTVTVSRDAAGRWFVSILAEEKITPLAPAEQSVGVDAGITALAALSTGEKIVNPRPERRDRRRLAKAQRALARKAKGSTNRAKARLTVARVHARITDRRRDHLHKVTTRLVRENQVIAVEDLTVRNMVKNHSLARAVSDASWRELRSMLEYKAAWYGRALVAVDRWFPSSRLCSRCGTLQEEMPLNVREWTCACGAVHDRDVNAAKNVLAAGLAES

SEQ ID NO: 18164 - protein, 388 aa, Lactobacillus sp.
MSTITKGIKLRLYPNRQQQVQLWQMFGNSRFVWNQMLNMAKQRYQNNPSSQFIGEYGMNYLLKPLKQEYPFLKVSDSTSYLVVTHNLSLAFKQLFKHQGGCPKFKAKSYAKQSYTGRSKCRIIAKRRMKLPKLGEIRTSKTGYLQNCRIKQYTLSYDATGKYYLSLQVEAPQPNPLPQTGQAVGLDVGIADLVISSDGTKYATFNAKWYEKQAIAWQSRFNRRKHRATVRVRQYNHEHKGLPEMDISDYQNWQRAKQRKARCQAKIADKRADYLHKLTTQLVKQYDVIVIEDLKAKNLQHNHHFARAIANASWRQFRTMLEYKCTWYGKRLITVKPNYTSQICSNCGYHSGKKPLEVREWTCPNCGARHDRDTNAAVNILHRGLKAIG

SEQ ID NO: 18165 - protein, 541 aa, Streptomyces sp.
MAELRPIDPPFVALGPSGIAIRTSLKGLTPEDERVLRLAGAHLGSLASKDFKRRCADGLEHSAQTWAERKRDLTQESSSRWAGSITKATHDQWALARRAQLAHIHSLQAGIRTIAHRLSLPMGEKGTKGAPGGYRTRQEWFAKTRRLHMLKDRLDAQRADREAGHVRVARGGRRLLNARHHLDAAQLTEHEWRQRWEAARWFLKADGESGKRFGNETIRVTPEGEVSLKLPAPLVALANAGHGRYVLAARVSFHHRGDQWADRVAANRAVAYCIHYDVERGRWYLTASWTIPPVKIIPLADARRDGLIAVDTNADHLAAWRLDEHGNPCGEPRRFVYDLSGTTGHRDAQVRHALTRLLHWAERHGLAIAVEDLDFGAEKTREKHGRRKRFRNLISGMPVSRLRARLVSMAAELGITIIAVDPAYTSRWGAEHWQRPLTSKTRKATRHDAAAVAIGRRALGHRIRRRTAPPPHHQSDGAGHRTAQAGHDARGRKGTRPRLPGPRTGCVPPDAERTRATSASTTVRDAPVAQDWDQTSLLLTD

SEQ ID NO: 18166 - protein, 395 aa, Moraxella sp.
MTTIRGHIIELKPNNTQATYFKKACGVARFAYNWALSEWKKQYEADKNYRETCQKLGLTLDETKLHKPTQGKLRKQLNSIKRQQFPFMLEVTKCSPQLAIMQLGDAFKRFFKGESNYPQYRKKGVNDRFSLSNDQFKLKLKKDRPHIQIPNLGLVRMREKLRFDGKILSAKVFTKGGKWFVSIAVELNSDDVINVLKTNQATKANNCIGIDLGITSLATLCTGEKIHAPKPLKQKLKQLKRLSKQLSRKQKGSKNRAKAKTKLSRLHLKIFNIRKDFLHKLTTDLVKRFDVICLENLNIKGMVKNRKFARSINDLGFYEFKRQLVYKANIHHKTVKELDRFYPSSKTCSCCGFKVDELPLSIRNWQCPSCNTTHDRDINASLNILNKADKVLTLS

SEQ ID NO: 18167 - protein, 266 aa, unknown
  TnpB Polypeptide
MNRAIKIRIYPDKEQRIQIEKTIGCSRFIYNQMLADKISYYQKEKKMLRNTPAGYKKEYPWLKEVDSLALANAQLHLESAFRKFFREPSCGFPRYKSRKHSGISYTTNAVNGNILLQDTHLKLPKMSAVKIKLHRQIPSDWKLKSVTISRESSGKYYASLLFCCESQTVEKRRAERFLGIDFAMQGMCIFSTGEKAGYPMFYRKAEKKLAREQRKLSHCEKGSRNYQKQKKKVALFHEKIKNQRKDFQHKLSRSLLKDMMQYAWKI

SEQ ID NO: 18168 - protein, 371 aa, unknown
  TnpB Polypeptide
VEYSYKFRVYPTKEQEILIQKTFGCTRYVYNHYLAKRTTAYESEKKTLNYNACSADMTNLKREFEWLREVDATALQSSIKDLDFGFQNFFRRVKQGEKPGYPRFKSKHNNRQSYKSKCVGTNIKVSENAIQLPKLGFVECRVSKQVRGRILSATVSKNPSGKYFVALCCTDVEIEPLEPTGALVGIDLGLKEFAITSDGQKFENPKHLTKSQKKLAKLQRQLSRKQKGSKNRNKARIKVARLHEHITNQRTDTLHELSTQMVRDYDLIAIEDLQVKNMVKNHKLAKSISDVSWSEFTRQLKYKCDWYGKTLVEIDKFYPSSQLCGVCGEKNPAVKDLAVREWTCPSCGAQHDRDVNAANNILKEGLRTLAG

SEQ ID NO: 18169 - protein, 392 aa, unknown
  TnpB Polypeptide
MFRYRLEPTAAQKAVLKDHCAHARFVWNLAVEQQSSWRPGRRSAPGYLEQCRQLTQARAEFGWLRAGSQMVQQQALRDFAQAMVNLFAGTHRRPTWRKAGHDESFRIVAVKPAHVKRLGRNTGEVWIPKVGWVRFRWSRIVPEDLKSYRVTMDRAGRWHIAFAAIPKAIPAPGTGEAVGLDRGVAVSAALSTGEMLTVPRPSHERQRRLSRLHRRLARASRGSNRRARVKLAIAKLRARDADARRDWCEKTSTDLARRFDVIRVEDLNIRDMTRSAKGTITEPGRNVRAKAGLNREIMRSGWGLLVRRLEDKAPGRVEKVNPAFTSQRCSACGHIAAGSRESQALFCCMACGYACNADVNAARNIAAGHAVTARGGDGVARPVNREPHLLAS

SEQ ID NO: 18170 - protein, 477 aa, unknown
  TnpB Polypeptide
MPRKRAADAPRVVHRTARCGLRVTAGQRRRLFGLLRSAGDVWCCVLELNAWRRRRQDPPLAGYQELCRELARSGPRTFGELDTTGARSVLRRYSDAWFAAAKRRKAGDARARFPRRRRALVPVRWYAGTFRLNGRVLRLPVARGCAPLVVRLDRDPPYPAGQVRSVTVLAEAGRLWVDVTAEVPVVAHPDGQRPDPGRVAGVDLGVIHPYAVAGPGGQLLVSGRAIRAECRQHLREARARRRAVARRATRPGQRGSRRWRQFRRREQEAEARHRRRVRQAQHEAAKAVVGWAVQHQVGTLAVGDPRGVLSVAAGRRHNQRVRAWRVGHLIRALADKAETAGITVTLVDERDTSSTCPACARRVPKPAGRAFCCPHCGQAGHRDLVAAANIAARAGGGTIPAETIGGITHRRAGAHLPGVHPARHDPRRRPHRGPPHGPLAGTGPPRIAPLVRGVARVTARNPEHVTVFTGGCTWSER

SEQ ID NO: 18171 - protein, 399 aa, Exiguobacterium sp.
MERNVLVSKLLPRDDRRCDDRRHQAIHRKTRRGVITLLKAYKFRLYPTKPQREHFMKTFGCVRFVYNKMLEERIRLYEESRLNPDAKQKLPTPAKYKPEFPFLKEVDSLSLANAQMDLNKAYANFFRDKSVGFPKFKSKHGDRASYTTNNQNGSVRIEDGKVRLPKVGFVRFKQHRPFEGIIKSATVSMTKTGKFFISILVNQGEEKWVPAKNKIGIDLGLEHFAIVTNDEMVSEKIDNPRFLRKSEEKVKKAQRALSRKKTGSKNREKAKLILAKKHEKIVNQRKDFLHKLSKRIVDENQVIVVETLKSQNMMKNHKVAKSIADVSWYEFVRQLEYKCKFYGRTLIKADQWYASTQICSSCGEKGEKKTVDVREWTCTCGAHHDRDINASINLLMLAD

SEQ ID NO: 18172 - protein, 548 aa, Fischerella sp.
MTYVPLREAVKRLGLHPNTLRKYADNGKIESIKNEAGQRLFNVESYLRGATRASIVCYCRVSSTKQRDDLDRQIAYMQSLYPEAEIIKDIGSGINFKRKGLQTLLGRLMRGDKLTLVVACRDRLCRFGFELPRSIWSNKTVDKSWFSKTLYTVPNQNLPRIFSPSSTSSLVECTDSGNTVKKSRKIRIFLKATQKQIIKQWFGVSRFVYNTTVKLLQDSTIKANWKAVKTDILNGLPDFCKSVPYQIKSIAIKDACKAVSNAKKKFKNGGGISKVKFRSRKDPIQSCYIPKSAVSDKGIYHTILGEVIFKEALPQSFGDCRLVKAYGDYYLTVPEEVSRQQSENQGRVVALDPGIRTFITFFSESSFGEIGISANIQIQKLCFRLDKVISKIAKAKCKSKRRLKLAATRLRGKIKNLVDELHKKTARFLVDNFDVILLPTFETSRMSKKAKRRIRSKSVRQMLTLSHYRFKQFLKHKAFETSKVVMDVNEAYTSKTVSWTGEIIHNLGGAKFIKSPTDGRVMPRDLNGARGIFLRALVDTPSLRECIC

SEQ ID NO: 18173 - protein, 380 aa, unknown
  TnpB Polypeptide
MLRAIKIRLYPNKVQEQILNKVLGCYRFVYNQTLALKQNAYKEDKTNLKITDLSKWFHGTLLKDEQYAWLKEQNTKVMKQAIRQMDGAYQKFFKQHNGFPKFKSKKDKQSALFPYEAISKHNTFETRHISLTTPLNNINFRCSDLYFSRLQKYNKNIRSATLSKTKSGNFFLSILIEMEDTELNKFKHTNEQVGVDLGVKDFVILSDGEVFENKHFFKKNEKQLKKLQRQLSRKVKGSNNRKKAQAKIAKLFDRMTNKKDAYIHYVVNELLTYFDTIFMEDLNVKGMLRNHHLAKAISEVGFYKFKETLVNKALVNNKQVVFVDRFYPSSKTCSVCRYKKRDLRLSDREWVCPNCGTKHDRDINAAVNILLEGQRILTAV

SEQ ID NO: 18174 - protein, 520 aa, unknown
  TnpB Polypeptide
MKTSYQYKLRPKTEQSDLMDSWLNMMRSLYNWMLADRIDGYHQSFISGDYCDTRTKTERCPLTCSLSRSSMLHNPWKNPDKEGNIKKRSASLMQDAYLAEMKKARPWYKSIHSNVLQLLIKRLDAAMEGFFKHERGFPKFKNRSNFRSFQYKPGDVKVDGNKIYLPSIGWMRFYNSRPIPTGYEIRTVTVRTKADGWYVSILLEDKTIPDFIAPAPPNTLTGLDMGLTKLVHCSDGQQISNPRFATSKKAKRTLKIRQRRVERKKKGSNNRKKVGIKVARLYKQRVDKRTAYQWEVANLVVKKADGVAVEELNINGMKARCKPKKNDDGSHARNGQSAKCGLNRSISDASWGDLISKIKYTAEKQGKNFYQVNPKHTSQTCSHCGVVDAKSRFGERFVCVECGHQDHADLQAATMVKRRAIAEYSLTIKKNAPKPKKVSHCGLGVSPSKACGLKVQMVRVDCPEPKQLCLFETPIPESTGVKRKQHRTRKSERGVPGNPLTQLSLWDSAGCGYPHESHPF

SEQ ID NO: 18175 - protein, 399 aa, unknown
  TnpB Polypeptide
MKYRAYKYRLYPNKQQEVLLAKHFGCCRFIYNYALDKKIKAYQKDKTNLSRFDIQADLPKMKKSEEYHWLSEVNSLSLQAALANLDSAFVKFFREKKGFPNFKSKKASKQSFSIPQNTRVKFDEGRVYIPKFRQGIKARFHRKFEGLVKTSVITRTSTGKYYISILVEVNEVDATPKPISENKAVGIDLGIKTFAVLSDGMEIQNHKYLKRSIKKVKRLQRSLSKKAKGSKNRERARLKLARAHERVSNQRNDFLHKVTHDLVSQYDTICLETLTASNMVKNHHLAQALEDIAIRHFNTLLEYKAKEHGVNILRIGRFEPSSKMCTCGYINHNLTLSMRHWTCPVCGAIHDRDLLAANNIKRFAFHNIHTAGTAEIKACGDMSKDACAAHEAHESLAHG

SEQ ID NO: 18176 - protein, 372 aa, unknown
  TnpB Polypeptide
MTMRKSFKYRLFVNKTQATKLGEFFQSARFLYNCALEHRIICWKQWHKSISYYDQCYSIKEIRSFNDGLAQLNYNCSQNILRNIDKAFQAFFRRIKQGGKPGFPRFKGRDRFHSITFPIYGNGVKLKNGKLYIQSIGYIRIKLHRKIEGIIKTVTIKRQNSKFYASFSCDEVPQNVLPKSNKEVGIDVGIKSFAVMSDGATIDNPKYLKQSEAKIKETQSKCSKKPSKTLRKKLACLHTKVRNQRRDFQHKLSRTIVNEFGYIFIENLKPRDMVKNSPKVLNKYINDAAWSQFFGFLFYKAENAGRKLIKVNPKNTTQMCSQCGTIVPKDLSVRVHDCPHCGLEIDRDHNAALNILALGRSVLLGKEAINFG

SEQ ID NO: 18177 - protein, 379 aa, Erysipelotrichaceae sp.
MYRAFKFRLYPNKEQKILINKTFGCSRFVYNYYLSKIKNSKYINAYTNISDYVNELKYIYPFLQEVDSIIIRKSIFHLDDNIKKCYNHHFGYPKYKNKFNRNSYMTNAIYKDYKDKTYCNIEIDLVNRKIKLPKLKWISIRGYRNTKEINGKIINATISREITDKYYVSVVFDMPDIINKELIPRNIIGIDIGIKKLLTLSDGVTFDNNKYILKYEKRIKRLQRCLSRKERKSNNYYKYKEKISILYSKLKNARKYYLHNITKKITDEYDIITCENLDTKNMIMRKKLSKNITDASFSEILRQLAYKSNYKNKYFYQIDEYYPSSQKCNHCGNIDKRYKDIKERTYKCTKCGNVIDRDLNASLNICYEGLKLYMKGLYR

SEQ ID NO: 18178 - protein, 445 aa, Streptomyces sp.
MRSVNLIMPPLCRYRGGMSRFRMYPTSEQTGVMLDHCAHARYVWNLAVEQHSYWYKGRKSAPGFAEQCRQLTEARRDSEWLRGGNADVQQQALKDFATAKTAKFTSGFGEPRWRKKYVHEGFRVIGTDRVPEFEADGSPKLNAKGTQVMGRSVVVRRLNGRWAQVKVPGCGWVRFRLTRAELPKAKTFRVTFRNGQWHIAFAVIPEAIDAPATGEVIGIDRGVKITAALSDGRKLNCPQLTVKERAQIRKHQRRAARAPQGSHAKTAGYARVARLKAREADRRKDWCEKTSTMLARTYGLVRFEKLNIKNMTASAKGTVEQPGKKVRQKTGLNRAILAQGWGLLRQRTEHKAPGRVEDVPAPFTSLRCSACGWIEKKSRKSQADFVCVSCGFTCNADENAATNVAAGQSGFPRPRRPAGAGGTTVATGRSSVREPQSIRVGIPLF

SEQ ID NO: 18179 - protein, 544 aa, Streptomyces sp.
MGGLREVAASFVVPGPSGVAVRDRLRVSERDAAVLAEVGVFLGSLAAGDLAVRSRQGPAHDAGSWAQRKRELTGACSARWAGSITKATHDQWALARRGQAAHMAWLRGQITRIEARLARPLSAKADKRAGLVRGYRSRAEWHAKSRRLQSLRHRLARVEADWAAGRVHVVHGGKQLARTRHHLAEAQLSKEAWRERWQAARIFLSADGESGKRFGNETIRITGTGQVSVKLPAPLRHLANAPHGRYVLDATVAFRYRGAEWLDRITGNRAVAYRIHHDLLRDRWYVTASWQRAAAPVLPLEAALNQGAVGVDMNDDHLAAWRLDVHGNPVGEPQRFFYDLSGNTQHRDAQIRHALTRLLHHTRRTGAAAIAIEDLHFTDSRCRERHGRNKRFRRLLARFPTATLKARLTSMAAEQGIALVAVDPAYTSRWGAQHWQQPLATPTRKISRHDAASIAIGRRALGHPIRRRTTPPPHDQSDRVGHRTVQARPDTGRREETRPHVPGPRTRCAPPGRGAKAGDQRAQHRSGHAAEHGFWHQDPLPLSP

SEQ ID NO: 18180 - protein, 304 aa, Pelotomaculum sp.
MAQHRELNKLKQTNFPWMYEVSKCAPQEALRDLDRAFKNFFAGLKAGEGVHDSFRLTGSIRVEDKAVQLPRLGVLRLKEEPGIGGRILSATVSREADRWFVSLTCEVEIPEPEQVSGEVIGIDVGLNHFVSISDGTKIEAPKPLGKYLKRLKRLSKKHSRMQKGSNNRKKSALGLARLHRRIRNSRRDFMHKLTTVLAKTKSGIVIEDLNVRGMLQNDRLSRHIADVGWGEFRRQLAYKTVWYGSTLIVAPRFYPSSKTCSSCGYVMDSMPLSIREWDCPCCGAHHDRDVNAAVNLKKYAISVA

SEQ ID NO: 18181 - protein, 483 aa, Pelotomaculum sp.
VKTTVRGVILQLTEVQKTFLDNLMGRYCAAVRWGFKRLLDGWKTQDIRLAVQSKFNLNSRQANDTVHDAQATISSQKELVKLNHANATKKVEFTRKRLEKARSPRKKDNLQKRLDKEERKLAFWQKHLDAGTFPSVVFGGKRLFHQRCKGNITLDTWQDARSNRYLSRGDKTKGGNLNTRLYAKDGIIYLDIAAEPVETKKSIRYNRITVPVYLAYKPSKKTGLINGLNYRQMVIDYLITGSAYQVEIIRKNGCYYIHVTIEEEAPVQYTAYNGVIGVDTNPDGLGITHADYLGQFKESLWIPQGEWTYARSNRRNKLIGEAAAMVVDLAKRLNCVLAVENLEFKNDKSVTAKFNRIINGFMWSKFLQAVERKAAREGIHLAKVPPPFTSVIGILKYQQQHGISNHEAAAYVIARRGLGFSNEKIPKQLEQKYVKKKESFTLLTNWKQWSVIKKAAIAAVKKHTKQEVKSLVSWHHYRKQLVS

SEQ ID NO: 18182 - protein, 476 aa, Pelotomaculum sp.
VILQLTDIQKVFLDNLLECYCAAVRWSFKRLLDGWKTQDIRLSVQSNFSLNSRQANDAVYDASATVKSQKELVKLNHAGAANKVEFTRKRLEKAKFFGKKANLKRRLGKEERKLAFWQKHIDAGTFPPVVFGGKKLFRERCKGNITREEWQEARSNRYLSRGDKTKGGNLNTRLYTKDCNIYLDIAAEPVGTEKSVRYSRITVPVYLACKPSKKTGLINGRNYRQMVLEYLKTGSAYQVEIIRENGRYYVHVTIEEEVPAPYTAHNGAIGVDTNPDGLGITHADYLSRFKESLWLPQGEWTYARSNRRDNLIGETAVLVVAMAKQFNCALAVEDLEFKNDKSVTAKFNRMSHGFVWSSFLKQVERRTAREGVPLVKIPPPFTSVIGILKYQQQYGISSHEAAAYTIARHGLGYGNEKVPKQLVQRFVKKRDTFALLTNWKQWSAIKKSAIAAIKKQTEREVKSLVSWQHHKKQLLN

SEQ ID NO: 18183 - protein, 374 aa, unknown
  TnpB Polypeptide
MKGSDIMAEKAYKYRIYPNKQQQELIQKTFGCTRFVYNYYLNKRKETYEKDKATFTYNMCSKNLTQLKKELIWLKEPDKDSLQKSLKDLDMAYQKFFKEHSGYPKFKSKKDRHKSYRTSCTNNNIRFENKHIKLPKLGLVKVRDKQIPQGRILNATISQESNGQYYCSLCCTDVEFVQYEKTSQNIGIDLGLVDFAILSDGNKIDNPRFYEKLEKKLAKLQRELSRKTIGSNRWNKARVKVAKLQKHISNQRNDFLHKLTTNIVKNFDVICIEDLDVKSMRETDSSLRNKRVGDVSWSEFRRMLTYKSQWYGKKLSVIDRYYPSSQVCHCCGHKDGKKDENVRNWICPECHSELDRDINAAINILNEGLRLVNN

SEQ ID NO: 18184 - protein, 385 aa, unknown
  TnpB Polypeptide
MLLMELSKTVVCKLKPSEEDARKLLATLEAFRDACNYISKVAFERRVFNPVALHHMVYRETREKFKLPANLAIRARDRVAKAYKQRKDKLLKFTRLSMDLDERLFRLIYKPDGIYASISTLQKRVKPTLDIGDYQRKLLEDARPTHAVLAYRKAFFLHITVEKQIPEPKGSNPVGVDVGMKNLLVASNGFKTKGGEILAKRRHFRELRSSLQRKGTASAKRRLKRLSGRERRYVNTALHQVSRAFVNTLREGDIVVMEKLTGIRNSTKHRRSQNGDFHSWAFRKLQSFIEYKALERGIPVVYVEPKNTSITCPRCGCIDKANRRNQSLFRCVRCGFQHNADYVASLNLSRVELARSGWAPVRVPYVGMNGDFGMNHYDSPTSSRL

SEQ ID NO: 18185 - protein, 298 aa, Acidimicrobiaceae sp.
  misc_feature (105)..(105): Xaa can be any naturally occurring amino acid
  misc_feature (278)..(279): Xaa can be any naturally occurring amino acid
VPLPWSPRPSPSRSTPPLSRRRRCSATSAGHALPTTPCSVWRGTTGTRIARRRTRASRSRRRTTSAPRTSACSTSGPSTATNWRPGGRRTARAPTTTRPRGSPKXFTNFHKGRAKFSHFKRKGHGGSVRIVGPAVRLADSHHVTISRIGAVKTYESTRKLYRHLERGTGRIVAATLAQRNGRWSVSFTAQVTRQLPATRTPERIIGVDLGITTLYSGATPDGEHVLEVDNPRHLVKAQRSLAHAQHVASRRQGPRKGVEPSNRWRRANARVQRVHAHXXSRSSCASSSTRPSGTDRRW

SEQ ID NO: 18186 - protein, 548 aa, Aquificaceae sp.
MPLVKRVLSIRIAGKERKQKVRKLLLDLAHFRNLLILLIRRYRKLYGYYPLNTSLLYGLLAKKYKGKYQTEFNELLQNIKADKKLAQFLENLKAQKEKIENPHLVQSIIRNVVKDFNNYFKALEKYRKNLKNFRAKPKPPKPKKLSYLMDFSVEGNRNIFEITEDNRFLFKLKNGRWLKVKLPKDFGYEITSFRLKLLADDLYVDIVYKYPLEIKEPKGGFRAGIDVGLDELLAIVSDNPNLKSFIISGKELKAFNQWFNKEKAKFQSEIDNLKNELKKKRENLSEEQIKAIQKQIRELEIRLKVLSAHRRRKLNNDLHKIARKVVDLLYETGHKAIYIGKNVLESKNGINLGKKVNQEFVSIPFRKLIELIKYKAQELGIEVKEVDEAYTSKTSPFVDVIKNQKLGKRLKKEIEKLEKLKRQGNANEHKIAEVKQRIKKLSKEIKGNLFGKREGNIFRDFIAGKIFHSDLVGALNILRIGAKLLRLGFYENLKVLFVKLCNPRRFKLMEFFYKVSPESLKGIGSSRQAIKLAGVDGERVFANALIPA

SEQ ID NO: 18187 - protein, 326 aa, Gammaproteobacteria sp.
MQYCLMRRRQAYKYELMPDGHQERQMGRFAGSCRFVFNAALALQKARYELGEKKLGYGGLCKLLTQWRNSEETAWLADAPVHPLQQALKDLERAYSNFFAQRADFPRFKKKGRSDGSFYAPLGSFKRHEAALRRAQQAMSRKTKFSSNWKKAKARVQRIHSRIGNTRRDYLHKTSTAISQNHAMVCIEDLQARNMSRSAAGRADAPGRNVRAKSGLNKSILDQGWFEFRRQLDYKLAWNGGWLIAVPLQNTSRTCPACSHVSGDNRRSQARFACVECGFEDNADLVGAINIVRAGHARFACEVSGAAMPPAAGTHRSDFGVAQCRA

SEQ ID NO: 18188 - protein, 362 aa, unknown
  TnpB Polypeptide
MQITYVLELLEPTKRKQNIFLKNIAEVAKNRQSIADKLKAGENKLSSADFSEHSLPSAVKNQNIREVKALYKNFIKSDSDKENITFKKNQPICYNNQNYDIDDHIISIPLYTTKCQRFAFPVKRTERWKKLQQHLKDSCKLGKASLFYKNGKWFFAVTVNVENKENDNSNIMGVDIGLKQLAVANVQNQDGKKINCQFHSGSQTGFIRKKYRSLRRNLGQAKIFDVIKKINDKEQRWMTDLNHKISRQLINLAVQEQVGTIVMENLEQIRQTARSLDRADRNIHNWTFSQLQNFIEYKAKLAGIKVEYVNPEYTSQCCSKCGQVKKSNRKANLYYCECGNHIHADLNASRNIANKYLGQQSA

SEQ ID NO: 18189 - protein, 398 aa, Escherichia sp.
  misc_feature (85)..(85): Xaa can be any naturally occurring amino acid
  misc_feature (119)..(119): Xaa can be any naturally occurring amino acid
  misc_feature (187)..(187): Xaa can be any naturally occurring amino acid
  misc_feature (202)..(202): Xaa can be any naturally occurring amino acid
  misc_feature (251)..(257): Xaa can be any naturally occurring amino acid
MASWLVEWKNATETQWLKDSPSQPLQQSLKDLERAYKNFFRKRAAFPRFKKRGQNDAFRYPQGVKLDQENSRIFLPKLGWMRYRXSRQVTGVVKNVTVSQSCGKWYISIQTESEVSTPXHPSASMVGLDAGVAKLATLSDGTVFEPVNSFQKNQKTLARLQRQLSRKVKFSNNWQKQKRKIQRLHSXIANIRRDYLHKVTTXVSKNHAMIVIEDLKVSNMSKSAAGTVSQPGRNVRAKSGLNRSILDQGWXXXXXXXAMIVIEDLKVSNMSKSAAGTVSQPGRNVRAKSGLNRSILDQGWYEMRRQLEYKQLWSGGQVLAVPPAYTSQRCACCGHTAKENRLSQSKFRCQVCGYTANADVNGARNILAAGHAVLACGEMVQSGRSLKQEPTEMIQATA

SEQ ID NO: 18190 - protein, 263 aa, Escherichia sp.
  misc_feature (98)..(98): Xaa can be any naturally occurring amino acid
  misc_feature (132)..(132): Xaa can be any naturally occurring amino acid
  misc_feature (200)..(200): Xaa can be any naturally occurring amino acid
  misc_feature (215)..(215): Xaa can be any naturally occurring amino acid
NHEAGNKYIPYGKMASWLVEWKNATETQWLKDSPSQPLQQSLKDLERAYKNFFRKRAAFPRFKKRGQNDAFRYPQGVKLDQENSRIFLPKLGWMRYRXSRQVTGVVKNVTVSQSCGKWYISIQTESEVSTPXHPSASMVGLDAGVAKLATLSDGTVFEPVNSFQKNQKTLARLQRQLSRKVKFSNNWQKQKRKIQRLHSXIANIRRDYLHKVTTXVSKNHAMIVIEDLKVSNMSKSAAGTVSQPGRNVRAKSGLNRSILDQGW

SEQ ID NO: 18191 - protein, 367 aa, Lachnospiraceae sp.
MLKAYRYRIYPNKVQKELLAKTFGCCRFVYNQTLAYRKEAYETEKKSVSKVDCNNYCNRELKAKYEWLKEVDKFALTNAVYNMDSAYQKFFKEHAGYPKFKSKHNNHKSYTTNFTNGNIGVDFEAGRIKLPKLKQVKGKLHREFTGQIKAATVAQLPSGKYYVSVLVETEHIPMTEAEGKTGLDLGIKDLCISSDGKKYENPKTVKKYEKKLSKLQRKLVHKEKRSSNYNKIKKQLALCHEKITNIRKDYLHKISHEIISENQVIVTEDLQIKKMLKNHHLAKNIADASWYELTRQIEYKAKWNGRRYIKTDTFYASSQFCSICGYQNTATKNLSVRKWICPKCGTEHDRDVNAAKNILTEGLRQGA

SEQ ID NO: 18192 - protein, 354 aa, Deinococcus sp.
MRTVHHILQLKRHSYPTLQALIRSGQLKGNPKLRLQHDRASGLLYEAKPELLEALSDSTLLYGDVALHTELYRLPSSEYAALVRQSPRFQQHPGLEELSVALRSPTLSVTEAARLLESAVAQEPQPDAQPRLVQPDSLFSAVWDRERLVLQRSGDDWFLVLFFQVQATQPDLFTHRLEVSLDLGSKPLVYASTSEERAHRTQPCETDLIWQVRSRLSPQARRLLDRIVFSWHQAQLQRVSDFLCRHAFYVYAEDLRYKDMKPTFVQRSRRNGVLDFHECWMHTRLQLAGIGLEKVNPRHTSLRCSYCPGHPFGHRDGDIFFCPTCRRRMNAHRNATRNIMRLGMVKAKRWRRAA

SEQ ID NO: 18193 - protein, 385 aa, unknown
  TnpB Polypeptide
MAKTRHKSYKFRLYPTKEQMMMFEKTFGCSRFIWNQMLADKIQYYKETGKTLKNTPAQYKKDYPWLKEVDSLALANVQMNLQKAYQLFFRNKNHFGFPNFKAKKKMAHQSYQTNNKLGTRTIRLSENNRKIKLPKVGWVKVKAHRKMTGLIKSATISKTSTGKYFVSILCEIKIEVEEDIKTFPKTNSSIGIDLGLEHFAILSTGEKIENPRFLISSSKKLVREQKILSRRGMLAKKKGVKLSESSNYKKQRLKVARLHEKISNQRRDFLYQLSTHLIKNHDRICIEDLASKNLMKNHHLARAIGDASWSEFVRMLEYKAEWHGKQIIKISRWFPSSQICSNCKTNSGKEPLHVREWTCNSCGAHHDRDLNASLNILHEGLKILA

SEQ ID NO: 18194 - protein, 311 aa, unknown
  TnpB Polypeptide
VDSLALCNVQLNLQKAYKSFFQSGFGFPNFKSKKTAQSYQTNNQKGTIGLSENNHKIKLPKIGWVKVKAHRKIKGVIKSATISKTTTGKYFISILCEIEIEEKKINNNKILSSSIGIDLGLEYFAILSSGEKIENPRFLISASKKLAKEQKVLSRRALVAKQLGRSLNDCSNYQKQRLKVARLHEKISNQRRDFLHQLSTHLIKNHDRICMEDLRISKNLMKNHHLARAIGDVSWFEFRRMLEYKSEWYGKQIIKISRWFPSSQICSNCKMNSGKKPLHVREWTCKNCETHHDGDLNASINILHEGLKLLA

SEQ ID NO: 18195 - protein, 405 aa, unknown
  TnpB Polypeptide
VFEKDLLDISFQSIYRPTSHTLKLTNLKMKKAKKVTRIAYSDDLNQAKYEALTEIAGRCGSVRTEVWHNYGSISGLDAKFRKVRDSFLAAGHIKNLPQRIWRATLSDVLGDIKANREAAKINVNSYIFRNVNDKNKRQELFKSLKNDSVWINNSYERRLMRKYWKQGKNNTHNQIVLEPGSYKCFHHKGKNYIEVISLKRGKRIAIPIGTNYSIAGQIKLILLEGQVEIHYTIDNTDDRACGLPCTEIGIDKGYTEAFVDSDGIFHGEGLGKILSNETDSLNKKYQKRNKIGAVLKKLQEKNPKKAKRIIKHNLGRKKLNRRKKRHQGKVKTIIYRAANNIISKAETIVCEDLTKTFKSKNFGKTINRRLSGWVKGLMAYAIDTVASRRGSRVVQVNAAYTSQTK

SEQ ID NO: 18196 - protein, 558 aa, unknown
  TnpB Polypeptide
MAEGWMAQAYRYELDKPSNDPAISSHVGAKRFAYNYMLNLINEQLRTRDQLRVIAMLQGARYDEAAAFAEKACAIPYLVELNEKRKKEHEAKIAAGSRKPGEYQPVSEWCPWSMEAMRYIWNRVKGEVAPWWQENSKACYESAFEGLAQAFKNHFDSKSGKRKGAPVGWPKYKRRSGHQSISFAASSGGIATLDRHHVRLPVIGACRTKESTDKLRLKILAGDARILRATLADEGGKAYVSFGVLVRREAKTPKPITDFSCQAQGHDVGIAKLITSSDGSVTENPKAEERVKKKISRYQRRMDRQHRVASPKCFNSDGTHISGTCHWKGRSNRAKENQTRLRKSYAHAARIRKDTIHKASYHAATANAVNVVEDLKVEQMGRKGHGKRAFNRAQHDATMAEFRRQLSYKHSWYGSQLWLAAWWYASSKTCSECRVKRARLSRSARVFKCDSCGLEMDRDLNAAKNLQALAELACTCILAQISTGTPVDWSKVPVKPFGWEPDKNTRSSRECARAGDRKIIGGDKEATRFTDLGTCPGLRGEEALSFNREATRLENVGA

SEQ ID NO: 18197 - protein, 185 aa, unknown
  TnpB Polypeptide
VSIVIEDATVPSPILIDTVKTAVGIDVGLKEFLVDSEGQAVPIQQYYRKAQAKLALAQRRLAHKVKGSGNYQKLANHIACLHQHVKRVRKDFHYQIAHKLCKTYDLIGLEDLNIKGLAKTRLAKSILDAAWGSFAQILEAVAVKCGNWIVKVNPYGSLKDALDVIKMCLKLCLSEHMNVLIVALS

SEQ ID NO: 18198 - protein, 377 aa, unknown
  TnpB Polypeptide
MEAVVTTKIKLLPNEEQKELLLKTLKQMKDGLNFASEVAYENNCLAHSKKLQKLVYNDLREKFGLKSQMACNACNIVSGNYATEVTNKTFGKVFYKNAKLVYSYGRDFTFAKNNLISIGTLEKRAKMPYVTKGNEKYFDGSWEFATSELKYKKGKFYLHISVKKEIEEPEIYKNVVGVDLGMRFLATAIDSKDNHLFWRGGKVTQIRAKHLNLRKRLQECGTKSAKRKLKKLSGKERRFMTNENHCVSKALVRFAGENSIIALENLEGVNITTKVRDNKNHFRYHRMSWAFYQLRQFIEYKAKLNKSMVVDVDPAYTSQKCPKCGYTHKENRNKDKHIFECKACDYKSNDDRIGAMNLRQLGIEYHGRINEKEEQST

SEQ ID NO: 18199 - protein, 292 aa, unknown
  TnpB Polypeptide
MGIRDSHVKREASKPTIGQAYRSYCLYPELRCAVSQSLGIGSAFSIARDAPMTECTSTVGVDRNLRNLTVGNESQIHYYDLSKAVKIAKTTMRIVASFKRDDVRIRTEISCKYGRRRTARTGHALHNATKTIVERAVQRREAIVMEDIRGIRSLYRRGNGQGRAYRRKMNGWSFGEAQRQIEYKARWIGLPVIRLSRRETRGSGVTCPRCGERLQSNKRLGCKLWCGKCRIVMDRDRVAAVNLARRGRVRFARSRPPIILEAQGGAVEAVMGNLTPTVIPGVDAPKPTPTKS

SEQ ID NO: 18200 - protein, 374 aa, unknown
  TnpB Polypeptide
MLKAYKFRIYPTKSQRTKMEQTLDLCRWTYNKTLEIRKNAWENEGKSLSKYETNNLLPEWKADKPELKDVFSQVLQNVHERVDLALKAFLRRVKAGEKPGYPRFRGRGRYDSFTYPQKGFKIDSGKLYLSKIGNIKINLHRPIEGKIKRLTVRRAATGKWYACFSVEIEDQPKPPWKDGTLVGIDVGLESFATLSNGEKISNPRFFREEEHELARAQRKLSKAPKGTPDRKKALKVVERVHERIANKRYEFAHQISNDLVKRFGLIAFEDLNIKGMTKNHCLAKSIHDVAWNMLVTLTSYKAERAGSMVVLVDPRNTSKMCSRCGILVQKDLSERFHNCTQCGLSVDRDWNAAINILRLGLQSVGIKTVEACPF

SEQ ID NO: 18201 - protein, 394 aa, Streptomyces sp.
VKRAFKYRFYPTNAQAAELLRTFGCVRKVYNLALAARTEAWARQERINYNQTSAMLTAWKQTEELGYLSDVSSVPLQQTLRHLQAAFANFFGKRAKYPRFKSRKKSHRSAEYTTSGFRFRNGALTLAKVTEPLDIVWSRPLPEGAEPSTVTVSQDAAGRWFVSLLCEDPALSPLPATGTAVGVDVGLNHLLTLSTGEKIANSRHERRDRDALAKAQRSLARKAKGDGANRAKARRRVAKIHARVVDRRRDGLHKLTTRLVRENQTIVIEDLSVRNMVKNRSLARAISDAAWSEFRSMLEYKASWYGREVIAVDRFFPSSKLCSHCGKLAESMPLHVRTWTCNGCGTTHDRDVNSAKNLKAAGLAVSVCGAGVRPQRRTPGGQPTTKQKNPRREP

SEQ ID NO: 18202 - protein, 378 aa, unknown
  TnpB Polypeptide
MFRAIKVRLYPNKTQEQTLNRVLGCYRFVYNHMLALKQKEYNENRKSLGLAGLTKYFHGTLLKDEQYTWLKEQNTKVMKPAINQMLTAYDNFFKLKKGFPKFKSKKDKESALFPLEAISKRNKFNDRKITLTKSLKDMKFRCSDLYFKRLQTYKERIRSATLSKTKSGNYFLSILVDLPQEEIIKFERTDRHVGIDLGIKDFVITSDGEVFGNKHFFTKQEVKIAKLQRQLSKKQKGSNNRNKQRVRIAKAFERLTNQKNAYIHSVANELLTYYDTVFMEDLNVQGMLKNRKLAKAIQEIGFYKFRQILEDKARNNYKQVVFVDRFYPSSKTCSNCGYKKRDLRLSDRFWTCPVCGEHHDRDLNAAVNILHEGERLIS

SEQ ID NO: 18203 - protein, 382 aa, Escherichia sp.
MRRFAGACRFVFNRALARQNENHEAGNKYIPYGKMASWLVEWKNATETQWLKDSPSQPLQQSLKDLERAYKNFFRKRAAFPRFKKRGQNDAFRYPQGVKLDQENSRIFLPKLGWMRYRNSRQVTGVVKNVTVSQSCGKWYISIQTESEVSTPVHPSASMIGLDAGVAKLATLSDGTVFEPVNSFQKNQKTLARLQRQLSRKVKFSNNWQKQKRKIQRLHSCIANIRRDYLHKVTTAVSKNHAMIVIEDLKVSNMSKSAAGTVSQPGRNVRAKSGLNRSILDQGWYEMRRQLEYKQLWRGGQVLAVPPAYTSQRCAYCGHTAKENRLSQSKFRYQVCGYTANADVNGARNILAAGHAVLACGEMVQSGRPLKQEPTEMIQATA

SEQ ID NO: 18204 - protein, 420 aa, Euryarchaeota sp.
MSRLIRSLVFFGVHLPPSLDWLMREFRLIVNKSVRIALTEDVRTRYGLTRTAYPQLSAEHRIYKQYIPSAFEVATVALKNYRRRLRKGFSAKPPFVKRLFFTAENQAYHLDRLTGELRVPIRAGEAVVLQLPVSQWHRDFLADESWSLGALTVTPEKVVVAVRKEAPPLFQPSGAISLDSNEVSLDGVACLGESARLVNLPFSEVRVIQSTHFRRKRHLRKKKERDWRVRRALLRREGTRERHRVRQRLHRLSKGLVRIARELRLAVILEDLKLGNPSGRSRRNNRRLSSWPRSQLHFQIGYKAALAGVPVIKVNPRYTSKTCPVCGETKGRRERVGRMFKCRCGWRMDRQLNAGLNILNTALASSETLARAVRFQPGALRNDVVIPLYDLPGSLGGAREEPSGVDPIPPDAASSNSGVG

SEQ ID NO: 18205 - protein, 429 aa, Lachnospiraceae sp.
MSLYSVRISRSADIRRTLSATADIYRKAVDFFIHVCMKEWDSISTCRGQTGKVNAVEAFTVKTVRRPSVLYDFGKDYYKFPSYLRRAAIAEAAGKVSSWKSNLKNWKEADPRTRGMRPGQPSAGYVYPAMYRDNMFVRTGTYTASIKVFTRGTWDWLEVGLRRGDVDYILRHCKDRRECVPTLQKRGKLWYLDFAFEETVELPGTEVPARRILAVDLGINSACTCCVMGPDGTVTGRTFLKLPAENDRLDRAVGRIRKAQRQGARRMPRLWARAKGISADIAVKTAEFIVKTAVLHDVDVIVMEHLDVGGKKRGSGKQRLHHWRTVYVRQMVAQKAHREGIRISTVCAWNTSRLAFDGTGRVKRGRESERTADNYSICEFSTGKIYNCDLNASYNIGARYSKVPSVSKRSTCTLSTLISLSAVLAAAAA

SEQ ID NO: 18206 - protein, 382 aa, Escherichia sp.
MRRFAGACRFVFNRALARQNENHEAGNKYIPYGKMASWLVEWKNATETQWLKDSPSQPLQQSLKDLERAYKNFFQKRAAFPRFKKRGQNDAFRYPQGVKLDQENSRIFLPKLGWMRYRNSRQVTGVVKNVTVSQSCGKWYISIQTESEVSTPVHPSASMVGLDAGVAKLATLSDGTVFGPVNSFQKNQKTLARLQRQLSRKVKFSNNWQKQKRKIQRLHSRIANIRRDYLHKVTTTVSKNHAMIVIEDLKVSNMSKSAAGTVSQPGRNVRAKSGLNRSILDQGWYEMRRQLEYKQLWSGGQVLAVPPAYTSQRCACCGHTAKENRLSQSQFRCQVCGYTANADVNGARNILAAGHAVLACGEMVQSGRSLKQEPTEMIQATA

SEQ ID NO: 18207 - protein, 470 aa, unknown
  TnpB Polypeptide
MGQASRTTKLLLDLGQPDQGGANNQKRAALLATAKVLNQARAFYLDFFLAHAEKLAERVAYYSEEHLEMRERLISAHELLTWAERATVATKEHPYPWAGWNFSERFGGMPAVYRRSVIKDAIGKARSYLSNLANWEKSGKKKGKPGLPGAADHPTLYQGCIILDQETLDLQDAFVRLNVYTGSDWTWMHYPVRSSRYLLARLEEADWKRQSPQLVLRARSAALHIPQVKQIEAKKVMERKADPKLVTVAVDLNVKNLAVITVRQAERIIQTVFVTDHGLDAHRYRHLKKIAKKQWQAGRPVKGEHSNRDLWRHIDRLNEDAAHKVARQIAEVCARYPGCILLFERLRKIKPGKGSKSRRMNRRRANQLRGKVNQHARQKAYLHQIVTVEVNAHGTSQYCSRCGSKGERFSYRAGRRIAVKWGKLFVCPVCHYEANADFNGSANIHHSFYREWHWQPRKKPPPPSAAQSAR

SEQ ID NO: 18208 - protein, 509 aa, unknown
  TnpB Polypeptide
MAKATMTIKEALNYQPRHAQYFAANQSLFNRVVAFYFDCIQAHGGILALANKEALTVLERLTHATAENPAPIMPLTEVAPDIPAMFRRAAINAALGSARSFFSHLKKWRTRKEKHEARPARTGAKKKPFRERPPVPPRSWKKSAPFYAGQWKDRQDHSILLKVWTGTCWSWVKVRTLGRDIPALFELGSPQLIRHGNKWWLHTSIEKTFTAPPKIVEQVTKPQTKICAVDLNLDQHLAVCSVQTVEGTIIATRFIGGGRAISGFRKKLLGRIARNRSQTGIIAENEQDNADLWRKIRHRDDDLAHLVSARIVQFAKEHGASILVFEHLGNLKPEKGKYSRRGNTKRAYWMKGRIFKYAKYKAWQHQIITSRVNPANTSRACHRCHSLVVRYNAGQPVEGYTPGASLVLCETCQMRDHSDRNASLVIGQRLLERYAEPLKEKPHTAVRRGGRVSKETGVARSQDAKRKKGPSISHARQGDGNEHGTAQEKMHRMGSPFSATPHQLRLPLE

SEQ ID NO: 18209 - protein, 403 aa, unknown
  TnpB Polypeptide
VNYLRRQEFFEGKPIDFNKTEKIVYEEYKKEIGSATVQQIARKNAEAWRSFFTLLRKKRNGESPNWLKPKPPGYLKDNGKRKPLIVLRNDQYRIEGNRLILKGIGKFERLEVQFKGRIHLKGKQRRLEIVYDNVKRKWYAHISYTVEERMNNKEWVRVPRESLGNLFAGIDLGVNNLMAVYVENGESFLVNGRPLKSIAFYWQKRIAEYQSKINKSGAKKSKKLSRMHQKAKLQAKHYINTAVRQTVERLYHLGVSRIVVGYPKEIARNPEKGRKQNYLLSHVWRFNTVIQRLKEVAEEYGIQVLVVNEAFTSKTCPVCGKPHEGARFVRGLFKCPATGLVFNADLVGAFNILKRAVRTITPSLPGLTVGRGNWGKAVPEGLKTHFLVGLNETPQTSLPMARG

SEQ ID NO: 18210 - protein, 396 aa, unknown
  TnpB Polypeptide
MLRAFRYRFYPSPEQESLLRRTIGCSRLVYNKALAERSEAWTRAKESVGYAQQDRALTRWKKTADLTFLNEVSSVPLQQALRHLQTAYTNFFQKRAAYPSFKKKAAGGSATFTRSAFRFDGRGLRLAKMEASLDIRWSRPLPKVADPSTVTVSLDAAGRWHVSILCEDLSIKPLKKSKTAIGIDLGISALATLSTGEKVSNPRYSDSEQSRKRLLAKALSRKQKGSKNRLKARLKLARLHALISDRRQDTMHKLSTRLVRENQVIVVEDLNVAGMMKNRCLSRVISDAAWRMLLTMLAYKCEWYGRNLIKVDRFFPSSKTCHGCGHVVESLPLSIRKWSCPKCGTTHDRDVNAALNILAAGHAVARESEVCGPGVSHRILRNQVRSGLKQKTPGVN

SEQ ID NO: 18211 - protein, 429 aa, unknown
  TnpB Polypeptide
VKVELFHPTIIQTTIDNHKIITIFSSGMRKINRTYRFRLYPNRGQTELLAKHFGCSRFVYNYFLNQRKEQYKFTGKSDNFYVQCKTLTTLKKQEETAWLKEVNSQTLQFAIRSLEAAYTNFFKKRAKFPNFKSKHSKNSFTVPQSASIAGGRLFIRKFKEGIKCRVHREIKGKIGKVTITKTPSGKYFVSVFTEEEYITPIEKTGKSIGVDMGLKDLLVTSEGETFNNNRYTRRYEQKLAKAQRHLSRKKKGSRGFENQRLKVARLHEKISNCRADYLHKCSISLIRRYDTIYIEDLNVKGMVKNHRLAKSISDASWGSFVSMLTYKAEWNGKKVVKVDRFFPSSQTCNVCGYVNKVIKDLSVREWECPVCHTHHDRDVNAAINILRIGLNNNISAGTVDYTGGEGVRADLLESHSSVKPETNEFLVHW

SEQ ID NO: 18212 - protein, 396 aa, Cyanobacteria sp.
MHKELYNAAIANRKVQYERFGHSVSYYEQQNSLPEFKEVWTEYKQLGSQALQATLKRVDLAYQSFLKGLRGKPKFKSIRHYSGWTYPASSGWKIHTTGDNGYLELTDLKINVQIRGKARTWGKPTTCTIVYRNGKWYASITVECVPVRKTGTGAIGIDFGTYHAAAMSDGTVIDNPRFQAQSANKIKSASKQKRRKRAPNFKKKVKASKGWKKAAKKVAKLQRKVTNQRQDWTHKVAAQIVSGNSLVATEELNLKGMTKKAKKGSKRKVQKTGLNRSMLDVGIGNLISVIGYKLQEAGGFMIMVPTKKVKPSQTCPNCGHQKKKDLSERVHNCSECGEIYDRDVAAAMVMLSWALGTSVFNRGEEIPTSVPRHTGGWKQISSSKRQKLTVQRSNGE

SEQ ID NO: 18213 - protein, 404 aa, unknown
  TnpB Polypeptide
MLVKGVVFYLESGLPSEAKSLLEDFRLAVNNSIRAGLQARVTSRNALVKIAYKDFRQEHPRMYSQHLVSAFEVACGILKNHRKRLRNGVTDRIPFVKRLMMKTENQAYKLDRRSGMIDLPIRAGCHVELRLVVSQYHRKYLDDMTLSLGSLTVLPDRVIVAFRKDAPKPFVPVSALSLDTNERSLDGVLITDDTSMTVKAEFPDIAVIQQRHHDRRKRLQRKKARDRRTSRNLCRREGAREHHRIDYRLHQVANSVLKFAEERRSAVILEDLKGIRPKWNKELNRRISLWPRRKLHQIIEYKAQWRGVPVVKVDPRNSSRKCPACGRIQDSRMGAEFKCECGWHLDRHINASLNLLQTAISNGMAGGLRFNPGAFQHDVMMILYEPAMAARSEPNGTSGVVGVT

SEQ ID NO: 18214 - protein, 373 aa, Methanococcoides sp.
MDMDRTIKLKLVMSEEDKESLKDTVVLFNQVFNEVAKYGFRNRTHSKVSVHHATYKDIRERYPDLNSSHVQGARDVACEALKSVKLKTLPRSSPFSAIRYNKNTIRIVFEHGYASVSSVNGRVRVCFTIPKYYEQYLKWEIRSSNLNYDSRNDLFYLHITLRTESPKPIGNTVLGIDRGIVNVAVCSNNVFFNDSRVKNTRAKYTHLRKELQSKGTKSAKRLLKKMSRKERRFVTDVNHCIAKDIVNMPFDVIALEDLTGIRVQKRKGKNFNRKLNNWGFYQLEQFIRYKAETLGKRAISVDPRFSSQKCSKCGHTYKGNRDGSSYRCRSCGFQIHADLNAARNIAQAGISCLSRLSVNQPNVGMSAVQDTVQ

SEQ ID NO: 18215 - protein, 464 aa, unknown
  TnpB Polypeptide
MGLSIKTCYTVKIQKQLDATQDKTTEKLNIARKRAVDSRLMRQTSLICLEALKFCVSVISEEWDTIMGVESKLRKRLIDTLVHRTKTAAPKYPEFDLKFPKMPGYTRRAIIADAFGMVKSYRSNHKNWKETPPMERGAEPTLGIPSRYELTFYDQERKMSCLADSQIGLKLYNGKTWNWYYFQIRPSDAKQISRLSKTRKMLSPIVDKVRGRYQIRFTFEEIRELVQDEDKLAYRVLAVDLGINAAASWCVMEAGGTVHAKGVIHLPCEEDRLNHMINRKRMYQQAGKKSHCAYRWIREANRQLSIQTTKALMDVAVLYSVDCIVFEHLDSKGKIRGRRYRERIHLWRKNDVQHRVELQAHRMGMRLSHVCAWGTSKYAFDGSGVVDRHSIYHYEHGRKVYNYSLCMFQNGKIYNCDLSAAQNIGARFFLREYQLLGIEGLPATPQRTLCTLRILVSNGLPVAA

SEQ ID NO: 18216 - protein, 400 aa, unknown
  TnpB Polypeptide
MLIAHRIALNPNNVQATYFARASGTARFAYNWALAEWKQQYEAWNLDNNHPKPSQAALRRKLNAMKREQFPWMLEVTKNAPQMAIIQLGDAFKNFFAGRARYPQFRKKGVHDRFTLTNDQFSIDGCRIRIPNLGWVRMRESLRFAGKIMSATVSRVADRWFVSVTVDTVDDSHLPQAENQGAVGVDLGVAALATLSTGAVIDGPKAHTALLARLQRLSRSLSRKQKGSANRKKAKSKLAKLHARIAAIRSDALHQLTTSLTRRFHTIGIEDLNVRGMIKNRHLARSVADMGFFEFRRQLEYKAAMRGGQIVVADRFYPSSKTCSACGHKLEVLPLSVREWTCPACTTRHDRDENAAINLKNMAVSSTVSACGEEGAGRRRKTAVKPASVKQEASSRFSQK

SEQ ID NO: 18217 - protein, 372 aa, unknown
  TnpB Polypeptide
MEIIKGYKIRLKPTLEQEILIKKSIGVSRFIYNWCLSKEINSDKFIKDGDLRKELTKLKKEEDYIWLNEVGNNVIKQSAKDLCNAYKSFFKKISNKPVFKKKGYNNSFYVNYETMRKTKKGVRCEKIGDIKTSERLPKLKEDKYYVNPHIIFDGKYYYITFGIKIDIKPKVNTSEIIGIDLGIKDFATCSNGMIYKNINKMHIVKKLNKRLKHLQRKASKKYLKNKKGNCYIKTNNILKIEHKIKLLNRKIKNIRENYIHQITTYLVKTKPCKIVIEDLNVKGMMKDKHLSKAISEQSFYKFTNILKYKCEWNNIELIKADRFYPSSKKCSHCGNIKKDLKLKDRIYKCNFCNLVIDRDFNASLNLASYKLA

SEQ ID NO: 18218 - protein, 416 aa, Paenibacillus sp.
MYLTVKQQVKQLSKEDYQNVKKLSHIAKNLANEAIYNVRQYYFQEGEYLNYEKNYVLLKDSPNYKMLNSNMAQQILKEVDGSFKSFFGLLKLAKKGKYSYKDINLPKYLPKDGFTTLVIGFVRLNGNQLTIPYSNQYRKKHKSVTITIPPILQEKKIKEIRIIPKAKARFFEIQYTYEVKEEQRNLNKNKALAIDLGINNLATCVTSTGESFIVDGRRLKSINQWYNKRNAQLQSIKDLQKYEKKNTNRQKANTRNRNNKVNDYMAKTARIIINYCLENDIGNLVCGYNETFQRGSNIGKANNQTFVHIPFGKLRDKLEYLCKIYGIRFVKQEESYTSKASFFDKDIIPTYNDDNPTDISFSGKRVKRGLYQTKNGKILNADVNGALNILKKSSVVSLTALYGRGELDTPVRIKIA

SEQ ID NO: 18219 - protein, 248 aa, Paenibacillus sp.
MLLDGYVKLPKLKLVKMKQHREIPSHHIIKSCTVSRTKTGKYYVSILTEYEHQPIQKEVQAVVGLDFSMNGLFVDSEEGKTANYPRFYRQALEKLAKKQRILSRRKKGSNRWHKQRLEVAKLHERIANQRKDFLHKESHKLAKRYDGVIIEDLNMKGMSQALNFGKGVADHAWGMFTTFLQYKLEEQGKKLIKINKWFPSSKTCSCCGRKKESLSLSERTFRCECGFVVNRDWNAAVNIKREGLRLLA

SEQ ID NO: 18220 - protein, 143 aa, Nostoc sp.
HGKQSIQYPQNVKIADNSVGLPKIGDVTAIIHRPIEGKVKTVTISKNFSNQYFAAILFDDGKEKPELNTEGKAIGIDLGLTHFAVTSDGSKFDNPKILNKHEKNLKLKQRQLSKKQKGSNNRVKARKKVARVHRKITNCREDF

SEQ ID NO: 18221 - protein, 445 aa, unknown
  TnpB Polypeptide
MGCYEAVKVRIDPTPRQERLMASHAGAARFAYNAGLAHVKEAIDNGEPADWSHYGLLRWWNANKDELAVNKITGEAWWSQNSKEAYSMGLRSLAQGFSNWSKSRKGQRKGKRVGFPKFKSKNNVARFAYSTNFTAPTASDPYGLRLSCIGRVHCMENVYERVAGAHLVRVSVSRRAGCWYASLTVERESAASVSVSAPKGGAVGVDLGVKNLATLSDGTVIPNPRALNAKLRTLRKAQQALSRKIKGSTRREKAKARVARLYARVADVRADAINKVTTMIANTYSAVCIEDLNVAGMMKNRHLARSMSDAALGEFRRQLEYKTARSGAVLCVVDRWYRSSKTCSGCGEVKAKLSLSERTYRCESCGLVLDRDLNAAINICVAGSAPETLNARGEDVRRSDLVSGNADLCEARTKQSPTGGVRLGAGLGNEAMQPRVNSVVTVCRS

SEQ ID NO: 18222 - protein, 332 aa, Enterococcus sp.
MKLGVLKAYKFRIYPNGQQKQFFIETFGCVRFTYNQLLEAKMEELANNEAKQGLTPAKLKKEYPFLKETDSLALANAQRNLDRAFRNYFQKRAGFPKMKTKKSIWQSYTTNNQQHTIYFEDDQIKLPKLKTLVPVKKHRAIKGKIKSATISAKNNEEFYISILCLEEIPPLPKQQASVAVVYDPQQLVKANQPIPITCEHAIQTKQKLTRAERKLQVKATAVKRKKILLTQARNYQKLKGKVARLYRFHCCQKREFIDQVSYHLVKQYDTIYLEQIAEDTVLKAGHYSISDWHQFVRKIQYKAQWYGKELRFVTLDMQDQQKLERLSNEMSS

SEQ ID NO: 18223 - protein, 402 aa, Escherichia sp.
MKRLQAFKFRLRPDGQQEREMRRFAGACRFVFNRALALQNENHEAGNKYISYAKMTSWLVEWKNATETQWLKDSPSQPLQQSLKDLERAYKNFFQKRTSFPRFKKRGQNDAFRYPQGVKLDQENSRIFLPKLGWMRYRNSRQVTGVVKNVTVSQSCGKWYISIQTESEVSTPVHPSASMVGLDAGVAKLATLSDGTVFEPVNSFQKNQKTLARLQRQLSRKVKFSNNWQKQKRKIQRLHSRIANIRRDYLHKVTTSISKNHAMIVIEDLKVSNMSKSAAGTVSQPGRNVRAKSGLNRSILDQGWYEMRRQLEYKQLWRGGQVLAVPPAYTSQRCACCGHTAKENRLSQSKFRCQVCGYTANADVNGARNILAAGHAVLACGGMVQSGRPLKQEPTEMIQATA

SEQ ID NO: 18224 - protein, 372 aa, unknown
  TnpB Polypeptide
MEKAYKFRLYPTKGQEELIRKTIGCARFIYNQTLAARKDAYNAGCAISGYDCVKLIPGLKDTYPWLREVDSTALQSSVLHMDQAYKNFFAGRKGKRKVGFPKFKAKHHSRASYTSKVVGQNIQVNGSAVKLPKLGWVKAKVSTPVQGRILNATVSMSRSGKFFVSLCCTEVEIPQLPSTGAAVGLDVGIKDLVITSDGQKFDNPKYMQKAEKKLAILQRRLSRKPKGSRNREKARLRLSKQHEYIANCRQDYLQKLTTQLVRDYDIICVESLNVGGMLKNHKLAKAIADASWGELARQLKYKAAWQHKALVEVGTFFPSSQLCSRCGHKNPEVKDLSVREWICPCCGTHHDRDQNSAQNLLMEGLRLLRVSA

SEQ ID NO: 18225 - protein, 487 aa, Thermofilum sp.
MSGESKSNKNGKGLVDAYRVWRVKTNREQGLRLRSLYFSLASAVERASEELERKYGDAFRREPERFSEELIEEASKLAGLPKGLFWYAVEWWNMIAEARGKSKLRGRFTSPPVPLLIKVVSNSDRLYGNANATAVLDASRGELRVPSAGVAVRLRPSLVRAVLEDVQRFGDVKLTLQLTARGRPRLAAHRKVKQAWWGGDRKLAVMAVDVNSSYGLYLLAFAFDSEVRLVAQRVFKPPNTTMLRLLATILHSYSEVKSCELAVKRFRERRSVRRLQREGRGFVVEEALRLAGKLRARLNVTPERTERVAGQALRKVKKVNEDWVRGVLREMRELARKLRDQGYLVVIVADIPQAESLRGTKLQRTLLRVAERLENMAWYEGAKWFQPENNVSGKQCPLCGREGVEIQRRYYKCTRCGLIYGRDWAAAFNTAKLFLKACKAERQLEVLSRWLSQHPRALAKRYYMPRPKTQEAQAPAPVPAAPPPPGD

SEQ ID NO: 18226 - protein, 373 aa, unknown
  TnpB Polypeptide
MKLVVKLKLAPTAEQAAALLETMERFNAACDWLAGKAFEQHTANKYLLQRAYYRQIRDDFGLPAQMAVRVIAKTCEVYKRDKSVQPHFKAHGAIVYDQRLCSFKGLDRVSLLTLAGRQVMPYLFGEYQRPLVERLKGQADLVYLDGTFYLYATADVPTPEPAAPEGVLGVDVGVKNIAADSDGTLYSGAVCNGLRRRHYRLRQKLQKKGTPSAKRLLKQRRRKESRFQADVNHVISKQIVGTAALTNRAIALEDLKAIRERITARKDQRRVLHGWAFAQLRSFVEYKSVRAGVVVTAVDPAYTSQTCPACGLIDKANRPSQSVFKCVACGLAGPADTIAAKNIAIRGRVAVMLPHVPVLSRQPLPGPDTSPLL

SEQ ID NO: 18227 - protein, 384 aa, Lactobacillus sp.
MVLKGIKLRIYPSPAQQLEIKLNFGYNRFVWNQMLNMMRNRHENNPQAPFLNAFALNSLLPALKREYPWLKEAESTSLQSTCHDLVAAFQKFFKETNVGFPKFKSRKFPKQSYNVKFSGTSLAIKSEHIIRIPKVGLMSFRAGSEITGQLKSATIKLSATGKYYAVLLVEIEVLPFAKTSQAVGIDLGVTDLMITSDGKKHPTIRFDKHLAKKKYYWEKRLARRRRQAQKEIAWDHQNEVPAPRELSDFKNYQQAKLMVAKYNEKIANQRRNYLHQLTIQLVKQYDVIKIEDLKTKNLLKNHQLARAIANQSWREIRRQLAYKCAWYGKQLVLVNPWKTSQLCANCGYDDGKHGLSIREWTCPNCKTNHDRDVNAAKNILAATA

SEQ ID NO: 18228 - protein, 487 aa, unknown
  TnpB Polypeptide
MALRVVSNYLHLPRKTFQILDTLAYHAKSMYNVGLYNVRQHYATHQENTQILQGIRPDLTSGVDILVGSYLPFTRKKDFPYKACSNYAQSKPNENFGLLHNDNAQQTLRSVEEAYKSYFELLKLYRTGQLEYCPSPPHYLPKDGRFKLAFPRAHLTIRNGSVTLGMSLTFRKQHGLTGKELTFPIPPCIKPHQIREVAILPVNGGKAYKIEFCYTVPNQPQNLDPNQYLAIDLGLTNFATMVDTATGAAVILDGKRIKSINRWYNKENARLQSIKDKQKIGGITKRQARLLKKRDCRIGEAMNRYAVWIVNYALQHRIGTVILPRWDGIKDKINHGKRGNQNFVQVPYPKFRQKLKSKCELFGIRFDDTHSEAYTSQVDALNLDPIRKPPYGRTRRVKRGLYQSARDTLINADVNGALNHLRKVARDSSTEGSVSTARCDSVVPRIIGRGRVNRPVRIRTSFEPSTFAHIKVQPCAPQGAPAASPLR

SEQ ID NO: 18229 - protein, 332 aa, unknown
  TnpB Polypeptide
MSYYKLCAISSACGMLKNYHKAVRKNPKIMNPFARRLMLTTCYGFKIENGVLKLPLGEKRYANIALNNHTKQVLSNHTHTIRSICLTARTVSVTYAKEVAEINPAGYIGIDRNLNNVTMADIVGRAERLDLSRITKIKGRYRELISHFKRNDVRVRRRICRRYGSKQRERVQQILHHASKMIVQQAKDNQYGIVMEKLVGMRRLYRQGNGQGPNYRFRLNSWSYAELQRQIEYKARWEGLPVIYVNPAGTSAKCSVCGSRMMRIPEENRQLKCTSCGFTADRDVNAARNILARALRFRAVGPATEAMVQEPAGAVILKVDAGQLTEERPLAG

SEQ ID NO: 18230 - protein, 460 aa, Ruminococcaceae sp.
  misc_feature (150)..(153): Xaa can be any naturally occurring amino acid
MVANRAYKFRIYPNDEQKILFAKSFGCVRMVYNHWLDRKIRQYEENKTNVAYTICAKEMATMKKTEEYGFLKEVDSIALQQSLRHLDTAFQNFFKQPKTGFPRFKSKKRSKNSYSTVCINGNITISNGYLKLPKIGQVHLKQHRIIPEEXXXXEYGFLKEVDSIALQQSLRHLDTAFQNFFKQPKTGFPRFKSKKRSKNSYSTVCINGNITISNGYLKLPKIGQVHLKQHRIIPEEYSLKSVTVSQTPSGKYYASILFEYENQVQEKEMQNFLGLDFSMHELYRDSNGKEPAYPRYYRNAEKKLAREQRRLSKMQKGSSNRNKQRIKAAKLHEKVSNQRKDFLHKQSRQIANAYDCVCIEDLDMKAMSRSLNFGKSVLDNGWGMFTTFLKYKLEEQGKKLVKVDRFFASSQTCCVCGYKNAKTKNLALREWDCPQCRTHHDRDVNAAINIRNEGMRLVIA

SEQ ID NO: 18231 - protein, 370 aa, Micromonospora sp.
MGHAVKRTYKYRCYPSPEQAEQLNRTFGCVRKVYNLALDARTRAWSVDRQSTTYVQTSAWLTEWKRTDELAFLNEVSSVPLQQALRHLQAALAAFWDKRSRYPRFKSKRRSRASAEYTRSAFRWRNRQLTLAKMDTPLAIVWSRPLPEGAQLSTVTVSRDAAGRWFVSLLVEDPTIKTLSPVDSAVGVDAGITSLVTLSTGEKVTNPRHERADRRKLAKAQRELSRKAKDSRNRAKARLKVARIHARVADRRRDLLHKLSTRLVRENQTVVIEDLSVRSMLRNHSLARAISNAAWSGLRKMIEYKAAWYGRQVITVDRWYPSSKTCSTCGQINTSMPLSVRSWTCSGCCTTHDRDINAAKNILAAGLAER

SEQ ID NO: 18232 - protein, 466 aa, Micromonospora sp.
VTTTRIAYSHRLNAGKHRALMEQARRLGRVRSEVWQRYGSVSGVGLTDRQVRDRWLANGTHHQFGVLANAWKETVRDAMADIAATRESAKVQVRRAIRRRTSDQAELKRLFGLLKVDRWANDPYLSRQMRSLWRRGHNRTHNQIVVRADQHHTRADEGGRLWLAVPGLVRRQMVRIPLNTAVAPTGTLRLILRGDRVEIHYQIDAATMKTSQRPCGTATLGVDKGYTEALTDSDGNHHGGHLGDLLTAEADRIKERNRRRAKVRSVANNAARRGDRAKAERIARNNLGTIKRDRQAARHQARVRTEIFTAVHQVVNKAAVVVAEDLTKTFTGRKPLGKNTNRRLAAWTKGVTAEALKNVSERRGSALVHVNAAYTSQVCHRCGCFGRRAGDRLHCTLCGVVWQADVNAAINVLRRHGDPDITLHTPHRVVRQIVQARADRHRSRLPLPDSIPARPGGERIIQPAQQ

SEQ ID NO: 18233 - protein, 405 aa, Micromonospora sp.
MGEVVKRAYKYRFYPTPVQAEQLNRTFGCVRKVYNLALDARTRAWAVDRQRSTYVQSSAWLTEWKRTDELAYLNEVSSVPLQQTLRHLQAGFAAFWDKRSRYPRFKTKRTSRASAEYTRSAFRWRDGQLTLAKMDAPLSIVWSRPLPANAQPSTVTVSRDAADRWFVSLLMKDSTVKSLPSLESAVGIDAGITSLLTLSTGEKITNPRHERADRRKLAKAQRTLSRKAKDSANRAKARLAVARIHSRIADRRRDHLHKLSTRLVRENQTVVIEDLSVRNMLRNHSLARAISDAAWTQLCSMIEYKAAWYGRTVIAVDRWHAEHEDLLGVRSDQHRHRSRRPRLDVPRLRRRARPGRQRRPQHPRRRAGGEVKRLWRDDKTRPAQAAKARPSETGTPSGDRGNPRP

SEQ ID NO: 18234 - protein, 402 aa, Micromonospora sp.
LVTWANCYGDRVELVVQVKLLPTPGQAAVLGATLRACNQAACDVAVVARESAVYRNYDLRKHVYAGIKADYGLGAQAAQHVIKKVADAYTVLTANLKAGRYGKPGSNRRRRIEANPIGFRWDAAQPYDARMLSWQHDARTVSIWTTAGRLKAMAYTGSPTQLKAVATSVIGECDLVHRDGMWFLYASIEVAETPPYEPDGFLGVDMGISNIAYDSDGTRYAGTRLNGYRRRQMRLRARLQHKGTTSAKRLLVRRNKKEARHAANVNHRIAKTIVTEAARTGRGIAVEELTGIRERVRLRKPQRVTLHSWSFHQLGGFLTYKARRAGVPLVQVDPRYTSQTCHGCKHRDRRNRPNQETFTCRSCGVVAHADHNAALNIAERGVGSWGAVNRPHVASPRSQRGD

SEQ ID NO: 18235 - protein, 220 aa, unknown
  TnpB Polypeptide
MIPTLKNVRLKEYGYIPIGSKIISGTVSKKANRYYVSVIIDVENIPQKNTNQGIGIDLGIKDFAICSDKIIYKNINKTQRVKKLEKKLLREQKRLSRKYESLKIRNKKDKGEATRQNIQKQIAKVQILYQRLNNIRTDYINKVVSNVVRNKPSYITIEDLNVKGMMRNKHLSKAVAQQKFNEFRNKLANKCNALGIELRIVDRFYPSSKLCHKCGSIKKI

SEQ ID NO: 18236 - protein, 410 aa, Caldicoprobacter sp.
VPLITLKVQIHADSQTEAILKDAMWCATKVYNGLLWHLRKEYEETVKVNISRKNLNRILKELPRAKGYYSMSVQLTRDEVREAYKSFFTLKKKGLVQHKAPGFRRKGYLSPLKYVQSGFKVEGDKVTLSLGTSRGDGVKQVSFRISHRPDIEYERVRELSIAYDKFSGRVEARLVVEVKACENSGAGKAAVDLGETILMACAFDDGSVILYSGRFIKCIRRYWQKVRANLKQNSRRWKQIAHRKKKQIEHLLHITTSHFIEECVRRGVKEIVIGNLNGIRENIDYGEQLNQRLHVWPYRKLINMLKYKGELAGILVLDNVDEGSTSITCHACGEIMASNRRHRGLYVCSCGWKAQADVNGALNIYERAYKVSPVKGSSGRVARPVAVSFLLGWHGVTEPKRKDKLLRTSA

SEQ ID NO: 18237 - protein, 410 aa, Caldicoprobacter sp.
MDKTYILSVPEEYQGLAREISMVSGKIYSKAVNFFKRIQAKGINVSRKTFDQYMEWWLHQKSFKLHSQSKQAAYQQFWTAYQAYLKRLQKAKEKGQDTSKIRPPFRNKKYNKVVFKKSAIHFKDGDLILSNGKEQAPMVIKGCCLKGAPKYAELIFHQDKKKYYLHIVVEVEEGKIENTAGVMAIDLGVIHPMVCFDGREVLIYNGGILNSKIRYRNKKLGEFQQKLSKCQKDSRKFKELLRAKREVLKRVNNQIRDVLEKYTSYLVGYCIKNGIGTIVLGDLKGIRNGARHGKVPNQKIHQWMFRRVARRIEEKAEFVGIEVKFIKENGTSQSCPVCGSKNKPENRNYECKSCGFRYHRDGVGAINIYRKYTGSLSLVVGLLACPTGVRYTPHLCCPIEWNIHPVGKTA

SEQ ID NO: 18238 - protein, 376 aa, unknown
  TnpB Polypeptide
MKLVKTVKCKLEVNNQERDIILETISKFTQACNNALKIAKENNLWNKYKLHYLCYYQLKERYKLTANYIIRAIARVCVSRKRKPAIFKGGSLDLDKDLFRFIEKKESVSLATANGRLKIKLAIGNYQRGLLKDQKPTFAVLVYNKRKKCFYIHIVLEKPVETPFGSNPIGIDRGIYNLATTSNGLKFSGKQVKHIRNRYSKLRQSLQAKDTKGSKKLLKRLSGKEQRFMNSINHTISRRIVDSCKSGDILVLEDLKYIRDKIRLARKQRLIAYSWAFGQLGSFLEYKATEKGIPVVYVDPRHTSQKCPICKHIKHSNRNGHRFSCRNCGYIGNADIVASLNIRQVYLDTLSDGLSVNQPLITPLSAEVKADCFSCQ

SEQ ID NO: 18239 - protein, 406 aa, unknown
  TnpB Polypeptide
MELRRTAVVKLDVPDDRCDDLKRTMNTFRDASQRFADRGWAGDGDGFVITSRSHLQRLVYDPIRDDTGLHADLCVGAANHAADALSTCVEAMKDGERTSKPVFTSNTTVYNTNAVSYFDGYCTLAAYGSRVHAEFVYPDDSIQAEYLDNDEWTKQGAKLRYDHREDTYYLHVTVIRERDTTQEEAENQSVLGVDTNVDGCLAITSTGAFIGNADRLNHERRAYERRRARLQQQETRSAHLTLQSIGDRFARWSEDFLHRASKRLVREAVAHGCTAIVFEDLEDIRDRISNASKFQQWAFRELRRQTTYKAKAEGIAVETVNPAYTSRRCSHEACGFTHKQNRDGDQFACQECGKELHADYNAARNIASKYLQNRLKSGSGGATHHLALKSGTLNGNGDYSPSTSCG

SEQ ID NO: 18240 - protein, 408 aa, Gammaproteobacteria sp.
MLNAYKYRIYPTKAQAAQLACHFGCARHVYNSALAAKEKHYQETGKSLSKRAIQDAMVFSKKIEFPWLCDVNSQSLLASLDNLDRAFANFFRGRAKFPRYKKKSSGWQSFQCPQHVTVDAEAGVINLPKIKRIKTKLHRKFSGKIKTVTIKRNPSGHYFASVLVEDELALPMASPVIAEQTLGLDVGLTHVLIDSEGNKTDNPKFLKKSLYRLGVEQKIWARQKKGSANRSKQRRRVALLHERTGNRRHDFIHQETAKLAVKNHATSFAVEDLHIKGMVKNRKLSRAIHDVSWGKFLTVLTYKCERYGKNLLTINRFAPSSKQCHDCGYHNKVLPLSVREWECPSCLTIHDRDINAAKNIRLMGLADSPGHGDGVKSPSVAILVSASATAKGVESSLRRSQEAPTRAA

SEQ ID NO: 18241 - protein, 213 aa, Burkholderia sp.
MILVYRYRVKSLNGLLNKQSRAVNYVWNFCNDTQKHALKWSKTGEKLPNDPFGRRAAEKLAKAQRARKHRRHIAKLHAKVANARADFQHKLALDLVRRFDYIAIGNVSAAELARTRMAKSVYDASWSSFRNKLRYKAIAHGATFEEVDESGSTQSCSSCGSKDSTTRPKGIAGLRTREWACSDCGVVHDRDTNAALNILRCGRASPGVGILSL

SEQ ID NO: 18242 - protein, 440 aa, Blautia sp.
  misc_feature (118)..(121): Xaa can be any naturally occurring amino acid
VRKINRAVKIRIYPNAEQRVQIEKTIGCSRFIYNCMLADKIEHYKKEKKMLRNTPASYKKEYPWLKEVDSLALANVQMHLESAFRKFFREPSVGFPRFKSKKSARKSYTTNVVNGNIXXXXFIYNCMLADKIEHYKKEKKMLRNTPASYKKEYPWLKEVDSLALANVQMHLESAFRKFFREPSVGFPRFKSKKSARKSYTTNVVNGNIFLEGKYLKLPKMAAVRIKLHRPISEKWKLKSVTVRREPSGKYFASLLFYCENQTAEKGPAEKFIGIDFAMQGMCVFSTNERAKYPMFYRHAEKKLAREQRKLSRCQKGSQNYKKQKKRVALCHEKIRNQRKDFQHKLSTSLAESYDAVCVEDLNLKGMAGGFHFGKGVHDNGYGLFLSMLEYKLEERGKYLIKVDCILHPVRFAVYAERKKKNCLYLIGFIVVNVETEWIEM

SEQ ID NO: 18243 - protein, 442 aa, Lactobacillus sp.
LKSNKSIPRNAFQYEYLASEYFIAASPLLDQCSHKAHDLYNRALYDLRQGFFKRKYVKGYSQLDRLFKERYAKKESLLYHDLLYVQSAQQTLKEVNTVWSAWLKALKAYQKNPAKFTGRPRIPKYLRQKQRHIFFVTNQNARLKGNYLIIPKLQVKVKLDPKIKKIQRVAFKPTYGGYRLIVQYKTNKEISYLPDNGRYIGIDPGVDNAFACAGNTGACPLLINGRSLKSVNQYYNKERSRLKSLQAKYHQLESTVQTKQGAKPVYQETKAMQRLTAWRNAKIRQFAHKASKRIVDYALSCEANTIVIGNNKSWKRSSDMGKRSNQNFIGIPHKTMLDLIQYKANLQGITVIRTNEAYTSQTSALDHEKPCGENGNRSRQKQGKTPINRRIHRGLFKANDGRLINADVNGALQIIKKAFSKFSFDKGIAGVVLRPVKWTPLI

SEQ ID NO: 18244 - protein, 406 aa, Mariprofundus sp.
MQVLKAYKFRLEPTEDQKHLFAEFAGCRRFLWNKMLFMNLQRLKDKQPIIRYHEAAWWLTLWKKSDEFGFLAQAQSQVLQQCLKDLDRAFSDGFDRKQPLKRMPQFKRKGLGDSFRFPQSVRIEGDRVFLPKVGIVRFRESRSIKGLIRSATVSRRGKHWFVSILTAIEVDEPVHESSTATGIDRGVVNLATLSDGSVFEGSKPLKRLSKKLAREQRRLARKTKFSNNWKKQRERITRLYIKIADARNDAIHKATTIISKNHAVTVLEDLRTKNMTASAKGSVDEPGTSVRQKAGLNRSILDMGWFEFGQQLGYKQQWRGGQVILINPRNTSRKCSTCEFTDKGNRITQEQFSCTACGHAENADLNAAKNILAAGLAATACGGIGGQAPYEAGTRGAVMQSLPLAA

SEQ ID NO: 18245 - protein, 360 aa, unknown
  TnpB Polypeptide
MIRQEFTKSGKLLPEYGLTALLAKEKQMDYTSLPAKTSQQVVALLFKNWKSFFKLCKCKDKLNGKPKPPKYKHKTKGRNIVVFTYQQCKLKDGYIHFPKKVNIQPLRTKVTNLRQVRIIPQCSCHIIEVVYEKESIETTGLEPNSYLSIDLGLNNLATSYDSLCHKSFIINGRILKSINQYFNKRKTKLMSFIGGKGTSRRIGKLTLKRNCKVNDYMHKTSRFIVNYCIDNHIDTIVIGNNKDWKQQINMGKRNNQNFVSIPFEKLISQIQYKSEEVGIKVVITEESYTSKIDHYAGEEMCQHETYLGKRIQRGLFRSSTGKILNADLNGAIGILRKVVGESISQVVNRGGVETPTRLLV

SEQ ID NO: 18246 - protein, 173 aa, Microcystis sp.
MPSKEAWGVIKSNDFIAQVNLNIQGMVKNSRLAKSINDVAWSTLRQSSVLTFRQWLEYFGFKYGKATVATPSHNTSQNCSNCGQKVPKTLSTRTHVCPHCGYVEDRDINAAINILKRGLSTVGHTETDTLGERFPDQRLFVTLYAKSTYKMPRQDTSNPKITKVSKAIASSFY

SEQ ID NO: 18247 - protein, 1005 aa, unknown
  TnpB Polypeptide
MALKLVLGGILDEQGAGGRDLLDEQGAGGRGTRDEGKSSEKDEANEKEENDEDDPHFIWFGGSYPSRTMSKGEGGGEEKPEEEEELEEEKDDDVEDETILDTNFGVLTDKKVDGLFKGKKIGSDLSRTTIHVVVFDDDENTRKIYVDRKQGDSYTVQSRLIQHDVRGKKHMWRKFTGKDMLQDAKKFARDPREEQTRQKEAAEQTKARKKEARVAVNGPNPSRTFWDNNYSKVYAMVHNNPSRVAEAFERLPCDARHEVDDRTSSYATLTFKVVFMERGMKDFFRRCNRAHRQFWNTLLAIFKENEEMFVDHKWGEVPVDGKPQSFEQYLYGEVYGFSEGGITRGVKNCAENIPSRGRTLEQVRREVRECWDSVPKAVFWSALNQWKSAFESNFAKIAIAKKKGLSTKGFTVNFRKCGKKPEVIDLPGSGFINFRAETDDSIKNTTQERKNKKIKNAAERKERAKKRAAEKKKFLEETVKSPDNRSNWVCYRNEWYKHLGHRVEYGGKQVEVLKNNVRTTSHGKKLEKRLQRLSASADAPPAPVAAPAPVAVPTPTAPAPVAAPAPVAVPTPTAPAAVAAPTPTAPAPVAAPAPVAVPTPTAPAPVAAPTPTAPAPVAAPAPVAVPTSSTPTPTAPAAAERGEKKKKTLIIAKFGAKVIGAKKKETKLCGSAKSCNEILADEGKNIVNKRLRYNAKTGEAFVDVVVKREKTSSEANKDNKDAVVEKAAEKARGGSTVAAIDLGINPFFVAVNTGGEILHSDKAWRIKLLELRKKIDALQSKIAKRDHTTSLENGSKRTPTQYRKTTRKLQKKLAKMRERLKRVRKDYHYCEAKRIFKFCDTIVVNNLKVQQIAHESKKDGSLSKHARKNMLTLSPGYFVEVIKHVARRTPGKKVIFGCGEQWTSRTCTRCGKVNNELSLSKSFDCRECKFRIDRDVNGALNNLKEVLHKLFKPNGEFKDIPLRESKKPRRRKYQRKEQQQQEEEEEEENVNVLEEGDVENNNIDQ

SEQ ID NO: 18248 - protein, 573 aa, Halobacteriales sp.
MSDHLSLPIRLPDEDTDKFERLATVTYRVATHALEDHWTPVHLDGIADASHQAWKYFDEHEPFEELDLYLPSRFRRCILQKVGETLRSHADRRDAFQSIQNVLPDHKIQCIHRRRIKEQLWDDGDYLSSGYVDILIDQLNSYYDRHGRYPDTYFEMQDCPAYDSDVLPFSADDGPTSGQAVNYQYDSDSETLTLRLKTPDTHLPKTRGDWSWTEYERGGYEAFHNLLAHGDLSAPEFQPSRRKNGDAYYELSFPVEVEHTEATDTTDRVLALDAGIRKDMTAVVVTDGGEQLSTPQFIQFTERDGMRRLHRERTRLNDRLAALRRDGRSHTDEFAHVHSEYERVNSKTQYKREQLTHDVANQVLALALLYDVDAIVHEDLRSLSPPHGESTLSWELSSWARRDIIENIEYRAESAGVAVERVYPEGTSRSCPRCGSTGHTCKSPDHHHEQWWGGHFRCDNARCGFEGDRDYIGALNVARVFFNETDELDHGFMSSYTGDSEIVLARRSAGTRLTFGTGIVAYEPEQAAATTGGGSAVIAPAVAVPESNADGSDGRGPVVQQCTRFLRHTTESY

SEQ ID NO: 18249 - protein, 433 aa, Thermoprotei sp.
MARALRTVMVKSVNLSRKVFRVFVELEGMYRNMVEQLTMYAVRNSIKSFTRLKALKYREMRSIYPQLPSHYIYTACQNASTRAKSFLRLKRLGLVEREYPIVRRVSIWLDDHLWKPNGLTSIRIATHKGWVTVGLEPHKQYWRYVNRGWKLASEAKVKLDKGNRQLIIYLTFVKEVKEFKPKGYLPVDVNENNITVLVDGIAYLFETNTEKLVLGYYYRRKRVQERYDKLYGRKSRVKRKALRRLRERRKKQDIRWKIAGIVVRTAYERRYAIVLEKLGNKPANNMIERIRDKQLRHRIFQVSFRGIQRAIEGKAREYGVPVIYVNPKNASKLCPIHRTPINYNNGSRIGRCSEGGELWHRDVTACWNLLLKVLRGDGSHAPSSVGLSFVDVRLVPLASKATHDPIGISKSLWARWKSLPQIQYATVLNKMKR

SEQ ID NO: 18250 - protein, 502 aa, Microcoleus sp.
MSHRFHGCEIQQVSEKTLTRKLESSKTSSRASTSKEKRSLPFWDKSCQETSQQLWLDTKTDSPGLVATSSNGSVSQTITNSWFSAETSCLVNEKWLKIYLPPSTSLVADSTPGVNTNLLSKKIRVYPETELAAKWRTWIAASRWCYNQAIAILKTEKIGKYDLRKKIMDSAPLWVSEQPYNPRQMAVFQAFEAQKAAKKSKGTAKFRSRFDTSQTIRFQISNWKSKTFYPQATKGLSFKASEPIIEVMEHEPTLSLINGQWFICYAVDTAKPLQNESSLAIALDPGVRTFLTGFDGSDILEIGKGDIGRIYRLARHLDKLMSRIGIDKGGRFKRLRYCLRKSAAKIRIKIKNLVNELHKKAAKYLVTKYKLIFLPTFETQQMVKKGKRKLATKTARAMVTLSHYRFKQMLKHQAVKYGSTVVDITEEYTSKTCSKCGHIHTKLGGSKKFKCPECGHTLDRDLNGAFNILLKALRDTSLTGELAAFSVLPYTVASGLVLDLPG

SEQ ID NO: 18251 - protein, 303 aa, unknown
  TnpB Polypeptide
MPKYKKQDIMILEYTNQDVIIYDNGIKFPKIKTRLVVSNLKPSDSLKQVLVKPFYDGFMVCFVIDVETALSMHSMPNCASIDLGVDNLAALVTNEGHTYLYKGGIIKSINQYYNKQKAHYTSVLQSQTQEEAVSSKQLTTLNRKRYFQLKDYFHKVSKDIINKCVRHHVGTLVIGENKQWKQNVNIGKVNNQTFVSIPFDMLKKQLKYKAEQIGIQVIFQEESYTSKADFLSNDNIPSLGDKKTSFSGKRKGRGLYQSGTGIILNADINGACNILRKYDIHAFDGVSDFQYLQRPIVLSNLYT

SEQ ID NO: 18252 - protein, 398 aa, unknown
  TnpB Polypeptide
MKKVKKMIMSIKVRLNPNNKQLTKLFQYAGCARFAYNWAIAGEQENYKQGNKFLSDNDLRKEFTQLKKQSEYKWLNEVSSNVAKQAIKDACNAYKRFFKRQCGYPKFKSKKHSTPSFYQDNIKIRFTDTHVKVEGFSMSKKKNKQKLNWIKLCEKGRIPTNCKYMNPRFTYDGLYWYVSVGIEVNDNTIISSNEGIGIDLGIKTLAICSDGNTYKSINKIQKVKKLEKRKRRLQRSISRRYEKNKKGVSYCKTSNIIKREKELLKIVKRLTNIRHNHIHQTTSEIVKRKPSFICMEDLNVSGMMKNKHLSKAIQQQGFYEFGRQIEYKSESNNITVIIADRFFPSSKLCSCCGNIKKDLKLSDRIYKCECGNIIDRDFQASLNLKIYGENVYKKQSVA

SEQ ID NO: 18253 - protein, 450 aa, unknown
  TnpB Polypeptide
MKEKRVIKIYPRQLNNSYDYDLLLSYSHEAKLLYNYCNFIIRQMYFYNSKYEYNYTFDFVYQNEEPKLTGLLINYIEENNLLSTKLSQILCRYALVNNYKLISKVVQAVYRKVKADWTSYFKLLKLKKAGSYDKDVNIPSYKKGSYGLVEFNNQTISRKLLNKGYIGTASMKEGFKLPNWINIENITSFRVNVKHKKLLIEVLYNKKVCEHKTITIDKTKPTAAIDIGVNILAAITFNFNQRPLVVDNLDIKSFNRLYNRDIAKVKSLLPKKVLWSRLLSNITNKRNLRIDNLLGYKTNLIVDEFIKLGIKQVIIGKNKSWKKESSLNKVNNQNFVQIPFELFVQKLSYKLKEKGIFVYRQEESYTSKASFLNDDMIPTFGDKDSFKGFCGFSGYRQNRGLYKIKGKNRTIHADINGSYNIMRKAGVFIDRDKIDFLNKKDITPLNIKVA

SEQ ID NO: 18254 - protein, 380 aa, unknown
  TnpB Polypeptide
VFKAFVYRLYPSKSQRRRLEAVRETCRHFYNDCRRERKEAYEERGETISKTVQLRKVKVEKATSPYALDIHSHILQNVVADLDKAFAAFFRRVKAGANPGYPRFKARNRFPGFGYKEYGNGFKVDGRRLYLSGIGRIAVRWHRKLEGTIKTARIFCRAGKWFVAFACTVEKPEPLPATGESIGIDLGLLRLATLSNGEKKENPRWYRTILQELRVLQRKIARCMPGGRNRRRLILRLQRLMVHVANARKDFLNKFVHELIERFDRIVLEDLRVAAMAHGRFAMSILDAGWSYLVTHLTHKAESAGREVVKVDPAYTSKTCSGCGATFEHLSLSDRWVECDCGVSLDRDYNAAIVVFQRGRNGPLGAKLANGRVCPEAARL

SEQ ID NO: 18255 - protein, 391 aa, unknown
  TnpB Polypeptide
VLERHCADARFVKNLALEQANYFRAGRGPSPSPAERQRQLAEARQANPWLAEGSSSVQQQALRDFDRAMAGFFAGTHRRPTWWKKGRDEGFCIRDVKVRVLNRKWASVVVPKCGEVRFRLSRPLPKSYGMGRVTLDAAGRWHVSFAAPQPSIDRERTGREIGIDRGVATTIATSEKAMYRIPSPAKSTARIGRLQRRLARQQKGSKRIRRTKAEISRTWARITDRRTVWIEKLTTRLVCDYDVIFLERLEVSNMVRRPEPKPDPGRPGEFLPNGTSAKAGLNRVILGSAWGLFLRRLQEKAAASSVTVVLVDARYTSQTCKGCGHVSAENRKSQAVFSCVACGHRNHADFNAAQNILARGLEVLAPAPGHGASARVSPVLPAARTSEEVAA

SEQ ID NO: 18256 - protein, 213 aa, unknown
  TnpB Polypeptide
VDLGVNTLIAATDGQKVILISGRKAKATIQYRNKQLAHLSAKQSKHQKHSRRWKRLQRRKYCLLDKSKRQVRDLCHKATHQVAEAFPGALCYVGEPFNDAAQRARRTQAQTISQTCTRKIIQQLDYKTVGAVVIDEAYSSQTCPVCGRRSRHGRMYRCPHCGTTSPRDAVGATNILSLGVHGEMLPGRSLPEQVKYLRPWRSSSGGHPACSSA

SEQ ID NO: 18257 - protein, 259 aa, Microcystis sp.
MLKCETWKSYRYRFYPTPTQELLLRRTLGCVRLFYNKALHERKQAWYEKQERVGYAQTSSMLTDWKKQEELDFLNEVSCVPLPQGLRHLQTAFTNFFAGRTKYPSFKKKHQGGSAEFTKSAFKFKDKQIYLAKCTEPLPIRWSRQIPESCEPSTVTVRLHPSGRWHISIRFDDPTIKPLPVTDKAIGIDLGISSLVITSDGDKVSNPKHFKKHYRRLRKAQKSLSRKKKDSKNRGSSVDTILETVCESYKSYPSRVSES

SEQ ID NO: 18258 - protein, 425 aa, unknown
  TnpB Polypeptide
LIKLEPSSRQVTWLFRLFKDTRTTYNLAMAHLLEKKIHLKPAGVVSLGLVEAQLQKMFVARAGVLALARRHHRLLRTPKVPRQQAVKSVIAVFKAHYTREKKRLAMQARYPHAIAFRSRPRFCPGLKAKRMGGSDSISIEKRSFHLLDDSTFGLYQRMKFGGRAVFNRLKTQAGMNALMPVQCDFKVHFRHGKFYLILPSRRPPKKRVPRIDQEPIAAIDPGVRVPFTVYSPTGSVAEVGTNSQRVLDKHIASIDSVRQRLRAVRYAVDLERVFDWPCRKTKRNQRRRLRRARKRRAGAEDKAKRVIRDFHYKTAHYLLQHFRTIVLPRTSSHNWRTNRLARTTKRRSMMLRHGMFAARLIQTASDYPGSRVVRCSEAYTSRQCGACGKINDQLGSSKVFTCAGCGAVADRDVHAARNILLRCLQ

SEQ ID NO: 18259 - protein, 304 aa, Salmonella sp.
VINLDVAFSNFFNPKLKARFPTFKSKHGKQSSYHCVGIKVIDGAIKIPKIPPIEARLHREITGMLKSITLSRRATGKYYASILADDGQEVAAKPTCITNVAGYDMGLSHYLIGNDGCKVANPRHLVNAYRRLRALSRKKPGSANRHKARIRLAAQHERIASARADFQHKLSRRIIDENQAVIVETLKSANMMKNRRLARHIGDAAWSGFVAKLVYKAESSGVHLVKLDQWFASSKTCHCCGHKMSEMSLKVCEWKCPGCSADHDRDINAAINIQHKGITELMAAGLVVKAHRGLRESGTVPVVA

SEQ ID NO: 18260 - protein, 537 aa, Mycobacterium sp.
MTILGEVAPFVADLVAGVCIRTRLKGLTDADEAVLRQVGAHLGRLAGADLAARVRAGLGHDKEGWAERKRALTVESTARWAGSITKATHDQWGLARRAQAAHICSLTDGIVMIRHRLAQELGAKGTGGMPGGYRSQGEWFGKKRRLGVLEQRLARVEADRFAGHVSVVRGGKRLLRKRHHLTESGLTEAQWRGQWEAARWFLSADGEAGKRFGNETIRVTPAGEVSVRLPAPLEHLANAAHGRYILAGTVVFGYRGGQWADRVSANRAIAYRIHFSPNKQRWYLDASWQRKQVPTVPLEAMRAGDLVGVDMNADHLAAWYLDSHGNPVGAPGTFGYDLSGGADRRDAQVRHALTRLLHWATKSGCKAIAVQDLDFTDSTTREKHGRRRRFRQVISGMPTSKLRARLISMASEHGISVIAVDPAHTSKWGAQHWQKPLAARQPQTTRHHAASVAIGRRALGHRIRRRVAPPQPHQSDVAEHRTTQAESGVRERETTRHPRPGPRTRSACPPGAKNAGSQAPHHRSGPPTEPTSVSLSV

SEQ ID NO: 18261 - protein, 355 aa, Mycobacterium sp.
MTAMARFEVPDGWVVQAYRFALDPTPAQQRALASHAGAARFAHNHMLALAKAVMSQRAAERSYGIAESELTPALWWSLPALRKVWNQRKATCAPWWAENSKEAYNTGLDGLARGLDGWAKSRRGDRAGEAVGFPRFKSARTARSVRFTTGTIRCEPDRRHISLPRLGTIRTHESTRKLARRLDAGTARILSATATQDGAGRWYCAFAALVAAKTRPAHAGLSPHPVIGVDVGVKADSLLVVATPSGAEVQTDSSPPIADRCTTPASDVAAAGRPPAGPLRPSRPHQAAAIQAVAGHSDPDRPYPCSWCGGAPRRAAQSHYDAGSAAPRNCGGNVERFGHARQGRCRQTRPEPSTR

SEQ ID NO: 18262 - protein, 441 aa, Mycobacterium sp.
MRRAYVFRLRPTARQHIALAACVDCHRELYNAALQERRDAWAHSKTRINYGDQSAQLTGIRSARPDVAVWSFSSQQATLRRLTKAFGGFFRRVKTGKPGVKPGYPRFKGKARFDSVEWPKDGDGARWLPATKRVYLQGIGQVKVEVHRQVAGRVKTIQIKRQGRRWMLVLSCDDVPTNPLPVTGRQVGIDVGIASLATTSDGEHVDNPRWGRAAADKLAAAQQRLGRAKRGSNNRHERRETVAACHRKIANQRKDFHHKQARKLIAGYDLLVVEDLKIANMMRRAKPVADEDNPGQYLPNGARAKSGLSRSIGDAGWGGFVLILRAKAEDAGCIWIEVDPRHTSDGCEECGYAAAQNRVTQAAFVCQRCSHRAQADEMAARNILDPRHTSDGCEECGYAAAQNRVTQAAFVCQRCSHRAQADEMAARNILRAGLALHAQAA

SEQ ID NO: 18263 - protein, 449 aa, Algoriphagus sp.
MFRTVCTDAVCFGGPISEVFCECSPISMGTFTKSAGVSINYTILAQVKTIYRTFQFELQPTQEQKVLLDKHFGCIRYVFNHFLNERKEQYQAGNKSDNYYAQAAALTELKKQEETSWLKEVNSQSLQFALRCLDTAYVNFFRGNAKFPRFKSRKKKNTFTVPQFAKLRDGRFYAPKFKEGIKVTVHREVKGEIGKCILSKTPTGKYFVSILSEEQYQPKEKTGAVCGIDLGLKDFAVTSDGIRFKNNKYTKHYERKLAKAQEHLSRKTKGSNSFEKQRRKTALIHGKITNSRMDNLHQVSHKLVSDFDLIALEDLDVKGMVKNPKLAKHISDASWGTFVRFLEYKADWNDRQIVKINRWYPSSKTCCECGWINQDLNLSIREWTCKNGHVLDRDLNAAKNILKEGLKIYGQGLSITRVERKSDFGNKAHAMKPEAHPIAFGVGGQFTIA

SEQ ID NO: 18264 - protein, 285 aa, Limnoraphis sp.
MRIAYQFRLLPTSKQRATMSRWLDMLRLQYNWMLAERFQWWEENRSPVNACPLVCYLPELKDQPDYYSQKRSLVSLKQDRPWYKDIHSQVLQDMVKRVKLAFDRYLKGDSNGNRSGKPRFKSKNRYRSLTYPQASIDWINGNRIELPKIGAVKVIWHRPLPDGFAVKTAIISQKSDGWYITLTLEDVSVPEITSDVDRTWDNSIGIDLGLENFVRFVGVKVIWHRPLPDGFAVKTAIISQKSDGWYITLTLEDVSVPEITSDVDRTWDNSIGIDLGLENFVRFVG

SEQ ID NO: 18265 - protein, 287 aa, Escherichia sp.
MHQENTMLPRRISVSLFIDQSIIWPVKRLQAFKFQLRPGGQQEREMRRFAGACRFVFNRALALQNENHEAGNKYIPYGKMASWLVEWKNATETQWLKDSPSQPLQQSLKGLERAYKNFFQKRAAFPRFKKRGQNDAFRYPQGVKLDQENSRIFLPKLGWMRYRNSRQVTGVVKNVTVSQSCGKWYISIQTESEVSTPAHPSASMVGLDAGVAKLATLSDGTVFEPVNSFQKNQKTPARLQRQLSRKVKFSNNWQKQKRKIQRLHSCIANIRRDYLHKVTTPSAKTTQ

SEQ ID NO: 18266 - protein, 315 aa, unknown
  TnpB Polypeptide
  misc_feature (56)..(63): Xaa can be any naturally occurring amino acid
MTDALFLTSDEVDDLAEPADYVAAVRDGYREIGEGAPAEPRTKLANDDPPGMLTTXXXXXXXXPTGFTTGFGRSRLDVGANNLVACTTTTGQQLLYEGRDLFEEFREVTEQIAYYQSLLEDQRKTSKRIDRLYRKRTNRRNHAQDDLVRDLVERLYEEGVSTLYVGDIKGVLSTHWSARVNEKTHNFWAYRRFIDRLGDVCEEYGISVEGASEAWTSQDCPECGEREETIRHEDSLACVCGFEGHADLVASESFLRRQTVEIRPMARPVYLKWNNHDWREHHSPPSLVETTANEEYTDQSTALGGKVASVEAQDD

SEQ ID NO: 18267 - protein, 404 aa, unknown
  TnpB Polypeptide
MKATRVERHIITKTHPMWKDCDSLCFKSKNLYNYALYIQRQLFIGKKPILKYNELTFELKHSEPFKALGSNSSQHTLKLLDKCWKSFFVAIKDYMKHPNKYLGKPRLPNYKEKDGRHICVLTNLQSQIKEGYLYFAFRTLKEYNNLFKTNVKNKHMQTRIVPKGSCYMLEIVYEKEIIESSIEPNRICGIDLGVNNFATLTNNVGALSIVINGRVLKSYNQYWNKKLAISRSDLMKRHKMHWSNELERLTQQRNNKMEYFMHCASKSVVNYCIGLNIDTVVIGHNKKWKQDCRLNKNINQGFVQIPFNNFIEKLKYKCEDVGIKFIQTEESYTSGTSFLDNELPIKSNYNKKRRIHRGMFKSNDGKLINSDVNGSLQIIKKVFPNVFNDGIVGVYLHPIRVSIS

SEQ ID NO: 18268 - protein, 454 aa, Thermoprotei sp.
MTASTQLLSDEERGSAPVAGDAAIRLEVEPGPIRTYTLKHDRGDEVLPLLIAYRKVLDSMLDDIWGTVTWKAVKIPGKKQFRLFPRYRKDKAFRKSLRDKYLEGWAFAAHWVDSALATAFSIMKSWRKNYNKGYRKRRRPVARRLFARAPQDVCKLEGDKLRVTLEPGKFVWFDLSRRYFPLPKEVSSRGIGEPVITPERIHIPIHVPPGRDGTTKPPARKMAWDSNLLSLDGYSPETGWVRIDTRALATVHISSFEKRRSVQRKLKGSRRGRRVLAKYSRRERNSARKHVIEIARVIGSLAEVNGFEELRPRRMLRRSRAWNRMIMRADWRSIAKRVEGAVEVPPQHTSDACSRCGWVNRDLRGSTVFRCERCGLTIDRQLNAAINLYLRMEGVPHRRERWDENVLPSLVGGYLLTGAERRGPDELVRGLYDAVKPKLYAYDRHTDAYLRAPT

SEQ ID NO: 18269 - protein, 413 aa, unknown
  TnpB Polypeptide
MILVKQINYKKSHKDFNELDTLCFLSKNLYNSTLYKVREHFFKKGEFLSYYTINKLFIRENQKDYRALPSKVSQNTQRLVDENFKSFFALLKKKREGKYDSKIKIPGYLDKLKGKQVVLYDKQSLSFKKEGYIHLSKTNIFIKSDFNKEDVKFIRIVPKNNLITIEIGYEKEEKIFKDNGKFASIDLGLNNLMTIVTSTNKKPLIINGLPLKSINQRFNKRSSKVKSELFLKNQKYHSKKLCNITNKRNNKIKDYLHKSSTFLVNYLVSNDITNLIIGYNENWKQNINLSKKNNQNFVSIPFYTLINQIHYKCKLKGINVILINESYTSKCSFLDNEKIKKHDEYLGIRIKRGLFKRKINNQLVNADVNSACNILKKYLLKEVAKNSKDIYNSILENLVKVCSMPCIKIKTFI

SEQ ID NO: 18270 - protein, 390 aa, Coleofasciculus sp.
MTQKAFKYRFYPTQSQETLLRRTLGCTRLVYNRALAARTEAWYERQERVGYTQTSSLLTEWKKQDELDFLNEVSCVPLQQGLRHLQTAFTNFFAGRAQYPNFKKKRNGGSAEFTKSAFKWRDGKLFLAKSLEPLNIRWSRTIPEGAEPSTVTVKLSPSGRWMVSLLVDIEIKPLPESPNVVGIDLGITSLIALSTGEKIANPKGFKAKRAKLKKAQKSLSRKQKGSNNRYKACLKVAKVHAEISDARLDFLHKLTIRLVRENQTIAVEDLAVKNMVKNRKLALSISDASWGELVRQLEYKCDWYSRTLVKIDRWFPSSKRCGNCGHIVEKLPLNIREWDCPKCSSHHDRDINAAHNILAAGLAVKVCGANVRPDRHKPDGSCYEAERSKK

SEQ ID NO: 18271 - protein, 371 aa, Bacillus sp.
MIIAKKVRLYPSPLQEQKLWQSVGTARFIYNWTLAKQEENYKKGGKFISDNDLRKEITQLKKNELSWLNEVSNNVAKQAVKDACNAYKRFFKGLSEKPRFKSKRKSKKSFYNDNVKLKVKHGNLVNIEKVGWIKTNEQLPIDVKYSNPRISYDNKYWYISVGLEKEAILEQLTDVSLGIDVGLKDLAICSDGTVYKNINKTYIVRKTEKKLRRLQRQVSRKYEKNKDGKTFRKTRNIIKVEREIQRIHRRLANIRYNHLHQTTTSIAKTKPYRVVIEDLHVKGMMKNKHLSKAIAKQGFYEFKRQLDYKCKLRGIELVLADRFYPSSKTCSRCGEIKKDLKLKDRIFKCICGFTIDRDINASINLSNYKLA

SEQ ID NO: 18272 - protein, 396 aa, Nonomuraea sp.
MGVRRSFTFLLRPTARQAAALAACLEDHRQLYNVALEHRRTAYARAGVSVRYGEQSAELKHIRADDPDGQGRWSFSSQQATLRRLDKAFAAFFKRVRAGRAPGFPRFKGRGRFDTVEWPKDGDGCRWDSQPEHPTATYVRLQGVGHVRVHRHRPVRGQVKTISVTREGSRWFVVLSCDDVPAEPLPATGVVAGIDMGVASLVTTSDGQHLTNPRHLAASAGRLADAQRVLARKQRGSKRRRKAVARVAALHARVRRQRLDGAHKAARALVAAYDVIVHEDLRIANMTRSAVGTIESPGRNVAAKSGLNRSILDAGWGVFLTILAYKAESAGRKLIAVNPAGTSRTCARCGHSARENRVTQAGFACTACGHTAHADVNAAKNILRAGLALREPAEAA

SEQ ID NO: 18273 - protein, 415 aa, unknown
  TnpB Polypeptide
MRSQKIRLKLTKEQERLAWWYSKVSRNYWNLLVDIDKSNNKGEFDEILSKTGNKTYYSKFHDRCVYILNQSDYTNLAKFVVEDNAKEDLEKWSWYYQPNQSFIYNFISRELVKIKGRNKGRLSFKHASKTPPNFNVRCDAIYNNSSNNRSSRIYLKDNGKLQIPTIGEVRFGSTRADFDLSCKKQVAKVSFDGKYWYLTYTEDVESTVSELPDYTDGIGIDLGITPLATMYDGTTVPNIKTFRRFRVLNKRLKRLQRKLSRKYLINKCNKHNKTKNIIKLERQIKLIYRSITNIRVNHIRKFVSELVKRQPQYIAIEDLNVKGLLKNKQLAKDINNCSFYTIREHLIRKAKERHIVVRLVDRFYPSSKTCSNCGSYKVDLKLSQRVYRCEHCNMQIDRDFNASLNIAHTDRYTLA

SEQ ID NO: 18274 - protein, 605 aa, unknown
  TnpB Polypeptide
MASYYSDKQLDTLKKRVFRGLELATRQKGSVMTEIAQVAFSAYSLVRRFNIEGDIEDLLVAVRNLKGCKGNKYFINFAHNLYHWMEQNFADLPEYRMKEAGNKQLEVKVREEIKRLEKERQMQLSLAKKQRAEREREYTRTKRKQAAAKRAKKAQQRRTREERIVRERFDRLHPFKVTHKIRLKPKKEQEAYLDRCIQVNHFSYNWAIDQWQLSRARDERVFADELLKRFNEIKYTEFPELQEVTFFAVSTAFRNFRRAINKFFRSIENGERPTPPRLKEADDKCGSVFYVANWLDKAISDNNPDQPDSPKNPKRPYLRFPGIGYIKMTEPLRFSGRISSVTVKRESDGHWYACIRVNINRDEWISKHNKALLRTPPVGIDLGVKNYATMSNGIVIENPCIYKRSLKRKKALNRKISRCQHPRDEVEVAKGVQKSNNFRKASMRYARFLSRQAHRRNDFMHKVTSALAYNNRNVAVETLNVEQMKRQHRLSGYLADIMPYKFRKVLGQKMSMMKGNLVEADKTFESTNTCSVCGYINQQKLALKERTFVCEHCGHTADRDLNAAINLKKLVGLGEPEYKPAEPRPFLRILQRNGIKAHVIETGSQ

SEQ ID NO: 18275 - protein, 489 aa, Vulcanisaeta sp.
MLCRAVAVELEVTKELNRLLYSVESAYLGIVREVATYAVVNNVLSATQLQGLFYSKYRLEYPSLNSQLIIQAIRQAVQIAKSFIAQRKKGLASKPYPEVRSISIRFVETAWNYEEFVKSVAPVRIALSLPGGRREVWLRLHKRFWLFWWRVLNGEAELASTLMIKRKLNKWYAVFIFKLKPRREVPQRVVAFDINENTVAVGRVDLPSTVDKVVNWNRQYMIPELYTIKTDFGKLARRYERVRNAIIEKLKPEFALPNGKYMNITNTREFRKHMKRLRESGRKLGRVRYVASELTKNPSIIITEDLGEKPQESMIDGIEKNELRHRIKQTPFKALEKAVEEKALERGSKIFRASSYRNSRVCPIHFTRLERTDDWHVLKCPLGHYVDRDHTSVLNMAWKLTPEAWTKSVWWNLRREINWREHEDNSNPIIPKYIIQHLYAILKEFKASEENPAVLARGNPMNPAGRADEGWARKPPTPFQDREGVSLNP

SEQ ID NO: 18276 - protein, 478 aa, Vulcanisaeta sp.
MLRRAVAVELETTKELNKLLHSVEAAYLNIVREVVEYAVANNATSVAKLHRLFYSKYRLEYPGLHSHLVIQAIKQASEIAKSFVERRRGLVNKPYPKIKTVSIRFTEMAWGYEQFVKSIAPVRLSLSLLGERREVWLRLHKRFWRYWWLVLNKKASLAGTLIVKRKLNKWYAIFTFKIETEERTPQAIVSFDINENTVAVGKIDLTSTVGMVTNWNRQYLTPQLYMIRTDFGRLARRYKTIRNKIIEKLKPEFALPNGKYVNVTNTREFRKRVKHLREGVRKVGRVRQIANELTKTPAIIITEELGDNPQESMIDGIEKNELRHRIKQTPFKALERVVEDKALERGSKLFRVSAYRNSRVCPIHFVRLESTDEWHTLQCPLGHLVHRDYASVMNMAWKITPESWTKGVWWNMKKNMNWRKHEGKSNPIIPYEIVKHIHAMLKTFTASEQSPAMLARGKPMNPAGRADEGWARKPPTPF

SEQ ID NO: 18277 - protein, 357 aa, Firmicutes sp.
MLRAYKYRIYPNKEQVLFLSNTFGAARFIYNKMLYDKIEHYKQTGQTLNNTPAQYKSDFPWLKEVDSLALANEQLNLQKAYKNFFRDKKVGFPKYKSKKKNYFSFTTNNQKGTVSIEDGLLKVPKLKSRIKIKVHRPLLGDIRSCTISKTPTGKYYASILVNEEIMPLPKASDSIGIDVGIKTFATLSTGEFIDNPKWLRKSEKRLIRLQRNLSRKQKGSKNRYKARLKVARLHEKIKNQRNDFLHKTSTILIRENQALGIEDLRVKNMLKNHKLAKAISEVSWAEFRRLLEYKSNWYGRQLTVAPSNYASSQLCSDCGHKNPLVKNLKVRQWICPNCGVSHDRDVNAAKNLLKLVT

SEQ ID NO: 18278 - protein, 385 aa, Clostridium sp.
VKRVISFVLKPNKNQQIILGCLTYASSKLWNIANYERKNWVKESGLEYPNWFKQKKELKNHFWYKNLPFQSAQEVLKQLNESWKSFYTLKKTGGVGNPKPPKFKHSKFNVRYLNKGFKCLENSIRLSIPKQLQNYLKERFSITDKFLNIACPKEIHGIPKIIEIIPQANKSYSINIIVDLPDVNLKADNSIYMSIDLGINNLMAAYLSTGETFIISGRQILSINNYFDKKTAYCQGISDSQQSAKGIQYPKKSKRVKQLYIKRAKQIDHVLHTATKRVMDIAEQYNVCKIIIGDITNIRDNKDLGNTTNQKFHKWPFKKISDKLTYKAEQQGIAIERQEESYTSQCSPHAEKVSKEYAVKSNRKHRGLYKEGAQIYNAEGVNSFK

SEQ ID NO: 18279 - protein, 289 aa, Salmonella sp.
KRAAFPRFKKRGQNDAFHYPQGVKAGQASNRIYLPKPGWIRYRNSREVTGEVKNVTVSQSCGEWYVSLRTEYEVADPVHNTGSMVGLDTGVTKLATLSDGTLYQPVNRFKQASASWQKQKRKIRRPHSHMANIRCDYLHKVTSEISKNHVMIVIEDLKVSNMSKSAKGTSEQHGCNVRAKSGLNRSIPDQEWYEMRRQPEYKQHWRSGQVIAPPAHTSQRCACCGHTPKDNRQSQSKFKCQICGYTANADVNGARYILAAGHAVLACGGMVQSGRPLKQEPTGASQAPV

SEQ ID NO: 18280 - protein, 394 aa, unknown
  TnpB Polypeptide
MIKSIKVRLNPNNKQFTKLFQYAGSARFAYNWAIDREEENHRQGNKFLSDMDLRKEFTQLKKLEEYKWLNEISNNVTKQAIKDACSAYKNFFKGQSKFPKFKSRKHSTPSFYQDNVRIQFTNTHVKVEAFSMSRKKNKQKLNWIKLYEKRKIPTDCKYLNPRFTYDGIYWYVSVGVEVDDNTENTPPVNEGIGIDLGIKDLAVCSDGNTYKNINKTQRVKKLEKKKRRLQRSVSRKYDKNKKGENYCKTSNIIKREKELLKISKRLTNIRQNYLHQTTSEIIKRKPSFICIEDLNVSGMMKNRHLSKAVQEQKFYEFRRQIEYKARWNNIPLIIADRFFPSSKMCSCCGHIKKDLKLSDRIYKCECGNIINRDFQASLNLKKYGEDVLKQESVA

SEQ ID NO: 18281 - protein, 507 aa, unknown
  TnpB Polypeptide
VFSLFLLLRRAVAVELEVTEELNKLLYSVEFAYLSIVREVVMYAVVNNVTSATQLHELFYTKYRREYSSLNSQLVQQAIRQAVQIAKSFIERRRKGLVHKPYPEVRSVSIRFTESAWNYEEFVESIAPVRIAISPISTGKRGRGGRRFEVWLKLHKRFWLYWWRVLNGEARLASTLVIKRKANKWYAIFVFEIKPREEEPKSIVAFDINENTVAVGKIDLLSTMGKVADWNRQYLTPQLYMIRTDFGRLAKRYEAIRNTIIERLKPGFALPNGKYVNITNTREFRKRVKRLSEGDRKLGRVRYVANELTRTPAIIITEELGDNPQESMINGIEKDELRHRIKQTPFKKLESAVEDKALERGSRVFKVSSYRNSRVCPIHFTRLEKTDDWHILKCPFEHLVHRDYASVTNMLWKITPEAWTKGIWWNMKKNMNWREYEGESNPLIPYSLVQYIHAILKSFTASLEQSPAVLARGKPMTPAGGANEGWARKPPQHGEEASLVFQFIPLA

SEQ ID NO: 18282 - protein, 429 aa, unknown
  TnpB Polypeptide
MAARRAILIELPKDKCDVDYIKRLMALTNLAYRDYEVWSPDLPRTIQHQLYGSFKNFMESLVFGTEPKRWFTRTWVPLKVLRIYSDGTMKGDRGAPVVLEFRSSSDYKSNVIKIRQVCKNEPGYVVELTMPKWVIDRAKEGGDIKFAMVGLKDDKPYLALVAEREVEPYQPSGYRLVVDVNAWSNGVAYGIINPSNKIAEYSSLRPNLRLIDTWYHKAEKLSKELGMLKRLGLGSTLEAERLRMRINMLRRKIYAYLRDFVQKRAHELVMKALRLRAEVFIDDMIEESRRELLEMRLPRGLRKVYLAETRRFVKLLVTQLEWYGVSYEFKRLPSTVCPICGHKLIQEKDRVMSCTNCGFKAPRDKVPMYWAIRLGSSVRGVDEDQAREVSHAPLVIKKPLSFIMEYNRVAPVKEEVTFKTPGKPIKKGG

SEQ ID NO: 18283 - protein, 366 aa, unknown
  TnpB Polypeptide
MQLHQGFKFRLYPTQEQTILINKTIGCTRYVYNHFLDLRIKLYEAEQKTLNFNACCLELTQLKKQIEWLNEVDSMSLQQSVKDLDKSYQKFFKEKKGFPKFKSKKNFKQSYRTNANKGSIEVESNRIRLPKLGWVKFAKSREVNGKILSATIRRNPSGKYFISLLCEVDIQPLLMVDHAIGIDLGIKEFAVTSAGEHFGNPKYYRKYERKLKQLQRKLSKKQKGSRNRDKVRIKVAKAHETIRNCRQDFLHKLSTKLINENQVICLEDLKVENMIQNHHLAKSIADASWSEFRIMLEYKAKWYGRTISVIGKTFPSSQNCSACGYRNKDVKNLNLREWICPSCGTHHDRDENAAKNILREGLRLAV

SEQ ID NO: 18284 - protein, 468 aa, unknown
  TnpB Polypeptide
MGQATRTTKLQLDLGKRTAGGANTEKRTYLDMTATVLNEARAFYLELFLSHAGKLDEKVCYFSEKHQEMRERKISAQELLTWAEAATCATKQHPHPWAGWNFSERFPQMPFEYRRSVIKDAIGKARSYLSNLAHWQKTGKQKGKPGLPGASNHPTLYEGTLRLDLSESSKQDRFVRLKVYTGETWQWHHYPVRISRYFEQRLRERAWEKESPKLVLRKRSAALHFAQTRGIQAKKVVESKQDPDLVTLGVDLNVKNLAVITVRQHDQIIQTVFLTDHGLDQARYRHLKRIAKKQHLSGKPVKGEDSNQDLWRHVRRMNEDAAHKVAGQIARVCARYPGCVLLFERLRKIKHRGASKSRRMNRKQANQLRGKINQYARDKAYEQSVVTVEVNPHGTSQYCSRCGAKGERFSSRGGAWMKAKGGKVFRCPLCHYEANADHNASKNMHHSFYQEWHWRRKEKAPSQAAPSG

SEQ ID NO: 18285 - protein, 372 aa, Paenibacillus sp.
MHPNIKERKRLMHRTYKFRLYPTKAEQQNIHFALERCRLLYNRLLAERIVAYQQTGLSLTYYEQKASLPERKQYIPELKNVHSGVLQHVVERLDKAYQAFFRRVKNGEKAGFPRFKSERRYNSFTYPQSGFSIKGKHLVLSKIGDVRIRLHRQPQGTIKTCTIMVKNGKYYACFSCKVESQHLPVSEKQIGIDLGVSQLAVTSDGDRIESPKFLRKREGKLKRKQRAVSKKRRGSNRRYKAVRDLARLHEKVANQRKDYAHKESRKLINEYGFIAFEDLSIQGMVKNHHLAKSIVDAGWNQFVQFVTYKAESAGRQIVHVDPSGTSQRCSSCGEIVKKSLAVRIHQCPCGYAADRDENAAINILKQALQSVS

SEQ ID NO: 18286 - protein, 390 aa, unknown
  TnpB Polypeptide
VWNWALDARRKAYARRGETLTSVDLSRMLTRIKRSKTRGWLAEVPSSCLQQKLRDLDAAYRNAFAGRARFPRFKSRRGVQRIRVEFDQRHAGKVRAWLAGRMVLPGLGVVKLRGRALSGPMPKLVTVSRDMAGRWWASFAVEEVIEVMAPAPHASIGVDVGVAHLAVLSTGEGVANPRMLSRHLGRLARLHQRLARQCRGSKRRQRTKVCIARVHARIVDCRREYLHRLSHRLVSENQVIAIEDLNAEGMGRSAKGTKTCPGNGVRAKAGLNRALKDAAFGELRRQLVYKGEWYGRTVVAVDRWFASSRRCSACGAHKGELSLDERRWCCRACGAEHDRDVNAARNLEVEGLRSILHPEDTGGVRASGGEGERHSVPGPVAVSARICPAA

SEQ ID NO: 18287 - protein, 406 aa, unknown
  TnpB Polypeptide
MLVHKGFKYRLYPTKEQETQLLQQAGNTRFIWNKFLEFNLKSYKDTKKFLFAYDMSMSIPKLKEEFEFLKLSFSQSLQQVGRHLDKSLKDSFKKTKSFPKFKKKSNQDSFTVPQAFFLNKNSVKLPKIGKVKWVKHRNWKGNPKFLTVSRDGNQWYCSVTCEVNLPDKQYSDKNIVGIDVGLKKFAVLSDNTKVRRVRHFNKYDRKLKREQRWLSRKTKGSNNRKKQITKVQIVHRKIRNTRKDFLHKTSSDMIAKYSGVAVEDLNVSGMMKNHKLARSISDVGWYEFIRMLEYKALWNSKYFIKVDKWYASSKICNKCGNKKVDLALKDRTYKCENCKSIIGRDYNASKNIRDEGIRILEINKNKTTVGYTGSNACGDDKFHLFPEEEKEVVVKETGKRITTLIS

SEQ ID NO: 18288 - protein, 331 aa, unknown
  TnpB Polypeptide
MARRVKAIRAPVSMKIAPSEPLLTLINNYVKALRFVLFWLKENVPNPNEKGVLGKVHEGLYTRLREEYNLPSKVAEDCYRDALSVYKGWLNNPKKGRFPRVYKPTVWLTPKASYDVYFEAMSVRIASVGELPILGYPRNLREYMSWRMKEARLVIKDGKAFLKVVFEKPLDSVEPKESIAVDINMAEVVVGKDDKHYVRIPTRLEEVHHWKSLAENLQKKYPRMWRGNKRILHRVRSFHLKAKRVMEDFARKVGKWVVEIAEDFGANIIKLENLRNLIKNVDKLPKEFRDKLYLMQYRRLQYWISWQARKHGMVVELVNPSYSSVSCPKVW

SEQ ID NO: 18289 - protein, 405 aa, unknown
  TnpB Polypeptide
MCEITYNVKMIFEDQEDNSFWLNLLNEEKDMFNYASKLVYNKKPNLNQKDIANLIYYPIRNQTKYLNAQCVCKIEREIVSTFRSIKSNKHKNAKIPEKKNLSMRLDKRLYSKFNKNGIYLISNKSMKRCKATFNLYPKIEEMFEKYTLADPLIFYRDNEFYLSVTFNVPSIVKNNEDTLGIDLGCRRIITTSNGDAIKSNDYLRQKRKIRYLKRILNSKKKNSHSARTKLKKLKNKEHNFSKQYIEKTVNYILKNTKESNIAIEDLKGIKKKTNKKYSSHNKKICQIPFYMFRTILTYKATLYGKEVKTVSPVYTSQIDCTTNKRDGKRKGCRYYSVNDYVLDADWNAAINIKNRAENVKHLISYEKLPLDGCLNILNKQAAVNRPIVNNTSYDTVTSHSQAIPL

SEQ ID NO: 18290 - protein, 188 aa, Oceanospirillales sp.
MWRSLLLYVLFDYLHRCSTTTSEADLGIAQRAKNKKRVKVTHAKIANKRKDDLHKYSRKLVDENAVIFVGNVNFKGLAKTKLAKSVLDAGWGMLKTMLDYKCDHAGIVFEEVNEAYTTQTCSCCGVIPANSPKGRAGLRIREWSCAECGAMHDRDVNAAKNILALSVAQCMTEMLMRQRTFLRSGMTV

SEQ ID NO: 18291 - protein, 370 aa, unknown
  TnpB Polypeptide
MLKSYKYRIYPNDEQREMIEKHFGCCRFVYNWALNEKITAWKERKESLSCSSLIKRLPGELKEQYPFLKEVTALSLQAAIRNLDTAYSNFFRNTGGFPKFKSRKNEQSVQFIQNASVDFEAGIINLPKTRGIRCIFDRRFDGVIKTVTVRRNCAGRYFVSVLVKNDEKEKPCRPVNPATSIGIDLGLKELAVCSNGWTFENIEMTERQQKRLKMLRRRIDRKKKGSKNREKARLRMARYMEKLRNRRDDRLHKASHTLATSTKIKTIFIEDLTFSAMASKKGIAKRLHNIALGSFLKMLSYKCQWNGVNLIKVGKYYPSSKTCHVCGFKLSHLSIDTRRWKCPECGTEHDRDINAAINIKNEGLRITLKK

SEQ ID NO: 18292 - protein, 389 aa, unknown
  TnpB Polypeptide
VRRAYKFRAYPTVSQEGRAVRLLRDHCDLYNAALEERRDAWRKRNVSVGYNDQCAQLKEIRKNDPTGQGRHSCTAQQQTLRRLDATFRAFFRRAKAKRHRLGYPRFKPYQRFDQVRFVAGDGAKWMPAGAGRWARASFQAVGHLKVRQHRPVDGRVKMLQLKRECRRWYVIVVIEADAEPLQPSGRTAGVDVGVARFLTTSDGVVVANPRFLDSAQPRIARLQRRKERARLGSGNRRRLRRTLAREWRKVRNQRRDFHHKTARALVDTYDVLALEDLHIGGLTASARGTAEEPGRNLAQKAGLNRSILDAGWGQFTSILVAKAESAGRRVVRVEPGYTSLDGHACGSRCARPRQDIVICPKCGEQDADRNGACNIATRAGLGSGQAQVA

SEQ ID NO: 18293 - protein, 417 aa, unknown
  TnpB Polypeptide
MTDKTKKWLEKVKQTKEKRKSQVCKVYELKIDKSHISKEKSIYLKQLFLEAKWLYNSILSSEDIFKFDLKNKKIMVLDKDKNQIEKEIKVLSSQMRQAVHQKICYSIKSLSTKKKKRKTKEVGRLKFKSQLNSIVLNQFGITYRIENEKYIFIQGFKKHFKVKGFNQIPENAEFANANLIRRCGNYFLKVTCFLPKEEKARTGKSVGLDFGIKDSVITSDGNKYLFQFSETKQLKKVSRKLHKAKLGSSNRYKIKNKLQKEYEKISGRKKDCKNKFVAKLVKENDIICVQDEMIHNWRKSKLKGFGRRIQFGISSGIISDLKKKSETVLVPKNFPSTQLCPSCGLLNKKGLGERIYFCSCGYFEDRDIHSAKNILNQGLKQISMECRNQMPSEKNPLFDSFWIKQDFLMTKEAPTFR

SEQ ID NO: 18294 - protein, 199 aa, Chloroflexia sp.
MSMDRVSLKTLTGRVLGQLLLGEFQRRYLYDRSWKIGGAELVQRDGQFVLHITQTKASPKPDEPTGFLGVDFGMVNFASDSDGETYRGEEVRRIRQQRFRHRQRLQKANTRRARWRLRKNARRETRFQRDVNHCISKTLVEKAHTTRKAIALEDLSKIRARGTVRRDQRRVRHSWAFRQLWDFVTYKAQQAGVLRSGAE

SEQ ID NO: 18295 - protein, 396 aa, Bifidobacterium sp.
MLEAVKVALDPTPRQERLLESHAGAARFAYNAGLAHVKDMLERQEKPEWSYYALRRWWNANKDALAVSMETGKPWWPENSKESYNSGLESLADALKNFSKSRKGQRKGRRMGFPRFKSKDKAVPGFAYTTGSFGLIDCDPYALRLPKIGRVHCMENVSKRVDGAKVLRMSVSRHAGRWMASLTVERKDGPMPTPLKGGSVGIDLGVKQLATLSDGTIIRNPRALDSNLRRLRREQKNLSRKRKGSNRRREARTRVARLHARVADLRRDLLDKTTTMLARTYADISIEDLNVAGMVRNHRLARSVEDAAFAEFRRQLEYKTARHRREAPRHRPLVSKQQDMLELRDGESQTVPVRTCLPLRGVRACHRPRSERGHQHPSRRECPGDVKRAWRKRKTG

SEQ ID NO: 18296 - protein, 225 aa, Salmonella sp.
MPAKVITPLPGFAISNVTGLDMGLAHFAIKSDGNKIANPRHLINASHNLRRKQKALSRKKQGSANRRKARMQLAAVHERVANARADFQHKLSRAIVDENQAVIVETLKAANIMKNHHLARAIGDAGWSGFIAKLEYKAAEKGVHLVKLDQWFASSKTCHCCGHKVPEMPLHKRIWQCPECGAAHDRDINAALNIERKGTLELQAAGLVVYSHGGQRKSVKQTVAA

SEQ ID NO: 18297 - protein, 395 aa, unknown
  TnpB Polypeptide
MIISYRYPIFPSREVEQKLVEALDTCRWLYNRLLEEINKARESGKTLRTYDTQNLIPLLKTENPNLNKVYSKVLQMVNYTLWSNIKGLSALKKNGRKVGHLRFKGKGWYNTLNYNQSGFKLDQDHSILKLSKIGEIKIKLHRKVEGNIKAALIKRAGDRWFALIQAEQEPKQLSETGNVVGLDVGLTSFVVDSDGNSVENPRFAEKAATKVKNIQRKLSRAQKGSNNRRKLVDKLDKAHERINNQRSDFLHKLSRMYVNRYDIICAEDLDVMGLKEKGNNKVIHRNIHDASWSRFMSMLSYKAQSAGRKLIVVDSRNTSQRCSFCGSIVRKELSDRVHECPYCGFSSNRDYNAAVNILSTGMEQPVAPIESKPLHHVSVKQVLAMKWEALPFRVG

SEQ ID NO: 18298 - protein, 410 aa, unknown
  TnpB Polypeptide
MGALRVVRSLSFPIDDLAPSLRWLLGEFRLIVNRSIRIALRGDIRSRFGLSKAAYRTLSAEHDVYKQYIPSAFEVAIGTLKAYRRRIRGGKRTTVPYLRRLVLKAENQTYRLDRASGRLRIPIRGTESVQLTLPLSMWHRSIMSDPSWGLGSLTVTSDRVVITVRKAAPEPYRPDGAIALDTNEAALDGIVVHACVPALVTVPFPEVRIVQATHFRRRRRLAKKKAHDRRVQRRLLDREGRRERNRVRHRLHVVSKGLVQAAKSSKAAIVPEDLTLHGAGGRSRRMNRRLSSWPRGELHRQIEYKAALAGVPVIKVNPAWTSKTCPACGARRRDRVGKDFVCLVCDWEMDRQHNAALNILKTALASHEALARAVRFQPGALRRDVVSPLYDLPAREGAREEPSGVESLAG

SEQ ID NO: 18299 - protein, 399 aa, Bacillus sp.
MVNDYRRTLQSLWTRSYFVSTAKNVANENMLKIKKQGVKRMSQTLTVKVKLIPTKEQSRLLEESSREYIKVMNMLVSEMVEAKKSTKKSTKDIEANIPSAVKNQAIKDAKSLFATKVKKSNYKIIPILKKPVCVWNNQNYSFDSTHISIPFKVNGKSTRLKVRALLINKKNRNLDLLKHKLGTLRITKKSNKWMAQISVTLPTNERAGTKVLGVDLGLKVPAVAITDDDKVRFFGNGRQNKYRKRKFRSVRKKLGKDKKVNVIRRFDDKEQRWMQDKDHKISREIIDFAIANHISVIRLEQLTNIRQTARTSRKNEKNLHTWSFYRLAQFIAYKATIAGIQIEYVNPAYTSQSCPKCAEKNKARDRKYKCPCGFKTHRDIVGAMNIRYATVIDGNSQSA

SEQ ID NO: 18300 - protein, 253 aa, Lentzea sp.
VAGERALEAGVQVPRDSAGRWFVSLLCEDPSVTPLPVTDSVVGIDFGLDHLLVLSTGEKIGNPQHEQRDRTALAKAQRALCRKQKGSTNRAKARVEVARVHARTADRRTDYLRKITTRLVRENQTLVIEDLAVSNMVGNHRLARAISGAGWRQCRQMLEYKARWYGRQVIAVDRWFPSSKLCSACGALAETMPLRVRTWTCACGAAHDRDVNAARNILAAGLAVTVCGAGVRPQRSSPGGQSVTKQTPLRREP

SEQ ID NO: 18301 - protein, 368 aa, unknown
  TnpB Polypeptide
MTISREAKIYPNKKQAATLELLLEQSRLLYNHCLERKITEYKENEKTLSRYDLQKEVKEYGDMPATLRQMVIYRLNNAYEGFFRRGGFPRFKKYGRYRSIPLRQYGTDYKIDGVYLNTWKKYGLQGIKMRGLQKLNTPSSARIVKRASGWYAQVIDEVEELKSKKVKTAVGIDLGLKYFVVDTDSKKIEAPKIFRKSEMKLSHQYRQASKKKKGSNRKKQAYQIVARTQERIANQRKDFLHKTSRYYVDKYDLVAMEDLNVKGMGKNKHLSKSIYDVGWGIFTNMLFYKLKMLGRYLVKVPPHYTSQICSQCGEIVQKSLSVRTHRCLSCGLVMDRDENASRNIIKLGLDMANGQGIPLGSLLTRRTP

SEQ ID NO: 18302 - protein, 434 aa, Trichormus sp.
VISLYGCQQVLIHADKELKGILEFICSEANKLSNCAVYYARQIWFKAKRYITKFELDSEMKSNRHFQTLYSQAAQQLCRSVYESFASFKQLNALYNRGELADKPRPPKYRKNGFNLVSYPKQALRLKDGQIRIPLGSQVKVWFKLDSFTLPMPSNLRFEDIKELRILPRNRCFYAEFIYKTNTVKSDVDKSRVLGIDHGLNNWLTCVSNVGTSFIIDGRHLKSLNRWYNKRVSTIKENKPQGFWSNNLADITEKRNRQIRDAINKGARIVINHCLDNRIGRVVFGWGQGIKQEIDLGKKRNQQFVQIPTARLKARIEQLCQQHGIEFVETEEANTSAASFVDGDMLPKHGEKPDSWKSSGRRVKRGLFRTAMNWCINADCNGAANIIRKVSTKLGLDLSGVSRGALTHPTRIYIWVTANKKQSNEALTRRVASS

SEQ ID NO: 18303 - protein, 432 aa, unknown
  TnpB Polypeptide
MSELTKTLSFGLTIQTGSSDNLHEGCIEARRIRNEVNRLDTERYDWGEIHDTVVDNANHVKNTTQLIVQKAFKEIETYHNNNEWGRPYPYIHETYPMRMNHNEGYALTLSDSGDVQFRVSYKPYNYVKGVLRGSPNHLEQIKNALNSDAWRIGVAEVVYKHDEWQLHVTVTHKNHTVGTPEDAETVVGVDFNEDCVALAAMKNDDVLDSIVIEYPDIKRIRHEYFTKRKRMQKVGQDVGRTEERDFVHDQLHKVSRDVTRWVSQFNDPLIVFEDLKDMRDSIDYGTRMNRRLHSLPFASLRDMITYKAAWNSIPSTDINPEYTSQRCPRTECLHTERANRHKKRFKCKECGFQDHSDRKAAVCIAQEWFAENGNVPSLKTLPRVWKVRRTASGLCEEADSHGLVSSSGVYRTSAQGENQAREELKTVVPIVG

SEQ ID NO: 18304 - protein, 448 aa, unknown
  TnpB Polypeptide
VASYRVLVARGSKYDQTSDQQHRKDVNSYAINKKVKLYPNRTMAKVLDRLCDYRRYCWNQGLGLWNDLYDQRVEMVPADLREKSQLAIKDNSIVFSEEEQELLNLFPSPSHYVVQKMLIGDKADWQYRLSSRVLQLTVKDLAHAWSAFFNSKKPSKKSSKKKKRKVGKPTFRSKKNPKQGFKTDRASIKNGKLVLDKPHAYKGAWYGIPFKGYDLPDGKIKHCAITKIGNSYYASITIDCSEQSLSKTGRNTAIDANVNHFDYTDGSFSVCPQELDRLYAQIKHYQRLLARKRHENGKNATRSKQYFKVKTKLQKCYQRVTAIQNDLLHKFTTMIYQTYDTVVIEDLDVQAMQMKKKAKNLHRSLFGRFRIYMEYKSEKFGKTLIIADRFYPSTQRCSNCGHIKTGDEKITLNGNKKHGTKHNEYICYSCGFIADRDQNAVLNLLALA

SEQ ID NO: 18305 - protein, 274 aa, Nonomuraea sp.
SRFSIMPGGKLRLPKIGDVAVRWSRELPSEPSSVSVIKDAAGRYFASFVVEVSASPLSESGIESGIDLGLGHFAVLSDGRKIDSPRFLRRAEKKLKRAQKALSRKEKGSKSRAKARLVVARQHARVADARREFHHQLSTQIIRENQAVYVEDLAVKGLARTRLAKSVHDAGWSSFVAMLEYKARLYGRTFVKVSRWFPSSKLCSVCGAVRQDIPLSVREWTCSCGAAHDRDINTALNILAAGRAERQNACGGPVRPGASPARPVEAGSQGSVAA

SEQ ID NO: 18306 - protein, 372 aa, Fretibacterium sp.
MCVECAYKFRLYPNKAQEDLIQRTFGCVRYVYNYFLAERKEAYEKTGKAPSRFQQDKSLTVLKQGLDWLREPDKCSLQNALKDLDNAYKNFFRRVKQGVKPCGYPKFKRKHDNHRSYRTNSNIKVLDSAVQLPKLGLVKCRVHRIPLGHILSAVISQNPAGEYYVSLCCSDVPSRSLPATHGALGVDLGVKELAVTSNGEKYQNPQYLKKTEKRLKRAMRRLTRKTKGSKNRDKARVRVAKLHQKIANQRRDTMQKTTTELIKNNAIICVENLNVKGMMKNHRLALAVADASFFELKRELRYKAAWYGRRIVEIDSFYPSSQLCSFCGYQNAEVKDLSVREWTCPRCGTHHNRDVNAAKNILIEGCRLLSVV

SEQ ID NO: 18307 - protein, 518 aa, unknown
  TnpB Polypeptide
MSFTSFRVGMPGISMPGGTTPFFVPFLSHYARSDIIVIMSQKVVIESVQIRGAAPYLGMSATPDGQQVPLYSTNPDIVMRWLCDGWRCRYNQLRSRRTKWDRKSQTAVPLNGRPDMRSDRQVRLECSWFAAIPAMVLQSPNRIENTDWWSANKRRKTLKKKHRNPGMMPRFKKRRDDLYFVCWHNKGANANYRRLNRHHGEVVITGQNPGAYRLDGQPCRYSIHIRVRVSQPIRDYTSVGVNWTKRTLVFVNDPLPIQREASRSIVGLDRGCKHTLATSDGRFIDLPKHRLERIDREIRRRQKSQAHRINMSGKDVREYVRQPSRTYRKVQREINGLYAKAHRIIDDWQHKTTSMLVKRYDLIVLEDLNLQGMSRKAKAKNAPGRPSVFLPNGQAAKRGLNRSLRSAALGGIADKLEYKTRLADDSLLMLVNPAYTSQTCSECGHCERNNRESQAEFHCKKCGIRMNADLNAAQNILDRGWRQLSGSDGAGHATMTQDVHPAYRGADAAIGACGTSAS

SEQ ID NO: 18308 - protein, 443 aa, Thioclava sp.
LKLGADDVFYLFIVLALWVFLFFIIISLMSDIRSLSYKRYPSRSQAASLWRKHCLLTDLWNAALEERIGAWRRGVHIWLSDQEKSLKFIRSDVPSWSSYVHTHEAQVVLKRLDLAFASFFRRLRNGGAPGFPRFRAPERFRGWGYKQHGNGFKVEIGVGGRHGFVTLFGIGRMRMRGIARTPGRVLKADVIRAARGWMLNLVVETGCAQRERAHGPAIGLDWGVSEFATIATEAGECEVIHNPRHLATEAEDLRKAQRSLSIVARERKISSRALRKHRKSLARKHAKISARRKDFLHKVSQELVAKHRFIATEMLSPRNMTRSARGTAKAPGRNVAQKAGLNRAILDTAPSTFLNMLRYKAEEAGAELLEASTRALKPSQCCPECGAMRKKALSEREHSCSCGCKMGRDEASARVLLQWGLRFEASTEAKRAEVNRAAGTAVG

SEQ ID NO: 18309 - protein, 436 aa, unknown
  TnpB Polypeptide
MELIRSEDTKAKIKASMSATKARRQTQVCRVFELKVSIRHNPKEVFEKLSACFREAKWVINDMLSLSKDNPDNSMFDYKYTEHKDVVHFDKDKNPITSTITLPSVFHRATVAQKKTDIVNLAKAKAKGIKVGALKFKSEVNCIPIITGFTKILDGCRITIPGFKKLRVHGIDQLHGFENFELADAKLVRKASGYYVKISVMLPKEKRNPTGRNAGLDFGIKDSITTSYGDKYNCNVRETDRLKFLSRKLNRRGKKKNEKGSKLYYRCLRQLRREYERMANRRKDMANKIYHRLVTDYDIIYFQDEQIANWHKGLFGKQVQSSCLGALKQRLVALEESGRSFKISKWEPTTKLCPVCGAKNDIPLSERTYRCPCGYVMERDTHSARNVLMIGTVLRAGCLEQAPPELGPIHAGGLSDCMQDPVLMARQEAAALYGRR

SEQ ID NO: 18310 - protein, 408 aa, Symploca sp.
VAASWFLTRLYTAQVQNSPKIFSAFSTSSLVECRTGESTVRKSRKTRIYLSPEQRKIVKKWFGISRFVYNRTVEYLQQPETKASWKSIKTGILNSLPDWCKEVPYQIKSIAIKDACKAVSNAKKKFFDGGGISQVRFRSRKNPVQSCYIPKSAVSKKGIYYTILGEVSFREALPPSFGDCRLVFAYGDYYLSVPREEPRQIAENQGRVVALDPGIRTFMTFFSEDSFGELGAGANLKIQRLCFRLDKVVSRISKAYCRQKKRLKLAASRIRGKIKNLVDELHYKVARFLVDNFDIILLPTFETSQMSLKAKRRIRSKSVRQMLTLSHYKFKQFLKHKAFEQGKVVMDVNEAYTSKTVSWTGEIVSNLGGAKVIKSKLTGQMMPRDINGARGIFLRALVDTPSLRECIC

SEQ ID NO: 18311 - protein, 376 aa, Microcoleus sp.
VKKIRVYPDRKLNSIWRHWLAGCRFVYNRCIEVLKNGFHGSSYDLEAQILSDLPDWLKTVPRHPKANAVQDAYDACRQAKATLGDARFRNCRQSVATIKFKNGNYIKGTWFPQLTKGCGFESSQPLPDSCRYGTQLVRDRRRWFAVIPEHISTATTTQNQVIALDPGVRTFLTGYDGETVLEIGKGDIERIVRLCFHLDKLRGRAYQKQVRTKQRRSLLRAADKIRIEVRNLVDELHRQTVSYLVRNYKVVFIPTFETSSMVLRAKRRINTKSVRSMLTWSHYRFKQLLIALAKRSGVLVVETNEAYTSKTCGKCGHVHARLGGNKIFKCPECGYIADRDANGAFGIMLKALAGTPFTLAGDAIEVFSGVGEIQNV

SEQ ID NO: 18312 - protein, 173 aa, unknown
  TnpB Polypeptide
LKLPKIGQVHLKQHRIIPEEYSLKSVTVSQTPSGKYYASILFEYENQVQEKEMQNFLGLDFSMHELYRDSNGKEPAYPRYYRNAEKKLAREQRRLSKMQKGSSNRNKQRIKAAKLHEKVSNQRKDFLHKQSRQIANAYDCVCIEDLDMKAMSRSLNFGKSVSDNGWGMFTTFF

SEQ ID NO: 18313 - protein, 359 aa, Nodularia sp.
MFKPHEFAEKIGVSVKTLQRWDNSGKLPAKRTPSGHRFYTENDLLIIQGLKPTEQHRKNIVYCRVSSNGQKPELRNQITAMETFCLNRGLAVDEWVSEIGGGLNFKRKKFLSIMMSMLQGEIAIIVIAHKDRMCRFAYEGLPHTTCKSITISRTADSWFIAFAYEQEHEPTLKKYEVVGVDIGVKELATLSTGVVFPNPKHYKTNLRKLKRLSRKLARKIKGSNNRYKAKITLARHHAKIANLRKNTLHKITTYLCKNHAKIVVENLNVSGMLSNHKLAQVIADCGFYEFKRQLEYKAKKFGCEIIIADRWFPSTKTCSNCGHIQDMPLSERVYNCQNCGHSMDRDLNAAIVLSRLAKP

SEQ ID NO: 18314 - protein, 136 aa, Nodularia sp.
LSPFSGRQESPGFRRGEVQKFDLLCFETLNLLGMQRLWGRKISDLAFGEFLQILEWVAQKKNKRVIFIDRWYPSSKTCANCGHLLDSLDLSVRQWRCPSCQSVNSRDENAALNIKMVGASTIGLGDVRQAKPAIAV

SEQ ID NO: 18315 - protein, 292 aa, Nodularia sp.
VSGAPKFKKKGKSDSFELDGTIKIRGTHKIQLPKLGVLKTSESLPQIPPKSVTISRTADRWYISFRVEVEPTDTHSLVDVVGVDLGVKSLATLSTGEVFEGAKSYRTLETKLSRLQWINRHQVKGSANWKKAQSKIARLHQRIANIRKDTLHKLTTYLAKNHGTVVIEDLNVSGMMANRKLAKGIADMGFYEFGHQLEYKTKLYGSELVVVDRWYPSSKTCSHCGVQKESLSLQERVFKCEHCGFECDRDLNAAINLKNAASHAVSACGLVSADTARMKQEDFSLLANVSKL

SEQ ID NO: 18316 - protein, 184 aa, Nodularia sp.
VSPWDLRKLKLLQQRVSKKRLGSNNWKKAQKKVASLHEYVANCRKDWHRKLSHQICDSAGMVFVEDLNLVGLSRGMLGKHCLDAGFGKFFNILEQTCFKRDVYFQKVDARKTSQICPHCGVETGKKELSQRIHVCSNCGYTTDRDVAAAQVVAIRGLAAVGHTVKMLAEGKFIGIPVKQESSYL

SEQ ID NO: 18317 - protein, 207 aa, Nodularia sp.
MRLNAKTGKIAGFDFGLKTFLTCSDGSTIESPQFFKQSLNSITKASRQHSKKLKGSSNRERARKNLVRKYEDIYHRRRDWFWKLAHQLTDKCDVLCFETLNLKGMQRLWGRKISDLAFGEFLQILEWVAKKKNKLVVFIDQWYPSSKTCFSCGHVLESLDLSVREWRCPSCQSVNGRDENASRNICAVGASTVGLGNVRQAMPAIAV

SEQ ID NO: 18318 - protein, 404 aa, Nodularia sp.
VFSLTYEFRLKPTKQQIKIFQGWLEINRKVYNYALAERKHWYKSRSCQINACSLHSEYIIPADTPRPTYSIQCKSLTAAKEQYPELKSVHSQVLQQTLKRLENAFTSLWERNFGFPRFKKAGQFRSFVFPQLGKEPLKNNAVKLPGIGWVRLRKSREIPTDATVKQVRIVKRVSGWYAMLTLQWNVSVPQHQPVGEAIGVDVGLISFVATSGGLCVQRPKFFVDLQRQLKLLQQRVSRKVKGSNNWHKAQKKVAKLHEHIANTRKDFHWKIAHQLCDTAQTIFVEDLNLVGLSRGILGKHCLDAGWGQFFEILEQCCFKRGVFFQKVDSRKTSQICPNCRIETGKKELSQRVHVCEHCGYTTDRDVAAAQVVLIRGLAAVGQTVKMLAEGKFVGIPVTQESPGF

SEQ ID NO: 18319 - protein, 143 aa, Nodularia sp.
LSRFYIAEIEGTVKTLTIKRTPLGELFMVVVVDEGGQAEVEVKTGKIAGFDFGLKTFLTCSDGTKVESPQFFKQSLHLIKKAHRHHCAKSKGSANRERARKNLVRRYEDISHKRRDWFWKLAHELTDRKTRRKPLTLGMGRRR

SEQ ID NO: 18320 - protein, 286 aa, Nodularia sp.
  misc_feature (159)..(179): Xaa can be any naturally occurring amino acid
LLFGFKTELKINNHQRTQLLQHCGVARHAWNWGLALTKQILEHNKLNPNSKIKFPTAIDLHKWLVALVKSENPWYYECSKSAPQEALRALKTAWDRCFKKISGVPKFKRKGKHDSFTLEGSVKNLESNKIQVPKIGVLQTYERLPQKEIKSVTISRKAXXXXXXXXXXXXXXXXXXXXXDLGSGLNYSKKGLKRLIRLIVDSKLERLVLTHKDRLLRFGSELIFSLCEHFGTEIVIINRTEDSTFEEDLAQDVLEIITVFSARLYGSRSHKNKKIIEELKEVAVRL

SEQ ID NO: 18321 - protein, 410 aa, Salmonella sp.
MKRLQAFKFQLRPNGQQERDMRRFTGACRFVFNRALALQNENHEAGNKYIPYTKMASWLIEWKSDTETQWLKEAPSQPLQQSLKDLERAYKNFFQKRAAFPRFKKRGQNDAFRYPQGVKLDQANSRISLPKLGWIRYRNSREVIGVVKNVTISQSCGKWYVSIQTEYEVSAPQHESTSMVGLDAGVARLATLSDGTIFEPVNSFKTNQHKLARLQREMSRKVKFSNNWKKAKRKVQNLHSRIANIRRDYLHKVTSEISKNHAMIIIEDLKVANMSKSAAGTASQPGRNVRAKSGLNRSILDQGWYELRRQLEYKQLWRGGQVLAIPPAYTSQRCACCGHTEKDNRKVQADFICLHCGYTENADINGARNILAAGHAVLACEVNGAVMPSAAGTRRGELDSGLNAVGILAL

SEQ ID NO: 18322 - protein, 269 aa, Clostridium sp.
MGKIKEFGYIPVNSIVKSGTVSQKADRYYVSILVEERYIKTSNSNIGIKISNSNTGMKISNTNNEGLGIDLGIKDFAVCSNGNKFKNINKTSNVKKVEKKLKREQRKLSRKYESLKIRNKNIKEGRATGQNIQKQVAKVQKLHQRLANIRTDYINKTVFSIIKQKPSYIMIEDLAVSNLMKNKHLSKAIASQKFFKFQTKLTVKCKENHIELRIVDRFYPSSKTCSNCGEIKKDLKLSDRIYKCDCGLTIDRDLNASINLKNAKEYKIA

SEQ ID NO: 18323 - protein, 173 aa, Halorubrum sp.
LKEYWSDFVLCTYQTRPDIDLSAVENVQQVKIVWTGDEWELHFVCKVEMDVAEAPGEKTVGVDLGINNFAALAYEDGHSELYPLNCLKQDDYYFSKRITRCDDSHSAQATRLNQKKSARRTHYFHTLSKHIVQRCVDEEIGTIVVGDLSGVREDEENGESKDWGKHGNLDLHS

SEQ ID NO: 18324 - protein, 437 aa, unknown
  TnpB Polypeptide
MHSVITAKLKLQTTPDQFRALRQTQLAYRAALNDVSRYAFEHGKMSNKVALQDGTSRDVRAKFGLPAQMACSVPRQVGATYKTLWTKVKANAAARAAGHTKKRYRGLDQPPKYVSPTLTYQLGHDYGIKTGQQVSILTLDGRMIVPYTGYARHVALLQHGARIGTAKLWYDKPHKQFYLLVSLEIAVPDPLPEQHQRVVGVDVGQRYLAVATDTQNRAAFFPGTAARAIADHYARLRKRLQHKGTRAATRRLVVIAGRERRLKHERNHLISRRLVDAYPHSLIGLEDLTHIRERTKRKHGKKATVKQRRANRHASQWAFAELHGYVAYKALLAGSMTVKVDPYQTSQACPRCGYTAEDNRPDKGLLFLCQRAECQLVLHADLIGARNVALRTLLARQDWVSTGVLSERPDVSDDEAKAAQRKRFAELRWSPDTSLRA

SEQ ID NO: 18325 - protein, 412 aa, unknown
  TnpB Polypeptide
MECRRSLVFVVQVDDPRVDWLLREFRLLVNKSIRIAMAHGVRSRARLARVAYRDLSAEHLIHKKYILSAFDVALGLLKGHRRRLRKGRKSSAPYVRKPMLIAENQSYWLDRETGRLRIPIRGSEGIQLHLPLSEWHHSFLRHPEWGLGCLTVVPGKIILVVRKASSPAYAPKAVIALDTNEDSVDGVVSQRGQAKLVSASLGNVRLVQTTHFRRRRRLAKKKAHDWRVRRRLLALDGRRERNRVRQRLHLVSKRLVNAAREHEAAIVLEDLRIPRLAGFSRRTNRRRNMWPCGELHRQIEYKAALAGVPVIKVNPAWTSKTCPVCGARRRDRVGKDFVCEMCDWEMDRQHNAALNILKTALASNEALARAVRFQPGALRDDVVIPLYDLLREGAGAREEPSGVELGRSSRTT

SEQ ID NO: 18326 - protein, 297 aa, Mycobacterium sp.
MARFEVPEGWCVQAFRFTLDPTEDQARALARHFGARRKAYNWAVATLKADIEAWRVTGIGTVKPSLRVLRKRWNTVKDEVCVNAETGAVWWPECSKEAYADGIGGAVDAYWNWQNSRSGKREGKTMGFPRFKKKGRDQDRVTFTTGAMRVEPDRRHLTLPVVGTVRTHENTRRIERLIATGRARVLAISVRRNGTRLDASVRVLVQRPQQPNVAQPGSRVGVDVGVRRLATVANEAGQCSKKCPIHGHSTRHSKSYGTPAVRGRGARKAHGATASAPPRFPGCIAGSTMSALITCMS

SEQ ID NO: 18327 - protein, 387 aa, Glycomyces sp.
VKQVVVVKLVPDAASRAVLVETLRVCNAEANRIAAIAFAHRDTETGRIEREYALRGRVYAEAKATGIGSQLAQHVVKKVCDAYRTVYAQARSGLLRGRRAAKALAKPVAFRAGAAQPFDDRCLSWDLEARTVSIRAAEGRRRGIGFACSKQDLKVLRAHRQGESDLFERDGELYLAATVEVPETDEQFEPVDFIGVDRGIVNLATTSDGDNYQGKGLERYRRRMARARAELQAKATKAAKRKLKQRARRERRHASHVNHRISKEIVSAAERTGRGIALEDLEGIRERVRLTRSQRGRISNWPFYQLAQHIAYKAKRAGVPVVVVDARHTSQRCPLCYHAERANRRSRDRFECRGCGLAGPADAIAAVNVRARGRMAWAVSQGSRVAA

SEQ ID NO: 18328 - protein, 293 aa, Streptomyces sp.
MLSWQVPERRISIWTVRGRVKDVAFTAAPEQLATLTLYRKGESDLLYRDGMWFLNATCEVPEAPPNTEPHDLLGIDLGIVNIATTSDGEIMAGRELNRIRARERTLRGKLQKKNTPSAKRRLKKRRRKEARRAKDINHKIAKHVVAEAERTGRGIALENLTGIRERVRLRKPQRATHTSWAFAQLGKFIAYKARKAGVPVVYVDPAYTSRTCAECGHVDKANRVSQAWFACRSCGFVDHADRNASRNIRARAWELWRRGAQSTAPGPPPQPRRGTGRKRSATATGALCASPGL

SEQ ID NO: 18329 - protein, 383 aa, unknown
  TnpB Polypeptide
MESMNYITKSYKFRMYPNESQRILIEKTFGCCRFVYNHYLAKSIEDYKRTGKSNSYNQNSKDYSELKKKEEFSWLKETDASAHQCALKNLDAAYQNFFRRVKQGQKPGFPRFKKKTSEQSYTTPNLMGIKGTIERILNTNHIKICKLGWVEAKIDRVPQGHWVNMTIRRTSSGKYFVSLCCVDVPHEQYETTGSLIGIDLGINDFAITSNGEKFENPKFLRKSEQRLKMLQKRLSKKHKGSKNREKARIKLAKQHEKIANQRNDFLQKLSTNLVKNHDLIALESLRVKAMIRNHKLAKSISDASWSEFVRMLSYKCEWNRKVLVQIDTFFPSSQLCSECGHKNPNVKDLGVREWTCPKCRTHHDRDINAANNILKEGLRIISA

SEQ ID NO: 18330 - protein, 366 aa, unknown
  TnpB Polypeptide
LNKSFKVRIYPNQEQIRLIEQTFNSTRYLYNYMLNLKDKLYKFFGISLSYNNSSRVLTELKKHKTWLKSIDSKSLQQTLRDLDNAYQRFFNGIGKYPKFKSKKRSKNSYRTIHRVMIDTDSRTVKIPKVGSIKFRDKNGFSNILKIYNITISKTSSGKYYASISAEVYIPCFEKTNQSVGIDLGLKDFAILNTGEKVHNPKFFVNAQKNLAKMQRKLSKKVFGSNNYYKYKIKVAKFHEKIKNTRLDFLHKLSTNLVKTYDIICIENLNIKGLMRNHKLAKSFQDVSFSEFIRQLEYKAKWYGKVLFKVDRFYPSSQLCSSCGFRNKEVKNLSIREWTCPACRTIHDRDINSAINILNEGLRILDF

SEQ ID NO: 18331 - protein, 266 aa, Scytonema sp.
MRIEGQAITIERIEKDWLFLSISKLDGWVKVRLHRPLPLRVRQFPTEGNPPSGLDSPNGFVLKNALLTKKADGWYVTICLEDPNVPEFNPDEVTPTWDNTLGLDAVLHEDDYLATSENTKLPSLKSFRKSEKRLARVSNRKSAKKKGSKARRKLAKREAREHQRIARARKDHAFKTAHAVIRTNKKVIVHEDLNLKALSKRNKAKQDEDGKYLPNGQSAKSGLNKSWLDAAFGQFFTILEYIASKAGARVITATFCNGASNGQKYC

SEQ ID NO: 18332 - protein, 549 aa, Bacillus sp.
MKKAYFSKRIYKTDLSHETVDTLTRTLETFNTAKRFAFQTIVREKRWNRKMHTDSLHLVLKRKFQLNDYYANSAAQEAKALFSGLTELQTMYKKQTQEKLNKLKKKLKTERTKLTQLRKIKQSCVKGKIIFPKNSHFSKKNKVIAVSRKKDTLIWFSQYLFEQQYLDVQIKWTKAKIGRLTHRQYRLEQKLASYEVHIPSAVFGSKKLFRSQFTKDEMIQNHDKWKMLFSRARNKQLIVSGRKDAKHGNFVFQYVLENHELWMTTSEGKVVKFSGVTFPYGQETVETVITNQLECKDKKAHGKPIAWSVEDHGDYYIMKCLVNVPGNPHMNYSKSDGVIGVDCNLDHFAWANVTKDGNYKGSGSLKFSVMGKSTGQVTKIIEAEVIRLVDLAKQYNKPIVMEKLDTTQSKTGDRYGSKKANRMKSMFVYQKMTSAIVNRADKMGVAVFQVNPAYTSISGKMKYMRKLGISIHQSAAYTIGRRGLGYKEKLPTALQTYIKNQNAHHWSQWSALNKILKVRTHLFYKLFTGKQIHSHEMADFEAKIIMKLS

SEQ ID NO: 18333 - protein, 355 aa, unknown
  TnpB Polypeptide
MKLIPIFEDKKFKDKWEKAEFYLDDVENLSHEIEGKYEGDLKVSYEEGSESIILSYIGAPEGKQKQGIGTSMMKELCAYADKNHLPIKLHANGDLGTEIKALKKFYAGFGFKDRNVVVSKTKTGKYFASLTYDTGIKVPVPVPMFNSVGIDLGIKHFIVLSSGEKVPNHKFLKSSQERLAVLQRRQSKKTKGSNRRKAQVLKIAKAHEKVVNQRKDFQHKLSTSIVNKYDTVCMENLAVANMVKNHSLAEAISDAAWSQFVGMVKYKCVWYGKNFLQIGRFEPSSKMCTCGVINRELILTDREWTCSDCGVTHDRDILAANNIKNFALRNAGQGLPKEDVELPTLVGARKRQVYV

SEQ ID NO: 18334 - protein, 377 aa, unknown
  TnpB Polypeptide
MIKTNRAIVYRLYPNKKQAELFQKTFGCTRFVYNQMLSVQEERYKNNESHLSKFDMNLYCNHNLKTKYTWLKEVDKFALTNAIYHLEDGYQRMFKHLGKHPKYKNKHRAKKSYTTNFTNNNIEVGENYIKLPKVGKVKAKISLDTGCLHIKSATITQNRDETYQVSILFEIIEEEPVQIIPAEGNTTGLDYKSDGLYVSDTGVVANMPHYYRQSAKNLAKQQGKLRNKIIGSKNYYKQQKKVAKIHRHIANQRKDYLHKQSTAIAKQYAYVCVESLNMRVMSNKGFGNGKATLDNGYGMFLDMLAYKLQERGGSLIKVDKWFPSSQICNCCGFQNPILKDLTIRYWNCPNCGITNIDRDVNAAKNIKQEGLRLLGVA

SEQ ID NO: 18335 - protein, 424 aa, unknown
  TnpB Polypeptide
MIAQRAYKYRFYPNAAQRKQLAVEFGNARFAWNRCLDLRTKDYEAYRAAVAAGVEGATKPSWNYVSLSRLVTEWKRGEFPWLADSVAACLTQVLIDQDKAFQNFYRRVKNGEKPGYPRFKSRYDRQAVRYTLDQRQIERTYKAGEFLKLPKLGTLKVRWSQVPTGIPKMATVSKTPDGRYFVAFACEEVVEALPLTGVAVGLDLGIKDVVVASDGMKSGNPRHLKGRLRHLKRQQRRLARMKKGSNRRNRQRIKVARIHARIAASRADFLHKTTTALIRRADVLALEDLHVKGMVKNHHLARAIADVGMGEFRRQIEYKAAWYGRKVITADRFAPTSKTCSNCGSYREKMPLSVRQWTCPDCGTRHDRDVNAARNILMFSTAGEAGINARGLGKNLSDHVSGTKVEARTEAEKFDEAVRLERAA

SEQ ID NO: 18336 - protein, 198 aa, unknown
  TnpB Polypeptide
MRKRMQEAEQTALNDVFRGKEQQFVHDQVHTVSRRVVEWIQRFDSPVIVFEDLKDMRDDIEYGARMNRRLHSLPFAKLREFISYKAAWWGIPSGDVGPEYTSQQCPVCGHTERANRHKRRFKCRECEHQDHADRGAGISVAQRWLRTQEDRTVPALNTLPQVQKWELRRQASGPVDGPTVTHHTAGGHQTDGVSGVSN

SEQ ID NO: 18337 - protein, 211 aa, unknown
  TnpB Polypeptide
VKTLAVCSDGLTVKNPHVLRKRERRKKHLQRIVARRRKGSKNRRKAVARLARYEYHTACKRRDWLHKATRTIADENAVCFMEDLNVNGMLKNHRLAKSISDGSFNEFKRQLSYKTQVRNIDRWYPSSQICSRCGMRKPMPLPERTYECERCGLTLDRDLNAALNILQVGIANYPELMPVEGDNHLNAIGATDVATAPRETGIDHQKLHEQL

SEQ ID NO: 18338 - protein, 253 aa, unknown
  TnpB Polypeptide
MRCRLYGREFPAEAELMSPSVTFEKKYLMLHVPVKEFTADTATVKQRIQEGRKICAIQFTNGDVFAVGTVCDGMGKETDVKFWGGGKEYTHRCNQIRKKIEKARKSLGGEKQPGENRKYWMHLKHLSEHYGHQVTSQILRFAVEQDVSVIVLPRYNQEYSRNVMKGAGNWSPLHLSTRIRQYLDYKAWKNGIIVIEVHATGISKICAKCGAEIIRTDTRTELCCCANGHQTNRYLNAVRNLGKKCLTQFGRRA

SEQ ID NO: 18339 - protein, 379 aa, unknown
  TnpB Polypeptide
MYKAMKIQLQPTAEQEKKFEEFADIARFVYNKSLDWQTLNREQGNTFISKYEMRNRFVDLKNMLDLFGAAWLKDCNADVIVQAVFDCDRAFQNFFDNVKKRKKGIKVKSLGYPQFKGRYKSKKSFFNDPRKLRINGESILLTKIGYVRTTEEIPMREYINPRVTFDGKYWYLSLGYETEETSEINNGETIGIDLGIKDFAVCSNGLNVENINKSQKVRKTEKKLKRHQRERCRRVKKSKNRIKTNRKARLIHRRLHNIRENHINQAIVKVVKAKPRVVVVENLNIEGLLQNGKLSRSISQQLWGRFLVKLEYKCESNNIKLIKAGRTYASTQICSSCGNRLMGEEKLTLKDRVYKCKICGLELDRDFNASLNLKKLADI

SEQ ID NO: 18340 - protein, 372 aa, unknown
  TnpB Polypeptide
MRLVVNLKLKPTKEQHTTLKRTLEQANVICNEISTIAWDQHVFGQYALHKLVYHAVRTSSGLTAQVVVRCIAKVADAYKLDRKARRTFRLLGALAYDDRILRFKSDDRVSIWTVDGRQVVPFACGERQRALLARRKGETDLLFVRGIFYLSAVCEVDDPELIKTTDVLGVDLGIVNIATDSDGNVYSGAAVEKNRRKTAHRRRNLQRKCTRSATRKLLKVSGKQARYQKDINHKISKTLVSNAQRTGRGIALEDLKGIRERVTARKRQRARLSNWSFFQLRMFVSYKARLSGVPVAFVDPRNTSRECPSCGHVEKANRKSQAEFLCRSCGLAGLADHIAALNIRSRARAAVNQPMVASGHAFRSPSVTSCRL

SEQ ID NO: 18341 - protein, 307 aa, Okeania sp.
LLVIEAKLKGSQNQYKVLDEMILTGQFIRNSCLRYWMDNKDVKRNDLQKLCSQLAKDSNFPWAKKLNSQARQASADRAWQSIQRFYKNCRLKLPGKKAVRPRDDDSRKGTRTKRGYPKFKKFTRSIEYKTTGYKLSPDRKKIEFKDGFKAGVFELWTSRDLVWYSEQQISRVRVVRRADSYYCQFLVNVERKETHNFQGNVVGIDLGLNAFYTNSNGDVVENPKYLRKSEKRLKKLQRRVSRRYEKGKKPQSNNYHKARKQLARQHLKISRQRKDHAVKTARALIQSHDLVVYVDAERRAEGRFEDC

SEQ ID NO: 18342 - protein, 467 aa, Oscillatoriales sp.
MCIIPNAVKATYQYQFYPNTNQKLTLNQWLRICRYWYNRQLGDRFDWWEKNRTAVNACPLITSIAAPREKPNYYHQKQQLPILKKDLVKVVYSGELLDFKQVDSTVLQDVSKRVDKAFERLIVGDSKGGRSGKPRFKTEADYRTMTFPTASDNWIKLVRQKWFYLRLPKLGMIKVRMHRPMPNGFTVKQASVTKKADGWFIQLVLEDAAVPEFAPDKTIPTWDNSIGLDAVLHEDVYLATSEGDKLPSLKPLRKNQSKLDRISTKRNKRKRGSKSRRKLAKKEARQHQKIARSRKDFHYKTAHKLVRTGAKFFFHEDLNLKGLTKRNKVKQDENGKYLPNGQSAKSGLNKSWQDAAFGQFFTTLDYIAGKAGAAVISCKPAYTSMVLCYRNEVIFTDCSMRDYWDEQNSLMVDRDLNAAINLKRLGVGIFPSIKCHSGKLSVVGSMDESTAKEILHTLHRAAKKPTS

SEQ ID NO: 18343 - protein, 390 aa, Paenibacillus sp.
MWKIKEQDIEFTLRRCTEMKKAHKIRIYPNVRQETQFQKTFGCVRFYWNFLLDQRITNYKMKKENEHYQEDKTTYAGLKKQEEFSWLKEVEAQPLSQVNMDLNKAYKNTFNSKFGFPTFKSKKYSKKSYRTAVGMKLSGRYFYVSKVGWVNMAEELRFKGKLMNVTISQSKSGKYFATFLVDAENFQKAPITEVIGLDLGLTHFCITSAGKKIDNHQFYRSLEQRLIREQRKLSKRLEVAKKHNRKLDECRNYQKQKVKVARIHEKISNQRSDFLHQLSSKLTDENQIVCIEDLNVKGLVKNHTLAKSISDVSWSEFVRQLEYKSNWKGRILIKIDRFFPSSQICSSCGHNDGKKELHIREWLCSNCGSIHDRDINASINIKTEGLSGLA

SEQ ID NO: 18344 - protein, 295 aa, unknown
  TnpB Polypeptide
MLKAYKYRLYPNKQQIEQIQKTFGCCRFVYNQTLGYRKNLYEMKKESMNKTSCNNYCNQVLKKEYKWLKEVDKFALTNAIYSMDSAYQKFFKEHVGYPKFKSKRDHKKSYSTNFTNNNIEVSFKKNRIKLPKLKWVKVKIHREFVGKIKSATISQVPSGKYFVSILIETEHMPMKENDNSVGIDLGIKDLLITSDGEKFDNIRTTKKYENKLAKEQRKLSRKIKGSKNWNKQRIKVARIHEKIRNTRIDNLHKISHKLINENQVIVSENLAVSNMMKNHNLAKAVLDCGWYELTR

SEQ ID NO: 18345 - protein, 396 aa, unknown
  TnpB Polypeptide
MQEVFTLEKLMITVKGNIDARDKGIPHLTKEYHTFKKELIPLVQEAVRKVVKDPEIMVYSQQKWALDKKLTEYIKNLPCHPMPFHNESVWIEQTEKGYFRIHFKNKQLPKGQDITCNLIVPKKRRDLLQKASEEKQEWACDSRRKIMSNGRRQRCDYVHSLVEEHPKKPAKPCPICGGERWVKRLVLGQVQIIEDNQYARFNVHITLRLPRPKPYEPTGWVGVDVGWNNLAVSVFVTNKHEIKDATFHSRNFKTQIIRLKYLLKQYQRSGRSWKKWNYRKKNTTNNAVGNTAKEIVEKAKKHHGGVAFEDLTFPSQTKRFLIPRYKLKCAIQNLCERQGIPFTLVNPRDTSITCNKCGHKTKESRNGKTFKCVKCGYEANADFNACVNIAKRAILH

SEQ ID NO: 18346 - protein, 313 aa, unknown
  TnpB Polypeptide
LKSDFDRNPDKYNNHRPHLPKYKKGKKQNMVVFTTFSCRVKDDGYIHFVKNVIEPIKTNVKKDELKQVRIVPQATCYVVEVIYERKETDLNLDKDNFLSIDLGLNNLCSCISNVGIKPFIINGKVIKSLNRWYNKKKARLMSYVGDKGTSRRIRRISLYRNCWIDDKMHKISKYIVNFCVSNNIGRIIIGLNKEWKQEINIGRRNNQHFVSIPHSKLIDKIMYKAKLLGIEVVTHEESYTSKIDHLAFEEMKYQDNYLGKRKRRGLFQSSIGKLINADINGAIGIARKVVGDSCINTIVSSGFAFNPIRLNIL

SEQ ID NO: 18347 - protein, 383 aa, unknown
  TnpB Polypeptide
MKVVVTAKVKLADVFEVLNDTMRVYAQAVQWCIDTAWQHNITSKASLQRCCYAEVKERFGLQAQLVINAITQAVEMVKKAQSKPEVSQELSIRYNFPRCASIAKDWTLLSLSTIKARVKFSIVIPEVFEQYLEWKLGESTLIKDYKGRFFFCFTFSKETDIQPKTSNHYNILGVDLGVNTLAVTSDGDFFGSVKPQRIRWERLVAEPQSKGTRAAKRKLQRASGTWKRFMTWVNHNVSKRIVETLSEGDVLVMKDLSYIRQTATYNRWVHKWAFRELQRFLEYKAALKGVRVVYVRPHYTSQECSRCHTRTTQRYRGFFECRTCGHTLNSDLNGARNIAQRYMRITGLGCGKHAHVVTYDEVETRLQRRGLIPSTAISLTTLA

SEQ ID NO: 18348 - protein, 358 aa, Escherichia sp.
  misc_feature (273)..(331): Xaa can be any naturally occurring amino acid
VKRLQAFKFQLRPGGQQEREMRRFAGACRFVFNRALALQNENHEAGNKYIPYGKMASWLVEWKNATETQWLKDAPSQPLQQSLKELERAYKNFFRKRAAFPRFKKRGQNDAFRYPQGVKLDQENSRIFLPKLGWMRYLNSRQVTGVVKNVTVSQSCGKWYISIQTESEVSTPVHPSASMVGLDAGVAKLATLSDGTVFEPVNSFQKNQKKLARLQRQLSRKVKFSNNWQKQKRKIQRLHSCTANIRRDYLHKVTTTVSKNHAMIVIEDLKVSXXXXXXXXXXXXXXXXXXXXXXXXXXXXXXXXXXXXXXXXXXXXXXXXXXXXXXXXXXXTGCSASVHKPALRVLWSYSERKPPVTK

SEQ ID NO: 18349 - protein, 456 aa, unknown
  TnpB Polypeptide
MILGIKSKFNPTDDLGDVLSQWIGCSRVVYNAKCDEDKYLRTYARKYLPLGTWPEIDKTYSQFKTELTPWLKDCPSQILRNSATIWYHTYQRFFKGLCGRPQRKTRAKGNYIWLTQELFRIRWEARVAFVELGTVKNPVGTIAVRFSRKKIPSQNPKSIWIKKTNAGWSLAFSYDNGIELEESASQAHFNYLKTLDENRLEQLITPVDRGVARPVQTDAPEPFQFSEGDKQKFKYRDKLVRRFQRHLARQKKGSARRKQTLVRIAKLKDKDKCVRENFWHQTTRKIVDHSKVVVIEDLKLNNMTRSPKAKVCSITGKWEKNGARAKAGLNRALLGVGLGQFEQFLSYKMAMANKPLFKVSPHHTSQECANCGHTHPSNRLSQCNFKCVSCGHTDNADHNAALVIRKRAVNLILNSGTELTGAHGNVLRLRTNANPGKTTEDKSKVAVGCSPKKRVA

SEQ ID NO: 18350 - protein, 247 aa, Streptomyces sp.
MAELHQGAERGRVAGGEPGGGEDAGQRREGAAEDVDAGQDAFDGESGEDGGLAVAADGDDLAAEGGAGDQEGRKQKGSKNRDKARLKVARAHAKVADARREFHHQLSTRLISENQGIAVEDLSVAGLARTRLAKSIRDAGWASFISTLEYKAQRYGRTLVKSGRFEPTSQTCSTCGVKDGPKPLHVREWTCRACGTVHDRDHNAAINVKVAAGLAVSACGAPVRPGAIPAQREETGSHGFPTGKLAA

SEQ ID NO: 18351 - protein, 407 aa, Streptomyces sp.
VTTCHVKRAFKYRFYPTDAQAAELSRTFGCVRKVYNMALAARTEAWTLRRERVNYNATSAMLTGWKKTEELAYLCEVSSVPLQQALRHLQGAFSNFWQKRAKYPTFKSRKKSRRSAEYTTSGFRYRDGRLTLAKMTDPLDIVWSRPLPEGASPSMVTVSQDAAGRWFVSMLCDDRPAMPGAVNAAVGVDAGITSLVTLSTGEKVTNPRHERQDRERLAKAQRDLSRKAEGDGANRAKARLRVGRAYARIADRRRDFLHKLTTRLVRENQTIVIEDLSVRNMLGNRRLSRAISDASWTELRSMLEYKAEWYGREVITVDRWFPSSKLCSACGTLQSRMPLNVREWTCACGTAHDRDVNAARNILAAGLAVAACGDGVRPQRSTPGGQSSVKQEVVPPPRSRAAARPRG

SEQ ID NO: 18352 - protein, 404 aa, Gemmatimonadaceae sp.
MLMSFEYKLEPTAEQSNTLTEWLETARRVWNYALAERKDWLNSRKSPVNACSMGSEFIIPADAPWPTYARQCKALTHAKQTNPWLKTVNAQALQQVLQQLEKAFISMRERGLGFPRFKKSGRFRSICFPQFSSSPVRGEALRLPTIGYIKMRLSRPIPDGFQVKQVRVLKRASGWYAVLAMHSDVELPEVHPHGEAIGIDLGLTQFAAVSDGEVMARPRFFVDAQRKLKLLQQRVARKARGSSNRRKAQHKVALLHEQIANSRRDFHRKVAHHLCDKARVVFAEDLGCKALAASMLAKHTLDAGWGGFLSTLEWVCRKRGVYFRRVDARGASQTCPECASHTGKKELSQRMHECPECGYTTDRDVAAAQVVRNRGLAAVGQTVKKLVEGNAIGHPMKQEGISFL

SEQ ID NO: 18353 - protein, 348 aa, unknown
  TnpB Polypeptide
MLNIQNERYANGEKFLSGYEMSKLLPALKRQEQYSWLNDSPSASLQYVCVNLYTSFCDFFKHNKGRPKFKTRKKSKPYYQVQNSYFYFDGVYIQIPKLGRVRFKSDYVFPNGLGNTFCDIKIKHENDKWFLSFTMEHENQVLPELTNNSMGIDLGIKELAVVAFGKNQVVIHNINKSTKMREIERKIKIYQRSISRKYLGSYKRTGRFESTKNIERIGRRLKKLYARRRNMRTNYLHQTTRRLVDMLPHKVVMENLNVAGMMKNKHLSKALAEQNFYEFVWQMKYKCEWNGIEFVRADRFYPSSKTCSGCGCIKRDLKLSDRVFICPECGLQIDRDYNAAINLMRYEA

SEQ ID NO: 18354 - protein, 397 aa, Oscillatoriales sp.
MIVLEFKLKGKPQQYRVIDEMIRTAQFVRNKALRYWIDNQAVKLVDLYKQCAIMAKEFEWARKLNSMARQASAERAIFAIQRFFSNCKAKKPGKKGYPQFKKHTHSVEYKTSGWALSTDKRCLTFTDGFAAGTFRLLGSRDLHFYAPKEIKRVRVIRRADGYYAQFCINVERTEEIVPTGKMIGIDVGLNHFYTDSAGETVPNPRHLRKSEKALKRLQKRVSRKKKGSSNRKKAINKLGRKHLKVSRQRKDFAIKTALYVVKSNDFVAYENLQVRNMVKNHKLAKSISDAAWSQFAQWLEYFGKVYGKTVVAVAPQYTSQDCSSCGNRVQKSLSVRTHICLCGTVLDRDHNAALNILAKGLKEAGISSNTVGHTEINAWGQTDLYSLVVTSMSKLTD

SEQ ID NO: 18355 - protein, 378 aa, unknown
  TnpB Polypeptide
MIRTYKYRLRPTKKQTFLLSRLFAQMQTVYNDALNERRVKWRASRRSVTYVQQWNRMRDERHALPDEMGMLNATSIQQMLRRVDKAYQSLYKGRAGHPRFKNVKRFKSVEYRPGDGCKLSGDRLYIQHVGQIKVILHREIPGEATIKHVVIKRSLGKWYVCLMMELPDVEPVVTNRPDVGIDVGLHHLLALSDGTIIDNPRWLRSNLAALRVAQRRMSRRKKGGSNWKKAARQVAVLHEKVANSRRDFWHKTTRWIVNTYGNIAIEDLSLAFMTHNGNLSLSAHDAALGAFRSMLEYKAESAGTQVMAVKPARTSQLCSGCGSIVVKGLSVRVHHCPNCGLIEDRDVNAACNILALGRSAWALTCPVGESVAQEAPPL

SEQ ID NO: 18356 - protein, 319 aa, unknown
  TnpB Polypeptide
MYAKGINRITIVKEVTKELNLRYADTIYKLAKLIVEGAKCNNSNPLKVKIRKLFIASRGFTVNKGNRNIRLLSSNELEINILWKGWIRFKVLFGRKYIPLVNELVKKALAKKLSYTAKIAFKNGNVYLHVSVPIELYLKYFSKGKAEGKLIAGFDLNSDRINMVIVDKYGIIRDVKTEWFPEVTSHGFPRNKAHTLRLQALAKLLDYAYHCSVEVVVFEDLERIKKRRFTMSRTANRKITRFPKRKLLKHAVVMAMKYGFKVHLVNPANTSKLGEKIGEKLGLDKHTASAYILTLKYLGVANLISCNPSSQRNQTTINY

SEQ ID NO: 18357 - protein, 287 aa, unknown
  TnpB Polypeptide
MGMNRAWRYRLYPSTAQQEKLDRHLRECKNLWNLLLEYAKTYHKETGTFPTRKQLYLKTKEATLFSQVAQNIADRLAKSIRDMILKKNTGKKAGFPRFKPIERMKSFTYPQFGFRLGKRLELSGIGSIPIKKHRELKGRVKTLTLKKMPSGKWFAIFTSEMEEPIPKKNTGPAVGVDLGIESFACLSDGSLIENPRNLKLAEQKLKDAQRQIARKKKGSKSRRKARLKAATAYEKLLNKRREFLHKIARQLVSSYSFLALEKLNVAALARVSLQNMYWTAAGQSLSA

SEQ ID NO: 18358 - protein, 381 aa, unknown
  TnpB Polypeptide
MGADRGKGNWRGGFRVFRVRVSSENLPKLKRLFRDFADGKTRTKGALCYRDEWMAEWGNVLKMREEAGRRTMPKPPAALLLVRFVLPDGSVRGNNAAPCVIDLRRGELRIPSYGVAVSLRGSIVEALVEENGLEPRPDFVLQVTRRGFLRLIASRSAPRRQSSNLLLICMDENVAHGLFTTLIDFDGEDVEVLRGPTFKPTNAARLRRVAARLQSIVRKKTTSQLFGLWVTPERARCLKKSANGKEARLNREYRAQAVAWLRKHIRDTDAEVVILIDEVVEETAKSGLVRRAVKAIRNLADYEGAEYLPLRASGKHCPRCRVGGVEVAPRTYKCPFCGLEWNRDRMATFKLALTYTKITKNKRLEEALLKWLNEHPRALLS

SEQ ID NO: 18359 - protein, 444 aa, Vulcanisaeta sp.
VSSLGELGRGSWGPTLAGIPGEGVYPVRLTNRRTNVVRLFPNGAQERRLRRLADATAKLWNELNFERRRQFFSGKGVNFKGTWDKYYEKYKRMLGVNAQAVMQKNNEDWNSFFTLLNLKKEGKLPPHMDHVSPPGYWKDRETGKRRLMIVIRQDRYEVDVERRVIILKDFNLEIKFVGRLRWFGRQGRLVIIYDDTRNAWYAHIPVEVGVEETRTGKRSKFIVRGERRTIQVATPRGNRVASIDLGINNLASVVVSDGTWLLYKGVRTKEDYFYLQRLISRIQSLRDSLKDKLLDDAIDELNHEMRRLYGKLVRRLLHLYRNLASHLLKQLHELGVSTIYLGYPFNIAQQKGNKFNTNMWSYRKLMEAIELKAQEYGIRVFEVVEYNTSRVCAYHNVEVKRHPRGVVHCPKGHKLHSDLNGALNIMKRAIGKIPQTIKNPYPSP

SEQ ID NO: 18360 - protein, 367 aa, Caldalkalibacillus sp.
MQKAYRFRLYPNQKQQTLIHKTFGCCRFVFNHFLAKRKEVYEAERKTLGYNACSSMLTQLKKELEWLKEPDATALQTELRHLDDAFKKFFLKKHGFPRFKSRKNPVQSYTSKNNNGSITIQGNRIRLPKLGWVKFAKSREVEGRIISATIRKNPSGKYFVSVLVETEIHPLPACDRKVGIDLGVKDFAALSTREVIPNPKYLRQYEQNLIRWQRILSRRKQGGSNWHKARIKVARLHEKVVNCRKDFLHKLSTRLIHENQVICLEDLQVKNMQKNRHLAKSIADASWSMFRTMLEYKAKWYGRTIVVVDKTFPSSQLCSTPGCGYRYREVKNLGLREWTCPSCGTLHDRNINAARNILQEGLRLLAV

SEQ ID NO: 18361 - protein, 404 aa, unknown
  TnpB Polypeptide
MLLSTKTTLNFTRIGKLADLHHFVDEYRVVVIKFVDLLWNLDKIPTLLPKTITSTVTSWLSARSIQCAAKQASGIVRGTKTKQRRRLFIINKLNKSGQFKKARRLQAIYNSTNQSKPNINNIQCELDARFVEIELNDKTSFDGWVTFSSLGNKLKLEIPFKKHKHFNKMLNSGLLKNGIRLGKSDITFMFDIEDAKPKESGITLGIDIGQKTTLSCSDGQLLDKCPHNHTYTSICNKLARKKKDSRNFNEAVAHRSNYLHYIVNKLDLKNVKIVNRENIRHLRKFTNTSRLMKHWNYAELFEVLDNKLVKQGVLVNKISPTYTSQRCSACGWTRKDNRKKKRFKCGKCQCKLDADLNASLNLSFNLVPIKKQERLQHNNIKGFYWNVVSEAPIVPHVQKTNKLS

SEQ ID NO: 18362 - protein, 550 aa, unknown
  TnpB Polypeptide
VVDPAVGAFDQIASRLDDEPRGRVSAGHDVNGDTSFCGGGGDRGATRHRMSGGLSVGWGMLSGEMSRHTTFKFCLDPTVEQHELLARHGGASRFAFNQCLWMVKTALTQRKTDPDIDVPWTGFDLINAFNAWKKTGYAGRVFVVDAEGVTEAVVTGLAWRAQVCQQVFEEAAVDLAKGLKSWSESRSGQRNGKKVGFPRFKKKTGAMPSFRLRNKDRKDKPASIRVGDNNRPRSVTLPGIGQIGVHDDTRRLRRMLAKGRAKILFATVSQHAGRWWVSLNVEAADLHPAHHHRSRDPADDCGWVGIDRGLSAFVVAATSDGEQVARITDAPKALIAGMTRQQRLAKSLSRKQKGSRNRRDAAAKLGRHHHHVANVRRHFLHRVSNALVKTHDRLVIEDLNVSGMLRNHHLAQAICDAGWAEFARLLRYKQAWRGGQILTADRWYPSSRLCPACGALRHDLTLADRVFTCGCGHSDDRDTNAAVNLARWAQTHHTASPDPRTPKQRGRATNARRRDGADLGAHPACGGHPSCAGETSPDDAGTDVHTAPAA

SEQ ID NO: 18363 - protein, 402 aa, Escherichia sp.
VKRLQAFKFQLRPGGQQEREMRRFAGACRFVFNRALALQNENHEAGNKYIPYGKMASWLVEWKNATETQWLKDSPSQPLQQSLKDLERAYKNFFRKRAAFPRFKKRGQNDAFRYPQGVKLDQENSRIFLPKLGWMRYRNSRQVTGVVKNVTVSQSCGKWYISIQTESEVSTPVHPSASMIGLDAGVAKLATLSDGTVFEPVNSFQKNQKTLARLQRQLSRKVKFSNNWQKQKRKIQRLHSCTANIRRDYLHKVTTTVSKKHAMIVIEDLKVSNMSKSAAGTVSQPGRNVRAKSGLNRSILDQGWYEMRRQLAYKQLWRGGQVLAVPPAYTSQRCACCGHTAKENRLSQSKFRCQICGYTANADVNGARNILAAGHAVLACGGMVQSGRSLKQEPTEMIQATA

SEQ ID NO: 18364 - protein, 278 aa, unknown
  TnpB Polypeptide
VKSFSLTRSSLTSWCSGKKQPETAFLREAMSQPLQQALRDLDRAIGDSFRPNSDPAHKGWPKFKAKDIGDGFRIPQFAPEHIDDANGRVKLPKIGWIRYRRTRPIAFECADGMLVPGVVKQIHVRKDCGHWFVIFTVEFEVKVPDMKALDVGIDVGVVHAVATSDGRFYDLDTAKIRSIEKRIAGLKRKLSLNQESRKKLAKLGLAEPFDKKQPSCKRRRLKEKLQKLYRKIRCIRQDFNRKTAHALAQEYGCVYVEDLKVKNMTASVKGTVENPGKM

SEQ ID NO: 18365 - protein, 419 aa, Burkholderia sp.
MVAFAVELHSRYYGSMQRLQAFKFELMPTGEQQRKMRQFAGACRFVYNRTLALQKETYEAGGKYISKFSVGKHLTQWRNSADTPWLSDAPRHALMMAQQACDRAFQNFFAKRADFPRFKRKGDSDRFQFPDKNQIVVDSANGRIKVPKLGWLRYRNSRTVLGEVRSATVSLRAGKWFVSILTAREVEQPVPHGAAVGIDVGVARFATLSDGTYIPPLASFRKHEQRLAKYQRRMARKVKGSANWKRAKVRIQRIHARIANARADFLHKASNTISKNHAMIAVEDLQVRNMSKSAKGTAEAPGRNVRAKSGLNKSILDQGWGEFRRQLEYKTAWNGGYFVAVPPKNTSRTCPRCGHISAENRKTQSLFACIECGHTANADHVGAINVLAAGHAVLACGEKVQSGRSKKQEPTEATQVLAA

SEQ ID NO: 18366 - protein, 445 aa, unknown
  TnpB Polypeptide
LLSLPEQFTTPTKPCQALLRDFAIKYSYRALLDLDQLPQFQRVDALIGHRFRGKALADGKGIEVKLGAIGGKEVILGFSAVRLVIQQLQVIREHQHQVSDALHQHLCLCHGSAVGGGSALSGQHLGGRQGRDKVQLPQHLIRGTDTRKGFALHKAADALCIQLLRNFGRGELCFHLPVTLGGDRRFQRACLFCRCKSHKIGVLQEGVEGRTHLGGGQAVLCQKARSLQRGLLCLVDDAGHADLGGHLGQLCRRVLPGKALPQLFRQDRVGGGGFRGRGFFRCGPARKTARSITEYAHENHADVIVFEYLEMKGKISGKKRQKLHLWKKREIQTMCEHKAHRYGIRVSRVCAWNTSRLAYDGSGPVSRDPKNHSLCVFQSGKQYNCDLSASYNIGARYWIREIIKTLPETERSSLEAKVPAVKRRTSCVYADLLIIQNEYGCSKAA

SEQ ID NO: 18367 - protein, 356 aa, unknown
  TnpB Polypeptide
VLTGQSREEMCDLLARIRDSYKAKEKIQYYDKLHDTVKTMEEKEFLDSVSEVAMFYHIISDEYRIPVVKKAHVLSVTIPDRKRERMQVPVQADRDALRRMEQYGVSGSMRYTITDGGSLKLTCSFEKKTRTPEEHSAVIGVDVGITDAFHTSEGQAIESFQPVIEFYQTEVEPAFGKLSTLRNRKQQLRRFLKKHKGVLPEKVILNLRKRIDHLEKDIRQAHAPYRRKRHYYQLVEYTVRNAVNTYIESLNGDKTVLTAMELLDIKEFNKSRRVNGMLSDFSRGKLAEKLMEELSWHGFPFVQVEPAYTSQICRCADALTRQAVTGKCSIVPAAGIPMMQTTLAASISRPAQRIRN

SEQ ID NO: 18368 - protein, 428 aa, Dethiosulfatibacter sp.
VNVYSKLGEGEVMFMAKRMAVKEKNRLLADQGKQVKNYGLVLRLYPNDEQAELINKTVGCSRLVYNMYLADRKEDYEEHGSSLSVAKYKKEVLVPLKSSEEYGFLKEVDKFALEVACENVDDAYNRFFKGQNSFPQFRSKRKAKKTYTTKMTNNNIKVIGCSSIKLPKLGKVGLAKQKTKRNKYILKKIREGRIRILKATISQKGAHYYVSLTLEEIVDKVEPLDISQVDISKVIGIDLGLKTFATVNDGTETEFVKKVKYITESEEKLAKLQRKLSRKQVDSQNFKKARNKIASLQEHIANQRKDFAHKLSSRIANENQVVVMESLNIKGMGRNRRLAKAISDAGWHQFQGFLKYKLEWQGKHLIKLAPWYASSKICSNCQEKHIALSLNHREWVCSKCGTAHERDENAAINIRNQGLETLGLISIA

SEQ ID NO: 18369 - protein, 372 aa, unknown
  TnpB Polypeptide
MMMGFKFRLYPTAEQAQQVQRTFGCCRFVYNHYLAEHNRLYKETSKAPTCNQNMKDLTQQKKELPWLRDVDSTALQCAVQNLDASFQNFFRRVRDGIKPFGYPQFKSKHNRHKSFTSKRVGNNIAVVGGKIKLPKLGYVEAVISRPIQGRILSATVSQVPSGKYFVSLCCADVEIEPLEPTGAVVGVDLGIKDLAITSDGKKYPNRKALYKSDKRLRRLARRHSRKKSGSSNCEKARIRKARLEERIANQRKDAINKTTMELVREYDVICIESLKTKGMMKNHKLARSIADASFGEFQRQLEYKAAWYRKAVQRIDTFFPSSQLCHCCGYRNVETKNLSVRRWTCPQCGAEHDRDVNAAQNILLEGMRLFST

SEQ ID NO: 18370 - protein, 420 aa, unknown
  TnpB Polypeptide
MRRTSVVELVVDRGSEGRLKLLCSLSSKLWNEVSYARRRMFFEKKGVDLKATYKEYYEKYKTLIGSATAQQILNKNDEAWRGFFKTLKLKKEGKLPPFITRVDPPGYRKKGGRRALWAVLRKDQYRVEGDKIVLKGLGAIGRIEVRYKGLIHLKGEQGRLEIHYDQDRGKWYAHMSFEVSEKAVRGAWAGVPRRPRGNLVAGIDIGINNLMAVYVENGLTKLVNGRPLKAMSHYWRMRIAEHQSTLNKCGLKTSRRLRSTYSNWRRQVKAYVDSSVRQAVEWLHSVGVSAVKVGYPKYIAQERGNFNNVHVWTYGYLLRRIYEVAEEYGIAVVYVDEAYTSSRCPIHGEGCGERVKRGLFKCTKSGKALNADLVGAFNILITPSPVWDRGNGLETQPGAEPSGRGDVAPSLPALAGTLAF

SEQ ID NO: 18371 - protein, 364 aa, unknown
  TnpB Polypeptide
MKQVIIIKLQPSAEQHKALLDTLLAFNRACQYVADVAYEKRTANKIALQPFVYGTLRADFGLSSQMAIRAIAKACEAYKRDKRIHVRFDEKGGMVYDPRLMSFKGLTHVSLLCLGGRQIIPLRYGAYQAARLDRAKGQADLILRDGVFYLYVTVDLPSAPPAANDGVIGVDLGMAQLAVDSTGEAFSGEPIKAVRRRYSRLRAGLQSAGTKSAKRHLKRIRQKEGRFQRWTNHTISRHLVSKALAQQKALAIEDLSGINSRTMVRRANRYERLSWAFAQLRAFVAYKCEAAGVSLYIIDPRNTSRTCVACGHCAKENRRSQSEFLCVDCGFSANADFVASVNIARKGLEARGRVTAPMDALTAS

SEQ ID NO: 18372 - protein, 440 aa, Acaryochloris sp.
MLTRRATFRLYPTAAQEQQLFEWRRLHGYLYNAALTDRRDMYQRWDISVDYFGQQNCLPQFKQNWPEFKALGSHTLQATLKRVDLAFQGFFKGLRGHPRFKSIRHYSGWTYPCKAGWKALTDGEHGQLQLSNLGSIKMRGEVRSWEEPTTCTIVYRHGQWYASITVKCTPVRECGTGAIGLDLGCKDAVTFSTGKKISKPEFIAAGDVALKQASKALRRKRGPNRKQGVKPSKRWVKAQRHKSKLQRKVTRQRQDWLHQITSDIVSRNSLIVGEQLNVRDMTRKARKGKRKRQKAGLNRSILSVGFATIGQMLSYKAAEAGGFYLESPTRKLKPTQRCALCWELTPKSLSDRVHVCSNAMCQHTADRDVNAAQVNLKWARGQELSSLYVESASATDCEGTALGGSADLKQVPRSMKQLAARKRAKSQAEQDGNPVLLEAG

SEQ ID NO: 18373 - protein, 383 aa, Bacillus sp.
VLVNKAYKFRIYPNKEQVVLINKTIGCSRFVFNRFLAQWNYTYEETGKGLTYNTCSAELPQLKKELVWLKEVDSIALQSSLKNLADSYARFFKKQNKAPRFKSKKNRVQSYTTKETNGNIAIVGNKIKLPKLGLVRFAKSREIEGRILNATVRRNPSGKYYVSVLAEVEVHPLEKTGSSVGLDLGTKTFAILSDGTKYKNPKWLQTLEKKILDAQRVLSRRQQLALKRKCKLDEAKNFQKQKRKVARIHEKITNARTDYLQKISTEIVKKHDIIGIEDLQVSNMLKNKTLAKDISEVSWAKFRTMLEYKAKWYDKQVIAVSKTFASSQLCSCCGYKNKDVKTKNLREWDCPSCGTQHDRDINAGQNLKDEAIRLLTIGTMGIA

SEQ ID NO: 18374 - protein, 307 aa, Escherichia sp.
MTFPASPLQQSLRHQQTAFANFFAGRAAYPVFKSKRHKQAAELTASAFKYRDGKLYMAKSKEPLDVRWSRPLPSAPSTVTITRDAAGRYFVSCLCEFEPVSLPITVSTVGIDIGLKDLFVTDTGFKTGNPRHNAKYAKRLAVLQRRLSKKQKGSKNRAKARLKVARLHTRIVDCRMDNLHKLSRKLINENQVVCVESLKVKNMIRNPKLSKAIADAGWSELVRQLQYKGEWGGRSIVAIDQYFPSSKRCSSCGFTMQKMPLNIRKWHCPECGAEHDRDINAARNIKAAGLAVLALGESVIPKPLHVV

SEQ ID NO: 18375 - protein, 360 aa, unknown
  TnpB Polypeptide
MADCFLSKQRFTVKLRLRDKHIPDLHRQARAVNFVWNYCNETQQKAARAKRKWLSAYDLMNLTAGAGKELGLHAHTIQRVCRAYDDARKQKKKPWLRWRGQSSLGWVPFNTGHVVFDGQCFVFRGVRYEAMHLRDFLSPGMRFGAGSFNADARGRWYINLPVEVECDESRFENVVGIDLGLKDLATLSTGEKIEAPRFYRKSEIALASAQRARKTKRTRAIHAKARNRRKDFLHKAANGIVREFGTIIVGDVSSKKLAKTRMAKSVHDAGWAGFKNMLSYKAIMRGGRLIEVSEAMSSQTCSACGCLPPSRPRGIAGLGIRQWTCSDCGAEHDRDVNAARNIARVGLDTLVAGTLLGAAG

SEQ ID NO: 18376 - protein, 560 aa, Rhodococcus sp.
VADGLGVREDRGGDRVVCSPVWAAWCTPACSSCGDRCGGPDVTPTALLADSGAQDTAPTPDPALEQAADPCRVVIRAFVYILDPTPEQVSVLRSHCGAQRFAYNWALSQVKANLDQRTAERSYQIPDSELTPPVSWSAYSLRKHWNTVKNDAAVNTDTGQVWWPENSKEAYSSGIANCAAALSNWSDARSGKRKGAMGFPRFKGKRALLACRFTTGSFGLVTDGGDRRHIQLPRIGVVRSAESTRKLARKVAAGTARIRSATLSFRRGRWQVSFSVEITLPARALPPATTGTPAAVGDGGVDGAVVGVDVGVKHLAVLSTGEMIENPKHARKHAKRLRRLGRRASRRVGPDRCTGQQPSRRWLRTQDQIRAVHTRIADSRRDHLHKLTTRLVRDFDTVVVEDLNIAGMTRSGGVYKRGLNRALHDAGLAEIRRQLTYKTEWTGTGLHVADRWYPSSKTCSNCQVVKAKLPLKVRGFTCDSCGFRADRDHNAALNLAALAAVEGGASSASCGRDVKDARQKPTIRPATRRADGIAAGTPPSGERDRGNLDTHAERAKRHSA

SEQ ID NO: 18377 - protein, 300 aa, unknown
  TnpB Polypeptide
MQAVKMVRQKHQTPANLLWLLDEFRCMVNVCIAIGIEENVSSLKTLSLRSYHRLSRDNLSYYRLCAISAATGILRNYRKAKRKNPRTRVPYAKKLMLTTCYGFEITDDLLRLPVKPRKYVYLKLNNHTLRVLSGLNVRSVTVTPASVSIAYSIETAEIRPEGYVGVDRNLDNVTTASTDGTVKTFDLSKATGIKSTYRFVKGRLKRNDTRIRARVFSKYGEKQRNRVQPLLHNVSKRIVEDAKTRQHGIVMERLTGIRRLYRRGNRQSRSYRARMNSWSFGELQRQIEYKATGTRTRPGT

SEQ ID NO: 18378 - protein, 391 aa, unknown
  TnpB Polypeptide
MRSYKYRIYLNKTQISEVENQFSFCRFLYNSALEEKISYYKTYKKSISYEAQSKQLPEIKTFFEKESAGTHSQVLQSTLKRVDNSLQNFFRRVKNKSDKAGFPRFKSRNSFNSILFPQCDLKSGGVKLLKNNKLKIFGISGEVKIILHRSFEGDIKTVSLKKDNNNYYIVVTSDNIEPKLHVKTGKTIALDLGISTFAVSNTGKKFRHPKPYKTAKEKLAFINQKLSRKQKSSKNRMKALYELRKAHQKAVNVRQDFLHKLSNTLVKENDKIILEDLNVKPMMESVGFHVDKNNIQDMSWGTFTQYISYKAERAGIEIVKVNPANTSKMCCKCKNIDKAQTLSDRIYQCKSCGFKFDRDHNAALNIFRLGTSPSTLKDVKEVLPFYGRVVH

SEQ ID NO: 18379 - protein, 511 aa, unknown
  TnpB Polypeptide
MSPKTIVSRTYPRVPYAAFDKNGKPLDLDDVLNGVRADAELVAYYALQEMTEQNLALSTYFDGLKPSGAGYMMGLKLPSEVKNQFKSGASRLEKMFQEQVVTNLRSWAARSEVVSGKYTDYVSAGWKRTASKSKPTSMSPRLALSATDKGYYYKNFNVTPERISLDMVIQGQWVTLHFPTPPQLLEEGCDSGVPDIWIDKNNRVVFGFHGKTDPGRPKFSERYVIGVDVGITNPAAYVVWDTEKKQVVERSLLGQRARSLSNKIKRGKTQVASLKRKSKDEEAVSHREHLSNRRKELSILIAQELADTSWYYDNAIVSFEDLSHIKNTMRHGRWFRGEVLRRTRDMVEADSGRVMKVNAAYTSQRCHVCQSDLDMRDYSNPHCSTCGITHHRDINAAANIAQRANVKKACETRKRHATKIKRVRRSKCRIKPLKHPGTKNKPTPKAPQNRPKTHAHSSLPSKEVSKRMCPADNRVSAVDHRGDSGFQTTSGTTNPTDNPSINTVDWFYPKE

SEQ ID NO: 18380 - protein, 321 aa, unknown
  TnpB Polypeptide
MVEDSATRTVPIKLDVDESAAGLLHQTTDYFLDAANYVVNVAWEPDWKITSKTKLHDLTYYDVRDDSPLPANLVQAARNRAAEAVKGVVERWKDGKKASKPYFTSRFASYDARTVTVNADHCTLATIDGRVTADFVLPDEQRDTPHSAYLFNDDYDVKGATLHYDTVEDCFYLHVRTKPTVENDNAGTGDAKHVSVLGVDLGITNIATTQPDVSGAAENSTTGIENTKRAAVAISNKLGLDGHTRTFSESVASKPDVSNRYFTRSRTNWWRKLSKTTAPIWCSSNSTASANAYRTRRQFTSGRSIACTSTSRTKPSRKGLW

SEQ ID NO: 18381 - protein, 285 aa, Okeania sp.
MNQFTRKALKTGICHLSMSEIKIPTSQTEIIEARIVPKSSCYIIEIVYEKEEEITKNQQVAGVDLGVNNLMAVTTNQTGASPLLIKGRPLKAINTFYNKQRSCLQSQLKTNDNQNNSPKLKKLTHQRNCRVENYLHTASKRVIDWCVNHEIGILIIGQNQNWKQEIKLEKNNNQQFVKIPHYRLIEMLTYKAKLIGIKVIITEESYTSQSSCLDGDNLPKYGEKKPKFSVKRVTIGLYKTRENKLLNADVNGSLNIIKKVIPDVLDQGIKGLAFNPIVVDPLAFN

SEQ ID NO: 18382 - protein, 251 aa, unknown
  TnpB Polypeptide
MCRDRTLVGDVKTVTIKRDALYDLYLCFSVEVDDPKVRPTSGKMAGFDFGLKSFLTVHDGFESYEIASPELFKQSLKSVKALSRCLSRKAEGSNNRRKARARLARAHRAIANKRLGWFFKLSHDLTERYDYLFFETLNLKGMQRLWGRKVSDLAFGMFLNVLQYVANKKGKVVALIDPFFPSSRLCPHCGCINEHLELSDRRWRCPHCHEIIERDVAAALNILREGASSLGGGDVRPVLGQSLLMPESHAL

SEQ ID NO: 18383 - protein, 395 aa, unknown
  TnpB Polypeptide
VQRTIRFPLLPTAEQYDVFLETMCQYTECFNAVAAYGWEHGEKNGVELHKATYYSLREAHPRLPSQLVISARAKATEAVKSAFTWKVKKEREFPKKVAKALARGKPAPTFKPVRCPQSDICSIRYDQRSYAFYGDHVSLATVAGRQVIGLHLYPYAKRLIAQSSEYDSADVIFRKGKFWLHVVVTLPDVEFVPNGDVVGGDFGITRPAVASNNQFFGERSWKNTERRYFRLKRALQSKGSDSAKRHLKKLSRKVSRFRLNCDHVVSRQLVQSVTPGTTIVIENLMEIRLNTKQRSKQQKRNMHQWSFNRLRDLLTYKAEAHGCIVVGIDPLYTSQRCSRCGHIHRSNRRSQSRFKCRKCGFELNADLNGSRNIAVKYLASVGIAEAGGLLSTSLS

SEQ ID NO: 18384 - protein, 393 aa, unknown
  TnpB Polypeptide
MIICKAFRYRLYPTAEQEQALAVQFGHARFIWNWALALRKATYQETGKGIGYYELKRRVTALKHQTETEWLQQTDSQVLQAKIEDLERAYKNFFEKRAKFPRFKGKRDGQSIRYPQRFKFDESFTFLPKVGWVKTRFHRPLEGRPKNVTVSKTKTGKYFVSIQCEVEMVEQTARDGEIGIDLGVKSFLAASEGWKRDNPRHLQQAEKGLKRLHRQLSRRVKGSAGREKARILLARRHEKVANQRMDFLHKLSTELVLTYGLIGMEDLNVQGMVKNDSLAKAISTTGWGAFRRMLEYKGNWYGSYVHKVDRFFPSSKTCSNCEYVLDELPLSVREWQCPICGAIHDRDINSAINVLKETRAGIARSHAGGESVRWRQGATTLAEAGSPTAFSGG

SEQ ID NO: 18385 - protein, 379 aa, Caldilineae sp.
VKTYKYKLYQSKNNKHLHQQINIAGLIYNHAIALHRRYYRLTGKGLNKYVLQKHIAKLKKLPKYSHWALLDAQAAQDIADRIDKAYKLFFGNLKRKVRTSPPGFKKVKKYTSFTLKQTGWKLLDGNQIVIRGKVYKFSKSRDIPADIKTVTIKRDSLGNLFLYFVVVQEPDNQIKQPMTGNSAGFDFGMKVFLTTSDGQEIVSPLYYRQAMAELKQAQRKLASKVKGSNNWRKAKMTVARIYQRVVNRRRDWFFKLAHDLTSRYDFLYFEDLSMKGMQALWGRKIGDLARSEFMGILKHVASDKDKVVGLVDRFFPSSKICFDCGCIKHDLGLSDRQWVCAGCGIIHDRDRNAAFNIHREGASSRKVGDVRPASLAVAV

SEQ ID NO: 18386 - protein, 427 aa, unknown
  TnpB Polypeptide
VECKTLFSKIINFVFYNIICIFASEMRKIHKSYRFRLYPNEGQIELLAKHFGCSRFVYNYFLNQREEQYKLTGKGDNYYAQAKVLTEMKKQEETAWLNEVNSQTLQFALRSVDTAYKNFFKKLTKFPKFKSKHFKNSFTVPQFASITEGRLFIPKFKGGIKCRVHREIKGKIGKVTITKTPSGKYFVSIFTEEEYITPIEKTGKSVGVDLGLKDLLITSEGEIFKNNRYTKKYECRLAKAQRHLSRKIKGSKGFESQKLKVAKLHEKISNSRVDYLHKCSISLIRRYDTICIEDLNIKGMVKNHRLAKSVTDASWGTFVNMLTYKAEWNDKRIVKIDRFYPSSQTCSFCGYVNKETKDLSVRAWECPICHTHHDRDVNAAINILRIGLNNNISAGTVDYTGGEEVRVNLLKDHSSVKPEAHNYFKKV

SEQ ID NO: 18387 - protein, 442 aa, unknown
  TnpB Polypeptide
MQIISSYGVELRKQNIPIRQTLEIYRSAVSYLIGIYVQVWEELAEIPDAKRRFNAAEHLVHTTKKNHACFDFDIRFPKMPSYLRRSAIQHALGTVSSYKTRLDLWEKTDGKSGKPKLVYENHAMPVFYRDVMYREGAEGKDEAYLKLYDGHDWKWSCVRLDHTDMEYLRKCWSGKKASAPTLEKRHRKYFLRFSYTEEVTLTKTPVKEQIICSVDLGINTDAVCTIMRADGTVLGRRFIDHPSEKDRMYRTLGRIRRFQREHGSAQTQGRWAYTKRLNTELGKKIAGAIVRYAEENHADVIVFEYLEMQGKISGKKKQKLHLWRKRDIQRRCEHQAHRKRMRISRICAWNTSRLAYDGSGAVTRDRENHSLCTFQTGKRYNCDLSASYNIGARYFIRELLKPLPATERSLLEAKVPPVKRRTSCVYADLRKLHSEMELLKAA

SEQ ID NO: 18388 - protein, 408 aa, Nocardiopsis sp.
MGVTTACFDCVLSLNGCTMVGVSKIVAWVKLTPSPEQAAALASTLRALNTHATWVAMVAHEQGVTRNYELRKHTYRQLREAGVGSQAAQHVIKRVCDAYRSRRSNLDNGNYGPKGSARRERIESTPIAFRPDAAHPYDARNLSFAMDARTISLWTFPGRLKDVPFVGSPEQIKMLAEHKRGEADLLCRDGVWFLVVTVEVPDASEQEPDGFLGVDLGIVNIATISDGRVMAGRQINRYRRRQLRLCQKLQAKGTRSAKRLLNKRRRKEARHARDVNHRISKRIVAEAERTGRGISLEDLTGIRTRVRHRRPQRVTLHTWSFHQLGAFIAYKARLKGVPVVFVDPAYTSQTCAECGHVDHRNRVDQAIFICRGCGVVAHADRNASANIAARGRVVWNAGRKSHVPPVHP

SEQ ID NO: 18389 - protein, 408 aa, Salinigranum sp.
MEYSHRYHAYPTQEVAERLEYHIDVHRQAYNYTRYEYENVDADNIGSAYKHHYRLPGWKQQFPVFSEVNSKALQRTVTRFYQNLNGLSEKKQNGHKVGKLRWKSPTEYQSMTYSQSGFELKNTSGRHATLELSKVGDIRIRHHRATPDEADIKEVTIKKETTREWFVSFGLETDDDELPEKPNVDSLNTSNSVGIDLGILNYIHTSDGKTVSWLDLEDEYERLRREQRKLSRKEKGSNNYEKQRVKVAKVKRRIRRTVLDYQHKLTTWLVKEYDAVFVEDLNVQSMLQGDGNARNKQDVAWRQFITLLEYKGDLYGTHVVQVDARGTTKECASCGVETAKPLWVREHSCPACGFECDRDANASLNVLRRGFSELGLGWPESTPVEIALPTDTTSVSAKRVVETGSLGA

SEQ ID NO: 18390 - protein, 393 aa, Cyanobacteria sp.
MEKQVLTIVCKINPTPEQVTKIEATLQSFAGACNYINEVVDPRLTHNVTIQNLVYRDVREQFGLASNLVVRAVNRVSSNRKTAKRMNKPVRKFLPTSADYDARIFSLREKDWSVSLTLVGGRERFLVDVGNYQKGKLSGFTPTSATLVKHQNGTYSVNIKVHIDAPSIQKSQGIIGVDLGRRDVAVTSEGESFSGQQITKIRDRYSRARTSLQKKASEGTRSTRRRARQILQRLSGRERRFQTWVNHNVSKHIIGKAKKSGCSIAIEDLTGIRERTNEQPRSKTERRRSNSWAFFQLRTFLDYKALGAGVEVIKVNPAYTSQTCHKCLHIHPVKGKSYRSGKTFNCQHCNWKGDADLNGANVIKLLGASVNSPGGSYLSCELRRKVEYFQPSL

SEQ ID NO: 18391 - protein, 375 aa, unknown
  TnpB Polypeptide
MRRAFKYRLYPNADEARELGIMLETHRRLYNAALAQRKDAWEKEKKAVYYGDQSAWYKKERETNEFFARTNFSSAQATLRRLEKSFQNFFRRVKGGEKPGYPRFKARDRYESVEFPSYGDGIRLLGNRLRIQHVGRVKVKLHRPIEGEIKTVSLKHEGDHWYAVFSCDLGEILIPKSALPEAGIDVGLERFLTDSEGGFEENPRYLKKELPALRRAQRAVSRKKKGGKNRTKARRKVRRIHARVRNLRREHHYQVSERLVHRYGFIAAERLSVSNMLKNRRLSRAISDAGWSRFLGILKHKAEKAGASVVEVDPRGTSQECSGCGKEVRKDLSERLHSCPHCDLSLHRDHNAALNVLARARRARTGPVGLNAAAG

SEQ ID NO: 18392 - protein, 367 aa, Moorea sp.
MAPNHSYTTKLKLNNRQKTLMAKHAGFSRWVYNWGLAMWRDAYNQGLKPNTKTLKRLFTNHVKPEYSWMSELSSKVYQYAFINLEKAYKRFFKGISKYPRFKCKGRNDRFTIDNSGQPIRLGGLTHKLPFLKWVRTFEALPDCLTKKVTIYKKAGDWYISFSIEKAFEATAKNRERVGVDFGVKSLAVLSSGMEFKGLKPYRNAQKKLAKLQRKLAKKVKGSQNREKAKVQVQKLHRRVANLRKDYLHKMTTYIAKNHGEVVIEDLNVSGMMANHKLAKAIGDLGLHEARRQLTYKCERYGTLLVVADRFFPSSQLCSNCGNQQPMPLSQRVYSCDCCGNKIDRDWNASLNLERYNEYGSTRKPVEG

SEQ ID NO: 18393 - protein, 269 aa, Microcoleus sp.
EGKLRTVTVSKMPDGRYYASLLVEDGLESPEPSSEGKTIGLDLGLIDFAVTSDGSKYQNPRHLKKHELNLKRKQRKLSRKKDKTTNKWRKARIAVAKVHSKISRVRSDFLHKLSRKTVNENQVIVVENLAVKNMVKNHNLAKAISDAGWGMFCTMLKYKAEFDGKTYLEIGRFFPSSQLCSNTLLQIPKMDLCVRSFDCPRCNQRHDRDVNAAINIRNEGLRILALGISATALGRNVRPKRYGRKSTTVEAVAVELGSPGSICTQMNVG

SEQ ID NO: 18394 - protein, 405 aa, Gammaproteobacteria sp.
MIIRKAFKFRLNTTAETEQLMSQYAGNCRFLWNKALALNLYYLENKQPMIWYQELDWFSKLWKKSDDYAFLKLSPAQTIQQTLKQLERAFKDAFDKKQPLKKIPTFKKRGDRDSFSLPQGFKLDGKRIFLPKIGWINFRKSREIEGTAKNVTISRQGKYWFVSIQVEMELPEPVHSSTSMIGVDMGVKRLFTLSDGDFEEPINVDFFKDKIKRLQKRLARMVKFSNNWRKLKEKINRLHTKIANIRHNILHKLSTALSKSHAMIVLENLQIKNMTKSAKGNVDNHGSMVKQKSGLNRVILDQGWGMFKTFLQYKQLWSGGQVLFVDPKYTSQTCPVCQHKSKDNRQTQAEFECVLCGHKEHADVVGARNILERGHRLLACGETDISLLCEAGTRQFSNELEPAVA

SEQ ID NO: 18395 - protein, 395 aa, Streptomyces sp.
MSHYRLRPTSDQARVLAGHCAHARYVWNLAVEQHTLWTPWRGPAPNYVAQARQLTEARREYGWLRAGAQMVQQQALRDFAQAMSNFYAGTHRRPTWRKAGRDEGFRVVAVRPEHVERLSRNAARVWVPKAGWVRFRLSRPVPEGVKSYRITMDRAGRWHVGFAAVPAPIEAPGNGDVVGVDRGVTVSAALSTGDMLNVPGLTVTEQRRLKRLERTLSRARRGSNRRRRVRTQIAVLKARETDRRKDWVERTSTDLARRFDVIGVEDLNIRGMTRSAKGTVEAPGRRVRQKAGLNRGILSAGWGGLVQRLEHKAPGRVIKINPAYSSQTCSVCGVTDREARESQARFSCRACGHTQNADVNAAVNMKTAAGRAVTAREGPSDSGPVHREPQLLLSA

SEQ ID NO: 18396 - protein, 414 aa, Lactobacillus sp.
LNASRFIYNQLLAHSRTDSLIIKNKLDQQFPIPEQYWRYNKKGQVIKKSTKRPTGLDRITTKQYPWLGDEDLDSDMFTNMKVHYQNAWNMFRKVHSAGIPKFKRKDRPVQSYSTSSHYSTKTVKNNGGVFSLYNGSIKFLDGSHIQLPKVGRIKVKLHRALPTNRLVRIATITIKHYATGDWTVSLLLKSDKPFHQALPKTHQTVGIDLNTDNFLTTSEAAVTANPRYYCTIKKRLAKAQRVLSRRERRAKKEHRSLRKSRNYQKQRGLVAKIHAQVRCQRQNFLHGRATTLIKNHDLVVAENLKSKNMLRNHALAMSISDVGWRTFLSMLEDKAPLYGRLFVEVNPAYTTQTCHDCGFVMGSADTKRLTLRDREWTCPACHVHHIRDHNAAQNILTKGQQWLQSGKYLAAIYG

SEQ ID NO: 18397 - protein, 445 aa, unknown
  TnpB Polypeptide
MAKNISEMRDVQSVSSARFVTSPLTRRKRELLDELLGQFAESVNFCIQKCLEHGCTSRASLHHVAYEEWKSRFNLATHWFHSAGQVATQTLRSWRRLCRRGQASPKKPPVYEARTMRLERWDENSTGVCRFKGGSVQICVRRGEYLWLPLIVSEHHEFRYLRDWREGKTKVGEITISIFKDRANVFVPFKREVEPKLAKGVCGIDVNERSVYLCILKQGEQPKHIKIDTSKLASIAHSMELKQKAIQEKLDSLPKRPVQRVRLKKKYQRRRRNRTNQVMHVVSKKIVEVLTRERVEPVFEGLTDIRQSMRSKRKSKNGQALRKDMRRRLNQWPFRKLQNYVEYKILRSGFETRYVEARGTSSTCPMCGRHNRPNGHVFSCRVCGFTGDRHSVGAYNIAARWLTKDVGSDVPPEWRQMQPPAEVAVPPKKLEVEAQKISLQFAAGI

SEQ ID NO: 18398 - protein, 567 aa, Gammaproteobacteria sp.
MSKKTTIKTSEEVPISTYQTRLRDLPLDLSGALDDCADLLSQVERKLFVKTQTQKVGTKKVFNKIKSFFVSFFGILSRHFNSINLTLKGKVDSYRSNLDRHIKENQERVDSARKTIEKLSKKTVEPNQRQKHLNKIHQKKRRLARLEKRLEQLKSDKATGRVRICFGSKKLFNAQFDLKANGYKSFEQWKSDWQKARSNQFILVGSKDETAGNQLCTAKRQKDGTLTLRVRMPDGLVPKHGKYVSIPGVKFEYGQEVIEAALNDNEARRVLKSLKSYETKHYGQAITYRFLRDKKGWRVFVSTAIPQIPIKTIKHIGTIGIDLNANHIALVETDRFGNAIETETIPFNTYGKSKGQTEALIGEAVKIIVERSEKTLKPVVIEDLDFSQKKSILKENRSNKNARMLSSFAYNKFKQFIEARAFKHGVRVYKVNPAFTSVIGRVKFASRYGLTVHHAAALVIARRLCRFSERAPSSCQDEILIPNNKGGHVTFSLPARNRKKHVWSFWRRVSRKLKSVVHVAQVRATELTARSSQTQGSLAGMEGQPLSRTLTGAIPAHETLGNTARPT

SEQ ID NO: 18399 - protein, 428 aa, unknown
  TnpB Polypeptide
MKGGESKMAVKVIQTSFTATPEDIDRLFACNRISAMIWNKVLELAKEYALANNGKWAGKTYLQTATKDIYPLHSQSVQAVVHNYLFARNAARAARKKGYKNKYPWRIKKNYNTTWVDEAFAFDFSQKTLSLSLGNWNHKHQKSIVVNLPKDIVSKIQEVLNKNKDAVSEVELCYSNGLHLHVTYDDGTEAETNPIASGTAGVDLGEIHAIAACADDGNSVIVTGRKLRSIHRLRNKQLASISKAQSKCKKGSRRWKKLQRKKRYVLSKSRHQVAYKTHEITKKFVDWCVEHKVGKVYCGDPEGVQRNTSGRKKKNRATAKTRKKIRKRKVSQKLSNWNFGKIKEYLEYKLQNQGISLEVINEAYTSQTCPICGQRHKTNSRNYRCKCGYHAHRDVHGAHNIMSLGMTGHFEKICNFDKQNPKYLRLTA

SEQ ID NO: 18400 - protein, 422 aa, Elusimicrobia sp.
MSRTLTGLRYRLRPHPGQERILARSAGACRWLWNWALAYREDLWLAARSAGARGFRGSTGYVHLSSLLPGLKERYPWLSEAPHHALQATLRDQDRAFSSFFAGKSGYPRYRRKGERDSIRFPDPKQFAVDGDWVKIPKLGWTRFRLSRPVTGRVRNITLSREGAHWGVSFCAEGQFSLPNRGLPAVGLDLGAVQSVTTSDGRVVSFPVTTPSEDRRLRWLQRKASRRLKGSARRSRTLAGLAKLKRHLVNRRRDAAHKLSTRLATAHAAIVIEDLKLRRMTASAAATTEEPGRNVRRKSELNRRMLAHGLSDFRRMLAYKCERSGARLVAVDPSFTSQTCSQCKHCAPGNRKSQAVFLCAACGHHANADLNAALNILAAGQAVTAQGGSGVAPADELRTHPRRRPPARLAPTGIPAKAAAAA

SEQ ID NO: 18401 - protein, 482 aa, unknown
  TnpB Polypeptide
MGGWSAYQIPEGWVARGWRFEVETTSPTQRALIAQHFGARRFAYNWALAQVKANLDARAADPSVPPLGWSLPTLRKAWNQAKADVAPWWPCCSKEAYASGIADLVTALNTWSASKQGRRAGARVGFPRFKARHRDRGRVRFTTDPMRLEPDRRHLTLPVIGKLRSKEITRSLERLVAKGRARVLSMTLSEQGGRLFLSVATVVAQAPGRPSEPDARCGIDLGIGAEWAVVAHADDTIERIAHPAPWVGVQRQRRRITRQASRRVVGSRGHRQAKAKLAALDRRVANLRRESIHTLTTALARRYGTVVVEDLDIAAMAKSMGRRAFRRSVYQAGLGRIRPTLTYKTSWGGGRLVVADRWFASSKTHHGCGGYHADLGLTDRVWVCPACGKPVDRNANAALNLRDWTGPVSDRDVQRGGVAAPVPLVGDHDGQAHAPGVGVRGPVRPPHVAGADDTSTNPPTPGARNPAPGYHPVSSHRRSPDW

SEQ ID NO: 18402 - protein, 407 aa, Bosea sp.
MLLTYRYKLKPTKAQYAALDRLLEAQRLLYNAALQERIEAWRKAGKSISKIDQNKSLTQIRSFDEGYASMPVALSRWSLARLDDAMAGFFSRVKRGQSPGFPRFKPLSRWSSFGFVEFKGIRLREGRLLFSPIVGGLKLNLHRPVQEGSSIKSCTFTRRGRHWWITMAVDVAVVAGHDAPAAAVGIDVGVAHLATTSAGEHFQNARPRSRRERELRVAARALARCKRGSKRRRKVRARLALLQLRVKAARNTHLHQVSAELTRRYAFIAVEDLKLRNMTRSAAGTVEAPGKNVRQKVGLNRSLLDAAPGRLIQLLTYKAERAGGLVVKVDPRGTSQECSSCGVTVEKKLSMRVHRCSCGTVLDRDHNAALNILNRALVAHGRAKPPGDANVGHQPVRRLGTAVAKAA

SEQ ID NO: 18403 - protein, 393 aa, Thermoactinospora sp.
VRRSFKFLLRPTAKQAAALAACLEDHRQLYNAALEHRRTAYAKAGVTVRYGDQSAELKEIRAADPDDQGRWSAGSQQQTLRRLDKAFAAFFRRIKAGQKPGYPRFKGRGWFDTVEWPATKNGATWDSAPHETQTRLYLLGIGHVRVHRHRPVTGRVKTISVKRESKRWYVILSCDDVPAEPLPATGAVAGIDMGVASLVTTSDGGHLANPRHLAATAGRLADAQRDLARKRRGSTRRRQAVARIAALHAKARRQRLDHAHKAALALVRAYDLIVHEDLEITNMTRSAAGTIDAPGRNVAAKSGLNRSILDAGWGVFLTVLAHKAESAGRELIAVEPRNTSRTCSRCGHCAAENRPTQAEFRCTACGHAAHADVNAAINILRAGLALRSAAEAA

SEQ ID NO: 18404 - protein, 385 aa, unknown
  TnpB Polypeptide
MIEVMKTYKFKLYSAKRNKKLHRQINAAALAWNHCVALTRRYYKSFGKSLPKFKLQKHLTKLKTRTPYAYLTEIGSQALQEVTDRLYKSYERFFNARKNGEKYGLPGFRKVRKYKSFTLKQAGYKLLSGNEVMICGQKYKYFKSREIEGKIKTLTVKRDSVNDLWLCFSVEAEVPNVVNSRPGHPVGFDFGLETYLTGSDGQSIESPEFFKQNLKEVKRLSRILSRKQQGSNNRNRAKRDLARLYRRIANQRSAWQWKIALELVELHAFIGLETLNIKAMQRLWGRKIGDYGFSDFVSILQYAASKVGTQIVHVDKWYPSSQICSACGYRFNGTKDLSVRRWICPHCGAEHNRDVNAACNILTEALCIAEKQQRAGRSSVKVSQC

SEQ ID NO: 18405 - protein, 362 aa, unknown
  TnpB Polypeptide
MVNKAYKFRIYPNQEQQILFAKTFGCVRFIYNRMLSDKIKYYEETKQKLNNTPAQYKKEFEWLKEVDKFALTNAIYNMDAAYQKFFKEHAGYPKFKSKHDNHKSYTTNFTNGNITVDFGCNRVKLPKLKNVKAKLHRNFSGQIKSATISQVPSGKYYVSILVETEHVELPHIKQNTGIDLGIKELCITSAGKKYENPKIIRKYEKKLVKLQRQLAHKEKRSQNYYKTKKKIAICHEKITNTRKDYLHKISHEIISENQVIVSENLQIKNMVKNHHLAKAISDVSWYELTRQLEYKAKWNGRKYIKIDTFYASSQLCSVCGYQNPDTKDLSVRTWICPKCGAEHDRDINAAKNILTEGLRQIA

SEQ ID NO: 18406 - protein, 569 aa, unknown
  TnpB Polypeptide
MSFKKKPGTEEDVFCLTFPLICEPWQRDRLDQYFSNAQHMENCLIAWVRAQVVQLERTRKWRRNQKHITKVCAEIGEVQKLILSGEAKLEKLNEKLKSIESSSEQKALRKNRSLLKKELKDADSRLQAVKKQVKACYDIRTEMIAEYGLTSDGLDQQMKKYRDHYSIHSAVTQKITARVWKSVKKYFYGNGKEIHFVKWTDFMSIAGKNNITGITYADRLISVAGLSLKVKLSAKDPYDYETQALARKIHFCGISRRWYPDGWHYFAQLYLGGTPPIKVHKATGELLHPIGSGRVGLDIGPQTLAAVGDQQVSLNVLASGIDDIHAEIRRIQRKMDRSRRATNQWAFDEKGSVIPINKVPPEHLKNKKRNWYKSKEYLRLESKLRYLHGKIARQRVELHNRLANQLLSYGDEFYIEKMDWKALAKRAKETKVSQKTGKYVSKKRFGKSIANRAPATFEHILENKVKHNNGSYTEINTWKAKASQYDHQTKACKKKHLGQRYHVLQDGRKVQRDLYSAFLIQNTNETRDGFIQELLERKFEHFYNMQTEELNKLSHIAVPLPNSMGIHAA

SEQ ID NO: 18407 - protein, 251 aa, Clostridioides sp.
MYCGQHIKLPKLDMVKIRDKQVPKGRILNATISKEPSDRYYVSLCCTDVDIEAFENTNNQIGLDLGIKEFCISSCGEFIENPKYLKKSLNKLAKLQRELSRKTIGSLNRNKARLKVARLQEHIANQRNDFLQKLSTKLIKDNDIICIEDLQVKNMIRNRKLSRLISDVSWSEFIRQLEYKANWYGRQIVKVGKFFASSQICNKCGYKNEEVKDLNIREWICPSCNETHDRDINASINILKEGLRLITIQNK

SEQ ID NO: 18408 - protein, 403 aa, Saccharothrix sp.
VVRRSFKFLLRPTAKQTQALSAMLRDHCALYNAALQERRDAYRHVSRTTVRYGDQSAQLKDIRGFDPDQARWSFSSQQATLRWLDRAMRAFFRRVRAGRTPGHPRFRSAARFDTVEFPRDGDGCRWDSTPHDPVTCVRLQGVGHVRVHRHRPVRGRVKTVSVKREGNRWFVVLSCDDVPSAPLPPTDRQVGVDVGVTHFLTTSDGVHVANPRYLRATADRLADAQRTLARFGRVHRDRRSRRHRAAVAKVAALHGKVRRQRLDHAHKTALHLVRTADVIAHEALTVANMVRRPSPRPAGDGSFEPNRAAAKAGLNKAILDTGWRMFLGILAHKAACAGRELIPVNPADTSRTCPECRHTAKANRHGEDFRCVSCGHTGHADVVGARNIAHRAGLVLRDTTPVA

SEQ ID NO: 18409 - protein, 453 aa, Methanocaldococcus sp.
MSSKNKLPTEIVLTYKVKHNHDLKNLPYEFIKTSQRAVDVIWENIDWKEKIVKHRYKIGKKKYKYYTTTRLIPEIPKDNDFKKALRNYLLKGWEFASHYVDGAIKTAYSAIESWKSNYLNGKRKRNKPIFKRPFVRVKTTLMKYDKEKGEIRITIKPRKEYLILNIKDEWFFERVKDFDIGEVILKDNEALITFKKQLDLSDKKVVGVDSNLKSLDLYHPEKGWIRVDLSELHRIKRVYDAIIDKLKSIYKKSPKRIGKLLKKYWNRRKNRVEDFINKLTSQLSKLFPDAIFIFEDLDKFNMYDKNSDFNRDLDRTNWKKIAKKLEYKSVVFYVNPHYTSKTCPVCGSKMKSQEGQVVKCDKCGIFDRQFVGCYNIFKRGVELAKKLLGGVGVPVTGVKVDDLLSNEPRGELRPMPPNPNVEAKLPVRKTEGFPLMVYTVDLNGRYLKIYNCP

SEQ ID NO: 18410 - protein, 408 aa, Methanocaldococcus sp.
VSKLEVTRVLTINLTRKLTDEQRIILNHLTYSASKLWNVANYEIIQDNIKLSELEKKLKDNFWYKNLHSQSAQAVLQKLKVAWDNFFKQHTKRPRFQPKDGHFPVKWKKDGFKIIANKLRLSLSKQTRQYLKERHGIESKFLWVELSKALPLDAMQVKEVEIVPHDIYGERFYVLHLIYKKEVNPEMSKEDKVIMAIDLGVRNLATVVIEGEKQPLIFDGKILVSKLRWFAKETARIKSIIAEQGLKTCKRLARLTVKERNYVKDYVHKISSWIIDLAKRKGVSRIIIGELNKNITKIDIGDRVNQQLHRIPYGKLVKMIEYKAEELGIKVEQIDESYTSQKCSVCGVIKKSNRKYRGLYICSNCGAVINADVNGARNILFKVVPNPERGRDSGLGNPRRVSFKALLS

SEQ ID NO: 18411 - protein, 558 aa, unknown
  TnpB Polypeptide
VRRCRVSGLRPVAAPFVAAAPAGARVRTRLRVSARDAEVLEAAGTHLGSLAGRDLAARCAEGRLDAKGKAGSRAVRKRALTAESSSRWAGAITRTSEDQYRLAGQNLRAGQASLQARIRRIEARLAVPAGGKSGRTRGYATAAERHAKAIRLRSLKARLARADRRLAAGTVSVVRGGRALLRKRANLAAAGLDEDRWRAEWESARLFLTADGEKDKSLGNETIRWHPGEGWLEIRLPAPLAHLANRPHGRYRLSCPVEFSYRGDEVAAQTATGAVRYDISRDPASGRWYLDASWKTSPAPAATLDELRASPVMAVDVNAGHLAVAVVAADGNVLGTPATIPLDLAGLPAATRDGRLRAGISALIATAKEHGARAIVIEDLDFAEARSEGRERHGNRPSRGRRGRAFRRLVAGIPTGKLRDRLVQMAANAGLHVIVADPAYTSRWGAEHWLGPLREHHPKATGHHAAALVTGRRGLGHRARRRVAGNRTAPEEAARPAQARPRTTPAAGPAPRKPATPRGTRQPPGTKTGRPHRITAGNQATQDRPGPPASQDHVLLVQ

SEQ ID NO: 18412 - protein, 242 aa, Bacillus sp.
VKTSQQLPRNKKTSNPRVTFDGRHWWICVGFEESFEFQELTHESIGVDVGLKELFVASNGMKERNINKDAKVKKLLKRKKSAQRDMSRRFKNGVKIQSAGYEKAKAEHLRLSRKITNIRNNHIHQATATLVKTKPMRIVVEDLSISNLLKNKKLSKALSFQKLNFFFQCLSYKCEKYGIEYVKADKWFASSKICSCCGVKYDHSVQPEGQWSLKIREWRCVTCNSHHDRDVNAAINLSRWVK

SEQ ID NO: 18413 - protein, 505 aa, Cryobacterium sp.
VSAIILELPKKRNDVAPGKFGNGSLTNRVGPPTKARKPREVVRTYPLPQSANVRKTESIVAMLAPWQAGLVRIHSGLTRARFEGARFPKYLDTKPLAETSVLTQRQWKSVTNQAFKETRSWEGMAKLRVAVLIRGSKLPKNTQFWLYQVNAFRAWWFKDGSLLLPTDEEAPPAAVYRLSRQMIKQVTRTHPRPRLGSIRTMLMDSLIVNVERSRAKTFDYWVKISTLDRGHRVMVPLSSYEHMETAPGRVLHYAQVRVDTDNQVSLSLLRKNALAPLRGDGAVVGLDWGLSHMFATSDGQLLGNTIFPWLKERDAELLALTRALQKQGIKLRASRRYRELTRRIREHMVNEVNRILNQLSRRNIRAIVVEKLDFRGGGMSPSMNHLLSKSARATVRAKLTSLTETAGIAVTYVHPAYTSQQCASCTNIDFRNRSGELFRCRFCGRESHADVNGARTILGRSHNDSVQLWMYRGIVKKIIDAQFTQRWGSPPTGLTRRREPSSTRA

SEQ ID NO: 18414 - protein, 389 aa, unknown
  TnpB Polypeptide
MNARSNKHNFLPSSYLYASFLMVRKTFKYRLYPTKAQASKFGAILEECRWLYNKMLEEHKYTWEVEQKVIGLYDQHARLPALKSARPSLETAHSQVLQNVCLRLDLAFKAFFRRVKAGEAPGHPRFKSFGRYDSFTFPQAPSGCQLRGEKLVVSKVGPVKIVLHRPVEGVVKTATIRRTATGKWFAFFSCELEPKPLPTSTERAGIDVGLMTFATLSNGEKIENPRFFRREEKALAQAQRKLSATPKGTPKRVKLRKAVARVHERSTNRRHDFIHQQSRRLVNRFGLIAVEDLNVNRMGRERKFSKSIHDAAWSMFFACLSFKAEEAGRTMVAVNPAYTSQDCSRCGQRQLMPLAERVYRCPSCGLELDRDHNASLNILAVGLHGLGLP

SEQ ID NO: 18415 - protein, 209 aa, Okeania sp.
VKQFGTIASSKENQIISFPESIKKEQFKFAKFQWHNRQKQLGGKGKPASKNAVKYYKKLAKYHARIASQRKDFLEKITTELASYYKHICLENLNVKGMMQNGKLAASIARLGFYQFRQRLTTKIVASGGSVVLADQWFPSSKTCHNCGHITRDLKLSDRIYNCPNCGTVIDRDLNAAIVLSQYGEVNQKARVGCTRIYACELEGADSPG

SEQ ID NO: 18416 - protein, 381 aa, Rubrobacteraceae sp.
VRRAFVYKLRPSRSQLAKLEETLVTCRHLYNDALAERKEAWENEQQSIGFAAQSASLPQRKRSSSYLPSVHSQVLQNVLRRVDQSFQNFFRRCKAGDAPGYPRFKGRGWYDSFCYPQYGNGAKFKDGRLVLSKVGHIKVFRDRPLGGKPKTATVIRKADGWYVSVLCEVEPEPLPKTGAAVGVDVGITHFATLSTGETVENPRCYRKAQRRLAKAQRRVSRRKKGSKLREKAKALLGKAHQKVARSRRDHAHKIAKDLVERYDRIAVEDLNVSGMVMNHHLAKAISDSGWTQFIQILSYKAESAGRELVKVNPRNTSQACSGCGELVRKALAARWHSCPSCGCELDRDHNAAKNILNIGSGRAFGEPMPTGAASNREPHVL

SEQ ID NO: 18417 - protein, 262 aa, unknown
  TnpB Polypeptide
VGQGENKKARLYLSKIGFFTVVVHRDFPLGRVSQVCVKLSPSGRMYVVFLVVGGEEAPNEQAPAGEPMKVVAVDLGIARLATLSDGRFLDNPRPLERSLGRTRLLQRSLSKKMKLSKNWFKVKRRLAKEHEYVKDFRRDLFYKLGALLATEYDLLVLEDLNVQGLIRKGETGKRRLRLHDSSFSELRRILEWQFRKQGRAVLAVPAYNSSRECFLCGGINQGLTLEDRVFHCPHCGFTLDRDLNASLVLLKRAGWVPPSRCA

SEQ ID NO: 18418 - protein, 421 aa, unknown
  TnpB Polypeptide
MVGVRVRAYRFRAYCSKTTAGVLEAQLQAACRLYNTLLHAEEEEYKKNKHTMSRNELRQLALDLRKRNTELQALHSQVAQQVAERFYQARQRFFDGLANKPREKKPHKYLSLVYPQSGWRLSNIREVGQGGNKKKKKARLYLSKIGFFTLVIHREFPLNRVSQVCVKLNPSGRIFVVFLVDEPVGEGPGEPTGEAGKAVSVDVGIMRLVTLSDGRFLENPRPLERSLDRIRALQRSLSKKKFLSKNWFKAKTKLAKEYEYVEDFRRDLFFKLGVLLAQEYDQLILEDLNVKGLIRRGETRGRRLRLYDSSFSELRRILEWEFEKRGKAVLAVPAYNTSRECFRCGGINRNLTLEDRVFRCPHCGFTLDRDLNACLVLLKRAGWVPPGVPVELRPIPPLPSLGLKRRQGGAVMREAPPPGAG

SEQ ID NO: 18419 - protein, 423 aa, unknown
  TnpB Polypeptide
MVGVRVRAYRFRAYASKTTAGVLRTQLQVACKLYNTLLHAEEEEYRKNKHTMSRNELRQLALDLRKRNTEFQALHSQVAQQVADRFYQARKRFFDGLANKPKTKKPHKYLSLVYPQSGWKLSNIREVGEGENTEKKKARLYLSKIGFFTVVMHRDFPLERVSQVCVKLNASGRIYVVFLVAEKVEVQLEQSPKDPKKAVSVDVGIMRLVTLSDGRFLENPRPLERSLERVRALQSSLSRKKKLSKNWFRAWRRLAKEYEHVGDFRRDLFYKLGALLAAEYDVLVLEDLNVVGLVRKSETGKRRLRLHDSAFSELRRALEWEFEKRGRGVLAVPAYNTSRECFRCGEINRDLTLGDRVFRCPHCGFTLDRDLNACLVLLKRAGWVPPVVPVELRPIPPPPTLGMVGRGRQGGVLIQEAPPSGAG

SEQ ID NO: 18420 - protein, 387 aa, unknown
  TnpB Polypeptide
LHAEEEEYKKNKHTMSRNELRQLALDLRKRNPEFQALYSKVAQQVADRFYQARQRFFEGLANKPKVEKPHKYLSLMYPQSGWRLSNIREVGQGENKDKKKKARLYLSKIGFFTVVVHREFPLSRVCQVCIKLNPSGRIYVVFLVEGEEAANEQAPAGEPMKAVAVDVGITRLATLSDGRFLENPGPLERPLDRIRLLQRSLSKKMKLSKNWFKVKRRLAKEHEYAKDFRRDLFFKLGVLLAAEYDLLVLEDLNVEGLIGKGETKKRRLRLHDCAFSELRGILEWQFQKRGKTVLAVPAYNSSRECFQCGGINRDLTLEDRVFHCQFCGFTLDRDLNACLVLLKRAGWVPPSVPVELQPIPPPPSLGLVRRGRQGGAMMREAPPFKAE

SEQ ID NO: 18421 - protein, 173 aa, unknown
  TnpB Polypeptide
MLSRCATRGNRDKTRLKVAKFHARIQDRRRDYQHKLSTRLVHENQVICVESLAVKNMVKNHKLAKAIQDVGWGEFVRQLEYKSKWYGRTLIKIDQWYPSSKTCHACKHVLDSLTLDIREWVCPECGVVHDRDTNAALNILAEGLSVNACGGNVRPVRAKARQAVAGEAGSSHS

SEQ ID NO: 18422 - protein, 408 aa, Arthrospira sp.
MKLRYRYRIYPTDQQKRLMSQLFGCCRVVFNDALAYCQEQYRAGNKKPNIKELSQRLTELKKTEEKIWLGEVSSIPLQQSLRDLEQAYSNFFKSCKGQRKGKKVKPPKFKKRKSKQSARFMDNGFKIYLNSDYIYIAKIGDIKVVWSRELPTKPSSATLIEDSADRYFVSFVVEFNPQPLPENQNSVGIDLGITDFATLSNGEKVKSPKPLKKQLKRLRRLQRNLSRKQKGSQRREVARKKLAKLYAKISDIRNDFLQKLSTRIIRENQTIVLEDLKVSGMMKNRKLSRAISDLGWRSFRTMLEVKSVMYGRDCRVIDRWIPTSQTCSGCGFRGGKKELNMREWTCLNCGTSHDRDVNAAINIKVAGGHLETLNGCGERVRLSVKKAHLNEASTRPAFQQLSIFDLLK

SEQ ID NO: 18423 - protein, 234 aa, Arthrospira sp.
LIGTWDLAFYGTEQIKRVRLIRRADGYYAQLCVKVDVREEIEPSGNTVGLDVGLKEFYTDSNGQSEPNPRFYRNAEKKLKRAHRRVSQKRKGSANRKKAVNRLGRTHLKISRQREEQAKRLARCVIKSNDLVAYEDLRIKNIVRNHCLAKSIHDALWYQFRKWLEYFGVKFGKITVAVNPAYTSQKCSSCGTIVKKSLSTRTHICQCGCELDRDYNAAINILKAALSTVGHTET

SEQ ID NO: 18424 - protein, 451 aa, Arthrospira sp.
MRTKKPTQIIRTDKWTLNPTAEQRVLFGETVKVYRRFCRYLVGIVFTHWSELGSLPGNNVISAVERLIHRTGKNPHPKYGLIDITFHKFPSYYRRAAIMLAVGQVSSYMTRYREWQSGMSRKRKDAKPPQLQAKTGCYPTLYKGGCYKLHGYEQIEIKVFTGSDWVWTTVQITGLCNRHEIPDNKLLSPSLIFDAQTCYLSVPFHCMPAKRIADQNVVAVDLGINTTATVTVVTFDGTVIHREFIHHGRDIDRRDKRLKSVSKRASKTMGKGGKLHKGFCSNTYRKCQNINNQISHIVSKRIVQIATKFNAAAIVFENLKGWRAKGGRRRSNLRQRFHGWLKAKIRDYTEMKWQELGGEVIDVVAAYTSKLAYDGSGIVKRDAKNYALATLASGKRYNCDLNASQNIAARGILQLTRRKDSEDLSSQRSGRSPRSWACLCDLWTLDSSRLA

SEQ ID NO: 18425 - protein, 345 aa, Arthrospira sp.
MQRQSTTRIGKLKLRNLVMQSDLPQWVKETPCHIRQNAIFDAHQAYTASRDACFRSIRNPQQTIKFNNSNFTKGTWYSQLTKKLKFKASEPIPHQCDYGTQLIYRRGKWFAVFPEPVIKSHTYSRKIIALDPGVRTFLTGYDGDKVIEIGNGDMGRITRLCTHLDNLISRSTKVNAKRRRSLKKAANRIREKIRNLIDEVHKKAAHYLTTNYGLIFLPRFESSSMVAKSRRKIQSKTVRNMLTWAHYRFKLILKHQAAKRGCVVLDVGESHTSKTCGVCGHRHAKLGGAKIHKCPHCGSQTPRDANGARNIMLRALRDSSFTVSNDGIAIVTVRALSINVQDCSA

SEQ ID NO: 18426 - protein, 382 aa, unknown
  TnpB Polypeptide
MKLVVQVRLYPDAAQEAALRGTLSLCNDAATLVSAQAFETRTTGKQALQRLVYGDLKEMGLSAQPAIHVARKVSGAYATLKANIKAGNLGKPGSARRVKVESKPISFRPDAAQPYDDRCLSWQLDRQTVSIWTTSGRMAGIPFTCSGAQLARLREHRQGESDLVHRDGKWYLYATCEIPEPEPADPDGFLGVDLGIVNIATTSDGARHAGKHLNRYRRRALRLRRKLQAKGTKSAKRLLRKRSRREALFAADTNHCIAKSIVAEAQRTSRGIALEDLTGIRARVRLRRPQRVTLHSWAFAQLGQFTAYKAALAGVPVVYVDPAYTSQMCSECGHVDKKNRPDQATFRCTSCGVAAHADVNAARNIASRGAADWAAVSLPDAA

SEQ ID NO: 18427 - protein, 252 aa, Blautia sp.
LRFSYKEEVTLTKTPVKEQIICSVDLGINTDAVCTIMRADGTVLGRRFIDHPSEKDRMYRTLGRIRRFQREHGSAQAQVRWAYTKRLNTELGKKIAGAIVRYAEEHHADVIVFEYLEMQGKISGKKKQKLHLWRKRDIQKCCEHQAHRKGMRVSRICAWNTSRLAYDGSGAVTRDWENHSLCTFQTGKRYNCDLSASYNIGARYFIRELLKPLPATERSLLEAKVPPVKRRTSCVYADLRELHLQMEILKVA

SEQ ID NO: 18428 - protein, 396 aa, Moorea sp.
MGMLRLNYQYRIYPDAEQAITLCDWLETSRRVYNYALRQIKDWSNSRKCPIDRCSIVSEYVIPPDEPYPSEYKQNAELAKAKKTNPRLKAVPAQNLQCTIKQLHKGFDFMRERGFGYPRFKKPGKLRSTLFPQFKTSPLDAQNNVIKLPKLGKVTINLHRPIPDGFKIKNVRVIKKADHWYCNICIQCDVNVPSVGFHGHAIGVDLGLDYLVATSDSLQVKRPRFKVKAERKLKLLQRRLNRKQKGSANYRKAQLKVARLHRTVAAQRRDHHYKLAHQLLAECDSIFFEDIDFRTMAKGMLGKHTLDAGLGELRQITKTVALKLGKFFDTVDHRGTSQECPDCGVTVKKTLADRIHRCDNCCSVKPRDVASAQVICNRGIAKHQTLPVEHRELETA

SEQ ID NO: 18429 - protein, 345 aa, unknown
  TnpB Polypeptide
MAQQILKEVDGAFKSFFRLLKLKSKGQYKEKVKLPKYLPKNSFTTLVVGFVRLNENTFILPYSQSYKKNHRPIKINIPPLLLDKNIKEIRIIPKFNARFFEIQYTYQVENEERNLDKNNALAIDLGVNNLATCVTNRGKSFIVDGKKLKSINQWFNKYNAKLQSIKDKQGYGKTLTMKQKYIWNKRNNRVNDYLSKSARIIINYCLENNIGTLVCGYNNDFQRNSDIGKKNNQNFVNIPFSKLQSKLEYLCEFYRIKYVDQEESYTSKASFFDMNIIPEYKEKDNIEYSFSGKRVRRGMYKTLKGYILNADVNGALNILKKSKVVDLEVLYHRGEVDTPVRIRVS

SEQ ID NO: 18430 - protein, 411 aa, Hydrococcus sp.
VFVLEFKVKPKPIQIQAIDEAIRTSQFVRNKVLRYWMDNRGVGKTELFRYNTRLRKEFKFVDDLNSHACQTAVERVLRAINKFFDNCKRQIPGKKGYPKFKKNTRSVEYKVSGWKLSESRKHIIFTDQKNIGRLKLIGTRDLLFLQIEQIKRVRILKRSDGYYIQFSVKLDPRDTVKPLIPSQKAVGIDVGLKHFYADSQGNLEPIPQFYRKGEKQLNRANRQKSHKYDSNKKKAKLPQSKNYHKARLRYALKHLRVSRQREEWLKTVALRLIQSNDLVAYEDLNVSDIVRNRHLAKSISDAAWSTFRRWLEYFGYKYGKVTVAVPAHYTSQKCSSCGQKVPKTLSTRTHICFSCGYVEDRDINAAINILRLGLSTVGQTGSQAWGEGTATLVGAILSGQVSSANQESSFL

SEQ ID NO: 18431 - protein, 470 aa, Acidimicrobiaceae sp.
MNEVAPYRSRLVAHPRCRPTVMEVTTPGTSTIIKSYRYAIDPTPGQQRALLSHIGGSRFAFNHLLSLTLANWDENQARKDAGEEVTKDDYVDTGHFGLLRLWSATRDDVAPWWGENGASAYNDAAQRLSRAMTNFYKKRAKVPRYKRRGLGESVRFTNQAVHLTDSHHVKVSRIGEVKTYESTRKLYRHLERGTGRIVAATISRRSGTWFISFSASITALIPTTRAPERIIGIDVGLSTLYTGATTDGEHVLSVANPRNYQRRERQLAHAQRQASRKQGPRRGVAPSSRWKRANARVQKVHASIAASRSNLIHATTTRLAKNFDRIVVEDLNISGMVKNHSLAKHISDAAWGEFVRQLEYKTQWYGSVLVKADRFYASSKTCSSCGHAKAKLALDERQYTCEVCDLTIDRDLNAAINLARWPSSRTEGKPTSAGTHSVAGRGGEVRPSQQQLAGQAHPDEASTEAPPQLV

SEQ ID NO: 18432 - protein, 419 aa, unknown
  TnpB Polypeptide
MIRSVKVTTKYANKSKINLLESFQIEYTKVVQRIVSHIWINGYINKNNTIFDFNKKKFDLDANLNNDFLKQFDNGLFTQRMLQACGTHSSSILRSCTVKNKQRQFMISKLMKNGKNTSHLQSLTNKEKISSPKFPLIQPQIDSRFFDIKESGVEFDNFIQIRLFKNKTICIPFKKHKKYNEYESKGKMLNSLRISSNYLSFSFDLPDKEKRIEGIKLGADQGIVTCLTLSDGQVTKKNNHGYDLRSIMNALARKKKGSHGFLKAQEHRKNYINWSLNQLNLSNVKQINLEKLFQLGKGINKGKFLSSFTYTLIKKKLESLSETEGFGISEIGNEFRSQRCSNCGWTQKSSRKEKMFDCKLCGFATDADLNASLNLEEDRLPPVPKWVREEKRNRKGFYWNLDGIFDSSRESIVPFVQKT

SEQ ID NO: 18433 - protein, 404 aa, unknown
  TnpB Polypeptide
MHTVRIYPLKNLDRRTRARLKAAQMEAAQVWMYCVERHWQARSARVPWPSRDDLQRETKGGKYALHSQSIQMICQQFLANVQTIHQLRQRNPRHRYPHHPKKYLTVQWPAQAVSRQGQRLILPMGRGRQSFSFPLAELPEQIGAVSLVWNGGYELHLVVPALSAASPAVSPGASPDQPVQATADLGEIHQVAITTTSGQGLIVTGRGMRTIKRQYNKTLGLLARLQSRCRKGSKRWRRLQYTKERERGKKERRVRDLRHKGTRQAVDFCRAAGVQTLYVGDPHGVRNENKGRHHNQRMAQWEYGKDKQYLHEKCERVGIVCFSGSERGTSSHCPRCDWKKKPTGRTWTCRRCGFVGHRDIVGSMNMHPLAFGSRISYPTSLTYRRPGPVRDRWQTKELSPSGTS

SEQ ID NO: 18434 - protein, 385 aa, unknown
  TnpB Polypeptide
MEKGYVYRAYPNAKQRDLIKKTFGCKRFIYNYFLRLRIDTYAETKKTLGYNACSKRLTDLKRELPFLLEPDKCALQNALRDLDKAYDNFFGTVNSSRKRKFGYPRFKSKRDNYQSYRTNFTNNNIAFEGTHIKLPKLGRVRIRGGKNLIPEGRILSATVRIEPDGRYYISICATDVPAPVLEHNEDPVGIDLGIKDLAILSDGTQFDALKPLNTSLNRLKFLQRSFDRKSKSSARREKARVKVARLNAKIAAQREDYLHKLTNFVTKKYGVIFIEDLNVSGMIKNHCLARHIADSSWGELRRQLEYKSLWRGRVLLTVDRFYASSQTCGNCGFKNPAVKELSVREWICPKCGHHHDRDLNAAQNILCEGLRLLVELDEKFRDKSA

SEQ ID NO: 18435 - protein, 375 aa, unknown
  TnpB Polypeptide
MYQVLRLRIYHKHYAKLNKLASAVNFVWNYLNDLCLQMWRRKRVFPSAYDVSEYTKGAGKYLGLHSQTIEFIGEKHYQSRKQHKKVKLAWRTNRPDAKRKSLGWIPFKASAVKVLRTYNNGKKALKSQVQLSCGKEKLILTVFDQYDLRRYSGFRTAEVVQDSCGDWYLCLLVKVEAKTCTSTGEIGIDFGCKTAATCSNGDKLKTKFTQQYAGKLATAQRAHKKKQAKRINRKTRNSRADATHKFTSKLVRENRLIVAGNVKSSSFTSGKLAKSVYDANWFAINRQLEYKSRCAGCQFIVVDEKFSTQTCANCLQITNSSPKGVAGLGIREWVCDCCGQLNDRDVNAAKNILRFGRETLAGGSSVLRTGSTSLC

SEQ ID NO: 18436 - protein, 369 aa, unknown
  TnpB Polypeptide
MYKTLKLRIYTKHTPKLVKLASAVNFVWNYVNDLSFQMWRRKHVFLSAYDIHEYTKGAGEELGLHSQTLQAVGETHAKARKQAKRSKLHWRTNRKDAKRKSLGWIPFKASAVKHIRTYQTGKTALKSQVQLSCGKDKLILTVFDQYDLRQYTEIKTASVVEDSCGDWYLCLVVKVEPINHPTLADGEIGIDLGCKTAATCSNGDKLETKFTQKYAEKLATAQRAHKKKQARKIHRKTRNARANATHQFTNRLVKNNRLIVIGNVKASTFTSGKLAKSVYDANWSEIERQLEYKCEHAGCLLVKVNENFSTQTCANCLQITNSSPKGVAGLGIREWVCDCCGQLNDRDVNAAKNILRFGRETLVEGSPVI

SEQ ID NO: 18437 - protein, 333 aa, unknown
  TnpB Polypeptide
LKGKGGYPNCKKKGVDDSFRLTGSVFIDKTHVQLPNIGKVRLKEKDVFNTKTKLSQITVSRQSNRWFASFFIDDGLAMPSKPEIDSITENDVMGIDLGCKDLAITSDGEVFSNPKAYRKRMRKLAREQRKMSRRYESSKKRNKRDKNNKLVMSSRFKESKLKVAKTHKKIGDIRKDTIHKFTSSVVKAKPKMIVIETLRPKNMSKKRKLAKSIMDSAFGEVVRQLDYKCSWNGIHLVKANEFYASSQYCSCCGRKNPLVKNLSVREWACPACRAKHQRDVNAALNLRFYGLWTINKFNNTVGSTGINACGDGRLQFLAERCSSMKQEANNKAA

SEQ ID NO: 18438 - protein, 382 aa, Bacillus sp.
LKKRAYKFRIYPSKHQEILIAKTIGCSRFVFNHFLSKWNDTYKETGKGLSYYKCSSRLPSLKKELPWLKEVDSTAIQTSLRHLSDAFDRFFKKQNNAPRFKSKKNNAQSYTSKQTNGNIAIVGKKVKLPKLGLVRFAKSQEIKGRILNATIRRTPSGKYFVSVLTEEEIKPLDKTGSIVGIDLGLKDFAILSDGTTYRNLKFFRTLEEKLGKAQRILSRRKEQAIKQQKPLADARNYQKQKLEVARLHERIANARKDFLHKTSTEIIKNHDVIGTEDLKVSNLLKNAKLAKSISEVSWSQFCVMLDYKAKWYGKKIVVVSKTFASSQLCSACGHQNKDVKNLHLREWECPLCGTHHDRDINAGKNLRDEAIRLLTAGTAGIA

SEQ ID NO: 18439 - protein, 426 aa, unknown
  TnpB Polypeptide
MQLTEQHVIARSDPRYAVVDAACFASKNLYNAALYEIRQAFFAHGTWLRYAVLDKRMQSQEAYKALPAKVSQQVLKQLDDAWTSFFEAREAYKQDPSKFTGRPKPPKYKDKAKGRNLLVYTIQAISRGKKGLKRGIIKPSMLPIEVQTKHKDVDQVRIVPRKGFYVLEVVYEKAVTQAAVTPAYYAGIDIGMHNLVALTANKPGFRSVLVNGRPVKSVNQWYNKRKAELQKQLGHTGTTKRMERMTTKRNRRIDQYMHTASKRIVDLLVKEGIGTLVIGKNDGWKQKANMGKQTNQNFVQIPHARLIAMLTYKAELVGITVKITEESYTSKASLLDLDSLPVRDPNNGNEKHTFSGKRVKRGLYRTADGRYVNADINGSGNIIRKVAPDAFSEVEGVEDGKAVLASLVVHPVRFVVSPSRTQKGKS

SEQ ID NO: 18440 - protein, 407 aa, Mycobacterium sp.
MPKFEVPDGWTVQAFRFTLDPTEDQAKALARHFGARRKAYNWTVATLKADIQAWHASGTVTAKPSLRVLRKRWNTVKDDVCVNTETGVAWWPECSKEAYADGIAGAVEAYWNWQTSRAGKRAGKRVGFPRFKRKGRDQDRVSFTTGAMRVEPDRRHLTLPVIGTVRTHENTRRIERLIKAGRARVLAISVRRNGTRLDASVRVLVQRPQQPKVVHPGSRVGVDVGVRRLATVATADGTAIEQVENPRPLGAALRELRHVCRARSRCTKGSRRYRERTTQISRLHRRVNDVRTHHLHVLTTRLAQTHGRIVVEGLDATEMLRQKGLPGARARRRGLSDAALGTPRRHLSYKTVWYGSALVVADRWFPSLSVEPTVRPGLARQVAVKRGREAAPRLPNNPETGCKSRDH

SEQ ID NO: 18441 - protein, 291 aa, unknown
  TnpB Polypeptide
MQLCKKIKLVVSDEDAATLEFMQNKCRGLYNWWVMQLRDGKQWNFKSCKKTLAESRVHDPELDDVYGKLLAEVYYRLDNSMKAFFRRVKNGETPGFPRVRPRHNFFTLCYPGMYLEIEGNTLIFPTGGRGKSKRFPNIVARLTDIPPQEYGEVAISRDARGNYYASFTYKEQEQGAEHEQEQADYLAFDLGIKTLATGVNEQGRVYTVGGFKGHQWYNKQLDKIRSKRDRCKKKSRRYIHLSKVYKRVSEKKQKKRKDSLHKASHLIAHTLVERTVIVGDLSQRQMSQSNT

SEQ ID NO: 18442 - protein, 383 aa, unknown
  TnpB Polypeptide
MARRAKTINGYVTQYTTLKVRLYPTPVQAELFEKTFGCCRYIWNQMLSDQQRFYSETGAHFIPTPAKYKSSAPFLKEVDNQALIQEHNKLSQAFRLFFKEPGTFRHPKFKRKKEDRDSFTACNHDFESGPTIYTTQDGIRMTKAGVVKAKFSRRPQAWWKLKRITVSKTKTGKYYCSVLYECLVKERGPVVPTAETTIGLKYSMGHFYVADNGTMADPPRWLKQSQEKLARIQQKLARMEPGSRNYEEAVGKYRLLHEHIANQRRDFLHKESSRIVNDWDAVCMRSEALREMSQNPLRSGAGSEGYRAFRELLRYKLERQGKPLILVDRYMPTARTCSTCGLVQDDVDYGARTWTCPKCGTTHDREVNAARNIKRLGLAQLSA

SEQ ID NO: 18443 - protein, 500 aa, Escherichia sp.
VKRLQAFKFQLRPGGQQECEMRRFAGACRFVFNRALARQNENHEAGNKYIPYGKMASWLVEWKNATETQWLKDSPSQPLQQSLKDLERAYKNFFRKRAAFPRFKKRGQNDAFRYPQGVKLDQENSRIFLPKLGWMRYRNSRQVTGVVKNVTVSQSCGKWYISIQTESEVSTPAHPSASMVGLDAGVAKLATLSDGTVFEPVNSFQKNQKTLARLQRQLSRKVKFSNNWQKQKRKIQRLHSCIANIRRDYLHKVTTAVSKNHAMIVIEDLKVSNMSKSAAGTVSQPGRNVRAKSGLNRSILDQGWYEMHRQLEYKQLWRGGQVLAVPPAYTSQRCAYCGHTAKENRLSQSKFRCQVCGYTANADVNGARNILAAGHAVLACGEMVQSGRPLKQEPTEMIQGDSLNVAGIHVLQGVEDVNIGFCQRLNSTPRNKRLRQLIPRTQNQSRPASIHLPLPEMPPPPRRAHAHYAAPDTNCRQWYSTAPDLPASGSNLRAGQPSSR

SEQ ID NO: 18444 - protein, 433 aa, Actinomadura sp.
MARQVRRAFKYRFYPTSEQAAELSRTFGCVRLVYNKALEERTRAWYDEQRRVSYAQSSALLTQWKKTPELAFLAEVSCVPLQQALRHLQTAFGNFFAKRARYPRFKSRKRSRCSAEYTRSAFTWREGRLTLAKMAEPLAIRWSRPLPQGAEPTTVTVSRDSAGRWFVSLLCQDTISAAPATEAVVGVDAGITSLVVLSSGEKVDNPRHERRDHGRLAKAQRNLARKAPGSANRDKARRKVARVHARIADRRRDVLHKLSTRLVRENQTVVIEDLAVGNLLKNRGLARAISDAAWRELRSMLEYKCAWYGRELVVVDRWFPSSKLCGTCGTVRAKLPLDVREWTCECGAVHDRDVNAARNILAAGLAVSACGDGVRPQRDSSRTGHSSAKQETRRATAGILRLQAGEEVKLARWRGRGSVRPRARGTGRAPAAG

SEQ ID NO: 18445 - protein, 404 aa, unknown
  TnpB Polypeptide
MDRTIVAQLNLTHEQKSILDRTMQEHTECFNAVCREGFEKGYSNGVELHKATYYPLRAQFPELPAQLVCAARVKATEAVKSALTWKRKHEVRYPQLVAKAKKQGKEPPPFKPVRCPHSEHAPLRYDARSSWVKWETMTASLATVDGRVVIPFTVPKHAMQYVGGNVCSADLCFHHGRYFLHIVVTLPDPIVALTSEVIGVDLGLNHPAVTSNKQFLGERRWKEQERRIFRLRRQLQAKGTKSAKRHLKKLSGKLLRQRKDHDHVLSKRIVENSTPGSTIVLENLTNIRERATQRKGVRQRRLHSWSFAQLYSFVEYKAEAKGVRVERVDPRHTSQTCSRCGYQARNNRRSQSLFLCRQCGYSLNADYNASKNIREKHQAFLASIGTPFAGGSPSQAASRLHSSE

SEQ ID NO: 18446 - protein, 259 aa, Halococcus sp.
VKREPTGEWFASISIETGDDPPAKPDSPERCVGIDVGILKFAHDTDGFALGPLNLSNERNRLDRERRKLSRKEHGSNNWEKQRRKVARRHADLKRKRRDFLHRVSNYYAREYDLVAVEKLDAKGLMELDGNSRNRASAAWGTFRRMLAYKCEREGTHFAAVDPEGTTKECAKCGAETDKPLWVREHSCPACGFEADRDANAAGNILSRGLDQVGVVHPESTPSETATAVGTAVSAVSASRVIEQGSPALNERASASRAG

SEQ ID NO: 18447 - protein, 368 aa, unknown
  TnpB Polypeptide
MKNEIKRTYRCRIYPNEAQKQELARTFGCSRWVYNWALETKTKAYYQDEESLSFTDLSSRLTSKKKEEETEWLSEVSAVTLQQSLRNLNQAFTNFFEDRAEHPSFKSKRGDQTARYVGTAFDIRKENGKRKLRLSKMPGLINIRWPRELPSQPSSCTVTKNVDLGIESLAVLSTGEKVGNPRWFENEHERLRKEQQKLSRKEKGSNNWERQRKRVAKVHQRIQDRRKDFIEKLTTRLVENFDVIVVEDLSVKAMQQNGNLARHIGQAGWNQIVRRLRDKCEWYGRTLVIADKWFPSSQRCSECGHVSGKKPLDVRDWTCPECGEHHDRDINAAKNLSRVGQTRIEANASEAPGDLGKPDAFEVVGSGR

SEQ ID NO: 18448 - protein, 416 aa, unknown
  TnpB Polypeptide
LLLTVKQQVKHLSKEEYNILKELCHTAKNLVNESLYNIRQHFFKTKKYLNYNENYHLLKTSDNYRTLNSNMSQQIMRKVDGSFKSFFALLKLAQQGKYSSKNCKIPHYLPKDGYTTLVINMVKINNGKFVLPYSNKYKKKHKCIKFNVPKVLADKTIKEIHIIPEANARFFEIHYVYEANVTQRNLNKNNALAIDLGINNLVTAVTTEGKTFIIDGRKLKSINQWYNKRNAKLQSIKDKQKLGYKITNQQVAIVKKRNNQINDYMNKTARYIINYCISNNIGTLVVGYNNSFQRNSNLGKGNNQTFVNIPFGQLLFKLKYLCELNNIVFVEQEESYTSKASFWDNDNIPVYSKTNTTNYKFSGKRIFRGLYKTSNGTILNADVNGALNILKKSKVVSLKALYYKGKVDVPIRIRVA

SEQ ID NO: 18449 - protein, 236 aa, unknown
  TnpB Polypeptide
VASGTISYKAGRYYVSVLVDENKQINNYQSCNEGIGIDLGLKEFAIVSNSIVKQNINKTIKVKKLEKKLKREQRRLSKKYENKKKRGGKSVANSANIDKQILKIQKIFQRLNNIRTDYVNQIVSELVKPKPEFITIEDLNIKGMIKNKHLSKAIAQQNFYTFRTKLQSKCKLYNIELRIVDRFYPSSKLCSACGGIKNDLKLSDRVYICSECGLEIDRDLNAAINLKNAKEYTIAC

SEQ ID NO: 18450 - protein, 450 aa, Geitlerinema sp.
MAKTFAAQVNQLPDNPPLRAALEYLCTASNNLYNCTVYLARQLYFKAGKFSNGRWLSSQMKHNAHMKALYTSAAQQTCISVGEAFKGYRELLKLWRSGGLAQKPKPPNYRRSGGMFEISYPKRWLKLIDGQVKVPMGRSCKVWFNLPEIFLPFPSNLDWGKVRELQIVPRAGYFDAVWICEGKPVESFDLDPEKSLAIDHGIDNWMTCVDSSGHSFIVDGKHLKSLNQWYNKRVATIKKDKPQGFWCNLLDQITGKRNRQMRDAVNKAARMVINHCLEHGIGTIVFGWNQGQKNGANMGCKTNQKFVQIPTARLKNRIAQLCEAHGILFVEQEESYTSQASALDLDSIPVYGEKPEGWKASGKRIRRGTYRSAAGVEVNADCNGAWNIGRKAKVTGMQGIPARGVLTSPRRLRIWDLPGVSILTQKCCNPSGESPSRDSRGVVKKSACQI

SEQ ID NO: 18451 - protein, 319 aa, unknown
  TnpB Polypeptide
MRVNISNNVTKQAIKDACTAYKNFFRGLQKFLGFKSKKRSMPKFYQDNVKIRFSNTHIKFEGFSSGRKANKKMNWVRLAEHGRIPTNAKYMNPRISFDGLNWWISVCVEFPDCRETLNDDGVGIDLGIKDLAICSDGTKYKNINKSQKVKKLEKQKRRLQRSISRSYEKNKKGESYCKTNNVIKKEKLLLKRNHRLTNIRKNYLNQTISEIVNRKPRFICIEDLNVSGMMKNRHLSKAVQEQGFFWFRKQLEYKCSDKGIQLIVADRFYPSSKLCSCCGNIKKALKLSDRVYRCECGNMIDRDFQASINLKTYGEQFAS

SEQ ID NO: 18452 - protein, 352 aa, unknown
  TnpB Polypeptide
MKKTKTLKLRIKDKHSAQLDQMARSVNFVWNYVNELSSRSIKEHGRFLSNYSLQKYTQGANKELGLHSQTVQQVSKEYVTRRKQFKKSKLNWRKSHGVRRSLGWVPVNTGQAQWKNGCIFHNGRYFKVWDSYGLSQYKFRSSSFSEDSRGRWYFNVVVDVTEVKSTGTKVVGIDLGCKTAATDSNGTTIVGREYRKLESKLGIAQRAKNKHLVKTIHAKIKNRRQDSLHKYSRKLVNENAAIFVGNVSSKGLVKTKMAKSVLDAGWSTLKTMLEYKCDHAGIVFEVVNEAYTTQACSCCGTISASSPKGREGLGIREWACSDCGATHDRDINAAKNILAVGLHRLVEEKVAA

SEQ ID NO: 18453 - protein, 171 aa, Bacillus sp.
MEKQLKLEQRKLSRRVLAAKENSIKLFEAKNYQKQKRKVARIHEKIMNQRTDFLNKLSTNIIKNHDIICIETLNTKGMLRNHKMAKSIADVSWSNFVAKLQYKAKWYGREIIKIDPWFPSSQICSKCGQLEGKKSLIIRDWTCPICHAHHDRDINAIINILNEGLKIHVQT

SEQ ID NO: 18454 - protein, 370 aa, unknown
  TnpB Polypeptide
MEYSYKFRIYPNQTQENQIAQTFGCCRFVFNHYLAKRKDTYEQTGKTLNYYDCASDMTQLKKSLDWLKTVDSTALQSSLRDLDTAYQNFFRRVKKGENPGYPRFKSRHHHHQSYKSKCVGTNIKVLEHAVQLPKLGNVKCRVSKAVSGRILSATVSRTASGKYFVALCCTDVVIERLASTDAKIGLDMGLKAFAVTSDGLAYPNHKYLAKSQKKLAKLQRQLSRKTKGSNRRNKARLQVARLHEQIASQRQDMLHKLSTDLIRSNDIICIEDLVPKNMIKNHKLAKSIADASWGEFRRQLTYKAEWYGKQVVKIDRFYPSSQICSECGSQWPGTKDLAVRSWICPECGAAHDRDFNAAKNILNEGLRLMA

SEQ ID NO: 18455 - protein, 393 aa, Proteobacteria sp.
MGMKLTLQLQLLPDETQANALRGIVERFNEAATWLAGVAFAKQCANKVALQKHAYYELRERFGLPADTAIRCLAQVVEAYKRDKTVAPAFRPHAAVPFSMRKNLGFKGPDRVSIQTLTGRVVVPYLMGAYQRERFGFAHGQADLVLRRDGTWLLLVTVDVPDGTRLPVSDFIGVDLGVVNLATTSDGETHSGEQIEMCRTRYAKRRQRLQRAAHVAQMDGKRPKNMRRALQRTAMREARFRRDVNHGISKTLVAVATGTERGIALEDLTHIRSRTQFRPPQRAKMSGWGFAQLRSFVEYKAQLAGIPVVLVDPRNTSKGCSQCGHIAQANRPSQARFSCKQCGYTTNADFNAACNIKYRAPVNAPQVAGLLFHASRHGLANASDKLPALADSR

SEQ ID NO: 18456 - protein, 568 aa, Bacillus sp.
MGTNAYFTNRVYKNTLDKKFVDATSHALFLFNKAKHFSFNTLVKEKRSGKSKRNKSLHLTIKEKFQLDDYFANCALQEANAKQKSLTELNKLYIANKEEQIKSVKKKLKSEKTKLSKLKKMKSSFVNGKPSFPQKSREQKLGNYFVVQFKKKTDIYYHAYQFEHAYLDIQVSRTNTKIGFLTFKLHKFEEQLKRLKTVISSVVFGTKKLFKLQYTMDIYKSNHEKWTNKWNDSRYKTMVISGRKDAASGNFVFNYDIETHSLTYKTPSGVLVEVKEISFPYGQEKVEAAISIQKNCKNKKQYGKPIAWSIEDHGEYYIFKCIITEEKNEFVNYSKADGIIGIDCNVDHFAISNVNNKGQLISSWSLKFEILGKLSNQITKVIEVEAIEVVNAAFRENKPIALEKLDTTKSKVSSAYGNKKRNMMMSMFAYNKMISAIQSRAVKMGVEVFEVNPAYTSQIGKMKYMKRFGISIHEAASFVIARRALGFEEILPPVLHALLPEKITGMHHWAQWAYISKILKDVRVCAFYQSDLFDIDRFRSTNEFFAPGTLTNLEQKGLSKLKRGKTAS

SEQ ID NO: 18457 - protein, 472 aa, Bacillus sp.
MGTNAYFTNRVYKNTLDKKFVDATSHALFLFNKAKHFSFNTLVKEKRSGKSKRNKSLHLTIKEKFQLDDYFANCALQEANAKQKSLTELNKLYIANKEEQIKSVKKKLKSEKTKLSKLKKMKSSFVNGKPSFPQKSREQKLGNYFVVQFKKKTDIYYHAYQFEHAYLDIQVSRTNTKIGFLTFKLHKFEEQLKRLKTVISSVVFGTKKLFKLQYTMDIYKSNHEKWTNKWNDSRYKTMVISGRKDAASGNFVFNYDIETHSLTYKTPSGVLVEVKEISFPYGQEKVEAAISIQKNCKNKKQYGKPIAWSIEDHGEYYIFKCIITEEKNEFVNYSKADGIIGIDCNVDHFAISNVNNKGQLISSWSLKFEILGKLSNQITKVIEVEAIEVVNAAFRENKPIALEKLDTTKSKVSSAYGNKKRNMMMSMFAYNKMISAIQSRAVKMGVEVFEVNPAYTSQIGKMKYMKRFGISI

SEQ ID NO: 18458 - protein, 402 aa, unknown
  TnpB Polypeptide
VKRLQAFKFQLRPGGQQEHEMRRFAGACRFVFNRALALQNENHEAGNKYIPYGKMASWLVEWKNATETQWLKDAPSQPLQQSLKDLERAYKNFFQKRAAFPRFKKRGQNDAFRYPQGVKLYQENSRIFLPKLGWMRYRNSRQVTGVVKNVTVSQSCGKWYISIQTESEVSTPVHPSASMVGLDAGVAKLATLSDGTVFEPVNSFQKKQKTLARLQRQLSRKVKFSNNWQKQKRKIQRLHSRIANIRRDYLHKVTTTVSKNHAMIVIEDLKVSNMSKSAAGTVSQPGRNVRAKSGLNRSVLDQGWYEMRRQLEYKQLWRGGQVLAVPPAYTSQRCACCGHTAKENRLSQSQFRCQVCGYTANADVNGARNILAAGHAVLACGGMVQSGRPLKQEPTEMIQATA

SEQ ID NO: 18459 - protein, 390 aa, unknown
  TnpB Polypeptide
MTNRKVAQRIPFTPSKTQAALLEQCFGARRFAYNQQVEAFNTYDKESNPRPTYPSVTDMKNANEWLRDSPIPSIALSNAIMDFRKAQSAYFRKAEYGKHRPRFASKSDNVQSFRNSMPIRHMDGKRYPLSRKLGSVRIRRRDRLRYPLESLSSWTVKRENGTYYLVLLFDVDIQPKPPVDGQVGIDLGVKDFLTLSTGEKINYPDRLRRLEEDIRRERRKLSHRRKDSSNYRKQKAVVAKAYAKLRHYREDFQHQLSHRLIEENQFIGMETLAVQNMTRKAKKKLDTNGEPMRNGQSRKRAMNRSILRNGWSSLVDKLSYKAQWYGRAFVQVDRFYPSSRLCHDCGHKYAGLRLSERKWVCERCGTSHDRDVNAALNIRDEALRLTQTGQ

SEQ ID NO: 18460 - protein, 267 aa, Clostridium sp.
LSKIKIPVDLITIKQIKIQWNNSKKQWNLNIIWAKEEVNIAKDYYNIMSIDLELNNLATITFEDNIHSYIIDGKYVKSKNSYYYKEIARLTSIVMKQYKNSKYFKRTQQLIKLQTKRNNFIKDYIHKSSKRIIDLAIINRCHTIVIGDFKGIKQENTAKSFVQIPQQQLVEKIKYKAKLLGIKVVIQNESYTSGCSVLDLEEIGKDKYNKNRRIYRGLFKSNKGILINADVNGSYNIMRKYLKCTPKSLIKIMDNGFLDNPIRLRVA

SEQ ID NO: 18461 - protein, 568 aa, Bacillus sp.
MKKAYFSIRIYKNALNPKYVEAIGHALFVFNRAKHFAFQTQVLEKRSGSSKRSDSMQITLKSRFSLNDYYANSAVQEANALFSAQTELKKLYIENKNEQMKAVKKKIKKTKSDLTVLNKMKTSFIKGKPTFNKTSKEQQRGQYFVVQFKTRTDIYYHAYQFEHEYLDVRIQTLRSRLGSLVFRLDRLQKLLHSLKNKVSSVVFGSKKLFKAQHTVDTYVQNHTLWVQDFEAARYNQMLISGRKDAKSGNFVFTYNTESQSLYFITPNAVAVEIPNLTFPYGQEQVNAAVQNQWNCKDKKNAGKPISWTIEDHGDYYIFKCLIDIEENQNKNFSKSDGVIGIDCNFDHFAWSNINKQGQLIKMGVLSFDILGKILEQITKMIEAEAIALVDIAVKANKPIVVEKLNTTKGKVKNPYGNKKANMMISMFAYKKMISAIKSRAEKMGVAVFEVNPAYTSQIGKIKYMKRFGISIHQTASYVIARRAMGLKEKLPPILYSLLPEKMVGLHHWAQWKWLSGILSDLRVHTFYQMELSNHNKIRSVNELFPPGAFTDLEVKGLSKFESRKPIPC

SEQ ID NO: 18462 - protein, 244 aa, Cyanobacteria sp.
MEVPDSQPKDSWVGVDRGQRHLAVASLPTGLPKFWTFGHIRQIRRRYQKLRQQLQSAKKRKTVKKLESKERRIITHINHIVSKQIVQFATQNGCGIRLEDLSGIRQTSKQRKKNKSDAGNNRDAWSYYQLESFVEYKALWAGIPVEKVPPPYTSKSCCRCGGIGKQNKHSFSCPRCSYHVHADWNASQNIGHWLGFSCSLVLQQGSSVMGASVQGSGVNDTPPNSVSELAGSARSTSKNENPTA

SEQ ID NO: 18463 - protein, 425 aa, unknown
  TnpB Polypeptide
MTTVTQAYRFALDPTPRQRRALASHCGAARVAYNWGLELVTTRLDQRRAGEDVQLPWTLPALRREWNRVKYQVAPWWAENSKEAYNSGLDGLARALRNYSDSKAGRRKGRPVRFPRRKRKGRCRDACRFTTGAIKVLPDRKHIQLPRIGVLKTHESTRKLARHLERGTARVLAATISRTADRWFVSLTVEVQRAIPEGNGHDTVVGVDVGIRHLAVMSTGVVIPNPHALQHSLRKLRRLNRQLARRKLGSKGRRITRRKLSRVHARAANLRHDAFHKLTTAIATQHGSIVVEQLNLAGMVRNRQLSRALSDAGLAELRWQLTYKTIWYGSRVVVADRFYPSSKTCSACGWVKAKLTLAERTFTCEGCGLRLDRDLNAARNLAKLAEHVAQSGWETLNARGADRKTQPDGQVAAKREPSSSFLRRA

SEQ ID NO: 18464 - protein, 545 aa, unknown
  TnpB Polypeptide
LKKVRKRAKKPKKKHICKCRAVEKCVRLETCPIGDAGFAILERMFDSYTHCKQMFLDRFSGIGSILDVQNFISLRNRIRTEQNRISDHGKETGNRTYCEIYGFQGRFWVQALKDASSTVKSMWKNVGAECRAKLRDNDAHRDMPKPERAYCNYVLGAPPVLFCILNQVPYEGKIPKRFREILDGIRDVPKKRMDYLHSMLRRLVRDNLPHPQVRQARCMLLDEVMYSIITEDGADYLYLMTDKRGKLLRLKLHGRFCYNRKGDIQIILDREKRTVSIHKCILARQRVVEKEHPAGIDKGYATLISCMDLEGNSPEYGKGFGKLISSESKRINQRNTNKNYFYTKKKDLREQLDKARDPKERERLGSLIQKVERNHLGRKKYDRQHKKAVAHMEAAINHHIRTCMEEMKPSETVLEDLSFVSDKKKSPRKDFNRRMASWQKGYLDERLDYLSRVYGAAVTLVNPAYTSQYCNHCGAKLGPRYGFHHEYADCENCGTVNANTNAAGNILDRRNDKKIMLYTPYRRVKQICDRRAEPLNAAVDTAGLW

SEQ ID NO: 18465 - protein, 394 aa, unknown
  TnpB Polypeptide
MNTVHIYPLKNLSQTQSRRLRDAQMEAAQVWNLCTQMHKAAREQHKSWPERNTLQKATKGRFALHSQSVQMVVHVFLANINTTQQLRHTHPQMRMRYPYKDKRFYPISWPAQAVSREQGRVVLPMGGGRKSLVLPLDLPATSGACTIVWNNGFELHVCIEIAQAENAPGDNHATVDLGEIHLAAVTTHTGKAMIVTGRGIRSLKRQRTMQIRTVTKKQSKCTKYSRRWKKLQRAKNKQCRRAERRIRNQRHQATRKVINFCVERKVGTLFIGNPHGVRNQNRGRHQNQRMSLWEYGKDIDYLTHKSKQVHMVCFTGSERGTSSQCPTCGHRHKPRNRRWTCKQCGFKGHRDLVGSVNMHRLTFGERVTFPRSFTYLRPSSLGKVVAGQTRPNVV

SEQ ID NO: 18466 - protein, 527 aa, unknown
  TnpB Polypeptide
MKKKKVFRMYKTKGSEKLLPIYNKLQKELNLILSNKFYKEELMKIDLKYIDDKGKERNKFSSTIRDEIIEIIGKRLVGEVPDSWYVRILIHNIISLLKSRKEQVEIYELLKGNAYKIDSELKKKLTEKKLSASRPYLETLAAAKSIPTLPDKKVFILDFSAADKQMFRIGKNGRSWEIKIYSKEEKEKYNLESQWIEIETYLPIYIREGFKGEAAKPQFYIDRGENRFVCAIPCKIETISNEYKNIMGVDIGRTKPYSATVIRKDGSISDEYIPTEELMKMSEKLDRLKTHVKSVYKKHSRSKKYGNFTKRQKMRKIDYKNGRRKRTNLQYQIARLIAVEVVNVAIQEECKEIHIEYLAWVKNKAGKWNFSAIQKCIEEVAELYDIKVVKVSAKNSSKEHPVTGEIGKVNDREVRFSTGQVIDRDQLAGLNLALRRPKEEARKIKQLKKRKEQTITRLSRRANFKRIKNTAISDKKINKKENVKTVMFSHDKATNSYAIVIVFCVSQNNCYKDNNIHFIHIYDNFTQ

SEQ ID NO: 18467 - protein, 437 aa, unknown
  TnpB Polypeptide
MEKKKVRKKKDRSQIITLIEKHIIKSGHKYYNKCDEITFLAKNVYNATLYEQRQSFFRNEFISYYDVNKKFRNENQIDYRALPTKVSKGVQRLSDKNFKSFFALLKLKNEGKYDKPVRLPKYLDKKKGRIIAFYEKGAISFKKVGYVKLSQTRIEIKTKLRREQIIGARIVPKKGYFVVEILYDVKKVEKKEEQNRYAFIDPGMDNLMTITSNVFNPIIYNGKKIKSINQLANKKNAKRKSRMPLMRFRNGLTLQEKIEQIEKGLLEKDQSKGMKGLWRKRELRIKDSFHKITKDLVNQLVSYNIDTVVFGHNKEQKQDIKLGKKTNQNFVNIPFAILRQMLEYKCNLVGIRFETQEEAYTSKCSFVDKEEIKKKEEYLGKRIKRGLYQTQNGKKINADINGSLNIGRKYLEKKELYTEEIHNELIAKMHNPKKITI

SEQ ID NO: 18468 - protein, 425 aa, unknown
  TnpB Polypeptide
VILYIQIKRQKGSDKMRLNIQVQLYPNEYMKKYIDKQCDYRRYCWNKGLEMWNILYEQRKINLSTDLKNKIKASLKDKKIKFTDEEKALRKLFPSPNERNVRNKIVANKEEWEYENSSRVLQLAVKDLSDSWKRFFNKSQEKISKPKFKSKKTPKQGFKTDSACIKNNKLYLEKPRKYQGNWSPIRFKGYNISDGKIKLCSITRIKGQYIATLSIETEVKSIKKTGKNTAVDANVDHFDYTDGICTLRPKDLDKLYSDVKHYQRKLARKRKENGKEAIHSKSYQKTRVKLQRTYSRIQNIQNDILHKFTTMLYTNYDKVVIEDLSVKKMQMSKKAKNLHRSLFGRFRQFMEYKAIKFDKELIIADKYYPSTQRCSCCGHIKTGEDKITLQGNKKHGTKHHEYECYECGYKNNRDRNAVLNLLALI

SEQ ID NO: 18469 - protein, 447 aa, unknown
  TnpB Polypeptide
MKLRTIKIRVKDKKVEEEYKEKMKEAKEFYNSCLYLTRFRYFEFIGKTEKLDYEARRSYDVEDWFNNEKVFIGNFFSYDGSFIKKVQEAIGTKLKVKDRQTILRKVCTDWTTYFKTKEAMKDTDVKVNLPGYKRYDYLVCEFNKQMLKPFEYEEKRILGFLGVESRIKAPEWLKEEEIQAARFKYKNNYLYVEIIYKKEDKKSRKGLKSKVAAIDPGLNSITTMTFSWMKKPIAIRGKHLKSINQLYNKTVAELNEKLSEYEKTKEEAKTERIRELISKVTEKRNLRVEHELHKISKEIVRILKEEKVSKLIFGHNKGQKTEINIGKRNNQNFVNIPYNQLINYLEYKCEDAGIDFELQEESYTSKASFLSNDDIPTYIEGNNNKYSFSGTRRRGIYTDNKHNLKIHSDVNGSYNIMRKNGIDLKKLQKAFIKTNQTIDPVGMRFYI

SEQ ID NO: 18470 - protein, 464 aa, unknown
  TnpB Polypeptide
MKRTIEVAYEIKDRIEDLKEIGKNYRSDINYFYSRYSGIKNINRIDFREIRDKDLKEIEHLRLKGNYLQRCLNASLGNIKSMWSNTLRLIKSNINANNNLSEEEKHFLYIVIKSRAFVDYVVNTNKTFEDLMKNKYFSKWKKENKDFELNEKKLRQYLRRQIRRMKPSIPNTKKENHFKINKFLYSFKENKLYISNPFQKGQRIELISKNTKQYQTEATVKIDGNKLRIGFPIEVKQKSLKNNGVNEIGIDKGFIDLITTSNNKIYGHRYCDEIKGHIDKYLLTQKERGKYWSLYYKYKTINPEKAERIKKNNLGYIKFNKNKKLTQESKKKFINESINRFIKEERPTEIIVEDLSWEKKSKKKRYRLGFDLSTWDKGYLQERIEFKAYENKIKITTVNPAYTSQICSCCGKLGERVGKDFKCNSCNQALDADYNAAINIKKRKENALITTYMKPKKVLEILKL

SEQ ID NO: 18471 - protein, 527 aa, unknown
  TnpB Polypeptide
MRSQTPSFVVKVKLHLQENVKNHLNKSFHIADSAYNETLSFGLKRFSAMKKNERYQELLELRREVVKVQENIKKKNKEETKKEIKQKLKEEAKQIKIQLKEIDDEFGEIRVKYGLTKYQLSSWILERRKQTEAYQHLSAIELQATSENAYQTLSQVIFYKTKPEKLKFRSKYSLEHSFRNKVNKQGTRLVESKKTSVAYRLYIHKKSTFIDIPVRAFTEYQQVQLLRADKIKYVQIVSKTIRGKQVFYLHIVCQGIPVSKIQKGEGVTGIDPGVSTVAYVSKDSYELVDLVPKDFARKERLIQNLSRKIERSRRVNNPEAYNGNGTRKKDVRLKTLSKRAKRLAIRRQTAYRKLTEERRKIQGKLVNNIVSQSSVIKIEDLDVKSLQKRKRETRINPKTGRPFSKKRYGKAIFKAAPGYFRTLLLQRANSTGCKVDIISPKKTKPSQYNHITGEFEKKELKTRIYNLTDEITDVQRDLYSAFLIAHIENDKYLTEQLEENFENFYKNMKEQLHILRQKPSRLSWYVE

SEQ ID NO: 18472 - protein, 408 aa, unknown
  TnpB Polypeptide
MQVELYPNEHMKKYLDKQCDYRRYCWNKGLELWNVLYEQRTISLPTALKTKIKASVKNKKIKFTKAETELRKLFPTPNEYNVRNELVANKEDWEYKNSSRVLQLAVKDLADSWNRYLKKSQDKVNRPKFKSKKDSKQGFKTDSAYIKDNKLYLDKPRQYQGDWSPIRFKGGNISDGEIKLCSITRVKGHYIATLSIETEVKSIKKTGKNTAVDANVDHFDYTEGICTLRPKVLDKLYSDVNHYQRKLARKRKENGKKAIQSKSYQKTIVKLQRTYSRIQNIQNDILHKFTTMLYTEYDKVVIEDLSVKKMQMSKKAKNLHRSLFGRFRQFMEYKAIKFDKELIIADKYYPSTQRCSYCGHIKTGEDKITLQGNKKHGTNHYEYECYECGYKDNRDHNAVLNLLALIQK

SEQ ID NO: 18473 - protein, 394 aa, unknown
  TnpB Polypeptide
MQQPQPQPQSQSRAYRYRCYPTAAQVATLARTFGCARYVYNWALQQRTEAYQERQEHLSYQDTSAALTTLKQQPETAWLSEVSSVPLQQTLRHLDTAFRNFFAQRAKYPRFKQKRGKQSATYASGAFRYDAVNRILTLAKMTEPLTIRWSRPLPDGAVPTTVTVSRDAAGRYFVSLLVEEEIAPLPVTLGVVGIDLGLHDVVVFDTGEKVGNPRFFQQDEAKLATAQRRLAKKQRGSRNRDKARCQVARIHARIADRRTDFLHQLSTRIIRENQTICVESLHVKALAQHPTLAKAIHDVGWGEFLRLLTYKAAWYGRTLIRIDRWEPSSKRCSACGRVLDTLQLEVRAWTCPNPACGVRHDRDVNAAKNILAAGLAVTACGEPVRPGRASVRPA

SEQ ID NO: 18474 - protein, 396 aa, Oscillatoria sp.
MSAASLKQTTAAACTDDCDTARKSRKIRIFPSPSQKALLKQWFGVSRYTYNHTIKYLQQPETQAKWMAVAPIVMGALPEWALSVPYQIKKIAVKDACTAVREAKRGFAKDGQFRKCKFRSRRDRQQTIFVPKTAISQRGIYHTLLGEMRFDETLPEDFSDGRLTMAYGEYYLIISQEVQPRQPENQGRVVALDPGVRTFMTFFSESSCGWIGDDANLRIQKFCFKLDRLISKISKAKSAQKRRFKKAADRIRCKVQHLVKELHHKTAKFLVENFDVILLPSFESSQMVSKSRRKIKSKTVRQMLTLSHYAFKKHLEWKAWETGKILLSDINEAYTSKTVSWTGEIVKIGGAGVIESEIDGRVMDRDLNGARGIFLRALVDTPWLRASLPAYVFVTN

SEQ ID NO: 18475 - protein, 424 aa, Salmonella sp.
MITVTISETNGRRKWSHNARTKDALTAIIRTMRKHFPQSHNFIPDDVDNAPVLFAAVASTPGVEVTGHQNASFPPRPSGRGGKEAVFRLTVFCIITFSSLICEAMKRAYKYRFYPTTEQAELFAQTFGCVRFIYNSILRWRTDAYYERKEKIGYLQANARLTALKKEPEFAWLNDVSCVPLQQSLRHQQTAFANFFAGRAAYPAFKSKRHKQSAEFTASAFKYRDGKLYMAKNKIPLDVRWSRPLPSVPSTVTISKDAAGRYFVSCLCEFEPASLPITSSMVGIDVGLKDLFVTDTGFRSGNPRHTAKYAARLALFQRRLSKKAKGSKNRAKACLKVARLHAKIADCRLDALHKASRKLINDNQVVCVESLKVKNMLRNPSLSKAIADASWGELVRQLRYKGEWAGRSVVAHGEPVNPESLKAA

SEQ ID NO: 18476 - protein, 361 aa, Larkinella sp.
MKVRYTFRCYPTDTQAQALSRVFGHTRFVWNWALRLRTDAWGHGERINYNQTSAALTALKKTAEYQWLNEVSCVPLQQSLRNLQKAFLNFFAGRTRRPRFKKKRHKQAAEYTASAFKYQDGELSLAKIGKLKVRWSRPFQSQPTTVTVIQTPTGRYYVTLVLDEMPQPYNKTGELIGIDLGINRLATLSNGEHIPNLKFTKKHERQLAKAQKSLSRKTKGSGRWIRQRMKVARVHERLTNARIDHIHKITTDLVRRFDVIAVEDLNVRGMLRNKKLAKQISDASFGRFVSMLQYKCVWRGKELVKIDRYFPSSKRCSCCGYIAQTLPLSVRSWQCPECQSIHDRDENASRNILNFAVGHPV

SEQ ID NO: 18477 - protein, 379 aa, unknown
  TnpB Polypeptide
MLVKATLSFAMRLPPEPANPIHETLLTFREAVRYVVNWCIENRATNLARVHHNLYHKLRKAYKLPARLTLDAVRQGIWIAKGWLKNPKHGRRPVIRRLSMVLTPKQSYSFSWTEASILTVEGRKTVSLVYVERWHGKYRGWRVKEARLLPNRLNVVIEKEVPVKLINDVLGLDVNYANLTLSDGTRIPIKGFVKALAFKARAEAIQQKYPKKWRYVKGIRKAISRFGVRAKNIIKDTVNQLAVQVVKITSQKNSALAVEDLKKLNSGFKIFSKNQRIRLHLWAYKKLLKTIEFKAGVEGISVIKVNPKGTSSKCPICQSKLKEVSYRRLRCPSCGFEADRDYIGALNVKMKAFSGGLDSPQPDVNPNGMKGKSLGAKCP

SEQ ID NO: 18478 - protein, 295 aa, Caloramator sp.
MEKAFKFRLYPNKQQIELINKSFGCVRFVYNYYLAKREEEYKTKGITFNYKDCSADLTKLKQINIWLKEADKFALQNSLKDLDKAFKNFFEGRANYPKFKSKKCKYQSYRTTFTNNNIEIKGNKIKLPKLGWVKFVKSMEVEGKILNATISRTPTGKYFVSICCRIEKTTEKSKTNKVIGIDLGVKHFLIDSEGNKKSNPKYLIKLEKRLIKEQRKLSKKQLGSSNFKKQAKKVAKIHEKIRNQREDFLQKLSSKIINENQVIILEDLKVKNMLRNNKLSKSISDVAWSKICKYA

SEQ ID NO: 18479 - protein, 636 aa, unknown
  TnpB Polypeptide
MIDLTKTYDTRTLELPAPKGEMLRVGEALTHQAKNLRNIGNFFIRQVLSAYDYDAGTQTSTLKSELHPLQRQAIGHINATIDAVNAKRVAAHPGKLATHAAKKACGEAVGKAPVLEIVPRLETKVDSPAKSVLDLTVLDNALKTWKDEKGNNVYRRLAATMAQQVVLRLVESYTGFFGGLKQFNDDPSDMTGRPQMPGYLDRNGRFVLEVPFVNVKAALPRPQKAVPVPENDFVLSPSHLTKDMLDAFYGYDIRKAVMDACLKRGWKEFSPQHIRIVPMRRGLRLEVVGRMPNPYPDGSFLARLVAEHAADLSKLKDDKARDKWLLAHLGGMAADALPRIAGIDPGRKNLATISYTTGCRAAVHLGGEFTAKMEDFSARIGRRVSELTGDRARELQAKKLELQKAGKKLNRAEGIELATLLKAIYQDAEVIRLTGKMNRWSGDYLHKVSTAIVRDCVEHGIEVIVLGRNKGWKNGGGMSRRENRKFHQVSHATLGRLIRYKAESHGIAVVETEESYTSKSSFVNGDTLRTFGEEPVQGAPADETHDEAATSTPAGESGAPAPALTGTRDKADRNRFRNHNRDDRWKWVHADVNGAFNIIRKVFGSFAYNDGLTLKFKLLRVSPRMGVTSVRLRPCA

SEQ ID NO: 18480 - protein, 636 aa, unknown; identical to SEQ ID NO: 18479
  TnpB Polypeptide

SEQ ID NO: 18481 - protein, 386 aa, unknown
  TnpB Polypeptide
MKRATKVRLYPDSEQTAFLNAQFGAVRFAYNKALHISRHAYQRHGVSLKPKRDLKPLLAVAKKSRRYGWLKEYDSLALQQAAINLDRAFSHFFQKRAKFPTFKSKHGKQSSYHPNGKVLTDAIQLPKMTPIKAVIHREIAGTVSSITITRNAAGKYYASVLSDDGQDAPAKPTYITRVTGYDMGLSHYLIPSGGDKVNNPRHLINASRNLRRKQKALSRKQRGSANRRKARLRLSAVHERVASARADFQHKLSRAMVDENQAVIVETLKAANMMKNHSLARAIGDAGWHGFIMKLEYKAQAAGVHLVKLDQWFASSKTCHCCGYKMSEIPLHKRIWQCPECGVGHDRDINAALNIWHKGIMELQAAGLVVSAHRGQCKSVTQTVAA

SEQ ID NO: 18482 - protein, 419 aa, unknown
  TnpB Polypeptide
MLMKVNRVEQHRIRKNNKNWKLIDSLCFKSKNVYNYGNYIIRQEFIITSKEKQQGLRENANWIQYNELFKLVKGSEPYKDMGSNVGQATLRKLNQNWVSYFKSIKDWNKNPNKYKGMPRIPTYLPKDGRYELDIDNIKFRIVDACIYFSWTPLKILNNTYYTKISSDSKLIQCRFVPKGDDYIMEIIYEIEVPDICSDTERIASIDLGVDNLLTITNNCGLQPLIINGRPLKSINQYYNKELAKQKSMLKTKNDKDWSNKLQRLTTKRNNKVCDYIHKATKMIVDYCLDNNIDTLVCGYNQGWKQESNMGKVSNQKFIQIPYKTLVDKLTYKCENVGIIFKTTNESYTSGTSFLDRETPVKENYDKERRKYRGLFISNSGTEINADVNGSYQIMVKAFPNSFEDGIEGVGCHPIRVNLI

SEQ ID NO: 18483 - protein, 272 aa, unknown
  TnpB Polypeptide
MTTNPLRCVDVSITVFYTVLGYDVIVNKVSVKYRIYPNHAQQRTLDETRAVCRDVYNSLVHERTVCYETQGKSPTLYQQQKAMTAWKPNHAELKTVHSQVLQNVAVRVELAFQAFFRRVKAGEEPGYPRLKGKGQYDSITYPQDGYSIGQSTVTLSKIGQVKAKIHRVCPGTIKTCTVRKDGQKWYVCFCCEFEAVPLPPCDASVGIDVGLKTFAALSNGEFIENPRFFRKEETALAKAQRKFDRVKDKHGAKERKQTKKVVRRVHERIRAC

SEQ ID NO: 18484 - protein, 535 aa, unknown
  TnpB Polypeptide
MTPYKEDELAKNQTYKAFTARPTHVMDLNGVLLDSAPIMAELAAEVRGISGYATYVARNDVTLESRLAQITASAPAEAGRQAGIAMPNFFLEDEEGEALVGKSGKSRKEKLIQHNAVTAFRSWKERVDAVNGESTKYVSQGWKRTVNSTPPSYDEGFVNLGAVDSRYAVIENNPFVGGEIVLKLVIKGNWYRLIFPFDNTRFPVGKVTLPVIKIEDGKPAFIFTVATDTPVVLFSGKYIIGVDVGINNYATAVVRNTKTGQITHQTTLSQRVHSLWNSVRASERQVKQLREKAKPIVYDRQGKMAALDEAQLHREAASRKKRELAILAAQEIADLAHQYDNAVVAVEDLGWVKNTMQNGRWNRGELVQWITHYVSQNGCWVLSVNAANTSQVCHECGSEVTHPEHKVSDCPKHGKMDRDVNAAANIAARAVPKVKTARNTRAKSKKLQKKTSLKTPIARDALKHPGGSRNKNCATPKRKKRRSSKGVKLPLRPARVRAFCVDTRVLADWGTYGVSETSKAALNQGNVAYRLCSLS

SEQ ID NO: 18485 - protein, 246 aa, Escherichia sp.
MRRFAGACRFVFNRALALQNKNHEAGNKYILYGKMASWLVEWKNATETQWLKDSPSQPLQQSLKDLERAYKNFFQNRAAFPRFKKRGQNDAFRYPQGVKLDQENSRIFLPKLGWMRYRNSRQVTGVVKNVTVSQFCGKWYISIQTESEVSTPVHPSASMIGLDAGVAKLAMLSDGTVFGPVNSFQKNQKTLARFQRQLSRKVKFSNNWQKQKRKIQRLHSCIANIRRDYLHKVTTTVSKNPRNDSH

SEQ ID NO: 18486 - protein, 539 aa, unknown
  TnpB Polypeptide
MAKQMFTYQTRLTVTPAQDAMLSRLAALYSRVERHLFVAQQQGKLTQNELKQTYQTRFGLNSRYFNSINESIRGKILAIQELKALHVSELQSKIAALKKQLKKLSTQPVTSAHRFAWHHKNRRLIHLERKLTVVKKSQDSERVSLCFGSKKLFRQQFQLAKNGFDSHAAWLAAWQQARNNQFLLVGAGCETACNQNCQISAQDETHYALKITLPASLIGEQGKQLHLTDIRFPYGDAVIRAAMDSSQRIATVSNTGKPISKLTGTPITYRFLKDDTSWRLLVTVGQTPLPSQTSVLAGAMGIDVNVDHLALAETDRFGNLIDAARLPLVTYGKSTNQSRALIGDAAKHIALRAQAAGKPVVIEKLDFKRKKAELETDNAARARCLSSFAYGKILSSIKAACFRAGVVVIEVNPAYTSVIGAVNYAQKKGISVHMAAAFAIARRGMRLSELPPTRQVCVPTRNGDHVTFVLPVRDNTKHVWSTWSKIRTALNTAHVAHFRRGERSSSPPPLREHPSLRAVWKSQVNRTQICPECVLDIPF

SEQ ID NO: 18487 - protein, 398 aa, Bacillus sp.
MRQKAKPKEKQTEVTCHLFTKPSKEQPYVNYHFWDALFKVVSQKDYRSLPVQASQSVMKVVFQNWKSFHVSLKDYKQNPSKYKAKPKIPTYSRATEKEMTFTNQDCVIKNKKFLKFPKTKEELNIGKLGFAEGRLKQVRVIPKYNQYVVELVMEISFEKTELEDNGRFMSIDLGIDHLATNVTNTGRAPLLVKGKHVKSINQYYNKKKAYLLGILRQGKQANEAPFTSERLERLHQKRFLKMKDIFHKASSEVIKITLEENIHTIIIGQNKAWKQKSIIGKRNNQTFVSIPYSLLISMMTYKASQHGINVVVTEESYTSKARFLDGDDLPTYGESDRKKHFSGKRMKRGLYLSHRNGFINADVNGAANILKKTWLRLTKETNFNMETVNVWNPQTMIM

SEQ ID NO: 18488 - protein, 341 aa, Bacillus sp.
MKVVFQNWKSFFSSLTDYKQNPTKYKARPRIPKYSRTTKKEVIFTNQDCVIKDKKFLKFPKTKERLNIGKLGFSEGKLKQVRVIPKYNQCVVELVMDVAAKKIELDDNNRYMSVDLGIDNLATIVTNTGRESILVKGKNVKSVNQYYNKKKAHLLGVLRQGKQTNEGPFTSERLEKLHQIRHLKIKDIFHKASSEVIKIALEENTNTIIIGQNKEWKQNINISKRNNQSFVSIPRSLFISMIEYGAAQHGIKVMVTEESYTSKASFLDGDDIPTYGKGVGKKHFSSKRIKRGLYRTGRDWLINADINGAANILKKALLRFTKENEFNIETVNVWNPKSIII

SEQ ID NO: 18489 - protein, 372 aa, unknown
  TnpB Polypeptide
MIGGGKMLKAYRYRLYPNKEQKIYFSKCFGSVRFIYNKMLNDKIEYYKENNKMLNNTPAQYKKEYQWLKEVDSLALANAQMNLDRAYKNFFRDKSVGFPKFKSKKNNHYSYTTNNNQRDKTIKIIDDKYIKLPKLKTLVRIKLHRQIPKDGIIKSATISKNPSGKYYISILVEQEIKQLPKSEFAVGIDLGLTDFAIISDGIKYPNPRYLKKSLNKLAKEQRKLSKKKKGSKNRNKQRIKVARLHEKIANQRKDFLHKLSFKLINENQVICLEDLQAKEIQQNKYLSQSVSDVGWYELRRQLEYKAKWYGRTISFVDKYYPSSQICSNCGENTGKKPLDIREFDCPYCGTHHDRDINASINILHEGLKLLDK

SEQ ID NO: 18490 - protein, 463 aa, unknown
  TnpB Polypeptide
MWINDARLSYNKTVEELQNESDKHSKYTMRNRIVIKKNTTMTDPDLLESMERTPKDIRAKACFEATEAHNLSIAKTQIVNPRYKSYERLINIEEKKKAKNLLLLNRIEKLERDLESIKPTLKTYVNKANLIEKYKKQIVHVMDIEGLKKIFENIPRFMTKTSNVKFRKGSSQYSHIFIPKTAAKVGDNFIEVYTRSNIGQIRTDAPLREITADFQIRHDNRLNSWHIIVSEEVIPEKSVEINNIISIDPGIRTFLTGVDSDGNVLEIGKDWCNNSRIKERLKKLDKCKAMKMKNAKTREERYDVIKSKRNAILHQRKINNLINDMHKKASGLLLENYDLIVLPKLRTKTILKRENGLGKLINRKINIISHGKFHDYISWKAKMMGKIVVDQNEAFTTKTCYQCGFLNDIGSSKIYSCAHCGHQSDRDIQSSLNILTKFMGSYTSTGQWGDSDVNSINIGFTRL

SEQ ID NO: 18491 - protein, 426 aa, Ruminococcaceae sp.
  misc_feature (333)..(398): Xaa can be any naturally occurring amino acid
MLCPNNSQKTKLFECAGTARFIYNWVLDYEQINYECDNGFVSDYELRKRLTVLKQTHEKFMWLNHYSNNIAKQAVKDACNAYLNFFKGITGFPNYKSRRKSKPSFYVDTDKISFTDTYVKLEKLTTSRKANKQKFNHIRLAEKGRIPVGVKYSNPRVTFDGERWWISVGIEADENTNKPSNDGIGIDIGIKTLAVCSDKAEYKNINKTAKVRKLKKKKRRLQRRISKKYSKNKKGVCYCKTRNIIKSEKQLLKINHRLTNIRHDHIHKTTSEIVNRQPKFIVMEDLNVKGMMKNKHLAQAVQEQCFYEFYRQIQYKCQWNNIEFITADRYYPXXXXXXXXXXXXXXXXXXXXXXXXXXXXXXXXXXXXXXXXXXXXXXXXXXXXXXXXXXXXXXXXXXISNMSRFTVESGHDEQGMKHKSCFYNFL

SEQ ID NO: 18492 - protein, 374 aa, unknown
  TnpB Polypeptide
MKAHRAILIKLPKDKCNVDYIRRLIALTNLAYRGFEVWVPDLPKRVQYQLYGFKNYMGSLIFGTKPKGWFAETWVPLKTFRVYPDGSRKGDRNAPVVLDFKNNTIRLRQVCRSELSYVVEVPMPKWVIERVNEGGDIKFARIGLKDNEPYLALTAEREVEPYQPSGYVLAVDVNSWRYGIAWGLVRGGRLVTWRAEGLNTLLINTLYHQAVDRERLVGKLRRVGYGNSMKASRVREQVKSRWSRIYRITRDKAYFLASKLVKKALKYKALLIIDDVTEETRKELLEEKLPPGVIKLLMSNLKRFVHQLETLAQWYGVPYEFRRLPSTLCPICGSKLVQKDDRVMVCRNCGFKAPRDMVPMYWASQEIERFSKRR

SEQ ID NO: 18493 - protein, 368 aa, unknown
  TnpB Polypeptide
MPEFIQASPTLAATGLCHPPSCLGTMSLLKQQPALKTKTSIFLLLWHIYVGCVNINMDRVQQLIMIVLEFKAYGKLDQFTAIDEALRTVQFIRNKCLRLWIDGLGMSQYDLNKYCAVLAHEFPFADKLNSMARQAAAERAWSAIASFYDNCKKKVAGLKGFPKFQKDNRSVEYKTSGWRLADDRKSITFTDKKGIGRLKMKGTRDLNFYQPDQIKRVRLVKRASGYYVQFCIQVDRSELIEPTHRTIGLDVGLESFYTDSLGTKVENPRFYRTGEKKIGRSQRLVFRKVKGSSNRRKARIKLARVYLKISRQRKDRAIKLARCVITSNDVVGMSRSQESSDYTNRSRSVFSERDATRTERETACGESV

SEQ ID NO: 18494 - protein, 302 aa, unknown
  TnpB Polypeptide
VDKFALTHAVYHLEDGYDRFFKHLSRFPRYKSKHKAKKSYTTNFTNGNIEIGDSSIKLPKLGRVKAKIHRKPEEDWKIKSATITQNRDGTYQVSILFEYIADTVSALAVTEDTAVGLDYKSDGLYTDSNGETCGMPHYYRDSTKRLAKAQRKLKHKTVGSNNYKKQQKRIARLHRHVANQRKDFLQKRSTAIAKQYDHVCVEDLNMKAMSNKGFGNGKATLDNGYGMFLKMLDYKLEEKGGSLVKVSKWFPSSQTCSCCGGLHPEMKDLSIRTMRYSCGCKIDRDYNAAINIKKEGLRLLSA

SEQ ID NO: 18495 - protein, 472 aa, unknown
  TnpB Polypeptide
MATVSYGLKITEAYHIFDKTIKIYRNAVHYISDIAIRHYDELKSLESITGDDGKVIISAQQRRQQKMERLIHSTASNDAVYKRFDKEFYKFPSYLRRDAINTAIGLILSYRSQLQKLEDDGKHGRRPYLNRNQNTMPCFYRNNTFLDSKETNIVSLKLYNGKDWIWETFAIRDCDFMYAYSHMKEWKASAPVLVKRNHRYELRISYEMANSKFPKFKKDKEVETVIGVDLGINTDAVCSVVHKDGTVTGQRFINHPVEKDRMYGLLNTIKKAQQNGNHKTPRLWRLANNYNEAIAVKTAVEIVSFALESKADVIVFEHLNMKKKKKGNKQKLSLWKKRDVQHRVEALAARNGIRVSYICAVNTSRLAFDGSGKVIRGKDAGFGTYELCKFTTGKVYNCDLSASKNIGARFFIRVLLKSLSAKEELLVLAKVPELNRRTSCCLATLINAYAVLCASKAKPEAPAEGDAARQSH

SEQ ID NO: 18496 - protein, 389 aa, unknown
  TnpB Polypeptide
MVVRKVAQRIPFTPSKTQAALLEQCFGARRFAYNQQVKAFNSYDKETNPRPEYPSIADMKGANAWLRDSPIPSHALSNAIMDFRKTQAAYFRKAEYGKNRPRFASKDDSVQSFRNGRPMRHMEGNRYPLSKKLGSVRIRRRDRFRYPLEALSSWTVKRENGVYYLALLFDVDVQPKPPVSGEVGIDLGVKDFLTLSTGEKINYPDRLRQLEEKVRCEQRKLSRRRKGSSNYRKQKKVVAKAYAKVRHFRENFQHQVSHKLIEDNQFIGMETLAVQRMTRKAKRKLGTDGKPERNGQSAKRAMNRSILRNGWSSFAGKLAYKAQWCGRTFVQVDKFYPSSRLCHSCGYKYDGLLLSEREWVCESCGASHDQDVNAALNILDEALRLIQTE

SEQ ID NO: 18497 - protein, 304 aa, Ktedonobacter sp.
VSLLTLDGRIVVPYTGYNKHVALIQRGTEIGASKLWYDKAKKQFYLLVSLQVEMADPTPETHKHVVGVDVGMRYLAVTATIQGNCTFHADTSIVAKSHHSARLRKRLQKKGTRSATRRLVAISGRERRLKANANHVVSKRIVTQYPQSVIGLEHLTDIRERTKRRKGKSAKQRKANRAFSKWSFAELHSMIAYKALLHRSMAIKVDANYTSQACPKCGHTCKENRPHKGLLFLCQNCQYTLHADLVGARNIAMRTLLLRQDWIGTGLLSVRPDVSDDEAKAARLKRYAELRWSSDTTPSPRLSP

SEQ ID NO: 18498 - protein, 431 aa, Ktedonobacter sp.
MKTAHKIRMNPTPEQVEYLKRACGTRRFIYNWGREQWEKQYHAYKLEQETTPEEQRVLKPPNALALKQQFHAIREAAYPWTYDVTKCVVEGAFADLGKAYSNFFAGRAAYPQYKKKGKSHESFYLANDKFTIGSHWIAIPGLGRFILDQRKQQSDRGKLRRKLGTVNLAEKLRFVTQGNASVPTKKRTRRKHVLCDEVKILGATVSCEAGHWYVSIQVEVTRERPPTPEPVVGVDVGVKQAAVVSDGRRLENQKPLARHLGKLGKLQRTLSKKQKAKDPETGKTTFSKNYQKQRLKVARKYQQIAAIRRDVQHKFTTEIARTCGAIGIEDLNILGMMANRKLSRAVADAAMGQLLQFLKIKVAASGGNLFMASRWFPSTKRCSGCGHVKKRMPLKHRTYYCLVCGLVIDRDLNAALNLEQFARDMLRHLLA

SEQ ID NO: 18499 - protein, 474 aa, Ktedonobacter sp.
MRNDPAWAQACAIPRSKKQERAQAFSTLRKKYRFSEYEMHEYTKQARVSWIADHIDSTMAQTLATRAYQAANRVCVGKAKRVRFRSKGRGIDSVEGKRNDTGMHFVLDPNAGDGGFLIWNAEVIPAIIDWLDPVVQHGMRHRMKYVRLVRRKASSPQAQGTDKDGNRYYVQLVLEGRAFVKPRHEEVGKDIIGLDIGPSTLAMVPREGKADLVTFCEEVAPDTRKKRRLQRKMDRQRRANNPENYDEKGRVKKGRLRWKESKRYKATRRQHANTERKLAAHRKSLHGNLAHRIAQIGTTITLEKTSFKAWQKQYGRSIGLRAPGVFIVHLTRIVAKTGGTLYEVPASSTKLSQYCHQCRQYHKKPLSQRWHKCPCSFGPVQRDLYSAFLLAYLEPEQTIPSVNQHVWEGAEPRLRAVMEDLQQRANEGQHLPRSMGVVARRKSGAARARARRLESPAYPRQELVSPSGEIGNGG

SEQ ID NO: 18500 - protein, 445 aa, Ktedonobacter sp.
VSKKPQKASLDEKKKRKRKKKTKQTITRAVTHIRLIEANPGKLEALDQLVAVYLPLCQQYTTLFCEAETSPDKYQETVFKTDLSDRLHRVAIQQAAGIAKSVRTNRANAYQAYLEDVADYAQAKAQAEGRMSAFKRREPTWTEWDLPVLRVPVIQANVNVVVLEKSEDSTFDYWLRVSTLDVGNPLRVPVKLASYHKRALEGRTLNASTTLHKRNGVWWLTLSFDEDVPLQTKPDAPTVGVDVGIAHFLTTSTNKAYGSFHGKMARQHKHDREKRRRKAKLRACLEKKGVPKGKLPSTSSETSQRLSRHVKQEINRAVNALVKDHRDARLIYEDLNVASMRFKARVMNSYLYASHLGHIPEQLAWAAAKQGMAAHTVRAAYSSQECPRCHYVDRANRPNQKTFKCLVCGYADQADRTDARGTLGGSETGGMSLDLGGQGAPHDAA

SEQ ID NO: 18501 - protein, 568 aa, Ktedonobacter sp.
VRIDRTYEIEGGAGVQKTCQGQRKKKKQQEKRPATPTFLLELPLVVDAGQASRLRAHLEAARQLYNAILSEGQRRLRRMRSDPAWHVARTIPRTQKAERAAAFSALRKTYGFTEAALHEAVKGLRVGWIAEHIEAVLAQTLATRAYRALNRVCLGKARRVRFKSRGRGFSSIENKRNDTSLRFVLQPPEEGKAGYLLWNGDQLPALIDWKDEVLTHGLRHRIKYARLIQRPASSSRAEGADAEGYRYFVQLALEGKPHHKPKHTIGKGIIGGDVGPSTLALVPQEGEASLEVFCAELAPEARAICRLQRQMDRQRRAANPKHYDEKGRIKKQGNKKLRWKQSKRYQVTRRRKATKERKLAAHRKSLHGRKVHQVVKLGTTIILEKISYKAWQKQFGKSVGLRAPGMFVELLRRTVASTGGTLLEVPTRTTALSQWCHGCGKRVKKPLSQRWHQCECGVGPVQRDLYSAYLAAYLDPADPIPSCARYQGYWEGAEACLMAAHERAIQRAKEGQTLPRSFGIPRARARLPKSSGEPPRFQLFSFGEKSWKRGSNPWNPRCFSTGSSQRQG

SEQ ID NO: 18502 - protein, 399 aa, Ktedonobacter sp.
MLIYEYKLDGNTAQYSAIGEAIRITQCIRNKCLRLWMDTRGINRNDLQCYCAELAKAYSFATLLNSQARQSAADRAWAAISRFYEHCRNQKPGKKGYPQFQHDCRSVEYKQTGWRLEPDGKHIIFTDGCGIGRLRLIGCRDLATCPLPQMMRVRLLKRADGYYAQVLVKAERHGEHVPTGKQTGIDLGLKAFLTDAQGNTVANPHHLRKAERKLKRLHRRLSRTQKKSANRKKARKKLAKGYLKVQRQREDFARKTANALITSHDLIAYEHLRIANLVKNRKLAKSISDAAWGRFLQWLKYYGSMHSIPVIAVEPAFTSQDCSACGARVKKSLSVRTHICPSCGVVLDRDHNAARNILEKAYRTVGQTGTGEAQAPPNASGQTASTRSGRRARAGKRAG

SEQ ID NO: 18503 - protein, 416 aa, Ktedonobacter sp.
MLLCKKIKLDVSEQDAATLEFMQGKCRGLYNWWVMRLRDGEKWRFNACKKTLAESRVHDPELNQVYGKLLAEVYYRLDAGMQAFFRRVANGETPGFPRVRPRHCFFTLCYPAMYLTLEGSTLILPTGGKGKRKRFPAIHATLTELPPEDFREVAISRDGRGHYYASFSYRQPEEAKRNSGTVAFDLGIKTLATGVTEEGRFYHIGGFKGSRWYNRQLDKLRSKRSTCKKKSRRYLHLSKVYKRVSQKKRNKQRDSLHKASHLIARRLVERTVVVGDLSQRQMVMKEHQEHNKACNRAVYNDWGLYAFVQMLTYKCQLYGKELQFLDERNTSKQCSGCGNLQDMPLRKRTYQCAECGLSMDRDDNSAVNILMRFLARRGPHTRQAECDVLQATQSGVDAMEASCEGHVQQLNLFDGV

SEQ ID NO: 18504 - protein, 487 aa, Ktedonobacter sp.
MSKREAKATAEEKQKRKRKRKKKTKHTLTRAVTHIRLLEANPGKLAALDALMAVYLPLCQQYTTLFGTREESPDKYTDPIFETELSERLHRVAMQQAAGIAKSWRTNRTNAYQAYLDEVADYAAARAKAEAEGKRSSFKRKEPEWQEWDVPVLRVPVMQANANVVVIEKSEESTFDYWLRISTLDKGNPLRVPVKLASYHKKAMGGKTINTSTTLQKRKGVWWLTLSFDEDMPPKTEAGAPGVGIDVGIKNFVTTSTGKHYGTFAGKLATKHKRDREKRRRKDKLRACLKKKGVPKEKLPSKSSASSRRLGRQVRQDINRAINQALDDHPDARIIYEDLNVASMRFKARSMNAYLYASNLGHIPKQLAWAAAKRRMASHTVRAAYSSQECPVCHYVDRANRPDQQTFCCQVCGYTDHADRKAAGTLASRWADRELAACADLKQVKALLLRRHEKWKQENAQRITRAGPPIQLSFWDPPEMFLDSSHE

SEQ ID NO: 18505 - protein, 419 aa, Ktedonobacter sp.
MLLCKKIKIDVSEQDAATLEFMQSKCRGLYNWWVMRLREGEKWDLYEAKRSLQESKQHDPELVQVYGKLLQEVYYRLHGAMKAFYRRVKAGETPGFPRVRPRHCFFTLCYPAMYLKIEGDTLILPTGGGGKHGAKVYPNIVARLTEAPPEGFREVAISRDGRGNYSASFVRERNEKRHETEGTVAFDLGIKTLATGVNEQGRVYTIGGFKGARWHNKQLDKIRSKRDKCKKKSRRYIHLSKVYKRVSQKKRNKQQDSLHKASHLIAHKLVERTVVVGDLSQRQMVTKEHRERNKHLNRAVFNEWGLYTFIQMLTYKSQLYGKDLHFLDERNTSKQCSGCGNLQAMPLWKRTYCCVECGLVMDRDENSAHNILTRFFARQEPHTQARPECGVLHATQSGVEVKGASCKGQVQQLNLFEGV

SEQ ID NO: 18506 - protein, 440 aa, Ktedonobacter sp.
VPKKRQGQRKKKERQEKRPATPTFLLELPLMVGPGQAARLRAHLEAARQLYNAILSQGQKRLRRMRAAPAWHVARTIPRTQKAERSAAFSALRKTYGFTEAALHEAVKRLRVGWIAEHIEAVLAQTLATRAYRALNRVCLGKAKRVRFKSRGRGFSSLENKRNDTSLRFVLQLPEEGNAGSLLWNGDQLPSLIDWKDEVVTHGLRHRIKYARLIQRPASSPRAAGADRERDRYFVQLALEGKPHRKKKHAVGTGIVGGDLGPSTLALVPQEGEASLEVFCAELAPEACAIRRLQRQMERQRRAANPEHYDEKGRIKKQGKKKLRWKQSKRYQITRRRKATRERKLAAHRKSLHGRKVHEVQKLGTTIIIEKISYKAWQRQFGKSVGLRAPGMFVELLRRTVASTGGTLVARPHTHECIEPVVSWLWQEAQEAAFAALASL

SEQ ID NO: 18507 - protein, 392 aa, Ktedonobacter sp.
VKQKRAYKYRFYPSDEQKQIFARTFGCVRFVYNWALRKKTDAFYNDNQRLYYKDLSALLPDLKKQKEYSWLSAVASVPLQQSLRNLDRAFINFFEGRAEYPTFKKKSNRQSATYAGTAFTWRNGALTLAKMSEPLDIRWSRPLPDDITPSSVTITKDCADRYFISILAEDEIEHLPSNENALGADLGLKSFVVLSTGEIVGNPKFFHKDEKKLAKAQRRHARKKKGSKNRDEARLKVARLHARIADRRRDFLHKLSTRLIRENQTICVESLVVKNMVKNEKLSKAISDVGWSEFVSQLEYKADWYGRTLVKIDRWYPSSKRCFKCGHLLDALTLDVREWTCPECGVHHDRDINAANNILAVGLTVHACGESIRPGAVKTKPGSSRRSRKASK

SEQ ID NO: 18508 - protein, 410 aa, Ktedonobacter sp.
MKQTITAKLKLHTDSTQFAALRATQLASRDALNHVSRYSFAHGKTSNQRVLQHACYDEIRLLFGLPAQMACNVPRQVGATYKTLWTKARHNAQARKAGWTRKRYKGLDQPPRYVSPTLTYNYLRDYSFKKVQQVSILTLEGRVVLPHRGYERHVALIGQGAVIGAAKLWYDKPHKQFYLLVSLELEVEDPPPEAHSQVVGVDVGQRYLAVTATTTGQTSFFPGKQIRAKADHDARLRKRLQHKGTRSATRRLLAISGRERRLKQDRNHLISRRIVDVHPQSLIGLEDLTHIRERTKRKRGKKASKKQRRANRHASSWAFAELHGYIAYKARLSGSLAIKVDAYHTSQACPRCGFASPDNRPNKGRLFVCQECGYRLHADLIGARNVALRTLLTRQDWVRTGILCAPREAQ

SEQ ID NO: 18509 - protein, 381 aa, Acidimicrobiaceae sp.
VAPWWAENSKEAYSSGLDGLARALENWSKGRRGERAGHTGFPTRKKKEHRRSCRLTTGSIGVVDDRHVKLPRIGRVRTKEQATKLRELLDDGRARICSATISEEAGRWFVSFTCEVERHDVHGRLPDAVVGVDVGVKHLAVLSTGEVVENPKALGSYARRMARLSRELARRELGSKRCRRTKAKLARCHAKVANTRRDAIHELTSDLVSSYGTVVIEDLNVAGMTAAPRSKPDHAGGHGPNGRRRKAGLNRAILDASPGEVRRQLVYKLAWHGGTLVVADRFFASSKLCSSCGAVKAKLRLDERTYCCEHCGLVIDRDLNAALNLAAYGRRALSVAGSGPETRNARGGAHRRLRSDAPVKREDGTVEPDKTVTAPSQGEAA

SEQ ID NO: 18510 - protein, 417 aa, Halophilic sp.
MDVRRTVSVALDVDSHDAALLEDTVDTFLWCAQYVSDHAFEGEYVTTSKTTLDDETYDDVREATDGFNGGLVQAARNKAAEACKSVVARWKQGKKASKPHFTSPHVVYDHRTATFHDEYVSLATVDGRIEADYVLPDASSDTPHAEYFFSDEYETTGAELHYTSGNWMLHVHCKKDVESDTPDGETTENGTVLGVDLGVNNLAVASTGTFWTGNEFDHWRREYEKRRGELQEHGTRWAHENIQSVGRKEDGRFTLTLHRISNELVAEACDHGCSLIAFEDLTDIRDRTGASWGHKWAFNRLYEYVEYKAREYGISVAQVAPENTSRRCSHCGFTHPDNRNGEEFECLKCGYENHADYNAAKNIGLRYLRRNQTGDGGGAPLGVRLNSGTLNVNGGYSPADDSARTGVHAESHPFTRG

SEQ ID NO: 18511 - protein, 448 aa, Halophilic sp.
MKRTNTFDVIPQSDEDEELLRRLLDASAALWNEINYERREHYADPDGDVWEIGEYRGRYGGTLGASTVQQIERKNREAWRSFFALKKKGEANGKPGFWGNKDDGRDLRTYIRNTSYSVEWGDYSRLEILVGQDLKDEYGLGHRERLRLEVRGDPNWKEYDKQGRLELFYDEHAQTFRAFQPVTISEDHSRLAHPLADETAALDIGANNLVACTTTTGTQLLYEGRDLFERFRETTRRIADQQSKVKREEGRYTSKRIRQLYRRRTRRRDHAQDALVRDLVERLHGEGVSTVYVGALTDVLDTHWSVEANAKTHNFWAFRAFIDRLACTAEEYGMAVEVRSEAWTSQECPNCGSVDRTTRHRDTLTCPCGFEGNADLTASETFLKRHQNSESSDRRTRHVVSRQRQTTVSRPMARPVCLKWDDHDWSESPRSPRPNEEHTNPQVASVGR

SEQ ID NO: 18512 - protein, 406 aa, Actinomadura sp.
MSRYRLCPTPAQEAGLLEHCGHARFVWNLAVEQHSWWTPRRGPAPGYAVQARQLTEARAANPWLAVGSQTVQQQALRDFAQAMANFFAGTHRRPTWRKAGVHEGFRVVGVRGRAWEVRRLSRRTGEVRVPKVGWVRLRWSRPVPPGVKSFRVTRDRAGRWHVAFAHVPDPVPAPGNGAVVGVDRGVVVSAALSTGQTCTVPGLTAGEAERLKRLLRRLARADRGSNRRARVKAAIARLKAREADRRKDWVEKTSTDLARRFDVIAVEDLNVRGMTRSAKGTIDAPGAGVRQKAGLNRGILAAGWGRLVTRLEDKAPGRVVKVDPAYTSQTCNACGYRAPENRESQAVFGCTACGHRANADVNAARNIRDTARTIKDTAVGRTVAARGGGAAARPVNREPQPTLLSV

SEQ ID NO: 18513 - protein, 263 aa, unknown
  TnpB Polypeptide
LFERTADDSKIRSNTRFVQISQSSVRLSKGRNLKDHRSDFILCEYQTRPDVDLTEWNIQQVRVVYKRDEWRLQFVCRTTIDPKPPGDEVAGVDLGICNFAAVSFGGESVLYPGGALKEDEYYFMKKKAKCNDSSSREATRLDRRRTGRRTHFLHALSKEIIEECVKRSVGMFVVGDLGGIREVDENGEPRNWGDHGNLDLHGWAFDRFTTLLDYKAEAEGIEVDLVSERDTSKSCSSCGYTENNQRVERGMYVISVIRLRTQT

SEQ ID NO: 18514 - protein, 405 aa, unknown
  TnpB Polypeptide
MLKAYKFLIKPVKEQSEMFEKHFGAARFVYNWGLEQKTKSYQEGKKTLTFLGLGPELVKLKKENIWMKEVNSQSLLASLKNLDNAYTRFFREKKGFPKFKSKYNPKQSFQCPQHCTVDFEKGLLNIPKVKNIKTVFHRQFEGDIKTVTISKVPSGKYYVSILVEDGKSLPIKPKLDRNDAIGIDMGLKDFVVTSDGDKIANPKYLRKSEERLVRRQRKLSVKKKGSNNRNKQRKKVAKLHKKIANQRKDFLHKVSHQIVHKNHGTICVEDLCVKGMVKNRKLAKSISDAGWGMFYNFLKYKSEWYGKNFLDIGRFEPSSKMCSVCGNIKSDLTLSDREWICSKCETKHDRDINASINIRNMAFTNQNLVRCIGLEQPESTPVEKKALVRNNETIFCEAGSLTPCG

SEQ ID NO: 18515 - protein, 370 aa, unknown
  TnpB Polypeptide
MMLSYKFRIYPSKTVEAKLQEHLDLCRWLYNRLLEELNRAKAKAQRLTWKDAQALIVKLKRENPELNQVYSKVLQMVNNQLWSNIHALASVKKNGRKIGKLRFKGKWFKTLNFNQSGFKLEGKKLYLSKVGAINIKLHRSVKGKIKGVIIKRELSGKLFAVFQCENRVMPLVENGRVIGLDVGVRHFLSDSDGRQIENPKFYERSLERVQKAHRTLSRKKKGSKNRAKARIRLTRAYERIVNQRDDFLHKLSKFYINNYDVLIVEDLNITSMVRNRNLAGKILDASWGKFLQMLAYKAENAGRILVKINPRGTSQEYKHGELDRDYNASLNILERGLSGLGRPCLPVETKPLLAVPASLIIEAGSPYPSG

SEQ ID NO: 18516 - protein, 371 aa, unknown
  TnpB Polypeptide
MSNPGVIRNYKFRIYPNKEQERKLLRWLETCRRIYNEALARRKKAWEQEKCSVTRLEQQVWLREAKKENEFFKEVHSQVAQEVLFRVERAFEGFFRRVKNGETPGYPRFKGKGRYKSLTFTQFGNGLGASFQNGKLKLSKIGLVKIKQHRDITGAVKTVTVQRDSCGRWHAVLSVEVELSMMTTHSGSAVGLDVGLEKFAALSDGSVIENPRYLRRAEKRLKHAQRALSRKQKGSRSREKARLEVARLHGKICSQHRDFLHKASRRLVNTYSLIAVEDLAVKNMVKNHHLAKSISDAGWSEFLAMLCYKAEEAGSRVVKVNPSGTSQECSRCGEPVLKDLSVRVYECPSCGLVLDRDVNAARNLLARAIAM

SEQ ID NO: 18517 - protein, 260 aa, Rhodovulum sp.
VHTHEAQVVLKRLDLAFRAFFRRLRTGGKPGFPRFRSAERFRGWGYKEHGNGFKVEMRPGWRHGHVTLFGIGRRRARGWMLNLVVETDCAERARAEGPAIGLDWGVSTFATIAHEDGSFEEVANARPFDRARADLCARQHRLSAAARARKISRAALKRHREALARQHAKLAAKRKDFLHKISARIAGRHWLVATEALAVQAMTGSACGTAKAPGRNVAAKAGLNRSILDAAPAAFLNMLRYKAEGLPSIRAADQGLQWSA

SEQ ID NO: 18518 - protein, 554 aa, unknown
  TnpB Polypeptide
MFVYTVKLDTNDTTAAQLARRFKMAEDIYKYTLRTILKRVQKQNRDPRQKQLKRLHKEWGDLVSLKEGKILPTQSVVVKNFHDQDIYLHGFIANNSKDAYKPNPDGLTLDKTVLKFVNARIKAIEKERKELYRQLDLDYNLQGKFTFSKLANDYRNSRGYGSYIPSDVAGKLGIRAWDAYSKVKFNNGAKHVNLRAPLLSMEAKSDTGLVIRYGLFKMGTKGKQLQVPVLYQETPFEEDVLRNPFKFNRLVRRFERGHYQYYIQRIFDGVPPERFPILETGTVGIKVGLTTVAVVTQYHAAIYPLAPLSTSCINDIKREEQIIKLQQSLDRKRRANNPDNFNEDGTVKKGHKIWVNSKSYLCDKAQLNDLKRKEKVTRELYQKQLANRISQMGNRFFIMQPESSSLAKRTTKDEVTKKGTPKSKTRYGKVVANHAPYYFFSQLQYKTEFKGSSFTRVDKKNLVSYNHVADAIEKDLDLTMKTRWVGPHLVQKDLYTAYLLAHLTDELEFNHDALQADFEAFVEMQGTFLDSLGTVNDIIDNTITNTQENGEFTN

SEQ ID NO: 18519 - protein, 404 aa, unknown
  TnpB Polypeptide
LSFIVLAFKSVWQYYAPTGDVLLLLDVFRRMVNDSIRIGLLNGACSLRRLSLLSYNQLARYDSPSCYKLCAISRAAGILATKNKSVRRGFPTKTSYAVRQQLVSCYGFKIENGGLKIPVSRGKRFSIPLTKHTLEVISQRGVKVRSFTLTQNRLSLCIARGTPRIECASTVGVDRNLRNLTVGNDDQTRQYNLSKCMRIANTTVRIVASFTRDDDRIRTAIASRYGKRRTARVGHLLHNATKTIVAVAVQRRTAIVLENIEGIRSLYRKGNGQGRKYRGRMNGWSFGEAQRQIEYKARWVGLPVVRLSRRETRGSSVTCPRCGERLQSDKRLERKLWCGKCRAVMDRDMVAAVNLARWGRVRFARSRPPIAEAQGRAAEAMKGNPTPTVIPGVDAPKLTQPTKS

SEQ ID NO: 18520 - protein, 432 aa, Paraliobacillus sp.
VKAMLELVNRGYVYRAIPISDEVETYLRQCFGADRKMYNLHVAYLYDYLEKKPYQIGDKLPSLKQMGMPTVSAFKKQSVSDDHIAYLYLVDAFASNEAKQHFNKAMTAFNKIASKKQYKKAALKRQKTLGIEPTFRDLKGMPKFHSRKGSKASYTTFNQNGNIYIEDDILYLPSAQKSSVKVVGLKLYTHRPLPQGSKIKNVTVTMNTKGQFDVSICVAFPKQITSIGIPNRILGLDYSQSHFFVDSEGKKANYPHYYRKMKARLVKEQRILSRRVKGSNRWEKQRLIVSRLQNKVANQRKDWRLHKKAYALSNRYDMIVVENINLRAIGQNKHYAKNQQDNGFGNFRLYIKYKLEHQGKYYVKVPKNFASTQLCSTCSHKNTALKGNVAVREWDCPSCGAHLDRDINAAFNLKQYGEHYTKDEILPQIVVA

SEQ ID NO: 18521 - protein, 422 aa, unknown
  TnpB Polypeptide
  misc_feature (352)..(355): Xaa can be any naturally occurring amino acid
VFNDALRARQDAHAAGERVSDSEVQRRVVTLAKTRSERQWLGEVASVALVQACQDARRAYRNWFDSLSGRRKGRKVGYPGFRSRKDNRQSIRLTRNGFGVTAGGVRVAKVGDVALVWSRALPSVPSSVTVIREADGRYYASFVVEVAQTRLPRTRNDVGIDLGLTSLAVLSTGEVVQNPRFLGRKARGLARAQRALARKTKGSKRRARAVRRVAVQHRKVRETRLDAHHKLAHRIVRDNQAIYVEDLPVSGLARTRLAKSVHDAGWSTLIRLLEEKARRCHRSVVRVSRWFPSSQLCSVCGFNSGKKPLDVRSWTCLECGVTHNRDLNAARNILVEGRKVAAGLAETQNARXXXXKREPTKVPRERHGRNPGHSWPGGCQGLSESRCTVGLVEHTFYSPRSTGTSGSAAGASTPPVVEPDGP

SEQ ID NO: 18522 - protein, 421 aa, unknown
  TnpB Polypeptide
MTKNEQIKQTLIETSQRRKTQMLKVFELKVNCHHTSKDNFKKLSNLFREAKWIQNDVIASDDIFHYEYKEHRVIKNFDKDHNLVERNLTIQTGVHQNIIKHIQQDIINLSKSKQKGRQVGKLKFRKECNCIPLKTGMLRVTSSKTVSIPQFRKLYVYGLEQFINIPDFEIANANLIRKASGFYIKVTVYLSKSNPRKQTGKSVGLDFGIKDNITTSDGEKFNCSVQEDEHFKFLQRKLAKKQKGSKRYYKCLNQIKREYEHQVNKRNDDSNKLLSYLLKTYDVIYFQDEQISQWRKFNKGFARNIQHSYMGRIKARLIELESTGRTFEISKWTPTTKACPICGSIHTGITLNDRVYKCDCGYEYDRDIHAARNVKMFGSTKRTECLEQASAENSSSTSLLTEMLDDLQEDSMKRKLEADTL

SEQ ID NO: 18523 - protein, 376 aa, Nocardiopsis sp.
VRKVYNLALAARTEAWTRQERVNYNQTSAMLTAWKKTEELAYLNDVSSVPLQQALRHLQAAFTDFFAKRAEYPRYESRKRSRASAEYTTSAFRFRDGAPTLAKMSDPVDVVWSRPLPEGATPTTVTVSRDAAGRWFVSLLCGDPTVRVLPTNGNAVGVDVGLDHLLTLSTGEKIADPRHERRDRTRLASAQRRLAKKARGDGANRAEARRKAARVHARIADRRRDHLHKLTTRLVRENQTIVIEDLTVRNMAKNRSLARAISDAAWSEFRSVLEYKAAWYGRDVVVVDRFFPSSKLCSVRGALTERMPLNVRTWTCDCGAFHDRDVNVAKNLLAVGLAASACGAGVRPQRRKPGGRSVVKQETPRSDPGRASGGRL

SEQ ID NO: 18524 - protein, 475 aa, unknown
  TnpB Polypeptide
MRLDPKPDEESPCLFVPSLACTSDLLAQSNFKALISPFSNGGKDFLFFCQSQVKSPATRSEFIYKGFFRRFYVQKTFKFRLYPSKLQEQQMQSVLDKCRFVYNKMLEDLKKQESPDKLALQNSIPELKKEHPELNGIYSKVLQYEVYRLFSNLKALARLKRNGRKVGRLRFKGKDWFKTFVYNQSGFQMISTGKRCQKLHLSKIGEIPIRVHRPVNGEIKQVTIKRHPSGKWYAALSVEYGSSPKSILPEVRKAVGIDLGTIHFVYDSGGNAIKHPRFMAASLRRLRILQQKLSRKKKRSSNRQKQKIKVAKQFEKTCNQRNDFLHKISKHYVSSYDIIAVEDLNVRELINISHNARTITDASWSRFIQMLSYKAESAGKTVVKVNPRGTTQMCSSCGKEVPKQLWNRIHQCDCGLVTDRDHNAAINILNQGLRKLRLGQELPEVKPLREGTATDKNTCQQVPLMKEEAADFNRR

SEQ ID NO: 18525 - protein, 441 aa, unknown
  TnpB Polypeptide
MTAHLGCASPVLQVRDSRLRWGVGADCGGVVGERGYVERVLVRYRYRAYPTPAQAQMLARTFGCARVVFNDALRARQDAHAAGEKVSDAEVQRRVVTLAKATPAREWLGEVASVALVQACQDARRAYRNWFDSLSGKRRGRKVGPPRFRSRKDNRQSIRLTRNGFGVTTDGVRVAKIGDVRLEWSRDLPSEPSSVTVIREADGRYYASFVVEVADTPLPQSASDIGIDLGLTSLAVLSTGEVIENPRHMRRKARALARAQRALARKMKGSTRRAKAVRRVAVQHRKVRETRLDGHHKLAHRLVRDNQAIYVEDLAVSGLARTRLAKSVHDAGWSILVRLLEEKAARRHRTVVKVGRWFPSSQLCSVCGFGSGKKPLDVRSWVCTECGAVHDRDVNAARNILVEGRKVAAGLAETLNARGGDVRPGLVLAVACETRTHQGAA

SEQ ID NO: 18526 - protein, 451 aa, unknown
  TnpB Polypeptide
MKGGRMDIISMYSVKIKEYRHIFKESLRMYRSAVDFFIDVCLKEWASISVLKGLKMQQSYVESLTVSTKARPDVLYNFNAKFYKMPCYLRRAAISEAVGKVSSYKSNLSNWEESDPRIRGEKPSFPKSGYCYPALYKGNMFVRVDDYTAKIKVYRNNTWDWITIKLHKSDVDYITHHCKRMEECTPTLQKRGKVWYLDFPFKEKCKLKTTPIKEQTIVAVDLGINSSATCSVLNSGGTVLGRHFLKLSKEYDSLNRKIGHIKYAQRHGSRLTSRLWAFAKGVNDNIAVKTADFIIKMAILYNADAIVFEHLDLGKKKRGSQKQKLALWKARYVQQIVEHKAHVNGIHISHINAWGTSKLAFDGSGTVLRGNKSTKTGNNYSLCEFQNGKIYNCDLSASYNIGARYFVREILKSLPVTERQRIEAKVPGCAKRSTCTLSTLISLNGELQAAV

SEQ ID NO: 18527 - protein, 446 aa, unknown
  TnpB Polypeptide
VELLCNEAHSDLSVLIKGERENPPVYGRDESEQSGFKCAGLNSAVEDGRWLLSVFKYRLYPNVGEEMRLKRSLFQLCCLYDKPRAAKMQLYRKSHVSLSQTELRALVLQWRKNSSELQAVHSQATQNVADRLHAAFVNYFEGRARFPKNRQPRKYLSMTYPQSGFKLENGRLHLSKVGKLRIFLHREPEGTIKRLTIKREAGEWYSIFTTEREPLQKPKLETIPDEKIRGADAGLEKFATFDNAESVDYPRFLRRSEEKLKTLQRHLAGKRKGSRRWRQTCFQLARLHQHIARQRQDYQNKLIAQLYTTCDILVLEKLQVQNMLRNHNLAKSIADAAFGQFIRKAKFKADLLGKYFLPVDPWGTTQFCHNCLTWVPKTLSEREHKCPNCGIELPRDLNSAKLIKRLGILAVRCSSSDGGSSPAEPEPLPFLRGLVSRGVEARSPRL

SEQ ID NO: 18528 - protein, 369 aa, Mycolicibacterium sp.
VWNLAVEQQQHWQPGRHAPGYNEQCAQLTAARAEHGWLAAGSQTVQQQALRDFAQAMRNFFGGTHRRPTWRKAGVHEGFRQVAVKPHHVARLNRRFGQVWVPKVGWVRFRLSRTVPEDVKSYRITRDRAGRWHIAFAHIPDPIGGPGEGSVVGIDRGVAVSAALSTGELLHAPGLSRGEARRLKALQQRLARAERGSNRRARTKLAIAKLKARETDQRKDWVEKASTEIARCFDTIRIEALDVRAMTRSARGTVQQPGARVAQKRGLNRGIVRSGWGLLATRLQHKAYGRVEQVPAAYTSQRCSDCGHIATGNRKSQEVFECEACNAGPCNADVNAARNIAAGRAVTARGDLGASRSANREPQLRSPAA

SEQ ID NO: 18529 - protein, 376 aa, unknown
  TnpB Polypeptide
MSATNDVVTPYNLPYQAKYALKSYVPKLHKTYNAKELDEEHPLRFVNRAGKFDCDSEREYEICWNIPQPGRGTNFWIPLRLNPDQQELWDGLFDDESSTKVGELRLQKHQTTWTLHVTVEYEIKDTSEIPENPTRIEFDIGESMLVTGCALQHDTPRKPLLINGKEAKRIRKEMFTTLKRLQERDASEWRIEERFSYYQNRLTDIIEKASDEPVEYANQFENPVIVMENLSYIRESLDDGKYMNRRLHAWSFARLQGRIEDRAEDAGVSVRYAHPQYTSKTCHSCKRIGYRPQQAEFNCKNPDCHVSTFQADINASANIARRVDPWGESLPVKQVGDDSPQDGSGCDTATTQCEQRVPAQMTLTTFQESEPTASDD

SEQ ID NO: 18530 - protein, 222 aa, unknown
  TnpB Polypeptide
VGTSPRLQARNRVTHRARHRDCWYRPRFGICNFAAVAVAYSTEEADLYPGNRLKQDGYYFPKEIAKCDDSGGDRATRLHAKWSERRTHFFHSLATHIVQRCIENGVGRINIGKLAGVREDDNGESKNWGKHGNLDLHGWAFDRFSNILEYKAKGEGIEVVEVSERDTSKTCCVCGRTDESQRVERGLYVCEEHGNGNGDGDGDAFNADVNGAENIRLDIKRK

SEQ ID NO: 18531 - protein, 292 aa, unknown
  TnpB Polypeptide
MMKHTLRFRAYLTDDVASEAWRHIDILRQIRNHAVRDYYRSDYNNRPSDYDQHNTLTDWTEQWSIFAEPSQHAAQQAIIQIHSDLVTLQERRNNGFDVGRLQWQARGEFRSVSYNQSSRFNVDHNTGDNRFVRLRVEKIGWFKIRADRDVPPADEIDKVILKKETTGEWYVSLVTTVEDTPDKPPLSQIEPENCVGVDLGITSYIHTSENLSVDTLDLSDEYDRYAREQRELDRKEHGSANWEKQRQKVSQAKRKIKRKVMDYQHKLTTWLVTEYDVVAAEDLDVKPMLETS

SEQ ID NO: 18532 - protein, 199 aa, unknown
  TnpB Polypeptide
VGASPRLQARNRNSRPTRHRDCWYRSRFGICNFAAVAYSTEEADLYPGNRLKQDGYYFPKEIKKCDDSGGEEATRLHAKWSERRTHFFHSLATHIVERCIENGVGRIHIGKLSGVREDENGNSKNWGRHGNLDLHGWAFDRFPNILEYKAKVEGIEVVEVSERDTSKTCCVCGRKDESQRVERGVCTCVKNTTMRSTLT

SEQ ID NO: 18533 - protein, 293 aa, unknown
  TnpB Polypeptide
VGIHPCRIRNPVQCHRREPTAGQSSLRQGQTAMGTSPRLQARNRDTHRARHRDCWYRSRFGICNFAAVAYSTEEADLYPGNRLKQDGYYFPKEIANCDDSGGDRATRLHAKWSERRTHFFHSLATHIVERCIENGVGRINIGNLAGVREDDNGESKNWGRHGNLDLHGWAFDRFSNILEYKAKVKGIEVVEVSERDTSKTCCVCGRTDESQRIERGLYVCEEHDDDDGDGDAFNADVNGAENIRLDINDESNSESAPDLGGDRSTGWLAQPGVYVHDLSRGFQPRTEVVDCKP

SEQ ID NO: 18534 - protein, 332 aa, unknown
  TnpB Polypeptide
VGSHGRDTRPQRPQNRVEDSQQLQGTAQSIQSSQRVLEELAEAFNSWYSSDDDRDNPPGYRKQNYSDRDGHRVHEEHPRSTVTWKQNGIKHDIKNNRVRLSKGANHKQHPKAWEYILIEYETAPGVTVENLQQVRTVYDKAKQRWELHLVCKHEIETPDPPGTETAGIDLGSVSATSPPSRTVPRKPTSTPATASNKMATTSRKKSKSVMTLVVKKPRDSMRSGQSVEPTSSTASRHTSLSDVSKTVLGAFTSGSSRVFERTKTVTRKTGVATETSICTGGRSIGSRTSSNTKRRLRESKLSKCQSATQAKRVVSVGEKTRVSVLSVACVRV

SEQ ID NO: 18535 - protein, 333 aa, unknown
  TnpB Polypeptide
LKIHPKYKGLHSQSSQRVLAELAEAFNSWDETRKSDSRANPPGYRKKNYFDQQGRRVHEEHPRSTVTWKQNGIKHDTKNNRVRLSEGANHNEHPKAWEYILVEYEMRPGVTVENLQQVRVVYNNKRGRWELHLVCKDEIETPTAPGTETAGIDLGICNFAAVAVAYSTEQADLYPGNRLKQDGYCFPKEIANCDDSGGERATRLHAKWSERRTHFFHSLATHIVERCIENGVGRINIGKLADVREDKNNGESKNWGRNGNLDLHGWAFNRFTNILEYKAKVEGIEVGEVSERDTSKTCCVCGREDDSQRVERGLYVCEEHGTATATGMRSTLT

SEQ ID NO: 18536 - protein, 301 aa, unknown
  TnpB Polypeptide
MWKQKWSIFGELHSKAAQATVARFHHSLTVLSELKEKGYTVGRLKRQAPSEYRSVAYSQSGFDLDEKRAHDKHAYLRFSKIGWVKIQYSRPIPDHASIKEVTFKKETTGEWFVSFGLEADDEHTSEKPDVDELDASNSVGIDLGILNYIHTSDGKTVDWLDLEDDYERLRREQRKLSQKEHGSNNWEKQRREVAKVKRGIQRKVLDYQHKLTTWLVKEYDAVFVEYLNVAGMLQGDGNARNKQNAAWRQFITLLEYKGDLHGCHVVQVETRGITKECARCGVETDRDTTAAMNVLQRGFSE

SEQ ID NO: 18537 - protein, 366 aa, unknown
  TnpB Polypeptide
MIQRQLKLKLSQKQIRQCEAWLFRATGIYNWVIRKMEQDAQGGKYWTAYGLMYEIVGHSKKCDVPSRILQGTIARAHQAWARCYKKLGKKPHLKSVRNRMSGLDIPGGVHRASERISIPGLGKIRYHRDALPDGKIKACRLLKKASGWHLAVCIEAQPTAIARTANGQIGIDSGFSSLLTLSSGVKFEHPRELEASANRLAQAQRGGHKHTAARIQEHIANQRRDRNHKLSRKLVSENELIVFSADRHKAIAAMFGKSVASSGHAQLRSMLAYKSRTGGTQYIEVDSRFSTRTCSACGCLSGPSGFAGLSVRVWVCSECGTQHDRDCNAAVNTLLAARSAVGTEIALCERRSTRARQKRADVIQAR

SEQ ID NO: 18538 - protein, 431 aa, Actinobacteria sp.
MPASAYVSVIGHETNYTEMVQLRYNYRLYPAPGQRSALARAFGCARVVFNDGLRARQDAHAVGLPYITDAELSAALTTAKGTPARAWLGDVSAVILQQSVADLNTAYRRFFDYRKALREWKAAGRKGPQPREVGLPRFKSRKDRRQAVRFTANSRFRVLPGGRLRLPKIGDVEVRWSRDLPSAPSSVTVIMDPAGRYFASFVVEATPGALPGAGPVTGIDLGLTHFAVLSDGTKIASPRFLRRAEKKLRRAQRSLSRKQDGSRNRDKARVKVARAHGRVADARREFHHQLSTALIRDNQAVAVEDLCVKGLARTRLAKSVHDAGWSAFTRMLEYKARLYGREFHRIGRFVPTSQVCSACGVKDGPKPLHIRTWQCQACGMWLDRDINAAVNVAKAAGLAATARGAQVRPGPRVPAQRGEAGTHPKPRREAA

SEQ ID NO: 18539 - protein, 417 aa, Ktedonobacter sp.
  misc_feature (81)..(143): Xaa can be any naturally occurring amino acid
MHKMFQYRLYPTKKHVTKLNNTLDECRWLYNHLLEKRKDAYEQRGESLTCYGQITTFSILKEEHPSLAIVHSQVLQNVAVXXXXXXXXXXXXXXXXXXXXXXXXXXXXXXXXXXXXXXXXXXXXXXXXXXXXXXXXXXXXXXXPGFPRFRGKDRYDSFTFPQSGFSITHDDRVTLSKIGSVKMVYHRPLKGKIKTCTVQRSSTGKWYVCFSVECEPQRLPEIATQVGIDVGLKTFATLSNAEEIPNPRFFRKEEKALVRVQRTHSKLAKGTPESRKHRKVIARVHERIAFRRDNFTHQESRQIVDRFGVICVEDLQVNRMAHNHCLAKSIHDASWTGFFEKLSSKAEEAGRQFIKVNPTYTSQDCSRCHHRHKMPLRERVYHCPCCLLVLDRDLNAAYNIKALGLQSVGLPLEAPRL

SEQ ID NO: 18540 - protein, 387 aa, unknown
  TnpB Polypeptide
VRAVKGVKFGYRSTPQTRELLSTFRDMINEAIRICLEENIRGRLELRSRTYGYFRERYGVVSCFPYSIAEVAWSIVKKHKRWHRRPYAKRFIFKTDCDSYSLSYSILSLPFKKGERILIPLQYGEYQRSFLMDKTLHRGSVTMTESSIVIAFSKDNPTCKPSRKVGYDLNEKSIVGSDGTVHDLSEAARLHTLYGVRRSRFSERHSHDRRVRKKFAGSRREKERVSQALHRISTLIVEKARANNEAIVLERLKGIRYKHKKGNAEGKSTRRRIAQWPFRQLQSCIDYKAKWAGVAIEYVSPSYTSKTCHRCGAINGKLKVTDRSWLCPCGAKLDRDLNAAINIERRGKIRCLGEVRPGARGTDEAVKGNETPMTPILGAEAPKSGPR

SEQ ID NO: 18541 - protein, 395 aa, unknown
  TnpB Polypeptide
MEQKRAYRYRCYPNVIQKHMLARTFGATRYVYNWALRLRTDAYYERQERVYYKETSARLTQLKKQEETAWLNEVSSVPPQQALRHLDTAFRSFFDGRTAYPSFKRKHGHQSAEYTVSGFHFVDGTLTLAKMGSPLKIRWSRPLPKDTKPSTVTVSRDSAGRYFVSFLVTEEIHPLSKADTDAAVVGIDLGITSLVTLSTGEKVGNPRHLTSDTKRHRKAKRSLSRKQQGSKGREKARVRLARVEARIADRRKDFTHKLTMRLVRENQTICCESLRVKNMVRNHSLAKHIGDAGWSELVRQLAYKSAWYGRTFVAIDRWYPSRKRCSHCGHVVSSLPLDVRHWMCPECGTRHDRDVNAALNIAAAGLAVSAGGEAVRPGRRKSDQHASGKPEFHAL

SEQ ID NO: 18542 - protein, 281 aa, unknown
  TnpB Polypeptide
MSGQYDITNNFLYLKNKIFKDTDVIKQIRIYPPENGTCTVIVVYEVNDAVMLSDNGRYLSVDIGLHNLMTCYAPSTGKSFIAGRKYLSVCHYFDKEIARVQSQWYKTQTKAGVKYPKMSKHVQKLYKKKNDCISDYLHKVTRFIAEYCHDNDINTVVIGDITNIRKDNNKGSVTNQKLHSLPYRKLYILLEYKLAMYGIRFVKQNEAYSSQTSPLMSEVCKENAEKSNRIKRGLYTDGDKRWNADCVGAFNILRLYFQTNGIEKQMDPLKIADPYVIKVAV

SEQ ID NO: 18543 - protein, 384 aa, unknown
  TnpB Polypeptide
MRRAYKFRAYPTRRQEQHARAMLNAHRQLYNAALEERREAWRHGVTIRYGGQSAQLTEIRRADPDGQGRWSFTSQQQTLRRLDRAFQGFFQRVRAGRTAGYPRFKSTARWDSVDFVDGDGARWRGPEGKWARAYLQGVGHVKVNAHRPVVGRVKTLRCKREGRRWYVIVVAEQQPVPLPTTGRQVGLDLGVARFATTSDGHVVPNPRFLAASVGELAAAQRALAGCRPGSGNRRRAKRKLARLHRKVANRRRDFHHQTAHRLIDACDTIAVEALNISGMTGSASGTVQQPGRKVAAKAGLNRSILDAGWGQFLVILLAKAEGAGRRVITVNPRDTSSTCHLCGACCERPRQDTVICPAHGGMDADLNAACNIFTRAGLGSGRAA

SEQ ID NO: 18544 - protein, 409 aa, unknown
  TnpB Polypeptide
MITAYKYKLRPKKAQAHQIDQWLNLLRMQYNYRLSERFNWYESTRSPINSCSLVSCSIAPIVEQPDYYWQKRDLLNTKQLFPEYKSIHSQVLQNCIERVKKAFDRYIKVDKSGKHSGKPRFKGRGRYHSFTYTQVQQDCIKGNRITLPKIGDVKIILHRPIPDGFKIKTAQIVKNADGYYVVLTLQDVIVPTISLDVNLDNAVGIDMGLKNFLITSDAETVPIPQFARIAQSDKKLRNKAVSRKKKGSNRRRKAVKRLAKHHLHIARQRKDFHYKAAKQLLDKYDVIGFEDLNVKGLAKTRMAKSILDAGWSEFLDILVCKAESAGKLAIAVNPNGTTQNCSNCGTRIPKTIADRWHSCHVCGLELDRDVNAAINVKNLAVGRTVNKAQRVSDADAGLAEKPTLYSSAS

SEQ ID NO: 18545 - protein, 359 aa, unknown
  TnpB Polypeptide
MFALKRSLKLNNNEATLMAKHAGFRRVVFNFGLSLRTQMYSEGKLSDSKVINEVKKVLTNHVKKQPEFAWMNQLSSRVYQNALIDLKDAFSRYRAGKAGHQKFASRRNGQSFTVDSSNGKVLLSAGKTIKIPTLGTFRLYEALECGYVSQTFTISKEGSRWFVSFCVDAERLPVQQPKSSVGIDVGIKYAAMLSNQQVFDAPKPFKQAKTKLATLQRQASRQVKCSNNQRKTYNKISRLHAQIACIRKDFLHKLTTYLAKTFNLIKIEDLNIKGMMANHKLAGAISDIGFYEFKRQLDYKCLMYGANLVLVDKWFPSSKTCSNCGNKKDMPLGLRTYDCPACGRSIDRDFNASVNILNS

SEQ ID NO: 18546 - protein, 405 aa, Thermoplasmata sp.
MLHRAVVFHIHGELPFEARMLMENFRLAVNCAIRAGLQAKVTSRNALVKLAYKDFRKEHPNIYSQHLVSSFEVACSVLKNLRRHWEKGPVRRIPYARRLMMKAENQAYKLDRENGVVDLPIRAGCHVKLRLVLSDYHRIFLNDKSLSFGSLTLLPDRVIIAFRKSAPRPYTPETALSLDTNERSLDGVFLGENECLPIQAAYPDVPIIQARHHDRRRSLQKRKAHDQRTSRRLCRREGKREHHRIEYRMHQVANAVLGFAEEHKSTIVLEDLNGMAARKRGKSLNRRLSSWPRRKLHSIIEYKAAWNGVPIIKIDPYNSSRRCPICGRVRYSRMGAEFECECGWRADRHVNAGINLLQTAFPNGMAGGLRFSPGAFQHDVVMTLYDPSMGARLELNGTSRSVVRS

SEQ ID NO: 18547 - protein, 408 aa, unknown
  TnpB Polypeptide
MSDIMILCERHIIKKSHPFYDECDSLTFLAKNLYNSTLYYQRDSFFNKDFKNYYDVNRVFTHTNQKDYRALPSKVSKQVQMLVDKSFKSYFALVKKKQSNDYSSSVRIPRYLNKTSGRCVVPYPKDALSLKNEGFVKFSKTNIVIKTKLSRKDIKAARIVPKGNHFVIEILYKATMKPLKSDKPKRVAFVDPGLNNLMTVTSNCFNPLIFNGKPLKSINQVCNKNISELKSKLSERGLRTSSLLQSVYARRTSRLTDLLHKITTQLVNHLDSHNIDTVIFGHNIGQKQDINLGKVTNQNFVQIPYTQLIHLLKYKCELRGIRFIETEESYTSKCSFLDDEKICKHSSYLGKRVKRGLFETLSGRLINADINGSLNIGRKYLTKVNMYTKQLHKDLVRCMVNPKVVTIR

SEQ ID NO: 18548 - protein, 392 aa, unknown
  TnpB Polypeptide
LKVTLRLKLHVDPATQSALRATLEQSTACFNVVCRYGWDNNERNGTRLHQATYKPLRKAHPDLPSQLIVSARMKAAEALKSVAERTKQGRKANCPQSELCPVRYDARSYWVRLADGCASLATTQGRVCVAFRLCDYYTRYADWKPCSAALCFRGGAFYLHVVVEADAPEPVCEGVLGVDLGIVELATDSDGNSYSGEAVKAVRRRVKRIRRLLQSKGTRSAKRHWKRIRAKQSRFVNNTNHVVSQSLVRTASHSRKALALEELGNIRDRADTVSRDAERRCVAPSYAKQMRWLLGNWAFLQLRPFVAYKAEAAGIPVVLVDPRNSSRTCSVCGHCAKDNRKSQSKFHCLQCGFEANADYNAARNLKVRGECSDALLCRSEAIASNQAQAPAL

SEQ ID NO: 18549 - protein, 269 aa, unknown
  TnpB Polypeptide
LPHLKKNYPWLGDVSSVPIQQSLRHLDRAYTNFFEGRAKYPMFKKKLGNQQASYASNAFTWEHGQLTLAKMDEPLAITFHRELPKGCKPSSVTVSRDGANRYFVSMLVEEDIKPLPALNAQVGLDLGLKSMVILSTGEAVGNPKFAASDEKRLAKAQRRHAKKKKGSQNREKARRKVARVHARINDRRRDYQHKLSTRIVNENQVMCVESLAVKNMVKNHCLAKAVSDVGWGEFVRQLDYKSQWYTRLSAFTYRTRITSSLAWVRREIR

SEQ ID NO: 18550 - protein, 353 aa, Deinococcus sp.
MTQHTTHHVIRVKRTAYPQLQQAVASGQLQPTQENLDVMDQGQVYQPVPQLLNAQNLVHDRELKLGTLTIAGEFSRVPEQEHTSIITASLGVYRQYPGVYPLLTALLVPMLPADEAAWLAGVRAAVAQGRQLAAGADMVDDIWVPTDWLRDRTRLIGLAGDWFIVLYFAQPDRRTVPEGRAVVGLDIGLSPLATAAAGQQQLATWPVAEPTVPAGEWAEVRALAETLSYAAARAALEDLMVHVLPQAGTLVMEQIDYVKFRGDFTATARRRAVADFHQSWMPQRAHARGITVMRVSPAFTSQICSQCRAHTLGTRQGPTFTCPQGHILNAHFNAAKNLVRRYWGQQARARRLT

SEQ ID NO: 18551 - protein, 421 aa, Proteobacteria sp.
MDDGSIHRMNDATEFRAVTFRLHPGTRAKHRKLAQIAGACRYVWNHFLACNRRDHATYKLRKLMFDAGLLIDKPSPPSLSFQSMGVRFTALRRETPWLQRLPYAPVRYALKYQAEAWTRAFAGGGFPRFKARRGDDSFTIPQDVRVRGGVLSVPKVGRIRLSRRGGNPYAEHPPVKATVKRVNGKWYCVVVYKVSTVGRPDNGLALGVDMNCGQVAASTGDLLRMPDMARLQARKRRYQRMVARRSKGSNRRHRARHRLARTQRRIATIRHRWHHETSRTLADTAGLLAVEDLKTKAMTRSAKGSAEHPGRNVRQKAGLNREILNTGWSQLRRMLEYKAAHVEVVPPMYTSQTCRGCGAADPASRKSQSEFKCVRCGHTGNADVNAALNIMASATGATGRRGALALATPMNRQNVYRRRAV

SEQ ID NO: 18552 - protein, 497 aa, unknown
  TnpB Polypeptide
MTIADSIITASKFYEDNKIFISERIQVKPSPELSKVCHLAKNLYNLANFLVRARFFFKQDNDRALDTDWLKELEHELFSRPARFDSIAAITQKYIKIRNQHIAKKSSENGRQGYGNKLARINYTELWRLVQYTEAYKKMNSHSAQGTLQQVISDWDSFYEAVDEYNDDKKILTPKAFNDKWKSPPSIPRYKKKNGETVAFFSNQHCRIRDGYLTFPGLTNSRYSKKWLSPVKTRIRGKFQTVRVVPRGTMYVIEIVYAKEVQDLGLNKDNVCSIDIGVRNIVTMVNNMGIKPIAVKGGVVKSINQFYNKKRAKLMYIKDKQQYSHWTKRLKKLETKRNNILNNYFHQLSKHLVDFWIENNIGSVVIGYNQQWKQEVNMGKRNNQNFVYIPFWLLIRKIMYKAYLVGITVYLVREPYTSSCSFLDGEEIGFHEYYKGVRKGGLFRASNGRVINADVNAAYNIMIKAIKDAITADEIEDAALHPRRVDWHLLPMTGRNC

SEQ ID NO: 18553 - protein, 466 aa, Gamma sp.
MKVTRVLNAKRPNKGKVAALREQARRLGQVRTEVWQRFGSVGGVGLSDRKIRDGWLKEGRAFPVSANAWKETLRDAKGNITACMEAAKVKVRQSVFRHIRDEAEQKRLFTALKRNEWTGDSYLRRLMRKHWHHGHNHTHNQIIVRSDNYTTFLLGGCVWIKIPGLVKGQRIAILLNTTITPTGTLRVIIKDDDRIEVHTTVNVETKQDCGKRTLGIDKGYSEVLVDSDGDHHGQELGQVLTEQSDKLKAKYQCRSKLRALANTTRNPHKREHIYRFNLGRKKLNRQMDKTHASIRDVVFQSVHKVVDKAAVIAAEELTAPMSGKSFGKNVNRRLASWTKGVIAEALDSVSSRRGSAVVLVNPAYTSQIDSRNGCLLGKRQGDRFYCFDGVVLQADQNAARNVLARLSDLDIDRFMPYRQVKTILQARTERLRLGLLNQDSSCSPVRVLSTESELPKNCHEQLCLGF

SEQ ID NO: 18554 - protein, 398 aa, Streptomyces sp.
VRLRYNFRLYPTPGQRVALAKAFGCARVVWNDGLRVRQEVHAAGLGYLKDADLQRRVIAEAKKTPERAWLAEVSNVVLVQALRDLHKAFRAFFDSRNGTRKGPKVAPPRFRSRKDRRQAIRFTRNGFTLRPNGRLYLAKIGEVAVRWSRPLPAEPSSVTVIQDAAGRYFASFVVEVDAAPLPETDTEVGIDLGLHAFAVLSDGRVIASPRFLRRAERKLKKAQRALSRTQQGSKNREKARRRLARAHARVADARRDFHHQLSTKIICDNQAVYVEDLAVNGLARTRLAKSVHDAGWAAFLAMLEYKARRYGRHFARIGRFQPTSQVCSTCGVLDGPKPLHVRTWTCPRCGTTHDRDLNAARNILAAGRAERRNACGAGVRPGPGLAAGGEAGTHRGAA

SEQ ID NO: 18555 - protein, 382 aa, Escherichia sp.
MRRFAGACRFVFNRALALQNENHEAGNKYIPYGKMASWLVEWKNATETQWLKDSPSQPLQQSLKDLERAYKNFFRKRAAFPRFKKRGQNDAFRYPQGVKLDQENSRIFLPKLGWMRYRNSRQVTGVVKNVTVSQSCGKWYISIQTESEVSTPVHPSASMIGLDAGVAKLATLSDGTVFEPVNSFQKNQKTLARLQRQLSRKVKFSNNWQKQKRKIQRLHSRIANIRRDYLHKVITTVSKNHAMIVIEDLKVSNMSKSAAGTVSQPGRNVRAKSGLNRSILDQGWYEMRRQLEYKQLWRGGQVLAVPPAYTSQRCACCGHTAKENRLSQSQFRCQVCGYTANADVNGARNILAAGHAVLACGEMVQSGRSLKQEPTEMIQATA

SEQ ID NO: 18556 - protein, 410 aa, unknown
  TnpB Polypeptide
MEKVTYKAYRFRLYPTKEQEIFFAKHFGCSRFVYNYFLNERIKYYTEHKNDAKKGLTYIDTQRMLVELKNQPETIWLKEVNSQTLQVSLQHLDTSFNNFFKGISKFPKFKKKSHEQKFSVPQSFKISGKELFIPKLKSGIKFVKHREIVGTPKSLTICKRPSGKYFVSILCAIKQEVVEPKPVEFSGAVGIDLGIKHFAVLSNGEKIESPKYLRKSEILLKRRQRKLSRKVKGSKNFHKQRVCVARLYEHISNQRDDFLHKLSHRLVCENQALFFENLNVQGMLRNHRLAKSIFDASWSKFQTYCKYKAENFGKVYLQIGRFEASSRTCSKCGHINNELTLDVREWKCSNCNTHHDRDVNAAKNILNLGYISYSKLPTEYREVMPVEKRKTFHRKVEAVSAKQEAATSLG

SEQ ID NO: 18557 - protein, 398 aa, unknown
  TnpB Polypeptide
MLIAHRIALDPNNVQATYLARAAGTARFAYNWALAEWKRQYEAWKANSSLPKPSQQALRRQLNAVKREQFPWMLEVTKNAPQMAIMQLGKAFQNFFAGRTRYPTFRKKGVHDRFTMTNDQFDVDGSRIRIPHLGWVRMREALRFVGRIMSATVSRVADKWFVSITVDAPDSSHLPQAENQGAVGVDLGVSALATLSTGEKVPGPRAHKALLDRLRKLTRSLSRKVKGSANRRKAKAKLAKLHARIAAIRSDAMHKLTTGLMRRFHTIGIEDLNVRGMMANRHLARSIADMGFFEFRRQLEYKAAMRGGVVKVADRFFASSKTCSACGHKLETLALSVREWVCPACGAVHDRDVNAAINLKNMAVSSTVAACGEEGAGPTRKRRVKPSSMKQEVSFIHV

SEQ ID NO: 18558 - protein, 387 aa, Methanosarcina sp.
MESTKTIQLKITDIDSDLVETMQKYSDGMNYVSEIVFQNGKVLPAMKLQKMVYPYLREKIGLKSQVSCNIPRQVAGSYKTLLEQIKCKKTKWQKLQYTPSSMTLSYKRDYTITEDSVSITTFSSGRKTYNIQNYDYAKEYFKEPWKFTASKVTKHDDGDYYFHLTVSQKIEEPAIEEASNFMGVDVGINYLAVASTTDKKCKFFAGGEIKNQRNIYSKMRARLQSKGTLSAKRVLKHLTGKEQRFMKDVNHCISKSIIKFAVQEKVSIIGLEDLTNIRDTTNVRKKQRYLHNSWAFRQLQGFIEYKAKQVGVLVEYVDPAYTSQTCNRCNHISKNNRKGLRFHCEACGFEMNADLNGARNIEHRTRDFRYIVESQGCLSTIHTDNLS

SEQ ID NO: 18559 - protein, 371 aa, unknown
  TnpB Polypeptide
MKKSFKYRIYSNTETIQKAEKWLNLCRQLYNNCLKERIIAYKERKESISVYQQMKKLPHFKKAFPEYRKISSQTLQDVLQRLDKAYQNFFRRVKKGSEKAGFPRFKGYHRYDSFTLKQTGWKFNDKYLLLKNIGKFKIKLSRPIEGVIKTITISRNSSNKWFVCFSCDKVPLKPLPKTNKEIGVDMGCESFLTDSNGDKVNNPRFFKKSQRLLIKRQQKLSHKKKSSNLRNRARILVAKAHEKVFNQRKDFHFKIANQLLKENDIVYIEKLKLWKTFRNLNSSMRDVAWFGFFNILKAKAEEAGREVIEVPARNTSQICSNCGIIVPKDLSVRVHNCSCGLVIDRDYNSALNILRLGQSLQGAETLVSAMN

SEQ ID NO: 18560 - protein, 520 aa, unknown
  TnpB Polypeptide
LAKNRTYKAFVARPSHVLNLNGELLDSVPIMAELASEVRDISAYATYVVRNDVALGKQLAAVATSVPADAGRQAGVKLPEFLNTGSGRSRKEKMLQYNVVTSCRSWQARVKVANGESSKCVSQGWKRAASAATPSYGEDYVNLGAVDRNYARIENGPFVDGEIILRMVIQGQWYWIVFNFDNRRFTEGKVTLPIIKVHDGRPVFIFTVVIDNPIAQFSGDYTIGVDVGITDYATVVVRDVKVGRIVHETTLSQRVHSLWNSARASERQVRYLRKKAATLLRNRQARMAVLDEAKFHREAATRKRRELAILAAQEIADLSHLWGNAVVAVEDLSWISNTMRNGRWNRGAFVRWLAYYVSQNGGWVVAVNPANTSQRCHKCGARVSHPTHKLSVCAEHGVMDRDVNAAVNIASRVVPRVVKARATRAKNRKLQTQLPLRTPPARASLKYPGRDRTKNVPTPKRGTRRTEGVKLPLSPARVQAPCLVTGVLADQGARGALGTSVATIKQGASVDYEYPLCIPI

SEQ ID NO: 18561 - protein, 390 aa, unknown
  TnpB Polypeptide
MAVRKVAQRIPFTSSETQAALLEQCFGARRFAYNQQVEAFNSYDKDTNPRPSYPNVTDMKNENEWLRDSPIPSNALSNAIMDFRKAQSEYFRKAQYGKNRPCFASKDDSVQSFRNGKPMCHMEGNRYPLSKKLGSVRIRRRDRIRYPLESLSSWTVKRENGVYYLVLLFNVDVQPRPPVSGEVGIDVGVKDFLTLSTGEKINYPDRLHQLEEKVRWEQRKLSRRVKGSSNYRKQKAVLAKAHAKVRHYRENFQNQVSHKLIEDNQFIGMETLAVGNMTRKAKKKLDENGKYTRNGQSAKRAMNRAILRNGWSSFAGKLAYKAQWYGRTFVQVDRFYPSSRLCHDCGRKYDGLRLSEREWVCESCGVLHDRDVNAAMNILGEALRLSQTAG

SEQ ID NO: 18562 - protein, 573 aa, Haloferacaceae sp.
MGTSSRRHRAALPEFHDAFWGTRARVSVIIPPHSHRGGFLDLLTDKRRKLRETREAYQHALQDAFDAGCTTQTEANDVVVNYDLSGYAKNALKKYVPQLTTTYNAGELHDDHPVRFTNEGLRLDHKPENAIEWYVKIPHHEDYHLWMPAQPNPEQRDWLEALNAGDATMGESRLFERDGTWYLHVTATRDGEERSEVSDEERTPIGVDIGEASLVTVCHRDDHGSPTAPELWADEGKTVRRLRKTYFTAKRRLQSRGSERIAESFGDDVWNQIDDVFHRVTREVVEYAESVENPVLVLEDLTYIRESMDYGDFMNRRLHGWGFAKLHAQIRYKAVEKGIPVETVNPRNTSKECHACGEVGYRPRQVSFKCTNDSCWLDEYQADVNGAVNIADRYRSGESRSREHENGDDSAEDGARLTAPQDSQADADTQQEMLGTYASRNRRAEQALALKSCGRIPATVGAGGGQLMVEEKMCWPPQFCMIITNKQVGGDRRTGSLIEPDLLSLQSSTTGRAGCVAITPFPFRSLVSGPSTLLDILPRLRTQESSRMGSGPSPVPIVSDFPLYRERTLVCAQ

SEQ ID NO: 18563 - protein, 438 aa, Haloferacaceae sp.
MGSPPTKTKQFRLHIEEGDRSWLKDARFTSREVFVRSIELKQRGLSRTDIQRHIKPDDYLANNKCAVVGKALATWGSYQKLRSQWLSLDNPEDYPEPGAPSTDRKGAFPLVMAHGEGYRLTVRDDGRVGFSISAKPYKKVSGFLRGRHSDIGLLKDALTETDGEYGFGQAEVLYREGVYYLHVPIQYNADIPDKSDAETVIGVDINERNVALTALNRETLATKGTLVFDYGPVKGERARLHDISRRCQERDQHSIYRRIGDKEERYVNWVLYRISAAVLAFAETFDAPTIVFEDMSGIRDGMDYGTFMNRRLHRLPFRALQDQIEHKAAWNEIPTFEVDAYYNSQTCSCCGERGTRRKGRFTCRNDECSLQQDHADRNASVNVAWRGVRRISSDDEPADNYRTRKTQPSVRLVSLCGSGRDVNRPTSSAQLAARGVLN

SEQ ID NO: 18564 - protein, 408 aa, Haloferacaceae sp.
MTTATKTLEATLAPPTAHKEEKLRDTLGTYREALADAFDSGADTMGDVSDVVTPFDLPYQAKAALCSYVPKLRKTYNARELDDEHPLRLTNQAAKFDHSDERGHEFTWWVPRPGRGTNFWIPLRINPEQRELWFDILNEDAKAGEIRLQQHRKNWVLHVSVEYPIDEPTADGDTTPIGLDIGETALITACGLKRGTPTRPVLWSGKRAKHLRKEMSTTLQRLQERDAEWRVDERFDYYQNALTDIIEKASREVVDYAATFDNPVIVMEDLTYIRERLDYGKFMNRRLHTWAFARLQRRVEDKATDAGIPVEYVNPAYTSQTCHECDHLGKRASQAEFRCTNEDCHVSTFQADISAAASIAKRVNPWGESVPWKLERNDSPRDGSGSDTAVRPPKPSAPTQMTLGAYES

SEQ ID NO: 18565 - protein, 403 aa, Actinoplanes sp.
MTTKAVKRAFKFRFYPDDAQAAELSRTFGCVRLVYNMALQARSEAWTLRQERVNYNATSALLTGWKKTEELAFLNEVSSVPLQQALRHLQVAFTNFWAKRAKYPRFKSKKKSRRSAEYTTSGFRWREGRLTLAKMARPLNIVWSRPLPEGAGPTTVTVSRDAAGRWFVSLLCDNTIAQAPVVNAAVGIDVGLDSLLILSTGEKITNPKHERTDRKALAKAQRAMAKKARGSNNRTKARVKVARVHARISDRRRDLLHKLTTRLVRENQTLVIEDLTVRNMVKTHSLARAISDAAWRQFRTMLEYKADWHGRELIVVDRWFPSSKLCSACGELAERMPLSVRSWSCRCGAVHDRDVNAARNILGEGLSLIACGGGVRPQRESSRTGQSSVKQENPRVTKGIPVP

SEQ ID NO: 18566 - protein, 366 aa, Brevibacillus sp.
VNIVLCKKAFRFRIFPTHEQAVLISKTLGCSRFVFNRFLARWNETYKQTGKGLTYHSCSAQLPPLKKEPPLKKEFPWLQEVDSTAIQSSLQNLADGFIRFLKKQNEAPRFKSKKNQVHSYTTIHTNGNIRINRNQIRLPKLGWVKFAKSREVEGRILNVTVLCEVPYSSYVQVDKKKSIGIDLGLKDFATFSTGEKIRNPKYLRLYEKKLIQWQKKLSRRQRGGNNHEKARRKVAIWHEKVANTRKDFLQKLFTRLIRENQVICLEDLQVSNLIKNHKLAKSMADASWSTFRDMLVYKAEWYGRTISFVGEQFPSSQLCSTPNCGNRNTDVKNLNLREWTCSNCGTLHDRDENAAINIECEGLRLL

SEQ ID NO: 18567 - protein, 380 aa, unknown
  TnpB Polypeptide
MDRTLRLPLNPTTEQAEALLETMRQFTQSFNLVCAKGWRLREGNAYTLHKLTYRESKALCPKLVSDLHVQARQKASEAVKSALTRSKKKRNAGCPQSTLCPPRYNCNSFSVDWQKGIANLATSAGRQKVSFAVPVYASYMIGNRVATADLVFRKGRFTLHVVLKLDDVPFTDNDAALGVDLGVCRPAVTSDNRFHGKNHWREVEKRRFRLRRKLQANGSQSARRHLKNLAGCSARFRRDCDHVLSRSILHGITAGTTVVVENLTNIRTRVKATRGEAKHRLHAWSFAQLKAFLEYKAEALGCRVVGIDPRHTSQRCNVCGFTYRGNRKSQSEFCCRSCFHKQNADLNAAKNIRDKHLVGWVSDPSGGPPSIGPSSQSSLA

SEQ ID NO: 18568 - protein, 292 aa, unknown
  TnpB Polypeptide
MDARGRIYCTPKEFQNVLPGTSKSLGIPTPPIRGMLALAYQSWQRCYKKPRHKGRRNRLNSIPFPDPVIYLPVEGRIRVPGLGMVQYHKRDVPRGKNKNGRIVRRAFGWYRCMFIDAEQKAIPATGDGAIGSNPGFKHLITVCTGERVDHRKELQASLGRAQRGASLKERISNQRRQRHHHLNRRAVEENAVIVFSKDNLRGLSRADFGKSVAAAGGGQLRSIFDYKNRAGGRQYDDVSGKGSARTCSRCLAPTVPKERARLSVMQWPHNSNINAAVNSLVAGVATTRERSF

SEQ ID NO: 18569 - protein, 416 aa, unknown
  TnpB Polypeptide
MNRTNTILLAPTEAQEQELHMLADASAQLWNMANYQRRQTYFKDGRVPTYENQWRTFKDSEPFKRVGTCKGQALLLKLREAWASYHALKRLQKRGQLPDHIKRVSPPRYMKDRNTRERIANTIYVRNDGYRQDGDSLVLSKNLRVRFKAGDLWLGKQGRLELHYDRVRERWYGRIPIRVKWSRKGKPHHLTRKRASIDLGICNLATCVVEDCDKAYVYSGRAVLSDWRYWTKRIASYESILKKTNQRDSSKHLSRLYRTRRRRLDHAVKGMLRDLYEHLEDEHVTDLIVGDLKHIRDNANHGKVGNQKLHNFWPFAQIRQRIHELGEEYGIRARFKSERGTSKHCSLCGEVHKNGRVHRGLYQCKSQNIHMNADVNGATNILYGLQGKVAAGSGSRPMAWPLLLKWNSQAWDVSAA

SEQ ID NO: 18570 - protein, 329 aa, Coleofasciculus sp.
MDSDLPDWVKNAPNHPRENAIFDAHDACKQAKKQGGNARYRSCREPVQAIKFNACNFKSGTWYPGLVKKLNFKSSEPIPSNCEYATQLVRDRQRWFAIFPTRVEAIKTVSNNVIALDPGVRTFLTGYDGSSLLEFGKADIGRIQRLCSHLDKLISSSAKACRKQKRQMYKAASRIRIRIRNLIDECHKQIANYLTTHYRVIFLPTFETSQMVVKSKRKLNTKTARAMLTWGHYRFERHLKQVASLRSVVVVDVNESYTSKTCTACGFVHEKLGGSKNFKCPSCGHKHDRDWGGARNIFIRALRDGSFALSLSVEGIAIASDVFVNICSA

SEQ ID NO: 18571 - protein, 400 aa, unknown
  TnpB Polypeptide
MLKAYKYCINPTDEQKTLINKHLGSCRWLYNYALNKKITAYQKTQTNISRFALQAELPLLKKNSDTEWLSEINSQSLQAELRNLDMAYTRFFRLKKGFPQFKSKHNNRQSFQIPQRTQIDWENENIILPNIKAVPIILSRKFKGTIKTVTISRTPTGKYFASILVDTALVLPKKPKLNADTTIGIDLGIKDFAILSNGEKIANPKYLKNDLIRLKCLQRRLSRKVKGSNNWNKARLVVSKQHENITNKRIDFLHKFTYKLTHENQVDTICIENLAVNNMLKNHCLAQSISDVSWYKFKELLTYKCDWYGKNLITIGRFEPSSKLCTCGYLNKELKLSDRTWTCPNCNTTHDRDLLAANNIKTMGLHPKNYSGTGCSGGLLELSAIAGAKKEENILIPINV

SEQ ID NO: 18572 - protein, 372 aa, Clostridiaceae sp.
MLKTYQYRLYPNKTQEAQMNSYLALSCRVYNALLEFLQEEYEQHGKSYSKFDKVSLVDQWRRENKCLQVLSSAMNRDIAHRVHLAYDAFFRRVKAGEKPGFPKFKKARYYRSFGVRQWGNCKILKDGQNGKIRLWDLGEVRCWFHRPLEGKLKTWTVRKTPTNKWYISFCVEVAEQKTAETGKAVGIDMGISSFIATSDGELMGQVDVLRQNLAELKRLQRAVSRKKKGSSRRKEAVLQVARLHERVANQRSWIHHNVARSLLERYDLVVVEDLQIKNMMKNHHLALSISDAAWGNFINILSAKADEMGKIVYKVNPRNTSQECSQCGVVVAKTLSDRVHDCPECGLVIDRDVNAAVNILQRGLIGEEKLSA

SEQ ID NO: 18573 - protein, 317 aa, unknown
  TnpB Polypeptide
MKATEALKSIKTRLKKGQKATCPKSEQSSIRLDARGYNIWFNRGEISILTVNGRKRFPITIPEYFKRYLDWRRGSADLFLRGKSVFLHIVFEKDIPDPEPTGKIVGIDCGIRKIAVTSDNKFFNGGEIRKVSNRYEKLRSVLQSCGSKSAKRHLRRVSGKENRFRRDANHKITKQVVRSIPEGTTIVLEKLKGIRQQARLRKKQRGELHKWNFSQFQQFLIYKAEAEGIAVRYVNARYTSQKCSRCGYISRSNRMSQSLFRCKQCGFSLNADLNACRNVRQNYLDAICHPGRAIVNQPIVASPCDSATSCPPCGGSS

SEQ ID NO: 18574 - protein, 119 aa, unknown
  TnpB Polypeptide
LHKLSSKIINENQVIILEDLKVKNMLKNDRLSKFISDSAWAKFVKMLEYKALWYGRAIVKVDTFYPSSQICSVCGYRNEKVKDLSIREWECPKCGARHDRDINASINIMNEGKRILGIA

SEQ ID NO: 18575 - protein, 406 aa, Anaerovorax sp.
VRFTGLESIKNRQRKIRKLLKAYKTEINPINKQKIIIHKTIGVCRYVYNFYLAHNKEIYEKEKKFVSGMDFSKWLNNEFIPRNQEYSWIKEVSSKSVKQSIMNADRAFKRFFKHESEFPRFKKKNKSDVKMYFVKTDAKVIIPCERHRIKIPTLGWVRLKEKGYIPTNKIIKSGMVSYKAGRYYVSVLIEENDINQTTLDKEGIGIDLGLKDFAICSNGLIKKNINKTQQLIKLEKQLKREQRKLSRKYESLKQRNKKLKGEAARQNIFKQKLKVQKLHQRIENIRTDYINKIVNEIVKIKPSYITIEDLNIKGMMKNRHLSKAVASQKFYEFRTKLEVKCKELGIELRIVDRWYSSSKICHQCGSIKKDLKLSDRVYICDKCGYTRDRDYNASLNLRDAKTYKIA

SEQ ID NO: 18576 - protein, 391 aa, Anaerovorax sp.
MKKSIKVMLLPNNKQKTKLFQYANTARFAYNWAIAREQEKYKNGNKFISDNDLRKEFTELKKTEEYQWLNNISNNVTKQAIKDACNTYKRFFKGQCKYPKFKNRKKSIPSFYQDNIKIKFSNTHVKVEGFSESKKQNKQKINWIKLAEKKRIPTNCKYTNPRITFDGLNWWISVGIEYENSNVIPTNQGVGIDLGIKDLAICSDGNTYKNINKTSIIKKLKRKERRLQRSISRKYIQNKKGEKYCKTSNNIKSEKELLKIKKRLTNIRHNYLHQTTTEIINRKPMFIVLEDLAVMNMMKNKHLSKAIQEQCLYEFYRQIQYKSEWNNIKFIEADRYFPSSKTCSECGYINKNLKLSDRIYICPECGNKIDRDYQASLNLEKYGENVLKSIA

SEQ ID NO: 18577 - protein, 419 aa, unknown
  TnpB Polypeptide
MYETRVGKLDCDITTFWLLSRMGFVATKLYNTARWNAQEVWDKTGKIPSGFDLQKVVLQSPYHDMLPAHTYQHTAHQVSMAFRSWFKLRKKDKTAQPPGFRKKSRLSSFLFTEYGFRIAKNGCILLTVAKKLRNELDYQSKYLALHVIWGTHMPKNGRIQQLEIIPRDGFFDVHAKIQLPEPQWKTEGQIIAIDLGERVPIASADENGNTDIFKGGKILSDMHYWNKEKARVGSEVMERSNGKRKWSNALQRMSEHGNRQKDQSIHALALTFVKLCNERNIKEVVVGDLANIKKEKDGTGKNWRDKSSQNWQQFPIRKLVTLLRYKLARHGIRLIEIDERGTSKGRCSLCSSTTNLSRVHRGLFLCGNCKTYQHADVNGARNILHRYLHQVGKSIMGSSGSLADPMVWRWDNHTWGVVA

SEQ ID NO: 18578 - protein, 486 aa, Nostoc sp.
MPSLTYVKGLPTPLDELNALGFTNFEMFLEAFAPIFRDAAIETVNHLLSEAEFNKSTWNTHLQKTYQISKRHANGVIVYAKGKVDGSKEHRVLHLKTLEGKAKSIEAWIKKAERKLKLARKFYAKKNWQNSKTGCNFPLSCSLSYKDTNWQNLKFQIHHKKRKLYLIQSKIKFLKYKLIKVAVPHGQVFIVGSKDESFGNQIAQWDGKSITFRVPTRLESRFGKYVVSEVGNFDRNINRLSETGSKTWHLFKKDGKWNVAVQFTPSEVKRQSKDRNYGCIGIDMNPGSIGWSYVDTEGNLKAHGQIPLKMGLPSGRQQAQIVDACLSLANLAICFACPVVCEELDFANKKERCGEESRKYARMLSSWAYNRFYELLESILSNRGIELLTVNAAYSSLIGLVKYMKMYALSSDCAAALVIARRGMTLSERLPSAITAYLSVNDRKHVWHWWLQLNKQIKRSGKINRRHDYFTVPNWSFLANLETEEA

SEQ ID NO: 18579 - protein, 341 aa, Nostoc sp.
VWLADCYSQVLQATTLNLTTAYKNFFEKRAGFPKFKSKHALESIQYPQNVKIVDGNVKFPGNIGIVKAKIHRAIEGKVKTVTVSKTPSGKYLASILTEIEGESPITSEGKIYGIDLGLKHFAVVTDGAKVSKYDNPKHLAKHEKNLKRKQKKLARKVKGSKSRNRYRKVVAKVYERVSNSRQDFLHKLSYKLVSDSQAVIVENLNVRGMVRNHKLAKSISDVGWGTFTNFLAYKLERRGGKFVEIDRWFPSSKLCQKCFYQIGEMPLDVREWTCPDCNTHHDRDANASTNIRAEGIRMIKAEGSAVSAVGGEVSPTLGRKSKFRHSPVITEAPPSALCRVG

SEQ ID NO: 18580 - protein, 281 aa, Nostoc sp.
VTPNCKAKKQGLKGYPRFKKYSRSVEYKQQSWKLHPTKRRITFTDKKGIGELKLLGKWDIHTYPVELIKRVRIVHRADGYYVQFCVKVDNTQEVSLTTSEIGIDVGLEYFYSDSFGKHEENPRYLRKAEKDIKRVQRNIYKNKKGSSGRRKARGVYARKHLKVTRQRNEHAKRLARNLCLANAKVVLEDLNVSGLVINHKLAKSITDASWYNFRQWLEYFGEKFGREIIAVPPHFTSQECSNCGARVYKSLSTKTHSCSHCGHTEQPDVNAAKVILSRAFR

SEQ ID NO: 18581 - protein, 416 aa, Nostoc sp.
MSITRRITFRLYPSPSQAKTLSCWRRLHKDLYNAAIANRKNQYKHFKKSVDYYEQQNCLPEFKEVWYEYKQLGSHALQATLKRVDMAFQRFFKGLGGYPKFKSIRHYSGWTYPCIAGWKAISRGKNGHLELSNLGKIQMRGTARTWGKPTTCTIVNRQGIWYASITVQCNPVRGTGAGAVGLDFGCLTAVAMSDGNIVENPRYLATTQAKIRNASKSKRRKTKPDFKQKIIASKGWKKANKRINKLQRKASNQRSNWIHQVATEIVSCNSLVATEKLNIKTMTRKAKKGSKRKSQKTGLNRSILDVGMGMLRSAIEYKLSEAGGIFVEVPTVKIKPSQTCPKCGSQKKKELSERIHNCPCGFTCDRDVAAAMVMLNWAMGTGTDLIKRGSDSSTSTHCGGFKQLSDMKRQKPRPSS

SEQ ID NO: 18582 - protein, 318 aa, Nostoc sp.
MKTLKFKLYQHKGNKFLKRMINASGLIYNHCIALHKRYYRMWGKHLNCAKLQAHIAKKRGRQEFWQLVGSQAVQDICQRIEKAYQLFFKHNKKGVRPPGFKKVRKYKSFTLKQAGYKFLGGNRVKIEQKVYQYWNSREIEGKIKTLTIKRTPLGELFMVVVVDSIDEPEIKLTTGKIAGFDFGLKAFLTCSDGSTIESPQFFKQSLNIIKKASKHHSKKLKGSSNRERAFENLVRAHEDIANRRSDWFWKLAHDLTDRFDVLCFETLNLNGMKRLWGRKISDLALRDFLDILEWQALKKAKQVVYRTHLISLKVQQAS

SEQ ID NO: 18583 - protein, 292 aa, Nostoc sp.
MSPIRIQVLSGVKFDDLCEVRIIPKTGCFIIEVVYEIPPKSDFFCSLSAGLDAVIDIGLDNLAKIVFNDLTIQPIIVNGKPLKSVNQFYNKQVAKFRGFLPKGIGKSRRIANIVRNRNQFVNSYLHQSTKMIVDEFLSLGVTHVSIGKNEQWKTRLNLGKRTNQNFTQIPHAKFIEMLTYKLERVGITVKVAEESYTSKASFIDWDIIPTYEPNNKVRHVFSGRRVKRAWYVSKHDFKIHADVNAGLNIDRKSNPEGFDCLKSILRDRGCLVVHPRRITPLFKRVHAESRVA

SEQ ID NO: 18584 - protein, 278 aa, Nostoc sp.
LYKTAGIYLEKGKPALPFTNRVVINPGKLIRLPGLKKLRLKEQIDFICSSQTFTVSRTADKWFVAFMLDAQKIPPIIHPIKRIGVDLGVKVLATCSDGTFYDMPVTTKKAKIKLGKLQFRNRNKVLGNKKLKIRASNNARRYYTQLARQHSRIANIPQDTTQKMTTDISRKSAVIRIEDLNVQGMIANHKLAQAVSNNCFYEIRRQLTYKQPFYGTKVELVDRWYPSSKMCSKCHHIQQMSLSDRIFLCKSGCGNIRDRDENASINLKDAPIDKIRSA

SEQ ID NO: 18585 - protein, 445 aa, Nostoc sp.
MGVQQCLIDADKETKALLEYLCEQSGKLYNTGIYLARQTFFKTNKLLTGKFDLAFEPLIAKSMLAQSLPSKPMQQTLMSVTEAFKSFKEVRNLYLKGEFNFRPKAPGYLKGSKLFKVAYPNSGGQKPTLINGQLRFSLGLTVRRWFGVSEFFLPMPSNIDYSRVKEFTILPKNGAFYLEMSYKVEKQKHDLDINQALSIDLGTADNLAACVDTLGNSLLIDARAMKAMNQLWNKKVSTRKECKPEAYWDNWLDRVTRKRNHQMRDGINKAAKLIIDHCLKYGIGTLVIGWNEGFKESANMGRVNNQKFVQMPLGKLKDRLKQLCDLHGIRFIETEEAYTSKASYLDGDSLPVYGQKPVGWKALGKRVERGLYRSANGSIVNADLNGSANILRKVASNLSLDLGLLGRRVLTTAARVRLWTLPKFTLSAESQTLKGLRVSTLVYNS

SEQ ID NO: 18586 - protein, 408 aa, Nostoc sp.
MKQVLTVSCKIQVTPEQVAKIDATLQAFADACEYVNKTAPPTLVNELAMQSLVYHSVRALFGLSSQLAIHAVRRVSGNRKTAKQKGKPVTGFAPTSATYDVRTFSFREKDWTVSLTLIGGRERLTLAIGNYQRGLLKGQNPKTAALVKRNNGTYYLNIQLESEPPTPEKTDIVLGVDLGRTDIAVTSNGDKFSGQNITKIRDKYARVRAQLQHKSAKGTRSSRRRCRQLQQRLSGKERRFQTHINHITSYQIVKGAKDNNQMIALEELTGIRERTNTLPRSKRERRLSNSWSFYQLRQFIDYKAIKFGVKLVLVDPRYTSQTCHNCLHIHPLKGESYRSGKKFVCSNCEWVGDADLNGAKNISAIGAVIVNQPRGSGLSCKLEVRKIEYVQLSLFDISRASESSHLSR

SEQ ID NO: 18587 - protein, 627 aa, unknown
  TnpB Polypeptide
MGVRFEGTREKRRKNEMEANQRIKGLQVQQEDIIRDKKAIKAAMVLARTDPNLNAKIGASRISKITSNQRNITRSAYYWLFVAAKGTVDREKKAEEFFDQLLQRPEQAVEWIIFGRSPRMEKYLYKKWEVRRPYVINLIHGIRRKIDKYCPAKLKLNSKLPLLTQQEIERAIIRCYKKKCKELTTPQKNRSKDEFLTNLRLLAENVSIVAPMLTAWNNIEQPSHWKSIGELNKRIAEAVGKPKRVFFSALRTVIVFALFPQIGKTVKEIIEKTHPEKVINPPYKMKKKGRAPIILLTNERHLVMRPGDSEHMTFLARSEGEFEIGFLLKNHPRITAKLIFSKKVRGYLINGARIRVLYIRYSSAPNYKVRVSVVLEGPEEVFISTKLTREFAKNIKVTKSDYIGIDINRVGKHMMVFSNEAKIPKKLLVLADRYHKLRKTKIPELSYSLTNLGKKKQSPRYVKAKGELSRITQRKYRILKEIKNTLPHFLAAVMVEAKCKVLVHEDLEIDPRGKRGALARAIQTMPNNSNILDKAILIASSILGFELKKESVDWRGTSRYHNGCGGIIERTPKKYDRAPCKRCGKTVNTHTNAAKNVRDKGIKKLQSDHSSPHVRSMGDSPSSKSKP

SEQ ID NO: 18588 - protein, 417 aa, unknown
  TnpB Polypeptide
MDKTYILPVPEEYQVLARELSIESGKIYSKAVSFLKRMNKKGIKISRKTFDRYMELWMHQKDFVLHSQSKQAAYQQVWAAYSATLKKIKKTKKKNKDVSKIRLPYRNKKYNKVCFKNSAIKQDGYNLIFSNMKGAEKIVITVQNFEARPKYAELIYHADKNRYYMHVVVEIPDKQANSEKEDRAVAVDPGVIHPMTCFDGKHVTIYNGGILNSLIRYRNKKLAEIQSKLSKCKKGSKRWKRLQRAKRRILRKVKNQIRDVLEKYTSHLIGYCVKNGIGTIVMGDVTGIRKNKKCNKVAGQKIHQWLFKRLEKRLRAKATFAGIKFEKVKENGTSQVCPVCGSRNKPENRNYECSKCGFRYHRDGVGAINIYKKYTGENPLVVGRLACPTGVRFKAHLCCPVEWNTHPWVKNSTGKTA

SEQ ID NO: 18589 - protein, 402 aa, Escherichia sp.
VKRLQAFKFQLRPGDQQECEMRRFAGACRFVFNRALALQNENHEAGNKYIPYGKMASWLVEWKNATETQWLKDSPSQPLQQSLKDLERAYKNFFRKRAAFPRFKKRGQNDAFRYPQGVKLDQENSRIFLPKLGWMRYRNSRQVTGVVKNVTVSQSCGKWYISIQTESEVSTPVHPSASMVGLDAGVAKLATLSDGTVFEPVNSFQKNQKTLARLQRQLSRKVKFSNNWQKQKRKIQRLHSCIANIRRDYLHKVTTTVSKNHAMIVIEDLKVSNMSKSAAGTVSQPGRNVRAKSGLNRSILDQGWYEMRRQLEYKQLWRGGQVLAVPPAYTSQRCACCGHTAKENRLSQSKFRCQVCGYTANADVNGARNILAAGHAVLACGEMVQSGRSLKQEPTEMIQATA

SEQ ID NO: 18590 - protein, 403 aa, Anaerolineae sp.
MIRAHKIRLNPTDEQAAFLTKCCHTNRAAYNWALAKWQEWRAMGAKPSAMELKRLWNDQIDRLRPWARESFRDAYASAFDNLGDAFSRYFAGQNDYPKFKKRGKSRMSFTLANDKFSVEGYTAKLPKIGAANMAEALRFAGKIVRGTVSMHAGHWYLSITVQMSDAPRAKTGRRVGVDVGLKTLAVTSVANGNRSDGEQLENQKPLKNSLTKLRRLNRSLSRKVLGGRNWQKATIKLARHHERIANKRRDIWHKFTSSLASRYDTVCIEDLNIKGMTKNKRLSRAIADAGWAIGFAMLDYKCTDVRRVPRFAATSKPCNECGRRKENLTLADRVWLCACGNVVDRDLNAAKNILEMGIAQPSNERPQVVATSRVKRSRTARKTASAASQVEVGTSMRAHLRTF

SEQ ID NO: 18591 - protein, 187 aa, Salmonella sp.
VKLDQANSRISLPKPGWIRYRNSREVTGEVKNVTVSQSCGKWYVSIQTEYEVADPVHNAGSMVGLDAGVTKLATLSDGTVYQPVNSFKVNQRMLVTLQRQISRKVKFSHNWQKQKRKIQQRYSRIANIRRDYRHKVTTTVSKNYAMIVIEDLKVKNMSGSAVGTVSQPGRNVRAKSGLNRSIPDQGV

SEQ ID NO: 18592 - protein, 375 aa, unknown
  TnpB Polypeptide
LAGTPPTGGRGRLPRSSPRGAPRSRGTRRRRSREGARWRGRQTPGGGHPPALKQALKDLDRAYRNFFDGRADLPRFKKKGRHDAFRYPDPKQFAVDDGHGRVKLPKLGWVRYRKSRSVSGAPKQLTISRQGGHWFVSIQTEQEVAAPIHPANSAVGLDVGVAKFVALSIGDTFAPVSSFRKYEKKLAREQRKLARKVKYSQNWRKQKARIAKLHEKIARIRNDFLHKTSTTISKTHAMIVLEDLSVRSMSRSARGTVNDPGRNVRAKAGLNKSILDQGWAEFRRQLEYKQAWRGGIVVAVDPRNTSRTCPCCGHVSAENRKTQAVFRCVRCDHAADADVNAAHNILAAGHAVIACGERVQSGPSMKQEPSVSEVA

SEQ ID NO: 18593 - protein, 331 aa, unknown
  TnpB Polypeptide
MVLKAFKLRLYPNKTQRNQIHVNFGCARFVWNQMLNMHIERYKNNKKAEFQGRYSMDVMLKALKIEYPWLKQAESTSLQRVNRDLDDAFQRFFNHSLQNGFPRFKSKKNTNQSYTSKFVNNNIRIVDEHHIKLPKLGLVYFKAGRILNGKIRAVTVRVNSRKQYQASILVESENQTFKKTKKSVGIDLGLKSLTVTSDGQKEDILKVDDRLNKQLRIWERKKSRRYENAKKAMAFDKHDKVLFPRTDLKQFPRYQQAVRTVAKLKKHIAERRRDNLHKLTTRLVKDYDTIVVENLSVKNMMKNHHLSASIANASWGTLISQLKYKYGMANN

SEQ ID NO: 18594 - protein, 369 aa, unknown
  TnpB Polypeptide
MESVKGYKFRIYPNKTQACLINKTLGSCRFVYNHFLTVRKDSWNIEHKHVNYYQTSSQLTLLKRYDEYAWLREVDSMALHESLRNLDTAFQNFFQHRARYPRYKSKHCHSQSYRTRNQSNGIRIVDNRIKLPKVGLVKAKLSRDFGGRILNATVSRTASGKYFVSLCVQEDVDVLPNGGKQIGIDVGLKAFYSDSNGHTVANPRILRSLSGKLAREQRRLAHKLPHSRNRERQRIRVARIHERIVNIRKDFLHQHSTRLTRENQTIAVEHLQVKNMMKNHSLAQAIADVSWSEFFRMLAYKAKLHGGEVLEVDTFYPSSQICHICGYQNPLTKNLSMRKWICPACATHHDRDVNAAKNILLQALKQKSA

SEQ ID NO: 18595 - protein, 339 aa, unknown
  TnpB Polypeptide
MKSEQPFKDIGSNSGQHTLKILERNWKSFFVAIKDWGKNPQKYLGKPRLPNYLDKDKGRFVWVLTNVQSKVINGKLVFSFKPLHPFNGIIKTKIKGKHMQTRIVPQKGYYVLEIVYQINVPEITHTPNKILGIDLGMNNLITTQNNFGEKPFVINGKPLKAMNNYYNKKAAETQSHLKKSNGRNWSNRLSRLLTKRNNKIDHYMHNVSKWIVNYCFAFKVDTVVIGKNDSWKQENKIKNFVQIPFERMLYQLRYKFEQAGIKVILTEESYTSKASFLDEDKMSKGEFKGVRVHRGLYRSADGTLINADVNGAGNIIRKVFPNAFDGIEDVGLHPVIINI

SEQ ID NO: 18596 - protein, 365 aa, unknown
  TnpB Polypeptide
MLKAYKYRLYPNKEQQDYFSKVFGSVRFIYNQMLANRIELYEKYKHDKEELKKHKPNTYTSYKKEFEWLKEIDNLALANAQMDLNNAYKKFFKEGAGFPKFKSKHKSRKSYKTNNQGGNIRIEGNKIKLPKIGFVKMRYHREFDGLIKSCTISQTPSGKYYISILVEQEDCKWIPAKNKIGIDLGLSDFAITTNDDGISEKYENPRWLRKSEKKLIKAQRALSRKKKGSKNREKARLLLAKKHERIANQRKDFLHKLSHKITNENQVIVIESLKSSNMLKNRKLSKSIADVSWYEFYRQLQYKSDWLGRTLIKADQWFASSQICSECGCRGEKLALDIREWKCKECDFIHDRDINASKNLLNLAM

SEQ ID NO: 18597 - protein, 388 aa, unknown
  TnpB Polypeptide
MIKAIKVRLYPTRYQEELMFKSAGVARFSYNWGLAFLNNYYEKNNESLSIRDLRKEFTKLRNSKEYTWLKEVSSEIPQQALKDLGESFKKFFRKESSHPRFKKKGKCEVSFFHLNNKFIVKDKYVKLEKIGYVKMKDEGRLPVGNYKKDKIKVLNPRVKFNGKFWYLSLALEVEDKLNHKLTDISIGVDLGIKDLAIVSNINKPFKNINKSKEVKRLNKKLKRLQRQVSRKYDILKSGNTFRKGEKLTKTQNIIKLEKQMKLVHKRIADIRLNHIHQTTNTIVKTKPCRVVVEDLNVRGLLKNKHLSKAISEQCFDKFITILEYKCKWNRIEFVKADRFFPSSKMCSCCGTIKTDLRLKDRTYICPNCNLVIDRDKNASINLANYQLA

SEQ ID NO: 18598 - protein, 719 aa, Desulfurococcaceae sp.
VSEVTRTVIVKSTSLPRKLFRVFIELEGMYRNMVEQLVLYATRNKLTSFTRLKALKYRELRSLYPQLPSHYVYTVCQDASTRTKSFFKRRNKGLAKKDYPEVRKVSIWLDDHLWRMRGLTSIEIATHRDWVVVELEQHKHYWRYLNSGWRLASEARVKLDKRNRRLIIYLVFKKSVEIYGSKGFISVDVNENHVAVLVGDKAFLFETGFKDIVLGYYYRRKRIQERYDKLYGVNCRIKGKILRGLGERRKKNDLKWKLANIVVRVAREKQYAVILEELGEEPAREMINHIGDDQLRHRIYQASFKGVQKAIEEKAREHGVPVVYVDPRNTSRVCPIHNAKIIYSNSSRVGRCSKGGELWHRDVVACYNLLLRARLGDGSNAPSLGGLVVDGSPVPLGSTATHDPAVVTRALWARWKSLEGITKHPETPTNTLQGQTVMGSNLAKCLSRKGVNLGYYNRTIDKAKLVAREIGGVVYDDPLKLIAECEAVVVFVPREEDLLEVASMISRKFSGGKGVFINASTVTPQASLEALKILSDRGIDYVEAPVYGSSSEASDCRLVTIVASEKRVYNAVKDLLELYSSRVYYVGEPPSAIVLKLALNNIGLAFPALLAESIMLLEAYSVDYKLLLDVARELWFGQIIERYIERVVSEKPVRFKALWAMKDYSYISRSLRERGLPSMISDALTSFYAVASVNGYGEKDYPYSANYYISLARKRGSIK

SEQ ID NO: 18599 - protein, 377 aa, Microcoleus sp.
MKTLKFKLYSHKRNRYLKQSINAAGVIYNHALALHRRYYRMWGKHLNCAKLQAHIAKLRKRNPFWQLVGSQGVQDICQRIEKAYQLFFKHHKKGVKPPGFKKIKKYKSFTLKQAGYKFQGGNRVKIGSRVYQFGNSRPIEGIVKTLTIKRTPLGELFMVVVVDEGSEPEIEFATGKIAGFDFGLKTFLTCSDGSKIESPEFFKQGLNTIRKACKQLSRKQKGSLRREQARKHLCRQYEKIANQRRDWFWKLAHQLTARFDVLCFETLNLKGMQRLWGGKINDLALGEFLLILEWVAKKKRKLVVFIDQWYPSSKTCAQCGHILESLELSVRQWRCPSCQSVNGRDENASINIQTVGASMVGLGSVRQAKACNCCLSL

SEQ ID NO: 18600 - protein, 387 aa, unknown
  TnpB Polypeptide
MQSYKFRLYPSRQQEQKLLEVLDRCRFVYNKMLQGLNKQDKPNRLELQNSIPKLKEDFPELKLVYSKVLQYESYKLFSNLKALSRLKKNGKKVGRLRFKGKDWFKTFTVNQSGFKIIETGKRCQTLHLSKIGDIRIRMHRKTKGKIKQVTVKRYPSGKWFAFICCEAENVIKINNNKKVGIDLGTMNFVYDSEGSHIDHPRFLNKSLEKLKYEQRKLSKMKKGSVNRQKQKIVIAKLYERVCNQRDDFLHKLSRKYVDSYGFIAVEKLDVKGLIEKTYNPRNMLDASWSRFLQFLAYKAENAGNQIVEVEPRGTTQECSQCGKIVPKKLWNRIHKCSCGLVIDRDLNSARNILQSGLERAYLLEMESIPNNRQILSMNQEAPFERWE

SEQ ID NO: 18601 - protein, 365 aa, unknown
  TnpB Polypeptide
MKLTAQIKLLPSDEQAESLLQTLERANEACQYISDYAYESGEHSKYTLQEAVYHEVRERFDLSAQMTVRALGKVAYAYKTNPDAHNQFDIRGGFPYDNRILSFYTNRQEVSIWTLGGREQISYEFGENHRALLEQDKGEADLIYRDGMFFLLVSCQMPTANMSDEDVEAIDGYLGVDRGVNNIATTSDGDNWISDEIDRCRQWYQKRRNILQSVGTRSAKRDLRRLSGKQASFQRNTNYTISKRLVSKAKARSSAIVLEDLSGISEQTTVHRSQRARHSNWSFYQLRQFIEYKACIAGVPVIKVDPAHTSQTCCECGHCDSENRNGGEFECRECGHSMDADHNAARNIAARGAVNSPMVASRPSV

SEQ ID NO: 18602 - protein, 243 aa, unknown
  TnpB Polypeptide
MPTGKYYISILIEQDKELPKKRKIKEKTTIGIDLGIKTFATISDGRKIDNPKYLKNSLRKLKRQQRWLSRKVKGSNNRKKQIKKVALMHEKISNQRSDFLDKFSYQITHEKQVNTIAIEDLNVKGMVKNHCLAQAISDVSWGEFRRQLEYKTEWYGKNLLVIGRFEASSKTCICGQVNQELKLSDREWICKECGTKHDRDVLAANNIKKFALIPVERGKFTPLERTALAGSLKEEASWSLAKR

SEQ ID NO: 18603 - protein, 429 aa, Streptomyces sp.
MSRFRMYPTSEQASIMLEHCAHARYVWNLAVEQHTHWKPGRKAAPGFAEQCRQLTEARRDSQWLRSGNADVQQQALKDFAQAKSARFTSGFGEPTWRRKFRHEGFRVIGTDRVPEFEPDGSPKLNAQTGRQIMGRSVVVQKLNRRWAQVKVPGCGWVRFRLTRAELPQAKTFRVTFRNGQWHIAFAVIPQPVDAPGTGETVGIDRGVTITAALSDGRKLNCPQLTTKERAQLRKHQRRAARAPKNSARKTAEYARAARLKAREANRRKDWCEKTSTMLARTYDLIRFEKLNITNMTASARGTVEQPGRKVRQKAGLNRAILAQGWGLLRQRTEHKAPGRIEDVPAPYTSVRCSACGWIDKKSRKSQADFACVSCGFTCNADENAAVNVAAGQGGIPRPRRSAGAGGTTAATGRASVREPQPTRVGIPLC

SEQ ID NO: 18604 - protein, 515 aa, Enterococcus sp.
MARKTTSPSYVLEFELIVNKAEAKLLDKKLQIHRYVYNELLGQALKRLHELQHLSEYWLTLKNDKLTKAEKSKIINELTRRVHFTEYDLQAYGKTSQRKFALHLGSNEMQKLATRAFKAVQKKQFGKAKKVHFKAFYEEFSTENKSNTTGLRFINNQVLWGDQRRLVGQVKNPKGLRLNIKIKKNDMYAIDGLQDRTKYIRILTKTIRGRKRYFVQLVQEGYPPTKRNRKNGSFQKVNPDTTKSVGLDLGTSTVAISSNDYVDLKELAPECELEEKKIRLIQRQMDRSKRTTNPQNYNANGTVKKAKNGHKLKWNYSNNYIKLRNQLKDLHRKAKVKRKQSHNRLANFIISLGGNIYVETMHIKGLARRARKTTKNKKNGKNNSKKRFGKTIRNHAPAMLISTINQKLQLYGLEVIKINTYEAKASQYNHVTNTYSKKKLNDRWNYIDNLNIQRDMYSAYLIQHINNDLKSYNLFGCIDDWLSFIKMHNDVIEQIRNSNNKLLKWYIKKDKTYIM

SEQ ID NO: 18605 - protein, 377 aa, unknown
  TnpB Polypeptide
MKTLKFKLYSHKRNKYLKRTIKAAGVIYNHAIALHRRYYRMWGKHLSCARLQKHIAKLRKRNPFWQLVGSQAVQDICQRIDKAYQLFFKHHKKGVKPPGFKKVKKYKSFTLKQAGYKFLGGNRIKIGNRVYQYWNSRKIEGTVKTLTIKRTALGELFMVVVVDGYSTPEVTSETSKIAGFDFGLKVFLTCSEGFTISSPLFLKSSLTTLRKASQQHSKKQQGSTNRRLARKRLVRCHEAIGNRRRDWQWKLAHKLTDQFDVLCFETLNLKGMQRLWGRKVNDLALGDFLAQLEWVAKKKGKRIIYVDRWYPSTKTCSCCGHVLDELDLSVRRWRCPSCHQVKDRDVNAAVNIKRVGSATLGVGDVSQELLLQSLSDA

SEQ ID NO: 18606 - protein, 755 aa, unknown
  TnpB Polypeptide
MSVVVRRTNTFAVRPLSDNDERLLRDLLDASASLWNELNYERRQQFFDGESVWDTADYRKQYVDVLGSGTAQQVIRKNKSAWKSFFSAQDEWHNGEREERPSPPGYWGNEDDGRELRTLIRNDLYTLETSERSRVEIPVGDALKDEYGLGYHDRLRLEVAGNPKWDGEQGQLEIQYDETDDTFRAFQPVTVPDSQQDSPLASHEAALDVGANNLVACTTTTGQQYLYESRDLFDRFRETTEEIARLQSKLREGRYSSQRIRRLYRKRTRRRDHAQEALVRDLIERLYTEGVATVYVGDLTDILETHWSAEVNAKTHQFWAFRAFIDRLSYTAEEYGITVKVESEADTTRTCPACGEQDETNRDGDVFRCPCGYEAHADLCASRTFLEQQAGEIEVRPMARPVRLTWDDHCWSERPHSPDPVSPHRRPVRGNSHYTRRKRSNMSEADAENVLMEYYRRYVGDPDRTIDVYAGFGLFFAGIALGVIGVVVFLYSATLDPTALSTYAVREVAAVAGAVGLPALLFGIVVLLPVDRRMLYLASAGVAITLVGTGVFVWAYPHNWNVVVNPDYSAQVVAVYAVGLVALIGATGGALVAHRVERATGGAAAAGGGAAGAGGAGTADGAAATATDADGETVTEESVRADIERELDDAELTWGGVERSETRRLELNTSAVDEADVDTEQLSGSATETRTTSGTVNDAVSELKGLQGGEAKTDSGQGTDDQAAKLRELREQQRKEAEEADEDGSVVDRIKGLFG

SEQ ID NO: 18607 - protein, 357 aa, Paenibacillus sp.
LLKAYKYRIYPSHGQQHYFAKVFGCVRFIYNRMLADKIEHYKQTETMLRNTPAQYKKEFDWLKEVDSLALANTQLNLDKAYKNFFRDKKTGFPKFKSKKTNNHSFTTNNQNGTVAIEDGHLKIPKLKTGIKIKLHRPFVGLIKSCTISKTPTGKYYASVLVETDIVQLPKMHTKIGVDLGLKDFAITSNGEIISNPKYLRTSEKRLAKLQKDVSRKKKGSHNRHKARLKVAKLHEKIANQRKDFLHKTSAKMINENQVVVMEDLRVKNMMQNHKLAKAISEVSWSMFRSMLEYKAQWYGRELIIAPKHYASSQLCSCCGYKNAEVKNLALREWTCPECNVHHDRDVNAAQNLLKLAM

SEQ ID NO: 18608 - protein, 271 aa, Clostridium sp.
  misc_feature (30)..(30): Xaa can be any naturally occurring amino acid
LEYTDIYIIFILPKIKNYISSLKMVYWISXIPINANIKSGTISKSADRYYVSVLVETDIANPNIPTNDGVGIDLGLKEFAVISNGTFKKNINKTVTIKKLEKKLKREQRKLSRKYERLKLRDKNKKEEATRQNIQKQIAKVHRLHQRLSNVRTDYINKVISDIVKQNPSFITIEDLNVRGMMKNKHLSKAVAGRKFFEFRTKLTNKCNWMGIELRIVDKFYPSSKLCHECGCIKKDLKLSDRIYKCECGYEEDRDLNASFNLRDAKIYKIA

SEQ ID NO: 18609 - protein, 374 aa, unknown
  TnpB Polypeptide
MEVRATAKIRIQASPEIIRTITAYKKALQFCAGQAWNRKIKNNVRLHPFVYKRLRKVLPAQLAIACIKQACGIVKKAKSKPVIRQASVRYNFPRSASLKGSTLSLRLLKTRQEFRFNIPDCYKEYFSWKVCESLLRTDKKGRCFFLFCFSREVDVESSNFQNRVLGIDLGVNNLAVCSDDRFYNSSKVKQIKRKFKHLHSVLQAKGTRSSRKLLKKLSGREKRFMAWTNHNISKCIISNFNGNKIVMEDLKGIRKVNRGRKMNYWISNWSFFQLQNFIQYKAERKGIEVIKVKPFLTSQICHKCGHLGSRSKGCFSCHCGLSSYSADLNAAKNLASDKLALRQAAVTQPYIQSDEHKGSVRAIACELMDKSPVL

SEQ ID NO: 18610 - protein, 406 aa, unknown
  TnpB Polypeptide
MKANRGYRFELKPNNNQRTHFVKCAGVARFAWNWALYERQRLYCEKQGDERFTNAIEQHRLLNTLKKTDFPWMYEVSKCIPQEALRNLDSAYRLHQKTRKTGKKVRLPKFKKKGKTRDAFAFTDSPIRAEGSHVVLPRIGRVRVKEQTVLNGRILRATVSRAADRWFVSFTVEHEIPYVPPPPGPAVGVDLGVSHMATLSDGRVFDSPRPLRSRLRKISRLTKELHKRRDGSNNRRKAADRLAKAYWRIGNIRRDALHKATTYLAKNHGDIVIEDLRVQSMGWSHRLARDIRDVGFREFRRQLEYKCRWYGSQLVVAPEFYPSTKQCSSCGHVKDKMPLSERTYKCDRCGLVLDRDLNASLNLVAVSSTETLNACGDLASTAPARASRAGSKKQEVNADIQHGIDG

SEQ ID NO: 18611 - protein, 386 aa, unknown
  TnpB Polypeptide
MITNKYRLYPNKQQTEKLEFALDICRQAYNIMLEELRNQTIIDRNMIQAILPDLKICEPRFREVYSKTLQYECYKLFSNLSALRVLKDKGRKVGVLKFKGKKFFDTITYNQSGFDLEHTFSNNGRLKLSKIGNIKIKIHRIPDGNVKQITIKRENNKWFVFVISDGIKVLEHGNKIIGIDLGINHYLVDSEGNKVEHQKNYEKILPKLRIAHRNLSKKKKGSHNRLKAKKSLNKIYEKVNNQRTDFLHKTSTNLIRQCKIIVIEDLNIKGMMEQKYFNAKNIADSSWNKFIQMLEYKAENSGVEIIKINPKDTTKTCSNCGHIQKMHLWDRTYKCEDCLFEMCRDENSAINIKRKGLGSERACVEIVSDFSSEEQLSMKQEAITSK

SEQ ID NO: 18612 - protein, 398 aa, unknown
  TnpB Polypeptide
MSRYRLLPSPAQEAVLRDHCAHARYVWNLAVEQHAHWRPGRAAAPGYLAQCRQLTAARNEYPWLASGSQTVQQQALRDYARAMTAFFDPHNPARRPGWRKAGRHEGFRITGRCGRQWEVRRVSRHAGQVRVPKAGWVRFRWSRAVPDGVKSFRVTRDRAGRWHVAFAAIPVPVPAPGNGEVAGIDRGVAVSAALSTGEMLRVPALPGHQHKRLRRLERKLARARRGSNRRARVKHAIARLRARDADRRKDWCEKASTDIARRFDMICVEDLKITNMTRSARGTAAAPGRSVAAKAALNRGIHRSGWGMLVRRLEDKAPGRVERVSPAFTSQRCSACGHVAAESRESQALFRCVACNYACNADVNAAKNIAAGHAVTARGGLGDARPVNREPQLLLRSA

SEQ ID NO: 18613 - protein, 374 aa, Halomonas sp.
MTKRAYKERFYPTPEQAALLAQSFGCARFVWNNTLAYRTEAYQLLGESVSHSAAERRLVGLKAEFSWLKEVSSVILQQTLRDQKAAFDNFNNPKLKARYPRFKRKNGRQSIRLTKAAFRYRDGEITIAKTTAPLPIRWSRPLPSAPSSITISKDRAGRYFISCLCAFDPETLPVTSKTVGIDLGLADLFITSDGVKLGNPRHLKRYEAKLAYLQRRLAKKQKGSNNRNKQRQKVAKLHAKIVDCRRDALHKATRALVNENQVLCIESLSIIGMIKNRSLAKAISDAGWGEFVRQLEYKAAWAGRQLVRVSQWFPSSKLCHGCGHKVEKLPLSQRHWRCGSCGNPIDRDINAANNIRTAGLAGLACGATGAGTAV

SEQ ID NO: 18614 - protein, 441 aa, unknown
  TnpB Polypeptide
MPVRRATFRLYPNKKQEQILRYHRKLHKDLYNAAVSNRFVQYQKFGHSVDYFEQQNSLPAFKEVWTEYKECNCMTLQATLKRVDYAFQRWLKGLGKRPKFKSIRHYSGWSYPSKTGWKVHTTGDNGYLELAKIGSIQMRGKVRIWGTPTTCVIVYRNGKWYASITVELTELQVASRPTDLGVVGIDFGCKSALAITDGENHTFVEAPKFLRKAEVQIKKLSKGKRRKVAPNRRKKQKGSSRWKKAQLKISKVTRKVANQRQNWVHQVTSDIVRCNSFVATEKLEVSKMTRQAKKGKRKKQKAGLNKSILDVGFGMLQSAIQYKVTEAGGVFVEVPTRSVKPSQTCPNCGNQHKKTLDERVHQCDKCGFTMDRDLAAALVMLLWSQGKLPGLETSLVDADATSSTSSTRKRKLAGSQKQLGQMKRQKSELTGLDAKTSPSTK

SEQ ID NO: 18615 - protein, 402 aa, Escherichia sp.
VKRLQAFKFQLRPGGQQECEMRRFAGACRFVFNRALARQNENHEAGNKYIPYGKMASWLVEWKNATETQWLKDSPSQPLQQSLKDLERAYKNFFRKRAAFPRFKKRGQNDAFRYPQGVKLDQENSRIFLPKLGWMRYRNSRQVTGVVKNVTVSQSCGKWYISIQTESEVSTPAHPSASMVGLDAGVAKLATLSDGTVFEPVNSFQKNQKTLARLQRQLSRKVKFSNNWQKQKRKIQRLHSCIANIRRDYLHKVTTAVSKNHAMIVIEDLKVSNMSKSAAGTVSQPGRNVRAKSGLNRSILDQSWYEMHRQLEYKQLWRGGQVLAVPPAYTSQRCACCGHTAKENRLSQSKFRCQVCGYTANADVNGARNILAAGHAVLACGEMVQSGRPLKQEPTEMIQATA

SEQ ID NO: 18616 - protein, 382 aa, unknown
  TnpB Polypeptide
MISYRYKLYRTNKTKHLDAMLREACFVWNHALALQKRYYGLYKKYIPLGVMQHHYAKRIKRILLGSQTVQEILDRLDIAYKRFFEHLAARPPKFRNAKDFSSIVYKQRGFSLCGNKIVINKINKSYKFSKSRDYEGIVKRVILKRNRLGEYFILIVTDADPKKYGKTHNGASVGIDFGLKTYMTLSDGTEMKNPQFMKECLTELRRRSRNLSKCKKGSNNKERKRKDLDRLWNDICNKRNDFQWKLAHDLCRKYDNIFIEDLNLADMKLGRKANRKLTDQAHAEFVTKLLYIAAKYDVVVHKIDRYYPSSKTCTCGYVNKELKLTDRSWTCPHCGATNDRDLLAANNILRRGIYELESDYKTSKRPAKRLSRHHPRISSLRG

SEQ ID NO: 18617 - protein, 313 aa, unknown
  TnpB Polypeptide
  misc_feature (10)..(16): Xaa can be any naturally occurring amino acid
  misc_feature (290)..(307): Xaa can be any naturally occurring amino acid
LQKRLDYIQXXXXXXXEQKLWQSVGTARFIYNWTLNRQEESYKNGGKFIKDSDLRKEITRLKKDKLSWLNEVSNNVAKQSVKDCCNAYKNFFKGLVDKPKFKSRKKSKPSFYNDTSKLKAKEKSVLIEKIGWVKTKEQLPMDVKYTNPRISYDNKYWYLSVGIEEEMPVVQLTGESLGIDVGIKDLAVCSNGMTFKNINKSKEVRRLKKSLKRKQRQCSRKYEKNKKGKEYVKTKNIAKLENQIKLIHRRLSNIRLNYIHQVTRMIVKTKPSRIVMEDLNIKGMMKNKHXXXXXXXXXXXXXXXXXXNVSFVV

SEQ ID NO: 18618 - protein, 485 aa, Actinoplanes sp.
  misc_feature (365)..(440): Xaa can be any naturally occurring amino acid
MRSAYRCRAYPAPEQAAVFIRTFGCVRLVWNKTLAERHEAYRQRGESTSYKQTDAALSSWKKTEDLAFLSQVSSVPLQQALRHQRTAFRNFFESRARYPRFKSRSGRQAAHYTRSGFRLKSGRLYIAKTAGTLSIVWSWPKIGLADLNPTMVVISREADGRWFVTFAVDTVQPAPLDATGHEIGVDLGIKTFAVTSDGDRVANPRHLQRKARSLARYQRRLARCQDGSANRRKAKAKVARAHRKVRNARADFLHKTSISLVRRADTIVVEDLAVDCMVRNRQLARAISGCGWGEFRRQLTYKSERAGRSLVVIDRWYPSSKTCSACGYVITTLDLSVRVWRCPNCRARHDRDLNAAKNILAAGRXXXXXXXXXXXXXXXXXXXXXXXXXXXXXXXXXXXXXXXXXXXXXXXXXXXXXXXXXXXXXXXXXXXXXXXXXXXXDVYKRQTVTQASSLGDACGADVRRQGLFLPQSAAKQEAPAVRRPE

SEQ ID NO: 18619 - protein, 268 aa, Clostridioides sp.
VEKAYKFRMYPNKKQQELINKTFGCCRFVYNKYLAKRIDVYKNDKETFTYKQCSSDLTNLKKELKWLKEPDKFSLQNALKDLDNAYKKFFKEKVGFPKFKSKKINRFSYKTNFTNGNIMYLGQHIKLPKLGMIKIRDKQVPQGRILNATISKEPSGRYYVSLCCTDVDIEVFENTNNQIGLDLGIKEFCISSCGEFIENPKYLKKSLNKLAKLQRELSRKTIGSLNRNKARLKVARLQEHIANQRKDFLQKLSTKLIKENDIICIEDL

SEQ ID NO: 18620 - protein, 433 aa, unknown
  TnpB Polypeptide
MTNKWTTTEEKKAKIKASLSGTREKRKSQVCRVFKVKIQQNRLSKKQKEELKMIFVEAKWVRNYIVGLIKDGIPWNELPVIYSKTEIPVKTKDGAFENRRLNFISASQIQEVIDEVKANLKSIITNIRRKNIKRGELKFVSEIKSIGMKQYKITYSFKGRTGMKIQGVSKKVHVNGLGQFIDEEEIEFANAKVLNQANGYFVTITTYTPKKYFKQETNGKSIGIDFGIKHNLTTSEGETIDCSFEEPESLKKASRKMNHCKKGSNNRMKNRKKLQKYYQKLENRRTNAANQIVAKFKNYNKIVIQDEQLKEWHKGLFSAVVQHSCMGRVKAKLKAMPNVVILDRFIPTTKLCMNCGKVHKIRLSDRTFKCECGIEDDRDIHAAKTMLEIVEMLNLPPEQREVKRAEFLEAYSKKFGCEYGTMKHEDVTFQGCH

SEQ ID NO: 18621 - protein, 480 aa, Clostridium sp.
MDSIITYLLLYIQYQNKIILELFLFISKYIPLKQLVFEDSHSPEYQKFKVDKLPKIFNSEPVDYQLLLAYYKNRYGKTVKPVNRRSESAKVGESTVCPRCGAPHKYIYKNNGSKGQYQCKVCGELFNEINIYNRPLALRCPYCGHILTPKKDRKHFRIHKCVNPKCSYYRNNLDKLPKDLSDANKHKYKLHYIYREFTIDFFKMDLHELPSRAINFKYKKFNAHIMGLCLTYHVNLKLSTRQTAHALEEVHGIKISHTMVANYAMTAAAVIKPFVDTFDYKPSNILSADETYIKVKGIKHYVWIIMDACKKSILGYQVSDTRAVGPCILTMRMAFEKFKKFPNKALKFIADGYSAYPLASQQCKIVNGWDFDVTQVIGLTNDDAVSTEFRWVKQVVERLNRTFKSSYRVTCGYGSENGALYGVSLWVAYYNFLRPHPYNYWKPLNEIDILTNAGNMPAKWQILIYLGQQTILKMQAENSA

SEQ ID NO: 18622 - protein, 455 aa, Symploca sp.
VKYTYQYKALPTTEQKLELRLWLRICQYWYNRQLGDRFDWWEMNHSPVNACPLISHLPELRDKPNYYSQKKYLPGLKKEPVTVEWSGEKLDLSRVPANTLQEVCKRVDIAFKRFIAGDSNGNRSGKPRFKSQSRYRSFVIEGAGLEFHSCSIGGKYLYVKVPKIGLIKIRSHRHLPDGASLKQLQFVKKNDGWFVNLRLEDPTVPEITSDSILPTWENSLGMDAVLHEDDYLATSEGVKLPSLKVLRKNQHKLTRISQKKNARKRGSKARRKLAKREGRQHQKIARCRKDFQYKTAHKLVRTGKKVFFHEDLNLKGLSKRNAPKQDETGAFIPNGQSAKSGLNLSWSDAAFAQFFQILGHIAEKAGVVVIAKNPAYTSQLLSYRDEVIFVDTGIREYWDEVEKLLVDRDINAAINIKRVGLDVFPTIKRRKGKVVIVDSITDDTSKEVLRILRSA

SEQ ID NO: 18623 - protein, 387 aa, Archaeon sp.
MNKGGVMLKGYKYRLYPNKEQKERLVETLDKCRHLYNTSLGSRKLQAELYQLPIAKQWITVKTQSKVLLVQKKHDKYLPLVHSQILQNVLRRVSKSFDNFFRRIKNHEKPGYPRFKGYNSFTYPQTGFEIIGSKLHLSKIGDINIKLHRNMIGKIKTCTIKRDMNVWYASFSVEIADSLPEKTIIKSVVGIDVGINPLGNVALSNGEKKEQRKLSRKQIGSHNRNKQRIKVAKVHRHIRQQRMDFHQNLSKKLVEKYDFIAFEDLKIKNMMRNHHLAKSISDVSWNILQSFSAYRAEWAGKVVTFVNPKNTSQECSRCGKIVKKNLNIKIHHCPYCGLVLDRHVNAAINILHIGLKTVGLGYTDLMPVRGPAQDRPMTQEANDFSCG

SEQ ID NO: 18624 - protein, 417 aa, unknown
  TnpB Polypeptide
MKKMSDLEYHYGLKMRIYPSTNQKKIIKINGNIARTVYNKMVAIDQELYKLKQVKLPIDIVKERIKELKSRKNARNLSNHYQYMQDKNIDSLAKANAIQNYQKAWKMFRKVHRTGTPKFHKKGYRLSYQTNAQYKGAKMDVYSATVRFLDKSHIKLPKLGRLRVAGSHRHIIDNKDDIKIGTVTISKDSADRYFVSMQLGSDTPFVNKLAKTNSQIGIDLNTENFLTTSEGKVIDNPRYYRMIKGRLTKAQRMLSRRERRAKKEKRSLRNSKNYQKQRRLVAKIHDKIRNQRNNFLNVNSTRLINNHDLIVAENLKSKNMLKNHALALSISDVGWRSFLQKLAYKAELYGKTFITVNPKNTTQTCSECGFIVGSGNTKKLTLEDRSWTCPSCNTYHIRDVNAAKNILSKGLKQLEKA

SEQ ID NO: 18625 - protein, 426 aa, Halococcus sp.
MADSMVTRTYRARVRNHSQVCDDLDSLGFAAAKLWNVGRWTVQRVWDACGQIPDANALMSYLKGHERYADLHSQSSQRVLQELGEAFTGWYGKRDNGDTKANPPGYRKNGDEHPRSTVTFKTAGFKHDAANNRIRLSKGKNLKDGWSDFVLCEYDVIGSPETRVENVQQVRAVHEHGEWRLHIVCRVEVDVPESSGNEVAGIDLGICNFAAVSFGGESLLYPGGALKEDEYYFAKKRAECDKSSSREARRLDRKRTDRRTHFLHTLSKTIVAECAKRDVGTIVVGDLAGIREDDNGETADWGDHGNLDLHGWAFDRFTTMLDYKAEVKGISVEPVSERDTSKSCSACGRTDDSQRVERGLYVCDECGLVANADSNGAENIRQKVLPNPRREDRDNGWLAQPAVRLFDRSEGGFAPREQVAQTNREP

SEQ ID NO: 18626 - protein, 409 aa, unknown
  TnpB Polypeptide
MQYNYKYRLDPSEVLTETLHHHLDTCRQLYNHVLHLLNESEDIPARYEVQGRLPDLKSWWDDLNDVHSKVLQMVVKRVYDNLSTLKAQKENGRAVGMLKWKPPREYRSLTYNQSGFKLKNTSGRAVLWLSKIGEIPIHLHRDLPESATIKQVSVKQEPTGEWYATFGIDVDETTPEKPENPKQVVGIDVGLVKYAHDTDGYAIESPDFSDERERLERAQHDLSRKEHGSANREKQRKVVAERHADLKRKRRDFLHKLSTYYATEYDLVAVEDLDAKGLVELPGNSRNRAGAAWGTFLRMLKYKCEHEGTHFVAVDPIDTTKECASCGVKTDKPLWVREHSCPSCGFEVDRDANAAWNILSRGLSELGVGDSESTPVETALPVDTRVSAKRVVEAGSPTLKERTASAASE

SEQ ID NO: 18627 - protein, 332 aa, unknown
  TnpB Polypeptide
VKDLCRAFTNFFEKRATYPKLRKKFRHTPTFRIPQRIGLPSDNHMTLPGIGDVLMRQSRAIVGVVKSATCKWECGHWFVTLVAHQEIENKPKAVLTEANTIGLDLGLKDACVMSDGEIVPALRSYRKTQGQHRKAGRVVSRRTGAKKGEKASNRFKKAKAIAARIDRKAANQRNDFLHKLSTRLVRDYDGLVIEDLAVAGLAKTKLAKSILDAGMGAFRHMLEYKSDRASKTVVVIDRWFPSSQLCSAEGCDYRYRALTLSERAWTCRQCGTVHQRDVNAARNIKADGLRVYRTWDQSLLDGGHVAAGQVETLNARGCRVSLPLGAVAATSA

SEQ ID NO: 18628 - protein, 428 aa, Okeania sp.
MRTAYQYKLRPNKEQIATIEMWLKLLRRQYNYRLGERLSWWSENRCVVNACPLVMIIPQLREIPDYYSQKRDLVNTKDKFRKYKLIHSQVCQDCIKRVKLAFDRWFKGDKNGHKLGKPRFNGKGRYRSFTYPQIKLDCIEGNQINLPKIGKVKLIQHRPIPEGFQIKTVTISRKADVYHVTLSLEDKSVPALTTEVEPTLKNTLGIEMGLHEFLVTSEGESVPIPQYYRSSQKRLKTLHRRLSRKNKGSKRWLKALLALAKQHKKVADKRKDFHFKTANELLSKAEVIAHVDAERRAEANLNIKGQALTRLSKSINDAGWGQFLTILTVKARNAGQKTIAVNPKNTSQDCSNCGEKVDKELNIRTHSCPHCGVVIDRHLFALAQHPVGNHDLGNAAINIKDRAAGHSVLKARTCPTGYRGCETRELTL

SEQ ID NO: 18629 - protein, 442 aa, unknown
  TnpB Polypeptide
MQIISSYGVELRKQNIPIRQTLEIYRSAVSYLIGIYVQVWEELAEIPDAKRRFNAAEHLVHTTKKNHACFDFDIRFPKMPSYLRRSAIQHALGTVSSYKTRLDLWEKTDGKSGKPKLVYENHAMPVFYRDVMYREGAEGKDEAYLKLYDGHDWKWSCVRLEHTDMEHLRRYWSGKKASAPTLEKRHRKYFLRFSYTEEVTLTKKPVKEQVICSVDLGINTDAVCTIMRADGTVLGRKFIDHPSEKDRMYRTLGRIRRSQREHGSAQTQGRWAYTKRLNTELGKKTAGAIVRYAEENHADVIVFEYLEMQGKISGKKKQKLHLWRKRDIQKCCEHQAHRKGMRVSRICAWNTSRLAYDGSGAVTRDWENHSLCTFQTGKRYNCDLSASYNIGARYFIRELLKPLPATERSLLEAKVPPVKRRTSCVYADLRKLYSEMERLKAA

SEQ ID NO: 18630 - protein, 378 aa, unknown
  TnpB Polypeptide
MIQKSYKYRIYPSKEQQELLEKHFGSVRWVFNWGLERKIKTYQKNKKSLSCFDLINELTKLKKKRDFQWLNEVNSQSLQMSLRNLDNAFTSFFRKNNRFPRFKSKKQNKNNFQIPQNLKLDDKLTIPKIPDIKIKLSRPIEGKIKTATISKNSTNKYFISILAEQDKELPRKPKITKKTTIGIDLGIKTFATISDGRKIENPKYLKQLEIKLKRQQRRLSRKVKGSNNRKKQIKKVALIHEKITNQRSDFIHKLTYQLTHENQVKSIALEDLAVKNMVKNHCLAKAITDVVWQEFRRQLEYKCGWYGRNLLIIGRFEASSKTCSCGYVNQELKLSDREWICPKCKTRQERDILASQNIKRFALIGKGRPKSTLVESSQ

SEQ ID NO: 18631 - protein, 731 aa, unknown
  TnpB Polypeptide
MSKRIRDDHGEYETKEKEQEKKVKVQYLQRQRQIKTVPMSINSVITNKKVTETIDETVHLISRWCFHATLFLDFYIRYCIQNNIEPTLPGMSKEKEKKSYRESVVRSIMTKVLLRNRKERAATKIVLNHIDEVRKAWYAMLKDLNIQSPKIPSGVKLTNVITYVTKQYESTLWEVFDSEDVVKSHVKAFEKRPGHVKTPTLYRRVNDIMTDKESLITSKNRFDIAKWRLNMLDAIEEVSTDIREGKTFDIVPHAKSFRSFITIDSEFASSDCFKGLIDTPKEDETWVMKLFPNLSEHTPKGFCIPKTVKTDGIQIQIPYEKEILVEKTMSVKESEAHLWNRKDGKLVICNRDNVKIPSYPSVDDSTWNPEYFNNGRHKGLYSLREVKKLIKKNNIDVKKDVVSIDPGETNTICSYIPKTNTYFTMSKNTYLALIKSKQSRTRSNKAYSRMKKKDLRNRGWKHPEVQRAESEMSKTSTKTSHFELFCEAVKVRLSNLDTMFKFYGTRKQARLRFHRSILQQHTLDWIVNKVAPSPETIVAYGSGYNGSKETLKGITNGPGPVKKIRRHFAKKRKTVLTDEFHTSKKCSVCGCVGENPKRFQRYPLTKRHALEKDHPDMKCKGRLNSILGEFHCIQCRKSKNRDNNAAFNIYQAFQHEVTFGKRPKYLQRPKTSKKRKQTVDAVTTLGQSKNSCPHDSNTDFSMSPRGRQVTELTGVMAFFKPRVRASSQLIS

SEQ ID NO: 18632 - protein, 481 aa, Desulfofundulus sp.
MITVPGRIYPDAIAREELVSFMGRFQAAKRSAYQALRRGKEAGEIVKALHEKFFPNARWCQWAVEDAKSTIESQQELVKMYVSDLKAKIEKSEEKLERTRDRLHRQGIHARLNKLRARLVYWQGFLERDEVPPAVFGGKKNLLLLQEGKLSKEEWRELRSNSFYSVGQANMKGLEGQHGNANTEIVYHDLTGNFHLNVYIPPEPENKTGRRRKKEEWVTVPLEIPARYRNLLLQHLLKGEAYTVRVVRKDGRLECLISFSLGDTAPVDKDSVMAGIDLNPEVAAVTVVSPDGNFKASRCFWCPELVHVSHEKREWLAGNLAKEIAAWLKDMCVKQVALEELSFAQDHDTNRYFNRITHNFCKKLLFNRIVVALRKRGVAVFTVSARFTSLIGYFKYAETCGLSAHQAAALVIARRALGYAEKVPQDIMKLLSPKEGWRHFRLWGKLFGLFKAARKRAAREGYLIRRWQPEDWLVFMFAKTG

SEQ ID NO: 18633 - protein, 470 aa, unknown
  TnpB Polypeptide
MMGISESEVFFMKTITYSDRIYYNELLPEEAQAIRQDILLYHSILHTTYHLLTLKARGIPFSFEESLHKELKRRYHTNDYFPLAALWEAQHQLKADFENHERKKKMFKAKLKNIEKKIRKTEKEIQRLDKRLAQLKQKTKQGKQTQEDYLEEVQVLRPTRKQLKNQRSQLIFKLNRTQQQLNTANQKMRFTCFGGKKLSRSRTTVYAGNHEAWLEEYRYQRNKTMMIPGRRQGKYSNCLFKYHIEEGVLIYRCSSENREIRLKIQFHANAKELERAVKLPHNTPGKAVAYLLEDHKKYFIIKAVVEMKDRELMKNKQDGVIGIDINADHIAVSETDRCGNCVLLKTVPMPLRGKKKNQRKHQIRQTAKEVVLECVRSNKPLVMEALDFEKKKSNMRYGNQRHNQMLSEFATKQIQEALERRCWKEGYGVIQVNPAYTSQIGREKYSRKMGCTVHMAASFVIARRGMGYQN

SEQ ID NO: 18634 - protein, 508 aa, unknown
  TnpB Polypeptide
MYIAKKLKWRKTIMTTYTLELKLNTKKYSDQRYLENYFREVAKISNTVRRFAIRQITMLKRDKTYVDLLKQYVALEKGPEKEALSKQLSVIVKSYGLTQYNLQKSATKLRNHLKYVHSAVYQKISDSVWKGVEKVLYSTGKQIHYKKWDEFLSFEGKKNTTGIIYKDGKVYINASPKRQNRGLILDVILPGNQNTDHWYYETSALNDRTKYCRIVRKKFSTGWRYYVQLVQEGIPPLRHAVGTGRIGIDIGTSTVAVVSGTKCHLTELGEGIEVQNKKIRKMQRRLERSRRASNPDNYNADGTIKKGRKTWNYSSRYKKIRNELSAMQRKRTDTLRQWQEAYADLLLEEGNEVYVEDMNFKGLQKRSKKTEKNKKGKYKRKKRFGKSIGTRAPSQFLTILKRKLGYTGGTYHEVNTRTFKASQYDHTSDTYRKKKLSRRHNTINGEWIQRDLYSAFLLMNSDDTLEHTDRNKCLQNYPQFKNMHNQCITEILRFGKHIPSSFGLKRAA

SEQ ID NO: 18635 - protein, 282 aa, Bifidobacterium sp.
MKAYRTELDPTRAQASLIRQYCGVARFAYNWYLDCAQAYYRENGLFLTGYSFSKALNNSTRPDWFTAAPSKAVKHAIMNAEKAFRRFFNHQGGYPRYKRRGNRDSYYVIGSIHVQRHRIRLPKLGWVRLKEKGYIPTGRTPKSATVGIVNGRCYVSCLYDMDNPLPAPATGEPLGMDVGLKNLAILSDGTVFDNADTSGRIRKLERRKRRLERSLARSRSVAQTLRRTTVGEHQNRTHASGVRRVGEATAKLADHRTPERERHDEEPSPRARPAQAGSGDVP

SEQ ID NO: 18636 - protein, 554 aa, unknown
  TnpB Polypeptide
MNISGGKMHVIKFPLKATKRDIHIASGALAIVGQLYNAALDEMLERVDSMRADPDWNAAGKMKVVAQKSNAYRQLYKQHQLSQFDAVRACHAHWKNSGWMGDRVGSRIAIALAPELWQNLREYLYRRAKRPRFKPARERNVAWNNDNKSGLLLRDGCLQWSVKTKRKALSIPLDMGSISAPRRKWLEQCLEEGALRRVGIQREVVRGQERLFALICLEGSPYRSEKYLAGIQDSGDLIGLDLGPTWLAVVSENEAREIPIATEPRLAADQKIRLQERRQQRAADRSRQAANQHARRKNGRSLKGVRQPQRSKRGQQREQLLANIKRRDRINRQQDRINAVRSVIRQGKHIALEDLDYRSWQRSLFGRRMLITAPGDFVVRLQREAELLGGSVTLIDPWQAKASQTCLCGALTGKKQLSERTHICGSCGLQAPRDLVSAALVRELALVGKQTWNEELANASGTKNAAAELIQRPRRTSSFLKSIPGKNAVKQNRDRASAQSKVLLCGKPMPDPEDKTHASSDVPTYEQLRKVSRLGASQKATVKNTEAQALISSA

SEQ ID NO: 18637 - protein, 455 aa, Acinetobacter sp.
VYPTEHQKLILSQWMGCARFIWNAKCDEDKYFRGFARKFATFDHYYETQDQKYAHFKSDEISSWLANCPSTIQKNSTVNWYNTLKKSIKGLCGRPKRKKKTDKGSIHLTSDLFEFRTERNKRKLYIGGKKFNIGSLSFKAHANFKEPKSLYIRKERGQYFVSFCYEDGVEIQEFDGKKFDAKKYAKRQLDHLQGMDEEQLQKIVVGIDRGVTIPVHAGYEEFDFSKEQKNHLTKADRYIKRLQRKLARQVKGSNRRAKTKHRIAVHHSKKANIRKDFAHKTSHSLVNGLAKVFIFEKLNTKSMTKKPLPKIDESGRFIPNKAKAKAGLNKSILNVGWHRIASFLAYKAVKLGKAVFTINASYTSQECASCGHTHPDNRKSQDRFNCVSCGHADNADHNASIVIKNRAIKLVLDCGTQLDGNYLSSSGRGGVRKTTRGVKASFRSTVEASKEMCAT

SEQ ID NO: 18638 - protein, 596 aa, unknown
  TnpB Polypeptide
LPKPAAWPRSASHEPTTPTCSPRPTPISWSQHSTTSTPPRFSKDGWRGGRRYAGAGLRPALTRAAHPAVGLVRRSGIPYATVSELVQPPRKFLRGLAGFGWFVGVWVVAAFVGGRWFCGLVPRKRERDARRVVYRTARCGLRVTRGQRDRVFGLLRSAGDVWCCVLELNGWRRRRQAAPLAGYQELCRELAVSGPGTFGELGSAGARSVLRRYSDAWFAAAMRRKGGDGSVRYPRRRRGLVPVRWYAGTFALQGRVLKIPVAKGCPALLVRLDRDLPYPPGQVRSVTLGFDAGRLYLDVTAEVPVAAYPPGRGPDPGRAAGVDLGIIHPYAVAGPGGRGLLVSGRAIRAECRQHLRDGKGRSRAAARRAPRPGQRGSRRWRQHRRRVRATQARHLRRVRQAQHEAARALISWAVEHRIGTLTVGDPRGVLAGKAGRRHNQRVRDWRIGHLIRALADKAETAGITITLVDERGTSSTCPKCSRRVPKPAGRVFSCPHCGQGGHRDLVAAASIAARTGGGIIPAIPSGAGITHRRAGTHLPGVHPARRDPRRGPPSRPAAPGHLAGTGPPPTPPGTRGVARPKARNTQAPDNPSKTYE

SEQ ID NO: 18639 - protein, 390 aa, unknown
  TnpB Polypeptide
MQSIKVVELNTLPLTKSKEILLDELRSKYLFCANEILSVLKQNYLLTRKELHNLTYSKLKDETKLFSQLIQACRREVWSRRKKIKNGFVRISPKFENRGFKTFFTDRGTFCIKFSVFECKKVVIPIKGDGAYQRFGSFLRDGWNFKTIMIVENQIKVVLKKDFPESVEKNVIVGADIGSVNLATITVYDSVKKKILRQLYLGRDVAVRQRKYVMRRAKLQSVNNKKYLMRLKSKQSDFVKTRSEQIAWEIVRIAKQFGAMVAIENIRNLRSHNKGRKFNGLVCRIPYAKFFSALNNICIRESIKTIKVSPRHTSQECPVCHMIDKRNRKNSVFKCIGCGRTLNSDRNASLNIALRAVKTVFQPNLSNQISGSGVRVNEPVSPSEVLVGCL

SEQ ID NO: 18640 - protein, 296 aa, unknown
  TnpB Polypeptide
VRVGQEIRPYTSVHVDWTHRTLVFVNMPLPLPRTGDGVIGLDRGCVHTLASSDGTFRDMPKPSKAELKRLRYLQRRMSRQDRVNEGRGGRTAKFASKRRQKTLSRFNALQGRIVRRRNDWIEKTTTRLARENVLVAMEDLDIQAMTRKPKPKPDPDKPGQYLHNGAKAKAGLDRSILNNCWGHTLKRLNDKTAANGGKLVIVPAAYTSQTCHKCGHVAKGNRKSQAVFHCVECGYRANADVNAAENILSRALVKTGGGTALDVEDPHWRPDEASTPSFPQAGSSFGVRAVKGIPRL

SEQ ID NO: 18641 - protein, 356 aa, unknown
  TnpB Polypeptide
MPRAYKYRLYPTREQEEYFAKCFGCARFIYNKMLDDKIKHYKKTKQMLNNTPAQYKQDYPWLKEVDSLALANAQLYLQSAYRKFFKEKSVGFPRFKRKRNYNSYTTNNQKGTISIEHGFIKLPKLKTRVKLVIDREFSGVVKSATVSKTPTNKYFVSILVDEDIKRLPKSSNKIGIDVGIRDFAVPSKGDAINNPKWFRQSEKRLAKLQRQLSKKKKGSKNREKARLKVALLHEKIANQRNDFLHKLSTQLINDNQVIVIEDLRVKNMLKNSKLSKAISEVSWSEFRRQLEYKANWYGRDIIVAPSNYASSQLCSSCGHKNKAVKDLKVRNWTCPNCNTRHDRDINASKNLLKLAL

SEQ ID NO: 18642 - protein, 530 aa, Streptomyces sp.
MTARTRLRLSSSDAAVLAEVGALLGSLASRDLSVRCRQGPGSDAASWAARKRDLSGASSARWAGSITKATNDQWALARRAQAAELAWLRAEIPRIEARLARPVGAKADRRHGAVRGCATRSEWHAKARRLHTLEARLAALEGDWIAGRVHVVRGGKRLSRRRHHLSEAALGREAWRERWQAARMFLSADGETGKRYGNETIRVSDAGQLSIRLPAALSHLSNAPHGRYVLDATVAFAHRHTEWRDRVAADRAVAYRVHFDPRRGRWYLTASWQRPAVPVLPLPAVTARGVVAVDMNEDHLAAWRLDPHGNPVGEPQRFSYDLSGSARHRDAQIRHALTRLLHHARRTGVRAVAIEDLDFTDSRSREEFGRNTSLRRIVSRFPTARLRARLVSMAAEQGVAVVAVDPAYTSRWGAQHWQRPLATPTRTTTRHDAAAVAIGRRALGHPIRRRTAPPPHDRRDRAGHRTVQAAPEAREREGPRPRSSGPRTRSVSPDRGAKAGDQCVQHHSGHAAEHASWWLDALPLGPQEYG

SEQ ID NO: 18643 - protein, 426 aa, unknown
  TnpB Polypeptide
MWYHTAMEMQRTVTIMLPADADLRATLTAFRAVQNAVSADAFNDGKPLAAVPLQRVVYGRVKGALNSQMTITALRLVVGAYASALKNRNRRVRLEEQRRQRYEAKGWRYTPRQIKPLGACRFDRMAAMFLVGVRGRDADFRTDGTLSIWTVGGRKRLSYAVVPSHRPLFDAAKEIDSVTVIERGGKLYGRVALTLDAPEPRGVVPVGIDLNETNALVAVDADGRELFISGLSTKVRNRRTMQVAKRVQRTLATRKAEKRDTRSVRRVLKRLSGRRSRRTRDFARVTAKMLAQWAPADAVLVFEDLHMGQPAKGLTRGVALRRRLSLWQHDAIRTAVENKAQMAAMAVAFVNPAYTSQNCSRCGLRGVRRRHSFTCPHCGHTQHADINAAVNIRQRFVQSRLDAAPSVAAEALPPMGEGKPNRFSLG

SEQ ID NO: 18644 - protein, 357 aa, unknown
  TnpB Polypeptide
VSRYVFNKTVKILQDGEVKANWKAIKTDILNDLPEWCKAVPYQIKSIAIKDACTAVREAKKKYKKTSQIQRVRFRSRKNPTQSCYIPKSAVSAMGVYHTKLGKIAYSETLPDNICDSRLTSRNGDYYLVVPYQETKNTTENQGRVVALDPGVRTFLTFFSETSVGKIGNGDFSRIQRLCQHLDNLLSKISQACGGQKRRMRKAARRMVIKIQNLINELHHKTARFLVDNFDIILLPTFETSQMSKKGNRKIRSKTVRNMLTFAHYRFKEFLKHKAQETGKTVVDVCEAYTSKTVSWTGELVNIGGSRIIKSLVDGRRMDRDINGARGIFLRALVDTPWLRNQLALVNQNPPLVDFGS

SEQ ID NO: 18645 - protein, 421 aa, Acaryochloris sp.
MLNMTWEFKLKPTVEQVAEIERTLSVCRKVWNYALAERKDWLNSRKSPVNACSLHREYILPADQPFPNYVKQAKALTQAKQQIPELKSVNAQMLQQTLRQLEVAWEAWLLKRAGLPRFKNQARMRSFVFPQMLRNPISDQGIKLPQLGWVKVRWSRDIPDICLIKQARVVRKASGYFVLLSLQADVDIPEVPFQGHPTGIDVGLEYFLSTSDGLQVKRPRFFNPLHRKLQLLQRRLKTKQKGSANRSKLLQKIARVHQRIADTRKDWHFKLAHQLCDRADALFVEDLDFRIMAKGMLGKHTLDAGLGQFTNQILPWVCFKRDVYYAKVDPRGTSQECPDCGAEVKKDLSVRISHCLECGSIKPRDIAAAQVICTRGQRGIENACGVEVTGSSVLNSSQLALKQEIFGAIRGISSHTVRLAG

SEQ ID NO: 18646 - protein, 375 aa, unknown
  TnpB Polypeptide
MHHKYLDKRFRMASDIYQKTLREILKRVRKQKKDPLYKRAYRLPKGAERNKILKELDIKYDLRGSFSFSKFANNYRNTRNYAPYIPSDVAGKLGIRAWEAYSRVKFAKGAKRINLNQPLLSFEAKSNSGIIIRNGLLKMGTKGAQFECPVIYNNDEFEKQVFNLEFKFNRIVRRFLYGQWEYYVQMVFDGQHPRQAEQPLNTSVGIDIGTSTVALSSHFQTELRELAKGVVDKSQDIMRMQRKLDRQMRANNPDRYNDDGTIKRGRCRLTYSKEALSTKETIAELQRIQAAQRKVSHQTLANEIVNMGDRFVVEQMSFKGLQARAKDTEISEKTGRFKRKGRFGKSILNHAPAMLIDMIRYKAQFQNKAFITANN

SEQ ID NO: 18647 - protein, 411 aa, Cyanobacteria sp.
MLVFEFKAYGKPKQFSAIDEALRTVQFIRNKALRFWMDGLGKTQYDLNKYCAVLAKEFPFCNELNSMARQASAERAWSAITNARCSTWGNPKTALARFYDSCKKQIPLKKGFPQFQKNNRSVEYKSSGWKLADNRKSITFTDKKRIGTLKLKGTRDLHFYQPDQIKRVRLVKRADGYYVQFCVSVDRTESVEVTGTAIGLDVGLNDFYTDSNNQKIENPRFLAQGERRLKMAQKRVAKRVKGSKNRRKARQILGKRHLKISRQRKDHAVKLARCVITSNDVVAYEDLRIKNMVRNHCLAKSINDASWYQFRVWLEYFGKVFGKITIAVTPNGTSQECSSCKTVVKKGLSTRTHICRCGCVLGRDHNAARNILSRGLATVGHTGSYGLEACNAWGEDTATHVGASLHEQVTS

SEQ ID NO: 18648 - protein, 488 aa, unknown
  TnpB Polypeptide
MTESYVLTLKLNTSPEQDVWLGHTFRCGQQIYNVLVHHCRKQLRKLIQDPEYRKILDVRKESSLSKADKNRINMKLAVIRRDYGLSEYQLHAYVSVQQHRFRKCIDSMTAQKIASSVWRSVEKYLFDNGKCIHFKRYDDLDSLEGKSNVSGMRFRGGRLHWRGQVIQPQIRTDYDRKALKSRVKYCRIQRKPVGTKYHYYLQLVLEGKPPVKHPVGHGTAGLDIGTSTVAVMTEDSCQLTVLGSDTKDRSAQIRRIQRAMDRSRRATNPDNFLPDGTVRNGARKWIRSKHYKKLQFRKKSLERRYADAVNTCHHRLANKIASKADIVYVEKMSFHGLARKSKSAVKKADGRFKSRKRFGRSIGNHAPAAFLTILGNKLASCGGELIKINTVSFRASQYNHVTDDYVRKKLSCRGSFVDGRYVQRDLYSAFLLRNSNDTGTAADRQKCIDVFPTFLMTHDACMAALLAENKKYPSSFGLLSYKRYKCHS

SEQ ID NO: 18649 - protein, 537 aa, Burkholderia sp.
MQSTTQTRLTLAKADAELLDQVAALYGTMKRKLYARMAAHGGNAKSHKTAFCREHGISARMFNAMAIELQGLIDGTRELLKEERRSLQGGIGRLERQYRTRKTQLDEIAADRLRLKPLREAKLRRTVHQNTCRLERLNARLTKVEQRLEANVPGICFGTRKLFGQQHHLKLAGFSNREAWLREWQSSRSHQVFFVGSKDETAGNQLCQLQKATDGTYTLKIRLPDRLLAAGEAKSLIIADVTFGYDREALDAALEAGIALSWRLHRDERGWRAFVSFNYLPAQTVSLDAKYGAVGLDFNVDHLAVTETDAFGNLLYTKRLPLLREDASSGQRNAVLSDALSIAVAWAKDARKPVVAEDLDFTAKKKAMAQLSPKGARMLSGLLYAKYRQLLEAKCFRAGVELIKINPAYTSTIGAVKYASRRGWSVHAAAAGVIARRGQKLTERAPRVGTVIRVPVRGGHHALELPARKGQESREAVWRKVHTAYRGVVRERWLATRGGLPRRSAKGTHGSGARAAPLSRDNRLPCEIKLREQICAR

SEQ ID NO: 18650 - protein, 448 aa, Moorea sp.
VKTQTKVIRTDKWQLNPTPDQKRLLGETVKVYRRACRYLVGIIFTHWSELGELTADQLTPAVEKLMHQTARRPSVKYPQFNQAFYKFPSYLRRAAIAFSAGQVSSFVTRYREWQTGFRKRKDALAPKLNANTGCYPALYKGQCYKLHGYDQVEIKVFNGLDWIWTTVQITGLRERHLVATNKIMSPSLVFNEKYCHLSVPFTCKPEKRKPKANVTAVDLGINTTATIAVVAHDGTVIHREFIHPGRDIDRRDKRLKSVSMRASLTMGKGGKLHKGFCSLTYEKCRRINHQIGHIVSKRIVEIAKQFNSEAIVFENLKGWKPKGGRKRSNLRQRFHGWLKSKIRDFTEMKWTELGGKVIEVVAAYTSKLAYDGSGTVKRNSKKYSLATFPSGKRFNADLNGAYNIGARGVFKLTRRNDSEGRSSKNPGRPPRSWVCLCDLWTSGSSRLA

SEQ ID NO: 18651 - protein, 241 aa, Lentzea sp.
VQLRYNFRMYPDARQREALARSFGCARVVFNDGLRLRRQARENGEKHVSDGDLSKQVITLAKDTPQRAWLGEVSSVVLQQALADLNVAYRNFFASISGKRKGRTVAPPRFRSRKDNRQAIRFTRNSRFRVLDNGRLRLPKIGDVEVRWSRSLPSEASSVTVIRDAAGRYFASFVVRTTDEPLPETDSAVGIDLGLTHFASSRTVRRWPRRSSCAGLRASSSGCSRICLARPRDRTGVRKPS

SEQ ID NO: 18652 - protein, 510 aa, Bifidobacterium sp.
  misc_feature (391)..(487): Xaa can be any naturally occurring amino acid
MMLEAVKVTLDPTPRQERLLESHAGAARFAYNKGLAHVRDVLERGDAPEWSYYALRKWWNQAKDALAVDEATGEPWWPENSKEAYNSGLESLADALKNFSESRKGRRKGRRMGFPRFKSKDSGIRRFAYTTGSFGPVDHDSYALKLPRIGRVHCMEDASKRVDGAKVLRMSVSRRAGRWQASLTVERADDPAPKPPKGGSVGIDLGVKELATLSDGTVIRNPHALKSNLTRLRKAQRSLSRKRKGSNRRRKARANVARLHARVANLRRDLLDKTTTMLAHTYADISIEDLNVAGMVKNHGLAQSIQDAAFAEFRRQLTYKTARTGTRLHVIDRWHPSSKTCSNCGTVKTKLSLSERVYHCDKCGLSIDRDLNAAINIQVAGSAPETINARXXXXXXXXXXXXXXXXXXXXXXXXXXXXXXXXXXXXXXXXXXXXXXXXXXXXXXXXXXXXXXXXXXXXXXXXXXXXXXXXXXXXXXXXXXXXXXXXXSGGESRVRLGAGLGNEAMQMTSL

SEQ ID NO: 18653 - protein, 413 aa, Kocuria sp.
MLRRYRYRAYPTGEQVMALAQVFGCVRVVYNDALSACEEARARGRHLPSRADLSAALTEAKRTSERERLTSVSSVPLQQALIDLERAYRNYFDSLTGRRKGGRIGAPRFRSRRGRRQSARFTANAKFHVFETGHGVGHLVLPKVGRVRFALSRPLPARPSSVSVIREADGRYYFSFVVDVPSTVTASPVRRAAGVDMGLTDVAVVVRSDGVREKIVNPKWHKSAGHALARAQRALSRKQKGSKNREKARHQVAVLHRRVREARRDHHHKLARRLIDENQVVAVEGLDVAALMRTRMAKSVQDAGWGILVRLLHEKAVEQHREVAVVDRWQPTSQVCAVCGTKDGRKPLHVRVWTCRSCSAVLDRDFNAAVNIMIAAGLAEILNACGGDVRRTLACADPDEAGTHRTDRLRATA

SEQ ID NO: 18654 - protein, 303 aa, unknown
  TnpB Polypeptide
MECFENFNIDGTCRIKLFIDNDWKYVNIAFDKRALYSSKTFRFDGYTMDSPSLVFKSKRFYLNVPFYKNVELSKEQDIVIGVDLGITNSAVVSAVMKDGTVIDRLFINQPKEKDHLKYQLDRLNKANRMSGQKNKKPNIWRKINNLLTAIATQTANDIVDFAKKNNAKVIVFEHLHFKNRKGDKKKKLRSKRQYWTKIKIQEMVKNKAHSMGIRFSRVDARNTSALAFDGSGYVTRNPKGDIATFTTGKIYHADLNASYNIAARYFLRELERAKVPVRIDRTSQTLDTLINLAMMPHHPSKVA

SEQ ID NO: 18655 - protein, 392 aa, Mycolicibacterium sp.
MRRAYVFRLRPTARQHIALSACVDAHRELYNAALQERRDAWAHSKTRINYGVQSGQLSEIRRVRPDQGVWSFSSQQATLRRLNKAFDGFFRRVKAGQTPGYPRFKGKARFDSVEWPKDGDGARWLPDQQRVYLQGVGQVKVTAHRAVEGRVKTIQIKRQGRRWMLVLSCDDVPANPLPATGAQVGIDVGITTYATMSDGTTVGNPRWARQAATQLAAAQQRLARAKRGSNNRARLRETVAARHRKIANRRKDFHHQQARALVARYDLIAVEDLAIANMVRRPKPKPDPENPGRFLPNGAAAKAGLNRSISDAGWGLFVSILRAKAEDAGRTWIEVNPQHTSDSCEACGHAAPGNRVSQASFVCQRCGHAAPADEHAARNILRAGLARHANAE

SEQ ID NO: 18656 - protein, 353 aa, unknown
  TnpB Polypeptide
MGKHKVTFYSQDAQLKEIREVDPERYGRWAFDCERAAIRRLDRAFRGFFRRVKAGEKPGYPRVKGRGRWNSVEWPEGHGARWDSVAHPTVTRVYLIGVGHVRVHQHRAVKGTIKTITVKRERSRWYVVLSCDDVPAEPLPATGAVVGIDLGVASFLTKSDGKGVPNPRPLAAAADRLAAAQRDLTCKKRGSNRRRKAGRKVAALHGKVRRTRLDYAHKTALALVRDHDLIVYEALQIANMVRRPKPRPADDGTFEPNGAAAKAGLNKSVLDAGWGIFLRILNGKAESAGRELIAVNPRHTSQTCSRCGHIAAGNRVTQAEFRCLSCGHEAHADVNAAINILRSGLDLRVAQAA

SEQ ID NO: 18657 - protein, 396 aa, unknown
  TnpB Polypeptide
MRAYKYRLYPNKEEERRLLWTLEQCRLAYNRFLEEFEKGERNLYGLQKTFPRFRLEYPGMVDACAHTLYNEARHLFENLRSLAEKKKKGRKVGKLRYKGRNWFKSFTYNQDNIKLEYQDERFGLLRLSKVGYIPIRMHRDIQGKIKQVTIKHMASGNWYAHFAVEVSGPQVKQPIARAIGIDVGLDNFAVDSDGGVVENPRYLKRSLKRHRREARRLSRKKKGSKNRDKQRIIVAKAHENVVNQRNDFLHKVSKYYVENYDLIVTEKLMVNNMVRCHSLSRSISDASWGTLNQFISYKAENAGKRFVQCAPSYSSIDCSGCRQRVYKSLKERLHNCPTCGMSISRDYNASRNILKKGIEKVGSGRPELTLVDIRPLHQLELMQVGWRKQEKPEGED

SEQ ID NO: 18658 - protein, 265 aa, Shigella sp.
  misc_feature (190)..(228): Xaa can be any naturally occurring amino acid
MRYRNSRQVTGVVKNVTVSQSCGKWYISIQAESEVSTPVHPSASMVGLDAGVAKLASLSDGTVFEPVNSFQKNQKTLARLQRQLSRKVKFSNNWQKQKRKIQRLHSCIANIRRDYLHKVTTTVSKNHVMIVIEDLKVSNMSKSAAGTVSQPGRNVRAKSGLNRSILDQGWYEMRRQLEYKQLWRGGQVLXXXXXXXXXXXXXXXXXXXXXXXXXXXXXXXXXXXXXXXQRTQASVARAVVIQRKKIACHKVNSDARYVDIQRTPM

SEQ ID NO: 18659 - protein, 452 aa, unknown
  TnpB Polypeptide
MIQRLERHVIRKSDPNWQACHKLCSLSRKLGNCAVYLLRHHYFEKQPVLTRKELDDALKLHYISDYRAMPSAASAQRQSQVIAKQFKAFVKVTAEYYKHPEKFRGKPKLPGYKRKYRTFYVGRNGYQIQNHQLIITGGEAIGFSPMTVLCCEHQVFNAKAHEAVVGDLRIVPMGNTFVVELTYRSEKQEKDLSKCVSLDSNEALFCDLGLDNFATFVSTKPGVRPFLIKGKVLKCINQNYNKQVSELRSKGHKTHIRTKGVKRYWRLHDLLHKASRMVINFCLAHDLGHIVIGVNKEWKQEVNIGKRNNQNFVMLPHGKFVEMILYKAQDYGIDVTIREESCTSKASALDFDEIPSFDEKGSTPKPIFSGKRIKRGLYRTAKGLLINADINAAANIGRKELGDEWLKQLLGLDGGVLVDTPAVVRNLHAGADSRQWLELGIRSQETVHVSAR

SEQ ID NO: 18660 - protein, 385 aa, Betaproteobacteria sp.
MITRTVSLKLVATPEQALALSALADTYAQACNAIVPLAVEHRCWNRVALHHLAYYPVREQLPALGSQMVCQAVHRVADAYKTLKANKGISKDKPVPSIAFKPTSVNFDKRTYSIKGDTLSLFTLTGRAKIPFVCGKHQRNLLASGAPKEAKLIVRKGIWYFNLALDLPDVAPIPGGGVMGCDVGENYLAASSTGKVWGGGKLQHDRDIYLAHRRRLQSNGSRAAKRKLRAISGREQRHVKHTNHETSKSIVAEAIRSGASEIRMEDLTNIRANIKAGKRVRTRLHRWAFRQLQDFVAYKAQGAGLSVVYVDPSYTSQTCSVCGELGKRVKHRFSCTCGNLAHSDVNASRNIAGFAEPIGLARGGKVTRPEFAHRGLHDVVESPVL

SEQ ID NO: 18661 - protein, 383 aa, Catellatospora sp.
VKLVVQVKLLPTPEQASALESTLRACNTAACAVAAVARQKGVYRNYDLRKHVYQAIKDQHRLGAQAAQHVIKKVSDSYQALKANIRAGNLGKPGSKRRCSAEAKPISFRWDAAQPYDARMLSWQPDARTVSIWTVDGRLKCVAYTGSPDQLKAVATLPVGECDLVHRDGMWFLYATVEVPEPELIDPAGFLGVDMGIANIAYDCDGNRYAGTRLNGYRRRQLRLRKRLQAKGTKSARRLLAKRRRKDARHAADVNHCIAKTIVTEAVRTGRGIAVENLTGIRDRVRLRKPQRVTLSSWSFHQLGAFLTYKARRAGIPLAKVDPRYTSQACHRCGHRDKRNRPDQETFTCRSCRVVAHADHNAALNIAQRGVEDWGAVNRPHAA

SEQ ID NO: 18662 - protein, 204 aa, Lactobacillus sp.
LPKTGSEIGIDLNLSNFLTDDQGHQVPNPRYYRKMLTKLAKQDRKVARRRRRAKKEHRRLLDSRNYQKARRQRANLHSHIAHQRNDFLHRTSTVLIQNHDLIVSEELRGKNMLKNHALAMSISDVGWRTFISQLAYKAELYGRTYITVNPAYTTKRCHCCLVINHQVKLGQEEWRCPNCHVFHIRDHNAAINIKNKGLALFQEA

SEQ ID NO: 18663 - protein, 502 aa, unknown
  TnpB Polypeptide
MKCRIFRLHKDTNRSKIDKLEALHKAYVKYVRICVQTMLNQQTLNLPKAAKQTFFPRATDLTSQIEKIARDHAIQIVSAWAKATYARKLKPTITNLKHDGTLTDQDAKALCVIGLKSISKPWEFITQDHLDAYHTLLDTYGGNKPIVRDNLPMRLSEMTARLEDTTKAPLGGFWLRVSSLEARKSVWLPLVGNPYIQQADQVNKGISARKTKKGFWRFEAVSKAEWTIPEAQEDWPKLGVDVGLNVLAATSDGVTYGEHVKPKFDKLYARVRNLRANRQRQDLKDNSPKLDHLESKLSGLIKTETGRVVNTLIVRHPETVFVVEDLDLRGCRGQKRFAYRALQTNLERKAPTEKVNPAYTSQECPSCGYIHRGNRSSIRFHCRSCGRKAHADWVGSSGVLRRSEDEHIKAGDHPRGVKRVLRERFRVKRTSSLGFGRKEQPSFEPLPLGQRLTTVGSESFGSGTASNLMPVTFQQVLRNGTSVHQRTACSPPGSLQPEPSRP

SEQ ID NO: 18664 - protein, 381 aa, unknown
  TnpB Polypeptide
MENKAYKFRLTPTQSEIRALRQFAGCARYVYNRALSEAKARYENNGVKTNYYDWDKWVIQWKYSEETSWLKDCPAQVLQQSLKNLESAYINFFNRRAGFPRFKKKGMKDSFRYPQFVKVDSDKQKVYLPKIGWVKCRGHRPIEGTIKHATVSYKAGHWYVSIMVEYELTIKTHPFPSNCVGLDMGVVKTIATSGRQTYTLPTSIREVESQIKAVQRRIARCVKGSNRRNKLKLQLQKLWCRLSNIREDFHHKTTTDICKNHAVVVVEDLYVTGMTKSAKGTVANPGTNVTQKRGLNRNILKQGWGIIVGQLGYKLKWLGGAPLVTVNAAYTSQTCAVCGARDKRSRVRQSVFRCTHCGYIDNADYNAAKVILSKGVPSTQY

SEQ ID NO: 18665 - protein, 413 aa, Nostoc sp.
MQKAFKVILIPNHKQEVLINKSIGCARFVYNHFLALKQELYQTEQKTLNYNACSQRLTLLKKKIEWLQEVDKFALQNSLRNLETAYKNFFADLKKVKGKKNVGFPKFKKKHASKQSYKTNLTNGNIQIIENRLKLPKLGWVRFHKSHSEAVASHRASDITGKLVNVTITRTNSGKYIASILCETEIEKYPTVTENIGLDLGLKSYLTTSNGETVDNPKYYITQKMLLRKAHKKLSRSVKGSSNRVKAKIKLARTYERITNLRDDFLHKLSTRLIKENSIICIEDLRVSNMVKNHKLAMSISDASWAKFVTMLEYKALWHDRIVQKVGTFYPSSQTCNCCGFINPLVKDLRLREWSCPGCNSYNLRDKNAALNILTEGLRLLTAVGAPEVIKNACGELVSLEAIQAEIVEAGIA

SEQ ID NO: 18666 - protein, 402 aa, unknown
  TnpB Polypeptide
VKRLQAFKFQLRPGGQQECEMRRFAGACRFVFNRALALQNENHEAGNKYIPYGKMASWLVEWKNATETQWLKDSPSQPLQQSLKDLERAYKNFFQNRAAFPRFKKRGQNDAFRYPQGVKLDQENSRIFLPKLGWMRYRNSRQVTGVVKNVTVSQSCGKWYISIQTESEVSTPVHPSASMVGLDAGVAKLATLSDGTVFEPVNSFQKNQKKLARLQRQLSRRVKFSNNWQKQKRKIQRLHSCIANIRRDYLHKVTTTVSKNHAMIVIEDLKVSNMSKSAAGTVSQPGRNVRAKSGLNRSILDQGWYEMRRQLEYKQLWSGGQLLAVPPAYTSQRCACCGHTAKENRLSQSKFRCQACGYTANADVNGARNILAAGHAVLACGEMVQSGRSLKQEPTEMIQATA

SEQ ID NO: 18667 - protein, 328 aa, unknown
  TnpB Polypeptide
VLQVLERNWKSYFNGIKEWKRSLQKFLGMPRLPNYKKKNGKFVWFLKNNQSYIKDGRLYFKLKVFNGYSFKINATGRLISIRFIPQNDYYTLEIIYEKEIKSKETYNTNCASIDLGVNNFITMTNNVGLNPIIVNGKGIKSVNQFYNKQRAKLMKDAIHRNNSYWSHKLDTLNRKRYNRIKNFMHHTSKYIVKYCIDNSIDNLVVGINKTWKQDCKLGDKVTQTFTFIPYDLLIRQLKYKCDECGIQFIDTEENYTSGTSFLDNEEPTKENYNKKRRVKRGLFKSNNGILINSDVNGSLQIMKKVFPKALSDGIVGNLTPVVINVCKM

SEQ ID NO: 18668 - protein, 269 aa, Escherichia sp.
  misc_feature (86)..(127): Xaa can be any naturally occurring amino acid
  misc_feature (263)..(266): Xaa can be any naturally occurring amino acid
VKRLQAFKFQLRPGGQQEREMRRFAGACRFVFNRALALQNENHEAGNKYIPYGKMASWLVEWKNATETQWLKDAPSQPLQQSLKDXXXXXXXXXXXXXXXXXXXXXXXXXXXXXXXXXXXXXXXXXXAFRYPQGVKLDQENSRIFLPKLGWMRYRNSRQVTGVVKNVTASQSCGKWYISIQTENEVSTPVHPSALMVGLDAGVAKLATLSDGTVFGPVNSFQKNQKTLARLQRQLSRKVKFSNNWQKQKRKIQRLHSCIANIXXXXASE

SEQ ID NO: 18669 - protein, 345 aa, Alkalinema sp.
VLASEFSFADELNSMARQASAERAWSSISRFYDNCKKQIKGKKGYPNFKKHNRSVEYKTSGWKFSETRKKITFTDGKNIGMLKLKGTRELNFYDLKSLKRVRLVKRADGYYVQCCMSVDRQINLTPTGQAVGLDLGLKYFLADSNGETVESPNFYCTSERQLNRANRKQSKKYRKGAKPQSKNYHKARQTYSRKHLRVSRQRKEYCKNVAYSVIQSNDLVAYEDLNVKGLVRNRHLAKSISDAGWSTFRHWLEYFGKKYGKVTVAVAPQYTSQDCSTCGETVKKSLSMRTHVCPHCGFVADRDHNAAINILQKGLRTVGHTGTSMLGESSPLVSLEQSCGVTVGC

SEQ ID NO: 18670 - protein, 343 aa, Proteobacteria sp.
MRAFNAAASYAAQVGFTAQVFSQAAIHVRCYRELRDRFGLSSQMAVRAMGKAVETFKRDKRVCPVFRADGAMTYDERLLGWKGPAHVSLLTLQGRQIVAMVYGEYQAGFLARLKGQVDLILRDGTFYLHATIDIPEDSPIHPIRFLGVDFGIVEIATDSDGHNSPGAAMEAVRQRTARARQTFQATGTTSAKRRLKKMAGTQARFQRWVNHGLAKRLVQYAKDTQAALVLEDLTHIRDRITVRKRQRAKHHHWSFRQLRDLLTYKAQRAGVPLLFVDPRNTSRTCAECAYVDQRNRRSQAVFSCLQCGHTAHADHNAARNLATRGAVSRPDLVAPLLGQLAQA

SEQ ID NO: 18671 - protein, 453 aa, unknown
  TnpB Polypeptide
MKQIITAKLKLIPTPEQHRALRETQLAYRDGLNAVSQYAFAHGKTSSVTKLHKGMYAELRARYHLPSQLACSVERQVAATYKGLWTKLLNNREHRRLKITKKRFKGLDKPPHYSSPTVQYTYERDYTFQCEQQVNIKTLNGRISLPYQGYFKHLLLIQQGGHIAHIGDAKLWYDQPKKQFYLLVSLELTLPEPTCDELSEVVGVDVGVRYLAVTSTTAGKATFYTGKRVRHKANHYARLRKRLQQKGTRGAKRRLRRIGQRERRLKAAANHQIATQIMREHPQTLIGLEELTGIRDRTKRRKRKRKKNGKGYERVSPKARKSNRVYSQWSFAELHALISYKAALSGSLAVKVDADYTSKSCPMCGYTADENRPHKGLLFACQQCYYTLHADLIGARNLVMRTLVLRQDWSATGLLSMAPDASDREAKAVRLRRYAELRWSPEVRSLRSETAGD

SEQ ID NO: 18672 - protein, 427 aa, Escherichia sp.
MHQENTMLPRRISVSLFIDQSIIWPVKRLQAFKFQLRPGGQQEREMSRFAGACRFVFNRALALQNENHEAGNKYIPYGKMASWLVEWKNATETQWLKDSPSQPLQQSLKGLERAYKNFFQKRAAFPRFKKRGQNDAFRYPQGVKLDQENSRIFLPKLGWMRYRNSRQVTGVVKNVTVSQSCGKWYISIQTESEVSTPVHPSASMVGLDAGVAKLATLSDGTVFEPVNSFQKKQKTPARLQRQLSRKVKFSNNWQKQKRKIQRLHSCIANIRRDYLHKVTTTVSKNHAMIVIEDLKVSNMSKSAAGTVSQPGRNVRAKSGLNRSILDQGWYEMRRQLEYKQLWSGGQVLAVPPAYTSQRCACCGHTAKENRLSQSKFRCQVCGYTANADVNGARNILAAGHAVLACGGMVQSGRPLKQEPTEMIQATA

SEQ ID NO: 18673 - protein, 420 aa, unknown
  TnpB Polypeptide
MSLGLDMICAVKRIERIRLYPSARQEQALRFMLDVTRQLYNAALQERKDAYRMRGVSVTFKQQYAKLTALRKPLLRLDSRLAAVYRETEDAVLRRLDLAMQAFFRRCKRGETPGFPRFKPATRWKQLTFPHGDRALRLVGGRLVVPGVDALRVRKRREVPNERGRAWIIEKNGRWYCCFEREHAAQPLPATYKVLGVDRGVHVLAATSEGELISNGRMADKHQRAATGHARALDAATVKDAKGRPTNGADPKRIAAVRRLARAKEREANARLDALHKAAHRIVASADVIVTEKLNLRGMTRSARGTVEKPGRNVAAKSGLNRALLDAGFGILRRLIGEKAESAVRRVIDVEARYSSQECSKCGTIAAKSRRRRRFVCIACGFALHAGVNAALVIRGRAQLALTSEPYPAEDAGRRTRRAA

SEQ ID NO: 18674 - protein, 299 aa, Burkholderia sp.
VLTTGSSKALGIHSGTINATCEQYAKSRSQHRRPYLRYRGRKSLGWVPLKGRDLKREGDAFRFAGNTFRVFNGRALPEGKIKDGTNFAQDARGNWFLNIVIEMPDVQARPIRSGVGIDLGLKDFATLSTGEKLPNDRFGRRAAEKLAKAQRARKHKRHIAKLHAKVANARADFQHKLALDLVRRFDYIAVGNVSAVKLARTRMAKSVYDASWSSFRNKLRYKAIAHGATFEEVDESGSTQSCSACGSKDSTTRPKGIAGLRIREWACSDCGVEHDRDTNAALNILRCGRASPGVGITCH

SEQ ID NO: 18675 - protein, 386 aa, unknown
  TnpB Polypeptide
MLKAYKIEIKPTKDQIIKIHQIIGVCRFIYNFYIAHNKEIYESNGEFVSGISFSKWINNEFIPNNKEYIWIKKVSSKAVKQSIMNADKAFKRFFNKKTGFPKFKKKNKSDVGIYFPRNHKTDFTLERHRIKVPTIGFVRLKEYGYIPLYSIIKSATITKKCDRYYIAILVDEKLKPNTKPYTEGIGVDLGVKSFATVSNGRVFANINKTVCIKRIEKSLCRQQRRLSRKYESLKSRKNKEREATRQNIRKQLLKVQKLHVRLCNIRTDYVNKVISELVKTKPAFINIEDLNVSGMMKNRHLSKAIAQQKLYEFREKLIKKCHQNDIEVRLSDRFYASSKKCHHCGFIKKDLKLSDREFICPNCKTSIDRDLNAAINLRDNKIYKIA

SEQ ID NO: 18676 - protein, 766 aa, unknown
  TnpB Polypeptide
MVGGDRNARLWRDRTVGDECMALLPWRRRSIGFHATAPAHLDQATVARCFGAGHIGRVHEPVLLPGDLEDSAWFGRRHRVPRTVHGVGAREAFRAPLRVRDLGRARRPRHRASRSGAQLRGSPLRRRVRCRLGRLRVRLAPRRGTGRGLRWSRGLHVDRGPGYLAFDHWLVALRTGASGHARATGAGRVDGDRARLRVRAPGASTTEAVDRRRALRARSGGGLRHRTDRAEPKHSSVGPGGNGLRGDRRCRGHLRRRQFETDPRSVATGFVRSKYASHLVSTVHLVDQHYRMRAALVPLDPSPAQAELLRSYCGASRFAYNWVVARAKETRDIRGEERRKGIDEADLTKLDWSEWSMTPLWNSVKDEVAPWRRDVTMHAFRSGVTNASVALKNYDESKKGIRKGEPVGFPKFKNRHSKRSFTLIEFKPGYWFSEDSRHVRLVLPQHATDPRITRRREQLRWLHTTESLRRLKKKVTTGEWTIQSVTISFTGGRWQASFLVRQFYMPAPSAKRLIGPLVGVDLGVKHLATLSVPVAGVSDEHGHVENPRHLDAELERLATLDRKLSRCQKGSRNRAKIRKRRQLLYGRITRTRDLHLHRLSTTLARSFETVVLEDLDIVGMVKRPKKNTTKASSRSILDAGWSELRRQLTYKTEDRGHRVVVVNRFYPSSKKCSHCGETRAKLALSDRVFECGTCGITLDRDVNAARNIRDEGIRLLTNEASTVAGHQPETLNAVSRDRKTGAPRCDGGDRYQSRTTQPARESSPLA

SEQ ID NO: 18677 - protein, 378 aa, unknown
  TnpB Polypeptide
MGIALDGINCLFLKNELVAALKMLPTDAQAACLTATLERCNTACDWLAETAWNAGTFGQYALHKISYTETRSRFGLTAQAAVRCISKVADAYKLDRDTQRSFRWDAAQPYDDRIIRFVKDGSAVSLWTLEGRMIVPIVMGEHQKRLMAYRKGEVDLCLVRGKWILAATCDIPETDEFEAEDWLGVDLGIVSLATDSDGKIHSGAEVERKRQHIRKRRRGLQKCGTRGAKRRLRKLAATQRRYQKHTNHVISKALVLEAERTSRGIGLEQLKGIRQRVTARGGNQRARLTNWGFGQLGAFVAYKAKRAGVPVVFVDPRNTSRECSECGCVDKKNRRDQSTFKCIGCGREANADLNAARNIRQRAIHARANVMTPEVLAA

SEQ ID NO: 18678 - protein, 497 aa, Moorea sp.
MILAYQYKLKPSRHQQALMLSWLDMLRSHYNFCLRDRIESYEQIKEPKLGNYSDLKTKAFCCPLTCSVSKNSSIGEPFKKSVKLRNAYEQQSSELPSLKKVRPWYKNIHSTVLQQNLRRLDTAFKNFFSGRGYPKFKTRQRFKSFKYPPNQVKVEGKKIYLPSLGWMGFFKSRNLPDGFSLRSVTIRKKADGWYVSIQIEDKTITESQCIELEQVKSVIGCDLGIKKLLALSNGEQIKNPQFEKQIEKTKAIRQRSASRKKRGSKNQKKAYQKLAKIEQKIVNQRNDYHWKIAHHLVRLAEVIVLEDLNVKGMIKRCNPKQDEKVKYLKNGQAAKRALNKLIRDCSWGNLVEKIQSVAEKFGCIVEKVNPKFTSQECSNCGHIEPKNRDKEKFLCLNCGYCEDADNQAAVNIGKKGINQLNLSLSKLLGVTQEVTSKSELTGSTKISRELSTSLEVEPGNPQQLSLFEWINGQVTDCSESPVKPYRAITGENVNMDN

SEQ ID NO: 18679 - protein, 404 aa, unknown
  TnpB Polypeptide
MKAPVTMNQAQVYGISKQNSEKIFQFFQKNFGCTRKVYNLCVDSCYKQLEQAGYTSGDDLPDISFPKVAALKKDYPYLKEADGLGLANSVLDFQKAYKIFRNQKDRSAYRKSALRRDRSGKEPLSFRGLKGIPRFHVKSAGYFSYRTACQYPKEGNALKRPTIRLEGSILYLPKLKQGVELIIHRKLPEDAHILNATVFMDTDGTYQVSICHSYTFLMEMDYREAAAQEQPLPKGTRFLGLDYSQKDLYVDSEGRKANYPKYYRRSEQKLARLQKSICRKEKNGKNYQKTMRKIQKLHTKIKHQRHDYLQKLSTELVSRYDAIVMEDVNLWVMGGCLSLGKNLHDNGFGLFRDMLAYKLWKKGSCLVRNLPDIFERSHGKSGRSKEPAESCEREKTKEKGGRKT

SEQ ID NO: 18680 - protein, 361 aa, Thermoprotei sp.
MPRIIADEETIEQFMYVTVNGRLKPKSSEDYMKLCLLAYRFKQTVKHGLDLVLKGIPQKEAYKELAKLLPSSIYGETAYKYAKLLVEGSNERKIKIRRIWVASRGGVTWRGNLNIRLVSTNRVLIRYYNGEWLEFSARFGRKYLPLIRELIELAKYKRISYGVSISFNNGKPYVHVEIPLWLYLKHFSTPKSEGYGLIAGFDLNSDRVNVVVINGEGDIVALKTFWYSDVVSHGFPREKARWLRLNALADALKWCRRIGVDYIVFEDLIKIKTRKFTSNPTINRKITRFPKKQMIRHGVMKALKLGFTVILVDPRGTSNSITHRQIMIEKGLDRHMASAHMIAYRGLKRLKEHIPSTTPPT

SEQ ID NO: 18681 - protein, 449 aa, unknown
  TnpB Polypeptide
MLVFELKLHGTDSQYQSIDEMIRTARFIRNSCLRYWMDNRGVGQYDLSKLCAVLAKEYEWAGKLNSMARQASAERAWSAIKRFYDNCKQKKQGLKGFPRFKKRSHSVEYKTSGWKLSSDRQSLTFTDKFEAGTFKLIGTRDLNFYQIEQIKRVRVVRRADGYYAQFCIDVERSESHEWSGRVVGIDVGLEYFYTDSDGNTVENPRFLRKSEKALKRSQRRVSRRKKGNKNHKKAINRMARKHLKVSRQRRDFAVKAALSLVRSADLIAYEDLQVQNMVRNHHLAKSISDVSWSLFLKWVEYLGRIHGIVVVAVPPQYTSQDCSRCGHRQKKTLSTRTHECVKCGLKLHRDPRVLRKNQSPANSLHNSAIEIRNKGLQKLGASTAGLAGIHACEQNDLCTVEETQPCKPTGRSRKSVEQSMESPSIITSAQARRNLEAEDVKQSGDIIYT

SEQ ID NO: 18682 - protein, 415 aa, Pseudanabaena sp.
MLNLTYSYRIYPGLDQEAMMLDWLEQCRRVYNYALAERKDWINSRKCPVNACSIRQEYIIPADTPYPDYYKQQNALTKAKEEIPELKAVHSQVLQDALKRLDKSFKFMQERGFGFPRFKKFGQYRSFVFPQFKSNPVNGFEIKLPKVGAMPINLHRPIPEGFEVKQVRVVFKSSGWYAQLILQADVSVPEPMPHGEPIGIDLGLEKFLAVSNGKLVERPRFFVDLQSKLRWLQRKLSNKKKGSANYRKISAKIRALHEHIYNVRREFHFLTAHSLCDIAGTIFAEDLNLKMSSRGMLAKHCLDAAWGSFLEILKWVSWKRGIYFAKVDPNGTSQTCPQCGTHTGKKELSERVHHCGECGYVTDRDIAAAQVVMQRGLLFVADGQSVILPVEEGCLGTPMKQETSRAILGSQHRTR

SEQ ID NO: 18683 - protein, 374 aa, Thermoprotei sp.
MPKITADKETLERFTYITVNGKLIPRSNEDYMKLCLLAYRFKQAVKHGINLVLKNTPQGKAYKELAKLLPSSIYGETAYKYANLLVESAKEQIDNEIYINKIVIKKKWIASRGGVTWRGNLNIKLTSTNEVLVRYYNGEWLEFKVAFGERYHSLIKELVKLANQKKISYGVTISFRNGKPFIHVEIPIWLYLKYFSQPKLKGYGLVAGFDLNSDRLNVVVINGNGDIVALKTFWYSEVISHGFPRNKARWRRLNVLSNMLKWCRRVGVDYVVFEDLTRIKARKFTHNPNINRKIAKFSKKQLLRHGVIKALKLGFTVILVNPKGTSSSVTHRQIMREKGLDRHMASAYMITYRGLKKLKEQEPPITPSTTAGYP

SEQ ID NO: 18684 - protein, 419 aa, unknown
  TnpB Polypeptide
MNILKGYRTELDPNNVQRTLLLKSAGAARFAYNWGLNRTQEVYAMNQLPVPHIKYPTAVDLHRELNRLKRTDLPWFYEVSKCAPQEALRNLDKAFDRFFKGLGKYPKFKSKKKGIGSFAITTGAMKVSSDHIQIPRVGNVRLKERDYIPVDLKVKSITVSEKAGRWFVSVRVKEETGEPVPIKGPVTGIDVGSLKLATVSDGKVFENPRALRRNERKKARLQRSLARKKKGSNNRHKARMKVSRIEARIANIRKNAIHELTTYLAKTKSVNVIETLNVNGMLKNRDLAKSIVDAALGEIGRQLVYKCNWYGSLLVKADPYYPSTKRCSGCGHIKDDLPLDERIYECGVCGLVIDRDLNAARNLEQYYTKNLGPNYALTVAASSTETINACQRREVAGHRETDGQCSPVKQELNTIERKS

SEQ ID NO: 18685 - protein, 377 aa, unknown
  TnpB Polypeptide
MRKEAAAMEKAYKFRIYPNTEQTTLIEKTFGCCRFVYNEALAARQEVYKTTGKTISKYDCIKRLPALKAAKPWLKEVDAIALQSSVEHLDAAYQQFFRGLKAHRKVGFPHFKSKRHAKAAYCTKRVGQNIQVADRAVKLPKLGWVRCRVSTPVQGRILSATVSRTKSGKYFVSICCTDVEIPKMPSTGALVGVDLGIKSLAVTSDGAVYEPNRHLRRAEAKLASLQRSLSRKSKGSQRRNKARLKVARLQEHIANQRLDDLHKLTTGLVRAYDVICVEDLVPENMLRNHRLAKDISDAAWGELVRQLEYKCAWYGKQLVKVDQWFPSSQLCSNCGDQNAAVRDLKVREWVCPGCGAHHDRDRNAALNILNEGLRLLA

SEQ ID NO: 18686 - protein, 393 aa, unknown
  TnpB Polypeptide
MQLRYQYRIKPTAKQRQALARAFGCARVVYNDGLRLREDSFKAGLPFITDGELLRLVTTEAKKTPERLWLTSVSAVVLQQSVADLHRAYRNYFRAIEEFRTARLEGKRAYLRVRRPRFKSKHYSQAVRFTVNSRFRVLPNGRLRLPKVGNVHVRWSRPLPAEPSSVTITLDRAGRYHASFVVEVAEVPLPVAESAVGVELGLSNFAALSTGEKVANPRWLRQRERALRRSQRNMGRKERGSRNHEKARRKLARQHVKVADARRDFHHQLSTRLVRENQVVAVETLNIAALGRSNLAKSLADAGWGQFTSMLRYKTAMAQRTLVKVDRWYPSSQLCSGCGARSGPKGWTGLQLRAWTCSRCAIVHDRDVNAAKNILAAGRAVTACGPGVRPGVS

SEQ ID NO: 18687 - protein, 437 aa, unknown
  TnpB Polypeptide
MKVHRTVRYRLHPGSSRKHQQLHGTAGACRFVWNHMVRKLKDEYEFGIKPDFRHYSLCQVFTIMRRDDGTTKWLQDYSSRVVRISLKPIETTYKAFFKDLETGGKLNRKPPQFHGKWATTPSFPINYVSAKVSGESLYVQKVGWMKLAGNNPYPDGEFKSGTVKHECGNWYAYLVYEVEAQASLPHSIKEVGIDRNIAEGRLAVLSDGTKHGGPDLGKKVAKRKRYERSMARKREIYWKNQMNLCGPKPQGRPRYQPSKRYLRIQLRHQRACVAERFARKNWAHRVSKNIASEYDVAYVEKLNIRGMTKSAKGTKQKPGKNVKSKSGLNRQILASAWGTLELCLNYKMEVCKVNPAYTSQTCHQCGHVDKDNRNGIKFKCAACGHADDADVNAALNILAFGNGATGRGGGDTGGESCHSRPVKRQQMGKESLADFAT

SEQ ID NO: 18688 - protein, 517 aa, unknown
  TnpB Polypeptide
MFVSLQFKLELKKEDREKLIKLMRRQSSAIRTAYNMLKELEKEKAKNPHAQIYQRLRQLFPELPTKYIDSAIYKAKQYPTNKPVVFGSKRLFEKLCKNHLIGKVREKLKKQWKEQRQGTLISIGSKADKGNRLTRFEDLNGQLHLRITTGNREFIYAKVLREPSNNKDKWLTFMAMLLESWQTKNYFAYTVELKLRNGEVYGSVSFELPAPKVKYTKENGVIAVDTNASPIHLAIAEISKTGELLSYQTISLHHLLGLSQNSKDHQEWILAHQLLDLAIQKGKAIAIENLKKLKKGVRGDGKATLRKILHNWNAKKFLQKLKRVAMIKGVEIVEVNPAYTSVIGMLKYAPQLNIDKDIAGAYVIGRRALRFKEDTPENYERLLKDKAYLEFALKRYEEREKKLRELIEKESNEYKRNALKSELRNVEYAKKLLTNLLQSLQSESSSCGGAYGRNPKQGEIKKVSQSAWQVLKVALLFPILGRILPRDLSPLKPVLVEGVWDRVRSRLVPLEAGGTSR

SEQ ID NO: 18689 - protein, 418 aa, unknown
  TnpB Polypeptide
MNRSSINACPLISSIAPVREKPNYYSQKKQLPIIKKDLVKVFHSGELLNFSRVDATVLQDVSKRVDKAFERFIVGDSNGGKSGKPRFKSEASFRTMTFATASNNWIKLIRKNWLYLRLPKLGIVKVRMHRRIPDGFMIKQVSVTKKADGWFVQFVLEDVRVPTQSQDAIVPTWDNSLGMDAVLHEDVYLATSEGGKLPSLKPLRKNQTKLNRISTKRNKRKRGSKSRRKLAKREARQHQRIARSRKDFHYKTAHKLVKTGKKVFIHEDLNLKGLTKRNKSKQAEDGTFLPNGQSAKSGLNKSWSDAAFGNFFKTLDYIASKAGAVVVSKNPAYTSMVLSYRDEIIFTDCSIRDYWDESESLIVDRDINAAINLKRLGVGIFPSIKRRSGKISVVGTMDESTTKEILHTLHRAAKKRTL

SEQ ID NO: 18690 - protein, 377 aa, unknown
  TnpB Polypeptide
MYKAYKYRIYPTSGQETLLAKSFGCCRWFWNYALNLCQETYKNTGKGLTRGYIQGLLPNLKKEFEWLKEPYSQCLQVVALNLSTAYKNFFDKRAMPPKFKSKHGRQSISYPQNVKFEDDYINLPKIGLVYCKLHRTFDGTIKTVTVSRNPDGKYFVSVLIDDGKAQAEAVPIDKSVGLDVGLTHFVITSDGSKFDNPRFFIKHQRNLKRKQQKLSKKKKGSNNRIKAKLKVAKVHSKIARCREDFLHKLSRKVVNENQVIAVENLNIKGMVRNHNLAKAISDVGWGMFLTMLKYKAESEGKIYIEIDRWFPSSKTCHVCLNRVDTLPLDVRAWTCKHCGTHHDRDINAAINIRNEALRILTLGTSASACGGDVSRQE

SEQ ID NO: 18691 - protein, 526 aa, unknown
  TnpB Polypeptide
MKGKSKASKTKQDKDSTMSSLTNAVQLELPLFATAVSVQQSSETTSLDKLNLCVTSIQQPKSSKISALDSTSSAKDCKPYWSDLCAEISSKLLLPVATDCVDSDLNCSSLWSNKTVEGSWFSQILYTVHKQNSPPIFLPSFTSSVAECTDLEATARRSRKIRIFLSPEQKALLKRWFGVSRFVFNATIKFLQQPGTQANWLAIKTELLNSLPDWASAVPFQIKSIAIKDACQAVKKAKADFRKDGQVRRCKFRSRKDTTQSVFIPKTAIKDCGIYHTILGRSKLKEALPKGFSDGRLTLAYGEYYLIVSEEVQPRQTDNQGRVVALDPGVRTFMTFFSENSYGYLGNDSNLQIQKLCFKLDKLVSKMSKASSAQKKRFRKASDRLKSRIQHMVKELHYKTAKFLVDNFDVILLPSFESSQMVSKSRRKLRSKTVRQMLTLSHYQFKKHLEWKAWESGKVALTDINEAYTSKTVSWTGEIKKIGGSRVIKSADGRSMNRDLNGARGIFLRASVDTPWLREHLNLCIC

SEQ ID NO: 18692 - protein, 401 aa, unknown
  TnpB Polypeptide
MEVRAMLVFEFKAYGKSSQFQAVGEAIRTAQFVRNSCLRYWIDNPKKNKYDLNKYCAVLAATFPFADELNSQARQASAERAWSAISRFYENCKKKIPGKKGYPQFQKDCRSVEYKSTGWKLSPDRKSITFTDKKGIGKLKIKGTRDLHFYQISQIKRVRLVKRADGIYVQFCIDVNRTEDTAPTGTTIGLDVGLREYYTDSNGVTVENPRFLRKGERILKRSQRRVSRKVKSSKNRGKARQILGKRHLKISRQRKDHAVKLARCVIQSNDLIAYEDLRIKNMVQNHCLAKSINDASWYQFRIWLEYFGKVFKRVTVAVNPQYTSQECSSCGEIVKKTLSTRTHACKCGCLMDRDFNAAINILSRGLGTVGHTGTFALDASNALGELTSTVVGEILPQQVGS

SEQ ID NO: 18693 - protein, 397 aa, unknown
  TnpB Polypeptide
MVTLEYKLKGKAQQYQIIDDMIRTAQFVRNKALRYWIDNQGVKLVDLYKQCAIMAKEFEWAGKLNSMARQASAERAIFAVQRFFANCKAKKPGKKGYPQFKKHTRSVEYKTSGWKLSADKRCLTFTDGFAAGTFKLVGSRDLHFYAPSEIKRVRVVRRADGYYVQFCINVERTEEVSPTGKAIGIDVGLNHFYTDSNGETIPNPRYLRKSEKALKRAQKRVSRKKKGSSNRKKAINRLGRKHLKVSRQRKDFAIKTALCVVKSNDFVAYEDLQVKNMVKNHKLAKSISDAAWRQFAQWLQYFGKVYGKTVIAVAPQYTSQDCSVCGNRVKKSLSVRTHICGCGAVLDRDHNAALNILAKGLKQAGVILNTVGHTEINAWGQNDLYSLVVTSKSKSTD

SEQ ID NO: 18694 - protein, 553 aa, Streptomyces sp.
MRRRSMADPGKKQLRQIAAPLVALGPSGVAIRDRFKNLTPEDENILRLVGEHQGRLASRDLEVRCLDGLDHDNNRWAARKRELTGQSSSRIAGTITKSTHDQWTLARRCLLAHTQNLEAGVRTLKHRLSLPIGEKGTKRAPGGYRSRREWHAKSRRLAALESRLERARADWKSGRVRVVRGGRRLLKMRHNLEAAQLTETEWRERWEAERWFLAADGESGKLFGNETIRVTPDGEVSIKLPAPLADLANSKHGRYILATRVQFKHRGAQWADRVAGNRAIAYRIHLDVERGQWYLTASWQSPAVKTIPLQAARARGMIGVDTNADHFAAYQLDIHGNPIGDPRRFSFDLTGSSQHRDAQVRHAITRLLHWARRCGVAAIGIEDLDFTAEKTREKHGRKKRFRQLISGMPTGKLKARLVSMAAEQDMAIVAVDPAYTSLWGDQHWRKPLTSTKRKLTRHDAAAVAIGRRALGHPIRRRTTPPLDDQSDHRGHRTVQADRGARGREETRPRIPGPRTRCDEPDSGEKAGDQCAQHRSEHTAEHGSWQQDSLPLSL

SEQ ID NO: 18695 - protein, 442 aa, unknown
  TnpB Polypeptide
MKSRKFTVVAQLHENQNHDLIEYVDSCFATYGKAKRETFHVLKRHDDFNKSSFNKHLQTKYGILKRTANSIISDAQGTLNALIELKKYEKSQLERKISSLETLISKLEMKIADNKTLLRLNDKSVFLVAHRNLKRKLVSKKNQLNHKKQKLDNLVYQIENGIYKLCFGTKHLLNRDHKQFVERRDSQLSFVGSKNETAGNQLLQLAYNRQNNQFNIQLRKDIGGFKDQRGSYVNGKVYFNHHKKELISILINHNSPLSYKMIRKNGRYYLYCTFEIKRDESSFVTRSLNGVIGLDFNKGFVTLTETNQYGHMVDTDLIRYRFKQGTATQTDLEHVATLVKERALATGKDVVIENLNFKVTKAKAVSKKDKKYNDILHSLAYRKFVAIIENVCYRNCIWLRKVNPAWTSWIAKQKYCQKMKLNIHTGASFVIARRGQGYTEKV

SEQ ID NO: 18696 - protein, 298 aa, unknown
  TnpB Polypeptide
MPQSNACPPRYNHHTYRMDWESQTVRLSLIGGRQTIRFDVPEYAEKYVGNPVDTADLIERDGQWWLHVVVTVPAPEVEPTDQVVGVDLGLAQPAGTSTNHVLGKKAWKATEGHYFKHIRSLHKKRTKSAKRRLKKLRHTRARFRRDCDHVLSKQIVHASEPGSTIVLENLKDIRKRVKAKRKTATKRRIHGWSFAQLKSFIMYKAEERGCTVVGVDPRHTSQMCRCCGHTARTNRRSRGVFICRACGFHLHADLNAARNSAAKYRAQVGTACLGGPSVNRPIVSTSDSCGCEAQAACF

SEQ ID NO: 18697 - protein, 199 aa, Fischerella sp.
VPYQIKSIAIKDACKAVSNAKKKFKNGGGISKVKFRSRKDPIQSCYIPKSAVSDKGIYHTILGEVTFKEALPQSFGDCRLVKAYGDYYLTVPEEVSRQQSENQGRVVALDPGIRTFITFFSESSFGEIGISANIQIQKLCFRLDKVISKIAKAKCKSKRRLKLAATRLRGKIKNLVDELHKKTARFLVDNFDVILLPTF

SEQ ID NO: 18698 - protein, 516 aa, unknown
  TnpB Polypeptide
MRTIKRYSYKVNNGEWNQLCEIARLYRDEKNFHLKIYNQDKNYCNCQNERSRRDALVKEKYQPSTNLQARQWKTALTEAHDAVDKNWCALAVEIKSLIAKHKGTWSDAEMHYAYWLTYKGKRLAELMGSEKAPEPDHFEISHAEKKRGRNYLRRVIRRKRGGRPIARLTRSFALDANMYSLVEKVDFNGEKVQFIKIMGLTPRKMIVVPLTGYSNFSGNIRIVLDFYRHRIEVHTTSDVTIGIIPEQGGVVALDAGCSEVFTDENSTAYEPAFGKTLLTASEKLCETMKARNKSAALMKKSSKHKAHRILKFNLGKQKMRDRKRKIRIRVKQQISHAIRQVCHDRKPSIVVTENLDIRGKAKNKKMSRLVSFWMRSSLKERLEFLALVESFHHKQVNPAYTSQMCPTCLFVHKDNRKGDIFQCLNCGHTDLADRVAAINLKARYYDPNITIYTPKSVVWSILQKRFIASLESSNSTIVGATVSGRTGAQCKVRQSETPLPNSNNGRGTEMSYLMTF

SEQ ID NO: 18699 - protein, 379 aa, Lyngbya sp.
MRTRCYVDRCSIVSCPIGEIPARVDYYSQQSELKETKKLFPDYKEIYSEVQQINLQRLKKSWERWLIPDKSGKRGGKPRFKKVGFLRSFGFSRVNHAKAAIKFDGKNIITTRIGIIPVVVHRPIPNGFVIKTATIIKKADGWYVAFSLKDDSVPELIPVEQIKTGVGIDVGLKELAVTSSGETFPFKRFYRNAQAQLATSQRRLSRKQKRSKNYLKQLNRVQRIHQKIQRQRKEQHYKIAHSLVDRYDLIAVEDLNIKGLARTPLGKSILDAGWGGFLTILEAVAVKRGVHFVKVSAYRTTQECSTCGAIVPKDLSIRTHECPKCNTVLDRDENAAINILNRALNEAGIVLSAWVGLVDRQPLKQETSKTEKYIQLSLF

SEQ ID NO: 18700 - protein, 414 aa, unknown
  TnpB Polypeptide
MPTSIRNIEFRLYPTKSQEHTLVGWLGLHCELYNAAIQERRDAYRKCGLSISYNQQQNDLPVIKEYRPELIPLGSHALQETVRRVDRAFRAFFRRIKSGDIPGYPRFKSKDRFDSFCYPDLAGWKIIRQNKLRISNLGELSMRGRPRIPLTAGTPKTLTIKRQAGKWFAICAVEYPEAVLQRNQAYTGRMAGMDVGCSSLAVTSDEDYIDNPRNLKQAREKLTAAQKALSRKTRGSKRRAKARLKVSALHGQVARKRKDFLHQLSAAIVFLYSVVAVEKLLLSNMTRSARGTVEKPGRNVKQKAGLNRSLLDASIGALFSLIAYKAEEAGTRFVKVAPHHTSQNCFWCGHKVPKELSVRVHICPSCGFTQDRDYNAALNILAKGLVQTGWEPSEAWSRVAAAVKRETTSMPLAA

SEQ ID NO: 18701 - protein, 359 aa, Clostridiales sp.
MVIRQAGLFAYARYDMAYRGVILKAYPTATQRQKIEQTFGCCRLVYNNRLAKRQERADSKPRIISFPEIRSEYFKDFPFLDSVDIRACLGTTTDLSSLRFKSKRDHWQSYRTWGVSLNRERTRIDLPIVGSIKVKGFFGSYSRIVGASIKRAPLGEYYIVLTLEFKPEPRPNKGGQIGIDVGLDLYSVDSNGHENNNPQYYEKSLKKLKRLQRRLDRKTKDSKNYEKQRRRLAKVHAKIANQRKDYLQKLTTTLIRENQTICVEELDIQAMLADKSASQHIASASWRMFRDMLTYKAAWYGNELKLATPSLISRSICPHCGYKSSGNTDRLTSMRMCPNCKKFFDADQRVASKILLNAL

SEQ ID NO: 18702 - protein, 390 aa, unknown
  TnpB Polypeptide
VPTHRKVHRFRMRPTKAQESILNRLAGARRYVWNWALRRWKDHYEADGKPIGLKQLSAELTALKQRPETAWLKDADSQALQQTLKDLHRAFDNFFEKRARYPKSKSRKRDPLRFRIPQRVKIADGKVYVPKVGQVRIRQSRPVAEKTKSATFRRAADGHWYVSLVVEFAIPDVALPPVNPPRVVGIDLGLKDFAVLSDGTRIPAPKFFRKGQRKLRKAQRVASRRKPGSNRKAKAKDKVARVHQGIADQRGDFLHKLTTDLVLNHDGLCIEDLSLKGMARTKLAKSVMDASMGEFRRQLEYKCLWNRKHLAIIDRWFPSSRSHGVCGEINGQLRLSDRTWTCGCGDVIDRDLNAAVNIRDEGIRILAAGHADKSNARGARVRLAIASNGR

SEQ ID NO: 18703 - protein, 370 aa, Lachnospiraceae sp.
MKKQRAYKFRLYPDRQQEVLFHKTFGCCRFLYNRMLADKKEMYEKTGKTERLTPAGYKKEYPWLKEVDSLALANVQLHLEAAYKKFFREEKAGFPKFKSRHRSRKSYTTNAVNGNIRLEGGRLRLPKAGGVKIRCHREIPEGYILKSVTVSMDPSGKYFASLLYEFPASESQAAGKDMEGPEVLGIDFAMRGMAVFSDGSRAEYPMYYRKAQERLAREQRKLSHCKKGSRNYGKQKRVLARCHEKVRNQRRDYLHKLSRRIADRYDAAAVEDIDVKAMSQCLKFGKSVMDDSYGAFRDMLMYKLEDQGKELVKVDRFFPSSKMCSRCGNVKKELRLDERIYRCGCGNCMDRDVNAAVNIREEGRRLLMTA

SEQ ID NO: 18704 - protein, 432 aa, Calidithermus sp.
MQTLTLRCTLKPTPEQAAALEATARRFAEGCNHALRVAKEHGEFRRFKLHRLVYRDLRAMGLSANLAVQAIARVGRKRGSRARFYQPTSCAFDQRTLSLRGEDESVSLTTTAGRLVIPMRLGNYQRGLLARARGVQGGVLTQGPRGKWYINLVLRIETPTPPGGGGTIVGLDMGQKTLAMLSSGVRFSGGPLKGVRLNYLKKRAEVRSRLDRPSQRTRGVKRLWERLTGREARFVSHALHALARRIVDGLDPGDTLAIEDLTHLRCRTTKRGREARHLHHLWPYAKLRFLLGYKAALRGVRVVAVDPRHTSQGCPRCGHTARENRRSQALFRCTACGFQHNEGVAVGHTGFAGNLADWVAAYNIALRARGCSPVPQGIVARRAGSTGEGREGSGIAAGRCAPDLCKPARILRVSSVHRLLSESPNQNALAFG

SEQ ID NO: 18705 - protein, 376 aa, unknown
  TnpB Polypeptide
MQHTAYCFRIYPTDKQKELFVKTFGCVRSIYNKMLADKIEHYKKTQKMLNNTPAQYKKQFPYFKEVDSLALANAQINLETAYKNFFHNPKTGFPKFKSKKNSRRTYTTNLVNNNIELKEGKLKLPKSGWVRVKQHREIPEDYKLKAVTVIESGSGKFFASILIEYEEEITNKEPKSFLGLDYSMHDLYIDNEGNKGEYEHIYRQSEKKLKRAQRKLSLMNKGSKNRAKQRIKVAKVHEKIANSRKDFLHKKSRQIANAYDCVCVENLNMKAMSQCLNFGKSVHDHAYGRFIEFLSYKLKRQGKYLVKVDKFYPSTQLCSVCGYQNKEIKDLSIREWICPQCGTSHDRDLNAAVNILNEGKRLLLNQIKKEPRGTRG

SEQ ID NO: 18706 - protein, 492 aa, unknown
  TnpB Polypeptide
LSSTPHLDSTRQNRVDTEPCVQRLSKPHTPPVFNCNVQITTYKASKTSPFKAGTQKRINTCAGELCGVGVRAYRYRAYSSKTTARVLQTQLQVACKLYNTLLRLEQEEYKKNKHTMSRNELRQLALDLRKQNPEFQSLHSQVAQQVADRFYQARQRFLEGLANKPRVKKPHKYLSLVYPQSGWRLSNIRVVGRGENTDNKKKKRKARLYLSKIGFFTVVIHRDLPLSRVCQVCIKLNPSGRIYVVFLVEGEEVEAPNEQKRAGEPMKAVAVDLGITRLATLSDGRFLNNPKPLERSLERIRLLQKGLSRKKKLSKNWLKAKLKLAKEHEYVKDFRRDLFFKLGALLAKEYDLLVLEDLDVEGLIQKGETKKRRLRLYDSAFSELRRILEWQFQKQGKTVLAVPSYNSSRECFQCGEVNHNLTLEDRVFHCPYCGFTLDRDSNASLVLCKRAGWEPPAAPAELHPIPPLPSLGLARRRQGGAMIQEAPPFRAG

SEQ ID NO: 18707 - protein, 415 aa, unknown
  TnpB Polypeptide
MSTKQSIRQRLYPTPAQASLMLEWCHQARFVYNVQVAEFRMRRELRASGGAWVAERAPQDKIKRLRARLPWLSAGPSIVHQSASRDFERALSNYYAGRAEAPTFHRKDSRAGGFVIRDVTLRRLNRRWAVISVPKVGPVRFRVSRPWAEISSASTARARLDNGQWHVSLTVPARGKIVAGTGMMVGIDRGVKNTIATSDGTLSRIPTLTVGQQHRWRRLERTKSRTTKGSKRRVKVLDQLAALRRRQNDLATNWIEQTTTHLARSYDLIVIEDLRLTDMMRRPAPISDPEDPNDFLPNGAAAKSGLNRVLHASRMGRLATRLRDKTSAVLAVDPRNTSRRCPECGHTAAENRESQAVFVCRSCGHRANADLNAARNILERGMAIAGAAQEQEPADGGEWAAAPDSGASASDRRAA

SEQ ID NO: 18708 - protein, 393 aa, Firmicutes sp.
MVQKLTLLIRFGQLSKTKGNAISSLAQTCNSATQYFLAKAQELKTTSQKRLHDACYSEAKSFFQLNTGILQSCRDKAIACQRSYLARLKARKKASKPKGNFPIPVRKDCYKLFQSKRGTWHIKFATTSGYGSQLAFPLQPRENQLKWLSKDFKRGTCEIFNRKDYWILALTVTVNTPAPKASSIIGADLGIVNMAVLSTGKFFSGKWVQFKRNHFARKRSEYQSRKLRWKVKASKGKESRWMRDVNHKLSRQIVDIAKLNNSAIALENLIGIRERIKVSRKVNKMLHSWSFGELINFLKYKANLEGVAVIEVDPRLSSRTCSRCGHVEKSNRKDQATLLCKGCGYNLNADINASFNITLRASTLTPTKLGARIGGGHRLNGDRSLRPNLIASL

SEQ ID NO: 18709 - protein, 368 aa, Streptomyces sp.
MTQQVKRAFKYRFYPTDEQAAELSRTFGCVRYVYNWALHMRSEAYALHSKNVGYAETDRALTVLKRQPDTAFLAEVAAVPLQQALRHLQTAFAAFFDKRAKYPRFKSKKKSRMSAAYTRAGFRWRNGQIFLAKMNAPLDIRWSRPLPEGADPSTVTVSRDSAGRWFVSLLCEDTITPAPATTNAVGIDAGITSLVTLSSGEKVTNPRHERRDRARLAKAQRELSRKAKDSANREKARRKAARVHARITDRRRDFLHKLTTRLVRENQTVVIEDLTVRNMLKNHKLARAISDASWTELRTMLEYKCAWYGRDLVTVDRWFPSSKLCGACGTVREEMSLNVREWTCECGTMHDRDVNAARNILAAGLAER

SEQ ID NO: 18710 - protein, 373 aa, unknown
  TnpB Polypeptide
MRVTDNPDFLAGLPMQSAQNVLKQAVQDFKDWLKALSDYKKHPEKYLGRPRMPRYKRSGVTTFTLSNQDAVLYFTDHGTLLKLPLVPERLYLPNLSNKAVLKEVKVIPFYDRYIISLTLEEPEVPLRPDLPYLCSVDFGIDNFAAIVCNDGSSKLYKGGAVLSDCQWFHKSRAAAISIITKGHDRYTASSRKLNSISVNHHNFINDQCHKISRDIIRFCMEHRAGTIILGENKFWKQNTSMGAQNNQVFVSMPFSLLKNMITYKAEREGIAVITQEESYTSRADITAMDYIPVYGVDDEKADFSGRRIKRGLYRCSNGLVINADCNGAANIMRKAVPDAWNGTESFEFLALPEVSGFHELNPKSNSVRGIDAV

SEQ ID NO: 18711 - protein, 507 aa, unknown
  TnpB Polypeptide
MASNSVVSRTYPRVPYAAFDKDGGPLSLDDVLNGVRKDAELVSHYALKEMTEQNLTLVTYFDGIKPAEAGRQMNLKLPAEVKKHFKSGASRLEKMFQEQVVTNLRSWAARVEVMTQTYPKYVSAGWKRNASKSKPTSMSPRLALSAADKQYREMSVTPERIELMMIVQGQWTTLLFPTPPQLLEQGCEPGVPDIWIDDQNRVVFGFHGKTDPGRPKFSERYVIGVDVGVKNPAAYVVWDTDKKQVVEKSLLGQRARSLNNKIKRGKVQVASLQKKNRSEEAVSHREHLSNQRRELSILIAQELADVSWHYDNAIVSFEDLSHIKNTMKHGRWFRGEVYRRTRDMIEADGGRVMKVNAAYTSKRCHVCQSDLDMSNYSSPVCDTCGITHHRDLNAAANIAQRVNHKKACETRKRHATKTKRIRRSKCQIKPLKHPGTKNRPTPKAPQNQKKTHITTTPAREVSVRMCPADNRVSVVDHDTWFQTTSGTTNPKENLSTENTVDVVYPQE

SEQ ID NO: 18712 - protein, 376 aa, unknown
  TnpB Polypeptide
MIKAYKIQLKPNNKQQTKLFQNAGVARWAYNWTLARQQENYKNGGKFIPEFELQKQLTQLKLTDEFKWINNYSRQTIVQAIKDACQAYKRFFEGLSGFPKFKSKKSTKQSFYSRYDKIRFTETHVRLEKIGWIKLAERNRIPVNSKYSNPRVKFDGLNWWLTVGVEFEPVQDGTSHSEPIGIDLGVKDLAVISTGEKFKNINKSKKVKKLEKKLKRLQRKVSRKYEKGKEENRYRKTKNIIKLERLIRKTHQRLRNIRMNYIHQITTKLVKTKPEYIVMEDLNVSGMVKNHKLAKAVQEHTLKEFRRQVEYKCEWNGIRLIIADRYYPSSKMCSECGYILEKLSLSTREWVCPKCGALHDRDLNASINLRNYPKSA

SEQ ID NO: 18713 - protein, 376 aa, unknown; identical to SEQ ID NO: 18712
  TnpB Polypeptide

SEQ ID NO: 18714 - protein, 511 aa, unknown
  TnpB Polypeptide
MKIEEINEQKELQSKVKKHGKHGEVKSMSQAPLVTFYEVVPLRIKTELMSVRECERLRRITERDTRIIRDYLRIIKHNEENILQKNGKVNTSLLDKLTLTTSKNTKNKLRTSVPHDLKKRYPRCSFDEFQECRDKAIWTYESWKAQQDVSKKELSRPKFKNKTPRPLFKGTEGRGTFQVHSKSDNTDARLWLELRDSLDTKRSGKRTHQRLWLPLAYSPYHEKRLKLENIKMMELVRKSKEQQWWAHFTLQYSVSCYQSTLPPAVLGVDLGIKKTAVAVLLTPTGKVIMDEIRFIVNKERQSKIWQLENQIEDTQRKLNKSLNNGQHTKQLNTTLFRLRRRRRSIIEQELGYAVNQLVDFTLQLKKRYNLFVSVGYPKNIQKSQPRGSGNKSHRRRLHKWCYRLFITKLKYKLTSYGFEPLRVVAVKESDTSKTCSRCNSTNTTRTGQGQFNCHDCNYVLDADLNGAKNIGKRLIRYVLKSKFNYIFDILTKECYPLRHYKSFLPLGQWLK

SEQ ID NO: 18715 - protein, 382 aa, unknown
  TnpB Polypeptide
MILKTFKYKLYPSKPQQRLLAQTVETCRRWYNACLEERKKAWETEQRNVSKFVQLAQVKNYRKENQFAAQLHSHTLQVVVQDLDKAFQAFFRRLKTGETPGYPRFKGKNRFDSFGLKEYGNGFKLDGRRLRLTGIGRVRVRWHRPLEGKIKTIRICTQAGKWYASFVCEVEEQPLLPTGREIGVDVGIHHLLATSENEVVDNPRWYGVEQHKLRVMQRRVSRRKPGSSNRRKAVLALQRQHQHIASSRKDYLDKLANNFVTNYDRIALEDLRINRMVRNHHLSKSILDAGWGYLIQRLIDKAVEAGRQVYLVNPSFTSKSCCSCGETFPELSLADRWVDCSCGLSMDRDVNAAHNILQRAGHARWGQSTAIGLRLPQETPPL

SEQ ID NO: 18716 - protein, 400 aa, unknown
  TnpB Polypeptide
MIRSTKTSLEFSNTEKLNQLHSFLEEYRTVVSKFVDILWTEEKISPLIPNEITSQITTWLSARAIQCAAKQASGIVRGTRTKQNRRLWQINKFIKDGCAKKARKLQRIYDNIKQSKPNIDNVECELDARFVEINLNNQTSFDGWITLTCLGNKLKLELPFKKHKHFNKMLENGKIKTGVRLSKKNITFMFDIEDINLRNEGTTLGIDIGQTTTLSCSDNQSLDSCPHGHNYATICAKLARKKKGSKAFGRSETHRSNYLHYIVNKLNLDGVRIVNRENIKNLRKFSNTSRKLKHWNYAELFDVLDNKLAEQGVLVNKVNPTYTSQRCSMCGWTRKANRKGKQFKCDKCFHEQDADLNASKNLALNLVSIKKQERLQHKSRIGFYWNVVSKEPIVPSVQKS

SEQ ID NO: 18717 - protein, 398 aa, Proteus sp.
MKRLQAFKFQLRPNGQQEREMRRFAGACRFVFNRALARQNEAHEAGNKYIPYTKMASWLIEWKSDSETQWLKEAPSQPLQQSLKDLERAYKNFFQKRTAFPRFKKRGKSDAFRYPQGVKLDQSNSRISLPKLGWMRYRNSREVVGEVRNVTVSQSCGKWYVSIQTEYEATEAQHGSTSIVGLDAGVTKLATLSDGTVYPPVSSFKVNQRKLARLQRKLSRKIKFSANWQKQKRKIQRLHSHIANIRKDYLHKVTSEISKNHAMIVIEDLKVSNMSKSAKGTTERHGRNVKAKSGLNRSILEQGWYEMRRQLEYKQLWRGGQVLAIPPAYTSQKCACCGHTAKENRQSQSQFECLECGYTANADINGARNILAAGHAVLACGGDRPSKQEPAEVIQTSV

SEQ ID NO: 18718 - protein, 395 aa, unknown
  TnpB Polypeptide
MIVLEFKARVKPTQATAIDDAIRTAQFVRNKALRYWMDNQGVGKYDLSKLCKDLAGEFPFAKKLNSMARQASAERAWSAISRFYENGKKGIKPVGFPKFKKHSRSVEYKTSGWKLLGPKRITFTDGFGIGELRLIGTWDLAHYDESLIKRIRLVRRADGYYVQFCIQAECQVQVEPSQKAVGIDLGLRYFIAASNGMVVEAPQFYRQAEAQLNRANRQKSKKFRKGAKPQSKNYHKARVRYARTHLRVSRQRHEWLKDQALRLVQSNDLVAYEDLNVKGLIRNRHLAKSISDAGWSTFRHWLEYFGVKYGKVTVAVPPHYTSQTCSNCGETVYKALSVRTHQCPHCGYEADRDVNAAINILRLGLRTVGHTGTYTLGEIGPLAGLEQSCSVKSGR

SEQ ID NO: 18719 - protein, 420 aa, unknown
  TnpB Polypeptide
VKLTFPYIFKADKTQKEIIEEIMWHCEKVYNILNYDIYQGKETISLKNSINVQSGKIYKKYRESNWHSKYLHSHTLQETIINCIRDHKSYIALKEKYENGDKSIKGKPNKPRYKNSGKIEITFTKYAIRCEGNTLKLSISKKMQEKFKVKSLNFLIPRKLKKLVNFSEIKMIKIRKEKENKYKMEMIYEREEKAKEGTNVMAIDLGLDNIATCTNMNNKETLIIAGEIAKSKIGYYNKEIGRLQRIQMKMLGNEKYKNTKQIEKLYRKRNQYCNTYMHKASRMIVNYAIENECDRIIIGNIKNIKQEMKNNKRFVQMPIQELVKKIEYKAKLEGKEVIKIEEKYTSGVSSIDKEEINKENYDKTRRIKRGLFRTKTGKIINSDINGSLNILRKYVKSFSPNLEIAMDIGREQRPLKKRVA

SEQ ID NO: 18720 - protein, 388 aa, Nocardiopsis sp.
MKVTVRVKLVPSPEQARALAATLDACNRAADHASRVAQTTGARHKYALQEALYHEVKADFGLSAQPAVRVLGKVADAYTTREANLKNGNLGRKGSQRRARAQARAITFRRDAAQPFDARCLSWQMDARTGSIWTTRGRMKNLPFVGSPEQLKLLATCRQGESDLLCQDGQWFLSATCQVPEQPLNTEPEGFVGVDPGIVEIATTSEGDRYAGRGLNRYRRRQNRLRAKLQKKGTKSAKRVLKRRRRRQARRARDVNHRISKHIVERAERTGHGIALEDLRGIRGRVRQAKQQRSVLHAWSFAQLRDFIVYKARRAGVAVVVVDPAYSSQTCSACGHTDRGNRASRAWFVCRGCGVVLHADVHASRNLARRGRAAWNAGRRSTAPAPST

SEQ ID NO: 18721 - protein, 393 aa, Thermosynechococcus sp.
MRGVEKAFSYRFYPTTEQESLLRRTLGCVRLVYNRALAARTEAWYERKERLDYVQTSALLTQWKKQDDLQFLNEVSSVPLQQALRHLQSAFSNFFAGRAKYPNFKKKRNGGSAEFTKSAFRWKDGKVFLAKCNEPLNIRWSRRLPDGVEPSTVTIRLNPAGQWYISLRFDDPRDLKLQPVDPSVGLDVGMSSLITLSTGEKIANPKHFNRYYKRLRKAQRSLSRKQKGSRNWDKARLKVAKIHQKISNSRKDHLHQLTTRLIRENQTIVIESLAVKNMVKNRQLARSISDAGWGELVRQLEYKAQWYGRTLVKIDRWFPSSKRCGQCGHIVERLPLSVREWDCPKCGAHHDRDINAARNILAVGHTVTVCGAGVRPDRHTSGGQLRRSRKSQK

SEQ ID NO: 18722 - protein, 546 aa, Sutterella sp.
MIGVPAQQYRKKPTMQQTELADLHFVDAKRIKELGNAAELPAYRTMVRCLDETSVEKNREQLEALLRAFGKERQHFIDLLFTRDHRAFCIGNRWRKLRDALVMVKYRSCYGLQARHWKMALQTAATTVSNYWRLVQANALSRIRKKAWFARLNKLEQRYVHFLLGSLSEDFFTMLDGKCPSVVTDTEKEFVASRKGLCKAMVRTIHDEQGKRPKHGRDASVWFDCSCYKAVVVGELVRLDLMSLTPGVRLTLYVKGSVPVSSTLKLVKHPDGTMALHVQKSLSKADIRPIDSPKASRGKLYCRALDLGLTEVATDDAGNRFGTCLGEKLTGYAQYLDAKLKERNKLMARAQKAGKAKRRRMLRCNLGSKKFTKELQRIRTEIQNTVNKALNDILRQSPAQVYALEDLSHRFTFEGKYSRKVRNLLSKWVRGTIKERFLFKAAKAGVQVVFVPAAYSSQHCPECGYTAIENRKGEHFECKHCGYKAQADQNGALNLLHRVNDPEYRRYMTKEAVKKLERGRYEAWCKSRQEEPIKEASNKKRLKKAA

SEQ ID NO: 18723 - protein, 282 aa, unknown
  TnpB Polypeptide
VNSRLFLPKLGYVRYRNSRAILGTPKNITLSTKGGHWFASIQTEREIELPRHPSTTSIGADAGIKRNMTLSDGSFIEPLNPHKKQLKKLSKYQRKLARQTKFGKNWTKTKNRLQKLHARIADARRDFLHKITTTLSKNHALIVVEDLQVKNMSRSAKGSVEKPGRNVKQKAGLNRSILDQGWASARIFLEYKQEWRGGMLLAVPPQYTSQTCPACSYISSRNRLTQSKFECVECGFSGNADHVAAINILERGHRSLACQANDATRSSATGSHPKRLNEGLAA

SEQ ID NO: 18724 - protein, 406 aa, unknown
  TnpB Polypeptide
MTTTRQVFRFRLYPDLEQEKRMLYIIETCRRLWNDALSHRKSRWEKERASTSYNMQQWILTGERKRYPELRELYSQVAQDVLHRLDNAFQSFFDHMSKYPRFKPLRQYGSFTYPQAYNGSVFLAGGKVHFSKVGDIPILVHRQVPVDGRLKICTVRREACGEWYAVLVYETDEPAPEQKEVFESPVGIDLGLNSLITTTDGLKIEPPEFLRKSEKRLKRLQRRLSRKKKGSKNREKARHLVAVQHAKVRRQRMDFNHKLSAAIVAKHDFVAMEDLRIRNMVRDHSLAKSIHDASWYQLKTFIDYKERRMGGLMQPVEPAYTSQDCFFCGARNDVTLDMRTFVCTGCGRALDRDFNASWKVLQRGLREIGQDMPEYTPVEIGPPPFQPTGLASLVEEAGTFFGGVSL

SEQ ID NO: 18725 - protein, 162 aa, Halobacteriales sp.
MQSVGWKMTGRFNILLHKIAISIVVESETCGCSHIAFEGLMEIRKRMGAKRLHAWAFRQLYAFVEYKATERGIQVEQVDPAKTSQRCSTCGHTDPRNRPTQDRFRCLVCGFENHADYNPAKNIAFELLRNQNGPEGGAPEGVRVNGGAMSASGDVTGLPRSG

SEQ ID NO: 18726 - protein, 313 aa, unknown
  TnpB Polypeptide
VPLQQGLRHLQTAFTNFFAGRAKYPNFKKKHHGGNAEFTKSAFKWKDGKVYLAKCSQPLDIRWSRELPVGAQASTITVKLSPSGRWTVSLLVDIEIAALPESPNQIGLDLGITTLMALSNGEKIANPKAFKAKRRKLRKTQKALSKKKKGSNNRHKARLKVAKVHAEISDARNDFLHKLTTRLVRENQVIAVEDLSVKNMVKNRKLALSISDASWGEIVRQLEYKCNWYGRTFVKIDRWFPSSKRCGHCGHIVNKLPLNIREWDCPKCGTHHDRDVNAAKNILAAGLAVNVCGATVRPEQSKSVKAGAMKQKL

SEQ ID NO: 18727 - protein, 424 aa, unknown
  TnpB Polypeptide
MKYSPRYQLFPDDQQQEQLNWTVDVVRQLYNDALKRFNDVPESDGTLNQRVRSVRDELPSMKDWWDDLNDVYSKVLQMVARRVSDNLDRLKEKKKNGRKVGMLKWKSPREYRSLTYNQSGFELKNTSDQTVLSLSKIGEMPIHLHRDIPDDARVKQVTVKQEKTGEWYATFGIETETDAPKKPALDEIDREDMVGIDVGIIKYAHDTDSTMVGSLDLEDEYERLEREQRALSRKEDGSQNWHEQRRRVARIYARIVRKRRDFLHKLSNYYTREYDLVAVEDLDVHRMMQLPSNSRNRASASWRTFIDFLEYKCDREGTHFVKVGPEGTTQECAECGVEVEKELWVREHSCPTCGFETDRDENAAYNVLQRGLSELGLGHAEVTPAETALSTSTTGGSSTVVDAKCVVETGSPTLKERTASAVSE

SEQ ID NO: 18728 - protein, 626 aa, unknown
  TnpB Polypeptide
MSSKNTKPPDPFEHSGKQPYQTLKIPLKTILRDKEALPVLTQLVFDMNNLVIHTYQFIRLYLLQQLNISNSIPIIDDTFILYCMKTLGERDNRGKQATNTDLLSTLEKFYITEYQPLVNHEKVSLKNKTYILPYLATHIHTAFSNNITERFTSHFLRFINQTTTTITKDRSLLLQFKHRLFDLKDEEKNSPFQPWKDNHLHHILPTNIKKSVHYDVKVRPFHYLKGMLYMNSILEENDRKLFQPIPLRTDIIPKYITLDTACLISLFCPEKGKDGKKTRKGELLKNIKENQRDIWSSFIDLNNKIFRNKHYQFSYQLQTDGVGCSLLFIRKDLAENKKWGSKMPIVEEKEYPQLESLDDQIIEELKPRKIIGCDPGKRSLVYMVDEEGNRLQYTAPQKRIESKSKRNAYVLGIEKRRCGIIEKETVLSEQNGKTSKLEKFKSYLIEKTRLNNETMEFYKREVWRKMKFRSYSYGKKSVDVFLNKIKETFGDNLLIGYGNWSRDTQMKHFMPTMNKGLRKLIHRKYDTVTVNECMTSKMCCNCKSELENYKDKKGRKIHRLLVCKGQGCVSSQNKKAVFKTRDLNSAVNILNLTKAWIDRKERPEEFCHKLRSSLIVSHTRQDKVEP

SEQ ID NO: 18729 - protein, 206 aa, Thermus sp.
VQSQPLPPSDKAVGIDLGTNPHFLITSDGETVEAPRYFQKAEERLAKAQRELCGKKKGSYRYKQARRRVAKLHRKIANQRKDFHHKTARRLVNNYGIIVHEDLNILGLARSYVAKGVMDAGWAQFLRILAYKAAEAGRRVVGVDPKHTSQDCPVCGYRERRPLWVREYTCPQCGTHQHRDVAAAINILARAWVSPQGYLAGACGDR

SEQ ID NO: 18730 - protein, 440 aa, Clostridium sp.
LRKFVLYDINNKTIGGEELRLTFVCDFKLNEIQEKIIKEIKWHCSKVYNTFNYAIREGKVDVSKIKRVNEDGGKIYKNYRDENWHSKYLHSHTLQQIILNCIRDHKSYLALKEMYEKGDKDIKEKPQMPRYKNNGKMQITFTKQGIRIEGRTIKLSISRKMQEKFRVKSLNFLIPKRLEKLVNLESIKMIKIGNITEEKCKMYIIYEKEEKVIEDGSNIMAIDLGMDNLASCTNMNNNKTLIIAGERIKSKIGYINKEIARLEGIQMKTTGSKDFKNTRKINKLYEQRRNYTKTYMHKASRMIMNYAKENACSTIVIGDIRNIKQNMKNNKRFVEMPIQNLVKKIEYKAKLEGIEVEKIGEEYTSGVSSIDKEEISRKYYNKARRIKRGLFKTNSGKIINADINGSLNILRKYIKEMFSPDLEIAMGIGREQRPLKKRVA

SEQ ID NO: 18731 - protein, 248 aa, Blautia sp.
  misc_feature (241)..(241): Xaa can be any naturally occurring amino acid
IRQTLEIYRSAVSYLIGIYVQVWEELAEIPDAKRRFNAAEHLVHTTKKNHACFDFDIRFPKMPSYLRRSAIQHALGTVSSYKTRLDLWEKTDGKSGKPKLVYENHAMPVFYRDVMYREGAEGKDEAYLKLYDGHDWKWSCVRLDHTDMEYLRKCWSGKKASAPTLEKRHRKYFLRFSYKEEVTLAKTPVKEQIICSVDLGINTDAVCTIMRADGTVLGRRFIDHPSEKDRMYRTLGRIRRXRSIPETL

SEQ ID NO: 18732 - protein, 199 aa, unknown
  TnpB Polypeptide
MNRKMKHLQRRVSKRVKGSNNRKKAVSKLAKLHLKVSNIRKDAIHKLTTYLAKNHSEVKIEDLNVKAFLKNHKLAGAIADCGMYEFKRQLEYKTQKFNSKLTLIDRFFPSSQICSNCCNHRHKMPLRVRAFECPSCGNIQDRDLNASKNIERWFEGIFIPERSELAVSSTVSACGVDKPDSSHVVATVKQEVNTTSTHV

SEQ ID NO: 18733 - protein, 256 aa, unknown
  TnpB Polypeptide
MGTWKSKNRHKYLLQYHIIFVCKYRKKLLVSRQISDDIKQFSYEICQRHSVIIRYMETEHVELPHINQNTGIDLGIKELCITSAGKKYENPKIIRKYEKKLVKLQRQLAHKEKRSQNYCKTKKKIALCHEKITNTRKDYLHKMSHEIISENQVIVSEDLQIKNMVKNHRLAKSISDVSWYELTRQLEYKAKWNGRKYVKIDTFYASSQLCSVCGYQNTETKNLSVREWVCPVCGTTHERDINAAKNILEEGLRRIA

SEQ ID NO: 18734 - protein, 372 aa, unknown
  TnpB Polypeptide
MKTYKYPLYDQSNTIRIGNLLDDVWQVHVYFHKWQDQRYKDGLPYADYEAMCNHLKILKDTTHPHWTALPSQVMQQELKRIHNAYIRFFKKLGGKPHIKPRRKFKSITYPSSAGWSLFNNRITLTFRKWNPKTRKWQYDKVAYTFHKHRQWHGTIKHITIKRDSCGRYWLCITTTYKDFKPLPATGKSVGADFGMKDAYLTLSTGEKIQHPHPLKHSLKKLRSLNKALSRKVKGSNGWWKCVRQLARLYRKISNQRKDFHWQLASKLCKKFDTIVIETLNLDGMKRLWGRKVSDLGFYQFVEILRHKCSKHKRLLKEIDQWTATTKPCSDCGFHNENLTLNDRQWICPECGSHHDRDINAALNILRAGIAVT

SEQ ID NO: 18735 - protein, 366 aa, unknown
  TnpB Polypeptide
MQLPELNRPHIDSVTRTLRLKVKTESYAWLNAAACEVNQVWNWAAEVSEKAARPCTGERKWLTGFDLNNLSAGATEYFDKIGADTIQRVNGEYAEKRRIAKRYRLKWRTSGGPRRSLGWVPFKAASLKRKSRAVRFCGKTFRVFESERLDGVKWKQGVFAEDAVGDWWLCLPKEVSVEESVAPLEKVGIDLGLKEVAVTSDDARCERSRFYRDIEQKIAQAQRRGHRRQAKYLHRRAANRREDALHKFSRQLVDQYQKITVGDVSSLQLVNTRMAKSVLDAGWGMLRGFLQYKSQQAGRSFQIVNERNTSCTCSNCEALSGPQGVNGLHVRRWTCAACGVSHDRDVNAARNILRRAEWPASMRERA

SEQ ID NO: 18736 - protein, 151 aa, Oscillochloris sp.
VSRKVKGSANRRKAILKLAKAHFRAACTRKDVLHKLTTALVRQASLVGIEDLNVAGMLKNHTLAQAIADGAWAELRRQLEYKAPAFGSRVVAIGRFVASSKICNHCGHINEDLELSTRAWDCTNPICRLPLDRDLNAARNIRDEAKRLAGA

SEQ ID NO: 18737 - protein, 402 aa, Escherichia sp.
VKRLQAFKFQLRPGGQQEREMRRFAGACRFVFNRALALQNENHEAGYKYIPYGKMASWLVEWKNATETQWLKDAPSQPLQQSLKDLERAYKNFFQKRAAFPRFKKRGQNDAFRYPQGVKLDQENSRIFLPKLGWMRYRNSRQVTGVVKNVTVSQSCGKWHISIQTESEVSTPVHPSASMIGLDAGVAKLATLSDGTVFEPVNSCQKNQKTLARLQRQLSRKVKFSNNWQKQKRKIQRLHSRIANIRRDYLHKVTTTVSKNHAMIVIEDLKVSNMSKSAAGTVSQPGRNVRAKSGLNRSILDQGWYEMRRQLEYKQLWRGGQVLAVPPAYTSQRCACCGHTAKENRLSQSQFRCQVCGYTANADVNGARNILAAGHAVLACGEMVQSGRPLKQEPTEMIQATA

SEQ ID NO: 18738 - protein, 275 aa, unknown
  TnpB Polypeptide
VLHANNSPSVLLPFYPFLYLSQFGGVRYFAAGDSFPGFGPSRQGEKWFVCFAAEVEAQSLPESNEQVGIDVGLEKFAALSNGEFVENPRFLRKDEKALKKAQRKLAKQTKGSRQRRKAKKVVARMHERIRNRRYDFIHQTARKLVNRFGLIAVEKLNVKNMSHRPAPKQDDETGEYLPNGHAAKAGLNKSIGDAAWFLFRKVLTQKAESAGRKVVNVNPAYTSQDCSGCGYRPDTKKTLKDRWHLCPQCGLSLDRDTNSTVRHLKIAVGQHSVPA

SEQ ID NO: 18739 - protein, 484 aa, Georgenia sp.
VGRHTTFRFCLDPTVEQERVLSRHVGAARFAYNQCLRLHLNARAGRGGAHKGEYAADVGAAVPWSGFDLINAFNAWKRSPGAGRRFVVDTGGVVEVETTGLAWRTEVLAQVFEEAAVDLGRALSAWTDSGQGGGAGRRARHPRFKKKTTTGSFRVRNKVSGARAGIRVGGDRARQVTLPKIGTLRVRDDTRRLRRMIAKGRARILFATVSRGAGRWWIALTVEAADLHPDVQHRTRAGDDTSGWVGVDRGLTALVVAATAEGEQMLRVDDAPRALKTAARQTRRLSRAVARKQKGSSNRARAAARLARHHARVRARRLHFLHQVSGALVKTHDRLALEDLNIAGMLTNHHLAAAISDAAWGELARQITYKQAWAGGQVLHVDRWFASSKTCSGCGHHDKDLTLAVRVYRCVVCGLVIDRDLNAAANLAAWATDHTRGPAALAGDRQADGPVTNAHRRDGSGPRTSAGETSPDDVGTGPQTTTPV

SEQ ID NO: 18740 - protein, 188 aa, unknown
  TnpB Polypeptide
MSRLIKSYKTEINPTPEKKTKINKKIGTCRYMYNFYIAHNKELYDKGEKFLPLIKSGFVSKKADRYYVSVLVDIPESIVDNNLDKGIGIDLGIKDLAVVSDGTKYKNINKSYKVKRLEKQLKRQQRSLSRKYENLKKLKKGEATQKANIRKQMLKVQRLYHRIDNIRTDYINKTILKIVKTKPSYITI

SEQ ID NO: 18741 - protein, 228 aa, Crocosphaera sp.
LTTSYIIANIYSHKLPINLVFVPLRKAVEILGLHPNTLRKYADQGKIRIIKNEAGQRLYDVQSYIDGAARASIICYCRVSSSKQRDDLERQVSFMRSVYPEVAKFLTDNFDVILLPTFEVSEMVVKNSRKIRSKSVRQMLNWSHYRFKEFLKHKAFETGKRVIDCCEAYTSKTVSWTGELVQNLGGKKVIKSQFENKAMDRDLNGARGVFLRALVDTPSLKDSLSVHC

SEQ ID NO: 18742 - protein, 502 aa, unknown
  TnpB Polypeptide
MGRGVSGRARDAAAMRQRGTFSRGKRLMEYLVRCEVLFVFGRTTTSLPRLQALRASPGTRAAGGALFVLWSVVALSIMRAYKTELDPNETQRAFLCNSAGAARWAWNQGLSVNQRYYNETGKGLTYFRLCKLLTTWKQHPVNAWTYEVCHCCFQSALQDLTRAFQNFFEGRARYPKFKLRHGRKAFRVCGRIRAEERRLRLPNIGWIPLKERGYLPVAVKPLSCAVSERAGRWFVSFQVNEEVNAVAPGEEVIGVDLGISALAVASDGRQWARARASESIQRKLTKASRKLARQTKGSGRREVTKRRIGKLHLQAANLRANTIHELTSALVGVHGPAEDRPKAIVVEDLAVGNMLKNHCLARAISDAGWAELRRQLAYKCEWYGVTLIVADRFYPSSQLCSECGARQPMPLSEREYACGECGVVIDRDLNAARNLRDYGHDFLAGKAPERQNARGGNGKTSPMLARRDPVKRESAQVVAPGVTLGQSITPRGLLVNKIEAGE

SEQ ID NO: 18743 - protein, 319 aa, Bacillus sp.
  misc_feature (60)..(60): Xaa can be any naturally occurring amino acid
MMINTAYKFRIYPNKIQATLINKTIGCSRFVFNHFLSLWDNAYKETGKGLTYGTCSAKLXQTNENISVVGNKIKLPKLGLIRFAKSREMTGRIVNATVRRNPSDKYFVSLLVETEVQELQKTQSYIGMDVGLKDFAILSDGTTYKNPKFFRSLEEKLAKAQRVLSRRIKGSTRWNKQRVKVARIHEYMANARKDYLDKVSTEIIKNHDVIGIEDLQVSNMVKNHKLAKAISEVSWSQFRTMLEYKAKWYGKQVIVVSKTFASSQLCSSCGYQNKDVKNLNLRKWDCPSCLTQHDRDINASINLKNEAIRLLTARTAEIA

SEQ ID NO: 18744 - protein, 194 aa, unknown
  TnpB Polypeptide
LKLPKIGQVRLKQHRSVPSEYRLKSVTVSQTPSGKYYASILFEYEDQVEEKKLQKFLGLDFSMHELYRDSNGKEPAYPGYYRNAEKKLAREQRKLSKMQKGSNNRNKQRLKVAKLHEKVSNQRKDFLHKWSRQTTNAYDCVCIEDLDMKAMFRSLNLGKSVSDNGWGMFITFLKYKLEEQGKKLVRVDRFFASS

SEQ ID NO: 18745 - protein, 378 aa, Mycobacterium sp.
VWPESRCRHWNSPGSKQQQFWQPGRRAPGYHEQCAQLTAVRAEHRWLAAGSQTVQQQALRDFAQAMRNFFSGTHRRPRWRKAGVHEGFRQVGVKPHHVEKLNRRFGKVWVPKVGWVRFCLTRPVPDGVKSYRVTRDRAGRWYVGFAHVPAPIVGPADGSLVGVDRGVTVAAALSTGELLCVPGLSRGEAVRLRVLQQRVARAQRGSNRRDRTKLAIAKLKATEVARRKDWVEKLTTDLARRFDTIRIEVLDVRAMTRSARGTVEHPGRHVGQKRGLNRGISRSGWGLLATRLQHKAYGRVEQVPAAFTSQRCSVCGHVAAGNRKSQAVFDCESCTTGPCNADVNAACNIAAGRAVTARGDLGTSRSTNREPQHCSPVA

SEQ ID NO: 18746 - protein, 390 aa, unknown
  TnpB Polypeptide
MVVRKVAQRIPFTPSKTQAALLEQCFGARRFAYNQQVEAFNAYDKETNPHPKYPSIADMKAANEWLRDSPVPSHALSNAIMDFRKTRASYFRKGEYGKNRPRFASKNDSVQSFRNGLPMRRMEGNRYPLSKKLGSVRIRRRDRIRYSLESLSSWTVKRENGVYYLVLLFNVDVQPKPPVSGEVGIDVGVKDFLTLSTGEKINYPDRLRQLEEKVRWEQRKLSRRVKGSSNYHKQKAVLAKAHAKVRNYRENFQHQVSHRLIEDNQFIGMETLAVQNMTRKATKRMDENGKPTRNGQASKRAMNRSILRGGWSGFVEKLAYKAQWYGRTFVQVDRFYPSSRLCHDCGHKYAGLRLSEREWVCESCGASHDRDVNAALNILGEALRLSQVRE

SEQ ID NO: 18747 - protein, 471 aa, unknown
  TnpB Polypeptide
MIRTYNHKHDINKEKQEKVLFVVRAYRKSCTIISRHQWRLFYEGDGFDKMIETKDIVAPVSERYKRNCCYQVDGSLKSFIANRQNDFVKMVYASSLDTKTRKHLFQINRRKLWFKKVHGKFTQEELFLARKIFKHILSLHRKPSFRHANMLLNKNVAEIIIANKTQSVEFDYWIKLSTLEKGKPIMLPIRKNPYFEKLSGELQQAVQINFGDKKEITIGLMKDLPAKLIVFKTDILSVDIGLKNLFALNNGDIFGRNFYLKLRHYDFILTELAKNRQRQGLKIRSKKYDLLVRRLKNWIKNEVRRLLNRIVKLYAPKKIVIEHLDFRNQNLSKWMNRLLCNFGKGEIIKKLDSLEEEFGIIYQEIPAPYTSQECPNPECGYIDEKNRPTQEKFKCKCCGYTRNADIVGSRNGLARSSDKELSVIYLSRKLILQTLVMRFLERHPRLSSRANGLLLGNPYFKDYLSQPKMVA

SEQ ID NO: 18748 - protein, 396 aa, unknown
  TnpB Polypeptide
VQRAILLQTNATNSKNQRLTEFMNRAVNAYNLLLNERDGCNTFMQFHHKNLNTCKTRTGFNVQVACSLIRDAWRKNAEKVDGLTVKFNVPRNCKTFNTKMNFFVELGSYPRNRVAVPIKPNRNYQRFQQLTQNGWTCKTFGLTSDLQVVAYLSSTKKIPHRRNVLGVDVNAKLIAVSILSPEGKVLYQTYFGKQMWTRRKKIMARRSLLQSLNAKKKIRQLRHYERNYVKTELGHVVREIVGLAVRFDADIAIEKLKRFQSKGRRFNREAMRIPFYQFRRILEQRCFDHDVYLDRVDSWHTSKWCSHCGAVGKGHSANYSLFKCKCGQTVNSDRKASLAVAVKSLLERSHGSNQTFQFSSRRVPVSGLVRPSEADKPGSVNHTPSADGKPTSFSCG

SEQ ID NO: 18749 - protein, 405 aa, unknown
  TnpB Polypeptide
MVLLKPVADTELSEYAEQSAVLWNMANYERRQAFIKHLKASSYAKQCATFKNSEPFKDLGTCKAQALLSKLNEAWRSYYALLRLKKNGKLPSTVERVSPPRYWKKNGKREAKAFYVRNDGYHINEDSITISKNLKIPYRSGELWVGRQGRLEVLKDELSRKWYAHIPVEVQHEPPSRIDAKKKASLDLGICNLAALHIEGTKPTIYSGRAVLSDWVYHTKKIAEKQSQLPKQKHTSKRIAIAFRRRQRRLKHAVNAMLRSIFQKLEHENVGVLAIGDLNGIRAEANHGFNGNQKLHNFWVFNQIEKRIMELAEEYGIQIRKVSERNTSKTCCLCGKQHNGRIERGLMVCREKHRSINADVNGAVNILNVAVNRLPSVLSTDMEETSGSRLMAEPTLLRWNYNAWQ

SEQ ID NO: 18750 - protein, 389 aa, unknown
  TnpB Polypeptide
MKTVRTFKYRVYPTENQKKKIDFCLETSRLIYNHLLQEKRDAWEYEKKNRTMFDLCSQTKGNKLLHSTLVRGVVVRVDTAFKNFFRRCKENAKEKGFPRFKGVNRFSSLCSVDQKPNPKRIGKLTSFPQIGKLKTEYSRPMKGTPKTLTLKKTPTGKYFITIACELEIKVKKSRRKAVGIDVGLNHAITTSDGKFFDSPKPLKSLTQKLVRVQRKFSRTELRSNNHEKVRIKLAQIHEKIFNIRNDWNHKVTTFIANTYGKIKVENLNIQNMLKNHKLAKSISDVAWGDLINKLTYKVEQTGGEVIKVDPKNTSQECSSCGNLVKKNLSQRKHSCSKCGLKIDRDVNASRNILNKEICVANAKFKPDREDVRRSKRVRFSMTQETQVFG

SEQ ID NO: 18751 - protein, 310 aa, unknown
  TnpB Polypeptide
LATAGDYNWALNIKREAMQKREKIPNAIELHRRLNELKQTELGWMYEVSKCSPQEALRNCDNAFKNFFAKCKKKVKGKKGFPRFKSKKNGLGSFRLTGTIKVFEKAIQLPRIGKIRLKERGYLPNDKKILSACVSEKAGRWFVSLQVEEEISLPTNKKDIRVGVDLGIKQLAMTSDCEVFDNPKALRTNLKKLQRLSRKVSRKIKGSKNRKKAAKKLAQLHYRIACIRKDAIHKTTTHLTKAKSMIVLEDLNVSGMLKNRRLARAIADVGLFEFRRQIGYKGVWYLSAVRIALIEISFSIPYLPQTGHVS

SEQ ID NO: 18752 - protein, 441 aa, Halomonas sp.
MIRTDKWPLQATTQQRHLMRLTLAEYRQFCRALSVVVLANWPSLQQAPSFAAAVERLMHPTKKNPSPRHHYFVKRFYKFPSYLRRAAIEFVKGQVSSYLTRYWAWQSGDRQRKHAQPPRFNPVAGCYPAMYRGQLVKFNADFTTASLKLWDGKEWLWHNVAIKAVRQRHLLGTVKSPTLVLNRRCHLAVPVALAPQSLPDQQRVCAVDVGINTLATASIVTPDGTVAARGFFHPAADIDRRDKRATLIRRKARKTARLSKGFGRTWYRKAQHINEDIAQQTSRRLVDFALAQGADVIVLEDLKGWRPKAGKKRSGLRQRFHQWLHRWLATLIEQKMAEAGGRVVYVYSRGTSSWAFDGSGRVKRDKAQHELATFPNGKQYNADLNASYNIGARYWAWKHKLTRRKDGQLSAGRSSPGKPRTPVTLSTLWRREPEAPHQCVA

SEQ ID NO: 18753 - protein, 374 aa, Halomonas sp.
MTKRAYKERFYPTPEQAVLLAQSFGCTRFVWNNTLAYRTEAYQQRGEPVSHAAAEKRLVALKANYPWLKDVSSVILQQTLRDQKAAFDNFFNPKLKARYPRFKRKDGRQSIRLTKAAFSYRDGEITIAKTTAPLPIRWSRPLPSEPSSITISRDRAGRYFISCLCEFEPETLPVTPKMVGIDLGLTDLFITSEGMKSGNPRHLKRYEAKLAYLQRRLSKKQKGSHNRHKLRQKVARLHVRIADCRRDAIHKATRTLINENQVLCVESLNIVGMVKNRSLAKAISDAGWGEFVRQLEYKAAWAGRQLVKVSQWLPSSKRCHGCGHQVEKLPLSQRHWHCEGCGQAIDRDINAARNIRTAGLAGLACGATGAGAVA

SEQ ID NO: 18754 - protein, 378 aa, Tissierellia sp.
MKTVIKGYKYRIYPTDEQKELINKTFGCSRFVHNYFLAMKIELYKTEQKSLSYSKCSSLLTELKKEKEWLKEVDKFALQNSLKDLNTAYQNFFREHKKGNTNQGFPKFKSKKNNYKSYRTNFTNNNIEIDFEKGQIKLPKLKWIKCKTHRKFTGKILSVTISQVPSGKYYVSLNVECEHEELPKANNSIGLDLGISDLLITSNGQTFENNKLTYKYEKKLAKLQRQLSKKQKGSKNFNKQRIKIAKLHEKITNIRVDNLHKISSQIVKENQFIFSEDLNIKGMIKNPKLAKSIQDVSWYELIRQLQYKSKWNNRVYHKVDRFYASSQICNNCNYKNEKIKNLSIRKWTCPECGTYHNRDINASINILNQGLKDLELAV

SEQ ID NO: 18755 - protein, 405 aa, unknown
  TnpB Polypeptide
MSRYVVRTYKVAVPKELYPLCAELNKTAARIYNKTMSLVKKIKYKKGFWLSPNNTQKYILRWACSINVHTHSKQAIIQQYFQALDSYFNAVKTKPDLNPPYKRKRFMPFIWKDTAIKLLPDGKLKLSMGSNREPIVIQTTLLADTKIRQAKLVYEEGKYYLHLVIEGKNVARKPQNGKIMAVDLGILRPITCFDGTEVISYHGGILNSLIRYRNKELAKFQQMLSRCKKGSKRYRKLVKAKKKMLRRTRHQIKDILHKITSNFLKMCLQKGIGTIALGDVTNIRERVEGNDSANQKLHQWCFRKMVDMITYKAELLGMDVKLVPEEYTSQTCPMCGSRNHSNNRNYKCQNCGFKYHRDGVGAINIYVRYLGKKSQVVAGLAPVRGVRYKPHLCGHGVRNAPWKAA

SEQ ID NO: 18756 - protein, 403 aa, Meiothermus sp.
MLVIECKLYGSETQFRAIDEGIRVGQFVRNKALRYWMDEGKAGKKVGKHDLNKLCAALAAQYPFVAKLGSQARQAAAERAWSAIARFYERSKKGLKPIGYPRFQKDNRSIEYKQAGWKLDDAYNRLTLSDGLGIGTLKLKGYKALQGYNTDHIKRVRILKRADGYYAQFCLRVNRRIAVEPSGTAIGLDVGLTRLYTDSNGNIEPNPRFYRKAEKRLKRAQKIVSRRHKRGQKQSHNYLKAKERLARVYLKTQRQRRDHAIKLARCVVRSNDLIAFEDLSVKNMVRNRKLAKSIYDAGWRIFRQRLEYYGKVFGNVVIAVDPKNTTQIDHESGSILTRKTLADRVHLTASGREMSRDHNAAINILQRGLQTVGWGTAEPNAWRVSIGPALSGQETTNQESHVL

SEQ ID NO: 18757 - protein, 382 aa, Escherichia sp.
MRRFAGACRFVFNRALARQNENHEAGNKYIPYGKMASWLVEWKNATETQWLKDLPSQPLQQSLKDLERAYKNFFRKRAAFPRFKKRGQNDAFRYPQGVKLDQENSRIFLPKLGWMRYRNSRQVTGVVKNVTVSQSCGKWYISIQTESEVSTPVHPSASMIGLDAGVAKLATLSDGTVFGPVNSFQKNQKTLARLQRQLSRKVKFSNNWQKQKRKIQRLHSRIANIRRDYLHKVTTTVSKNHAMIVIEDLKVSNMSKSAAGTVSQPGRNVRAKSGLNRSILDQGWYEMRRQLEYKQLWSGGQVLAVPPAYTSQRCACCGHTAKENRLSQSQFRCQVCGYTANADVNGARNILAAGHAVLACGEMVQSGRSLKQEPTEMIQATA

SEQ ID NO: 18758 - protein, 335 aa, unknown
  TnpB Polypeptide
MIFHQAYKFRLYPNAEQRQALDRQFGCTRFVYNYFLRQRMDYYAVHKGEKKQGLNYQDTARMLTVLKHQPEFAWLQEVNSQSLQVALRDLDTAYKNFFEGRAKFPKFKSRRDRQSFGVPQHFTLDAEQGRLSLPKLTPLKIVVHRPIAGTLKSVTISRNPSGRYFASILCEVEMQDPPPRRTGQEIGVDLGLKSFLVTSQGEKIDPPQPLRRAEEELCRLQRKLSRKQKGSRNREKARMKVARLHEKVANQRADFLHKQSRRLIDESQAIYVESLNVKGMLANHHLARSISDAGWGEFLRQLQYKVVWTGCRLERSSPSSRPAGGVTGAAIVRPT

SEQ ID NO: 18759 - protein, 445 aa, unknown
  TnpB Polypeptide
MKLKRTYKYRIYPNREEKSILDKTLNTYRILYNDCLTERRDAWDISHKSINYYDQANQLKEIKTFDEDLKEVHSQVIQDVLKRIDKAFKNFFRRVRRKEKAGYPRYKPRSRYSSFTYPQTGFEFSEDGKKLILSKIGSVNIKKSLKIKDFWDTQIEDLRLHRDIRKDANIKTCTIEKDLDRWYACFAVEIEVEELNYNEEITNPIGIDLGINHLITLSNGDTEDNPRYLSKSEKRLKRKQRKLTKVLTTSSWDLENLRFSKTKKRSNNRSKRRFEVAKTHRKVREQRTDLLHKISRSLVNTFDLIVFEDLKVKNMLKNHHLAKSISDATKSLISCRENGTFSHVSWSQLTNFVSYKAEEAGRRVEFVNPKNTSQECSNCGEIVKKPLSQRVHKCPFCRLVIDRDFNAAINVLKKELKNLNVGQGLSEFKSEDFSKRRVIQEAPML

SEQ ID NO: 18760 - protein, 254 aa, unknown
  TnpB Polypeptide
VQLRYNYRLYPTPDQRAALAKAFGCARVVFNDGLRARQEAHEAGLPYITDAELSARLTACKATPERAWLADVSAVVLQQALADPNSAYRNFFASAAGKRKGPKVALPQFRSRKDRRQAVRFTANARFAVTRAGKLRLPKVGDVAVRWSRRLPSAPSSITVILDAADRYFASFVIETDSVTLPGAGKDGPKPLHVRAWQCQACRAWLDRDVNAAVNVAKAAGLAVSACGAQVRPGPALAQRGEAGTLPKSRGEAA

SEQ ID NO: 18761 - protein, 402 aa, unknown
  TnpB Polypeptide
VKRLQAFKFQLRPGGQQECEMRRFAGACRFVFNRALARQNENHEAGNKYIPYGKMASWLVEWKNATETQWLKDSPSQPLQQSLKDLERAYKNFFRKRAAFPRFKKRGQNDAFRYPQGVKLDQENSRIFLPKLGWMRYRNSRQVTGVVKNVTVSQSCGKWYISIQTESEVSTPVHPSASMVGLDAGVAKLATLSDGTVFEPVNSFQKNQKTLARLQRQLSRKVKFSNNWQKQKRKIQRLHSCIANIRRDYLHKVTTTVSKNHAMIVIEDLKVSNMSKSAAGTVSQPGRNVRAKSGLNRSILDQGWYEMRRQLAYKQLWRGGQVLAVPPAYTSQRCACCGHTAKENRLSQSQFRCQVCGYTANADVNGARNILAAGHAVLACGEMVQSGRSLKQEPTEMIQATA

SEQ ID NO: 18762 - protein, 396 aa, unknown
  TnpB Polypeptide
MQRAILLQINATKRKNNCLNEFMDIAICEYNRLLSERTDCNTFMQFHHKTLSTCKANTSFNVQVRCSMIRDAWKKKTDKVKGLTVKFNIPRNCKTFRTKSKFFVELRMYPRNRVAVPIKQNRNYQRFQDLLKGGWICKTFGLASNLQIVAHLSKEKEIKQRKNVLGIDVNAKHFAISVVSPEGKVLYQTYLGKNIWIKRKKIMERRAKLQSINSIKKLKRIRRYERNFVKTNLGQIVREIIKIASKYDADISIEKLKRFNPKGKRFNKTVMRIPFYKFKQILEQRCFDHNILLNIVDSWHTSKWCSHCGAVGKGHSANYSLFKCKCGQTVNSDRKASLAVAVKSLLERMPISNPDISIQISNRRVPVNGLLRSDDSLSGAVHNAQSLGMPTCFSGG

SEQ ID NO: 18763 - protein, 383 aa, unknown
  TnpB Polypeptide
VQLRYNFRIYPTPGQRMALAKAFGCARVVYNDGLRIRQEAYEAGLPYIKDADLQKQVITEAKKTPERAWLSEVASVVLVQSLNDLHKAYRNFFSSATGKRKGPKIAPPKFKSRKDTRQAIRLTRSGFAIRPNGRLYVAKVGDIRVRWSRELPSKPSSVTVIKDSAGRYFASFVVEVDDKPLPETTGEVGIDLGLTHFAVLSDGRKISNPRFLRRAERRLRKAQKALSRKQKGSKNRAKARARVAKLHAKLADARRDWAHKLSTQIVRENQAVYVENLSVSGLARTRLAKSVHDAGWGRFVAMLEYKAARYGRTFARINRFAPTSQVCSACGALDGPKPLHVRSWTCKECGTVHDRDVNAAINILAAGRAERLNACGGTVRPAA

SEQ ID NO: 18764 - protein, 364 aa, unknown
  TnpB Polypeptide
MSDTLIGVLVTEMLKLAPSAEQAESLLATIRACNAAANRAAEVAFEHRTANKIAVQKLVYGELRAEFGLSAQMAILAIHKACGAYKRDKSTKPVFRSDGAIAYDQRILSWKGRDRVSILTLGGRIIVPVVYQGRWATALADRIRGQADLVYRDGMFFLAVVIDVPEPPQGDEPDSWLGVDLGIVNIATDSTGETHSGKGVRAVRRRNARLRARLQAKGTKSAKRLLKKRRRKEARFARDVNHVISKHLVGKAKGTRQGIALEDLKGIRDRVTVTKAQRADLHSWGFHQLRAFIAYKAAIAGVPVRLVDPRDTSRTCHRCGHCDKRNRPTRDDFLCVRCGFAGPADHNAAINIGRRAAVMQPYAA

SEQ ID NO: 18765 - protein, 339 aa, Streptomyces sp.
VEEDRGTRLPERGVLRPLQQALRHLQTAFGNFFAKRAKYPRYKSRKKSRASAEYTRSAFTWRDGRLTLAKMAEPLDIRWSRPLPEGVEPTTVTVSRDSAGRWFVAMLVEDTIAPAPATSAVVGLDAGITSLVTLSTGEKIANPRHERRDRARLAKAQRELSRKAKGSANREKARRKVARVHTRITDRRRDFLHKLTTRLVRENQTVVIEDLTVRNLLKNGKLARAISDAAWTDLRMMLEYKCAWYGRELVVIDRWFPSSKLCGNCGTVREKLPLNVRKWTCECGAVHARDVNAARNILAAGLAASACGDGVRPQRESSRTGRSSVKQETQRATAGLPRP

SEQ ID NO: 18766 - protein, 305 aa, unknown
  TnpB Polypeptide
MLIRKTFKYRLKPTKKQLKALGCTLDECRWLYNHLLEQRKLAYEELDISLTKFQQNIFLPFLKLDRRELLTVHSQVLQNVTDRSDKAFQNFFRRCKSGEKPGFPRFRGFDRYTSFCYAQSGFSVKGSEVKLSKIGSIRFKLHREIQGKIKTCTLSRESGNWYVCFSCEVDLNPLPENSKSIGIDLGIENFATFSDGQTLANPRFFKKAEKEVAKSQKKLSKLEKGTPERKKQKKTTSNIHRKIKNRRSDFCHKISRKIVNEYQHICIEDLNTSRMMQGSFLAKSIADVSWSQFTQFLTYKAAGSW

SEQ ID NO: 18767 - protein, 483 aa, Nonomuraea sp.
VKKFRPQSGFVVQAYRFALDPNATQERALRSHCGAARAAYNWAVAWVEASWWQRRAEQSYGIPEEALTQWRPWSLPVLRKAFNAAKHTDPRFAGWWQDNSKEAYNTGLSNASAAFDNYTKSKQGKRRGKRVGMPRFKSKRKARLACRFTTGTIRVEFGGRHVTLPRLGTIRVHEPTGKLLARVEAGTARILSATVRHERGRWFVSFQVEVKRDLVRVARPDTAVGIDLGVKTLAVMADSAGEIREVPNPRPLDSALTQLRHTSRVVSRRQGPDRRTARQPSKRWEKANAARNRVHHRVANLRVDTLHKLTSGVAAEYGTVVVEDLNVCGMLKNRRLARQIADAGFGEIRRLLTYKTQRNACRTIVANRWYPSSKTCSGCGVVKAKLPLRIRTFECDACGLVLDRDANAALNLAALAAAAVTGTGVAGDLDTPKVSKPRGADHKTRTTRPSRKATAERAGGATLPHQRQTETRDRTQTEALTLW

SEQ ID NO: 18768 - protein, 350 aa, Burkholderia sp.
MILVYRYRVKSLNGLLNKQSRAVNYVWNFCNDTQKHALKWGKKWPTGFDLNVLTTGSSKELGIHSGTVNATCEQYAKSRSQHRRPYVRYRGRKSLGWVPLKGRDLKREGDAFRFAGNMFRVFNSRPLPEGKIKDGTNFAQDARGNWFLNIVIEMPDVPARPIRSGVGIDLGLKDFAALSTGEKLPNDPFGRRAAEKLAKAQRARKHKRHIAKLHAKIANARADFQHKLALDLVRRFDYIAVGNVSAAKLARTRMAKSVYDASWSSFRDKLRYKAIAHGATLEEVDESGSTQSCSACGSQASTTRPKGIAGLRIREWACSDCGAEHDRDTNAALNILRCGRASPGVGILSL

SEQ ID NO: 18769 - protein, 236 aa, unknown
  TnpB Polypeptide
VERSDPEPREVRGPEDSDGTRIEAPKPLAKAPRRLRRRKQKPTVVERDPETGRERKRNYEKAALRLARLHRRVRNIRRDFLHQLTTWLAKTKPVIVVEDLNVRGLMRNRHLSRSISDVGWGAFRRTLEYKCRWYGATLIVAPWGFPSTRLCSRCGKVAPHLPFSQRTCGLEIDRDYLQNYGLATLSGPTGSSPGSHACGDPLGGGTAGCRSMSHGSFRRLFSPQAGEINDDVRRNG

SEQ ID NO: 18770 - protein, 271 aa, Sulfolobus sp.
VDFEAMTVRIASVGELQILGYPRNLKEYLSWRMKEARLVVKGDKAFLKVVFEKEEEEKVEARESIAVDVNMSEIVVGKDDINYVRIPTRLHEVHHWKSLAESLQKKYPKRWKENKRILYGVRSFHQKAKRIMEDFARKVGKWVVEIAEDFGANVIKLENLENLIKNVDKLPKEFKDKLYLMQYRRIQYWIVWQAKKHGILAQYVNPGYSSVSCPKCGKRMEEKGYRWFRCSCGYENDRDVIAIVNLNRRGSLTLSSAHHMRDVTPNRWWER

SEQ ID NO: 18771 - protein, 459 aa, Sulfolobus sp.
MKRTNVVKLIVDKNTHEKLKELTIATAKCWNEVNWLRMQQYKKGERIDFAKTEKEVYEKYKQVLKVNAQQVARKNAEDWRSFFSLIEEKKEGKLPKWFKPRPPSYWKDESGKYKLIILVRNDRYEVDENKRIIYLKDFKLALKFNGKIKWHGKQGRLEVIYDEVRRSWYAHIPIEVENNVKAKGNLRASVDLGIVNLATIYVEDRTWYIFKGGSVLSQYEYYGKRIGEVQKVLARHGQRRSMKLKLLYDKRRRFLKHALNSMVRKIMEELGEKGVSEVIIGYPKGINKNHGNKLTVNFWNYSYVIKRFEEVGEELGIKIMKVEESYTSKTCSLCGETHEGGRVKRGLFKCPRMGKVMNADLNGAINILHIPESQGTMGRGLPMVRDRGNGLKFQPVVYRWTSEAGWVIPTSYEVMRMKAVNHKPMIRPEGTLALQAGRWSESSCLASNPFWNTRKIHLS

SEQ ID NO: 18772 - protein, 395 aa, unknown
  TnpB Polypeptide
MRRAYVFRLRPTARQHIALAACLNAHRELYNAALQERRDAWSHSKTRVYYGDQSAQLSEIRQVRPDQAMWSFSSQQATLRRLNKAFAGFFRRVKTAKPGVKAGYPRFKGKARFDSVEWPKDGDGARWLPETKRVYLQGIGQVKVELHRPVAGRVKTIQVKRQGRRWMLVLSCDDVPTNPLPATGRQAGIDVGIASFATTSDGEHIDNPRWGRAAAAELAAAQQRLGRAKRGSKNRRRRRETVAARHRKIANQRKDFHHKQARRLIEHYDVLVVEDLQIVNMLRRAKPVPDPDTPGQFLNNGARAKSGLNRSISDASWGGFVSKLHAKAEEAGRVWIEVDPRHTSDGCEKCGYAARENRATQAEFVCQRCSHRAQADEHAARNILRAGLALHANAA

SEQ ID NO: 18773 - protein, 409 aa, Aphanothece sp.
MQLVERHLIRQGHRYYQECDQLCWLSKNLYNSATYIYRQNFFKGVMTNAIEVYHQLKTGVDYKALPSKVAQGTLRLVLRNWTSYEQAKKSYLKNSSLFKGEPKIPHYKGTRKKNRSDGRFIVTYNHQAISKKLLKKQIANPSGTKIFLPTKVTAIDEIRIVPRTGCYVIEIIYPTEETTTKYENERVASIDLGLNNLATLTYNIPKLKPCIYDGRAIKAANQYANKLNALLRSQLPILEFTSKKLEKLWMKRNCKVDYYLHTTSRAIVNDLVKNNIGVLVVGWNEGFKDGINIGRVNNQSFVSIPHKKLIEQLQYKAKLAGIEVVLVNEAYTSKCSALDNEPIQKHKKYLGKRIKRGLFKTANEKTINADINGSLNIYRLYQQVAGNALAHPVEGVVVHPLRVKPYKVS

SEQ ID NO: 18774 - protein, 388 aa, Aphanothece sp.
MKQVTLTIKLKLVNLNQCKANMLEAMQVENTRLANYLLSVPIKERKKLTTAKVQTDLCSAICNQTIRHSLSKAGQKTKHYKVLPVEVNNQNWQVFKNGETYSISFPTLKGVKRVPISLASVHWQETLDKVLNNQCQKGSIKLIQKRNFWYVYMTVTLEVPEVQSQNRIGCDRGQNNLAVVAPSQGFGKFFSGRGIKHKRNYYQKRRESLQNAKKFRALKKWDKKERRWMESINHAISRRIVRFAEYLDADVVVEDLEGCRQTMKQSKKSRRQAGQSRHSWSFYSLEQKLNYKLDLKGRKLIKVPAPYTSKSCSTCGTLGNRNKHDFNCPHGHYHNADLNAAKNLAQWEGFCCNLNLQQTVSVIDTVGLNHGVFGSPLNSMKAIQLSLF

SEQ ID NO: 18775 - protein, 431 aa, unknown
  TnpB Polypeptide
MKAIKTIKIRTKQANKGRDKILRELINDWRRLVKFFLEKCFEHNAISRGKLHRVAYKVSKNIVPEGKWNSKYRYTAMNTALSIYKSWKKLNGKNGTKKSPEIKKLFLKLYRETNGKGVYKLIEKNGKWFIKVSTSPRNHIVLPLIVSNYQRKFLEMWKRGKIVLGEAYLKRNSDGSYEVHIAVKREEREKNFHRRLGVDINEGNVTISVLDENRVIYATQIDVSELSRLDYVYKMVRIRKLQKKFYRGHRPEGIPRKKIAIIRRYAKRWSSRKNHLVHNLAKYIVALATTFQARIVMEDMKNIKSRILNRGRKLNRRLALADFRKLQEFIEYKATWIGVPVVYIDPRKTSRICPICGLSVTGFSPREPFCERYKIIWDRDFLASINIALRDVARDVRAEVPMKWISRRRVSANEVSIEGKICAMKSRYSYK

SEQ ID NO: 18776 - protein, 358 aa, unknown
  TnpB Polypeptide
MYNDTLALRKDAWNERHENISYFSCYPYLKLWREETPDYKDINTQVLQDAQHRVDLALKGFFKRVKSGGAPGFPRFKSFGRYNSISYTQHGFHVFDNYIYLHKIGDIKVIFHRPVEGDIKQINIKRTSTNKWFISIMCDNIPAKNVPESIKSVGIDVGLETFAMLSDGLYFKTPKFEKNEKRNLSKAHTKFSRNLKNAISRKKYKRIAARIYERISNKRENFIQQVSRYIVNNYKNICFENLDIADMIQGSHLAKSIKDASWGKLINYTTYKAEEAGRTVILVDPKNTSQVCSKCGQIVSKDLSIRIHDCPNCGLKIDRDLNASINILRLGLQSLGYPLKALTYSEGVITAVQIPNIN

SEQ ID NO: 18777 - protein, 328 aa, Gammaproteobacteria sp.
  misc_feature (197)..(216): Xaa can be any naturally occurring amino acid
  misc_feature (282)..(314): Xaa can be any naturally occurring amino acid
MGSDLWQNSDRAMQSPDLTRPHARSLIRTLRLKVRSEAYPWLNAAAIEVNAVFNYCNETSLKAATRTDLKRKWLEGFDLCGLTAGATEYFEKIGADTIQSVCNHYAQKRKAAKKLKLKWRVSRGAQRSLGWIPFKAASLKRKGRGVRFAGKCLRVFERERLEGVKWQGGEFAQDAVGDWWLCLPVKFEAECTVAPQXXXXXXXXXXXXXXXXXXXXRIHRKIARCRADALHKFSRKMVDRYQKIVVGDVSSLKLVKTRMAKSVLDSGWGTLKRFLAYKCEHXXXXXXXXXXXXXXXXXXXXXXXXXXXXXXXXXRVREAGIESARTAA

SEQ ID NO: 18778 - protein, 349 aa, Metallibacterium sp.
MTGLVPLFYDSAAIVHEGEHVTEAPTTYMTTLHLKVRAEAWPWLDQASREVNVVWNWGNATSAKAARPFAGKAKWLSGFDLDKLSAGATKCFDQIGADTIQRVNGEIATKRRQAQCAKLRWRISTGSKRSLGWVPFKAASIKRTGRGVTFCKKSFRVFEAERLEGVTFADGSFAQNALGEWFLNIPVKRPIVRDVAPREAVGIDLGLKRVATTSDGALLDAGAFYRDIEDKIAQAQRRGHKRQAKRYHAKAANRRLDALHVFTSSIVKDYQHIVVGDREQPEAGQDTDGEVRAGRRLGDAQDAAAVQGPSGRSQRRDRQRKKHHASMFQLWPAHRPQRSKAARCKGMDL

SEQ ID NO: 18779 - protein, 455 aa, unknown
  TnpB Polypeptide
LLNSNQKLSKISKKEVKRGIRYMRKVIHGEIYSSDFDNLNKLVSDWSSACRFAFCRFQKDKLSFNKARNQTKIKYQSLNTRQISDAVKQAQGLYSRVKDKKVIFGGKKNWDKLIKKELSNQEWKNKRDNQIYARGDVTKKGNPNIRLLDKNGDFYLRVTIGNRQFEEYNLFIPTKFEEQLLSLFGSGNPYNVRLLKKDTHHYRVVIDYEIEAPETMVDFSNGVIGIDVNPYRIAISNINKDGNLVKSFNIVNNRMFFASTNKRKYEIGCVVKQLTKYALESQKGIVFEDLKFEKEFENRGRKFNKVKSNFVWKKLLTLLKHKCVENGIMYKKVNPAFTSVIGKLKYQKMYSLSIHESASYVIGRRGLGFNERLSLYKYPHEKVKELVFDHVGDKTKRVHSWSLWRKLRDNYKAVLTGLQSRMFSLKELNGNLCYVGENPTGEVLFQELVGRGINF

SEQ ID NO: 18780 - protein, 450 aa, unknown
  TnpB Polypeptide
MPVDNFQQLYYHTQVMKTTITAKLKLHTDPAQFQALRHTQLAYRDALNYVSQYAFEHGKMSNKVGLQDGTYAELRARFKIPAQMACSIPRQVGATYKALWTKVKQNAAARLAGHTKKRYKGLDQSPKYVSPTLTYQLGHDYSFKREQRVSILTLQGRVIVSYTGYATHVALLHQGAHIGAAKLWYDKPKKQFYLLVSLEVEVADPMPQTHTNVVGVDVGVRYLAVTATTRGEHSFHTGKRIVPKANHYARLRKRLQKKGTRAATRRAVVISGRERRLKQDANHVVSKRIVTRHPHALIGLEDLKDIRERTRRKKGKQTSKKQRKANAAYSKWAFAELQSMIAYKALLHASMAIKVDAHYTSKACPMCGHTCDANRPHKGLLFVCQNCQYTLHADLVGARNVTMRTLLARQDWVRTGQLSIAPDVSDGEAKAARLRRYAELRWSLDTSPAL

SEQ ID NO: 18781 - protein, 361 aa, Escherichia sp.
  misc_feature (3)..(3): Xaa can be any naturally occurring amino acid
  misc_feature (210)..(210): Xaa can be any naturally occurring amino acid
VEXLERAYKNFFRKRAAFPRFKKRGQNDAFRYPQGVKLDQENSRIFLPKLGWMRYRNSRQVTGVVKNVTASQSCGKWYISIQTENEVSTPVHPSALMVGLDAGVAKLATLSDGTVFGPVNSFQKNQKTLARLQRQLSRKVKFSNNWQKQKRKIQRLHSCIANIRRDYLHKVTTTVSKNHAMIVIEDLKVSNMSKSAAGTVSQPGRNVRAXKVTTTVSKNHAMIVIEDLKVSNMSKSAAGTVSQPGRNVRAKSGLNRSILDQGWYEMRRQLEYKQLWRGGQVLAVPPAYTSQRCACCGHTAKENRLSQSKFRCQACGYTANADVNGARNILAAGHAVLACGEMVQSGRPLKQEPTEMIQATA

SEQ ID NO: 18782 - protein, 170 aa, unknown
  TnpB Polypeptide
MCSDVDAPYSRENLTRTHEAALGMAQRARKKPRVKAIHRRIAHARKDWAHKTTTAIVNRATLVVVGNVSSAKLSKTRMAKSVYDAGWSQLRTLLEYKARRLGVTYREVNEAWSSVTCADCLARSGPRGLSALGVRVWTCAACGGVHDRDHNAAHNILRCGRATLSGIPRL

SEQ ID NO: 18783 - protein, 379 aa, Oscillochloris sp.
MCAIFHSVKLIAQLKLLPTPEQAQALLRTLETTNAACNSMSQVAWDAKTFGKFDLQKLCYEPVREQFGLAAQVTIRALAKVGDAYKLDKTRIRTFRPHAAIAYDDRILSYAIPDSSVSIWTLDGRQRIPFVCGTRQRELLSTRQGETDLAFVRGAWYLFAVCDVDEPDPQDVDDVIGIDLGITNIAVDSDGTIHSGRTVKSVRYRHRRLRNRLQKKGTLAAKQRLRKLAGQEYRFAKDVNHTISKRIVREAQRTKRAIALEDLKGIRMRVRARKSQRTVLHSWSFFQLQAYIAYKARQVGVPVVLVNPRNTSRTCPACGLIAKANRATQAAFKCVRCGCAGHADTIAARNIHVLGRAAVMQPYISESAGRSSQRQAAGL

SEQ ID NO: 18784 - protein, 370 aa, unknown
  TnpB Polypeptide
MRKSYKFKLQSQKNVIKLGNMIDDMWQIHLHIMLLARRYRLMFGKDISASRLNRHITNLKKRTKPQWRSLPSQVVQDVVLRYGKSQDAFFQNKKDRKAGLTKRKVGRPKIKPRHKYNSMTFTQAGYILEGNRIKINCIDTWYSFHEHREIKGRIKTITIKRDKCGDYWLYFSCENVDDSKPKPKTGKSAGFDYGNKTFLTSDEGDKIESPQFFKQSLNTLRSLNKALSRKVKGSGNYYRAARALARLHRKIARQRLDWQWKLATELCAEFDTLCFETLNLDGMKRLWGRKVSDHAFYQFLQILEQKCAKHGKNLVKISQWTPTTKPCSDCGHHNENLSLSDRQWICPDCGSHHDRDINAAINIKRAGLAA

SEQ ID NO: 18785 - protein, 416 aa, unknown
  TnpB Polypeptide
MYLTVKQQVKHLSKEDYKNIKHLCYIAKNLTNQAIYNVRQYYFNEGEYLNYEKNYALLKTSDNYKMLNSNMAQQILKEVDGSFKSFFGLLKLARKGKYSFKDCRLPNYLPKDGYTTLVIGLVRLNGNKLILPYSHAYKKTHKCVEITIPPILLDKKVKEIRIIPKANARFFEIQYIYEAECIQRNLNINNALAIDLGINNLVTAVSSNGKTFIIDGKRLKSINQWYNKQNARLQSIKDKQHIGRKPTNRQKAIARDRNNKVNDYMNKTARIITDYCINNDIGTLVVGYNETFQKNSNMGKVNNQTFVNIPYGQLRFKLEYLCKMNGIVFVKQEESYTSKASFWDKDNIPVYNNDNPQSYTFSGKRIHRGLYQCLNGKCLNADVNGALNILRKSNVVSLVRLYSRGAVDTPVRIRIA

SEQ ID NO: 18786 - protein, 413 aa, unknown
  TnpB Polypeptide
VQVAKSIMVKVSPKINRNKYIALRTFLNTYQTIARIYYSYIVENSLHEKLACGEITSIDLKRILHRELYRQIREMFDIGSNTIHDIKDTVVAVFNSYAKLVKKGKNPDLPKINRFTVNLNYPRVISVFEHGKEFDFFFKVKLNGGKRVAIPIECGEMQKQFLKDALNGKYKFGAFQLVRRNGCFYFVIPIKKEVEIKEEYDSVVGVDLGLRYNAVITLLHKNGKINHVEFVKYRKLMHKIRMLWYRIDKLKSMLPKGQKTSKQIQKLYAKIRRINNWIAHNVSKKIVEIAKENNAMIAMENLKNLKPAKGKNSKKNNREIANWVRGKVIKYVLYKSNWEGIKVKLVPAKNTSKTCHICGAVGYRKGVIFKCKSHNYVVNADFNASVNIGIRAMFPDVVGCVDHPAGLMHLQSS

SEQ ID NO: 18787 - protein, 424 aa, Escherichia sp.
  misc_feature (253)..(378): Xaa can be any naturally occurring amino acid
VKNVTVSQSCGKWYISIQTENEVSTPVHPSASMVGLDAGVAKLATLSDGTVFEPVNSFQKNQKKLARLQRQLSRKVKFSNNWQKQKRKIQRLHSCIANIRRDYLHKVTTTVSKNHAMIVIEDLKVSNMSKSAAGTVSQPGRNVRAKSGLNRSILDQGWYEMRRQLEYKQLWSGGQLLAVPPAYTSQRCACCGHTAKENRLSQSKFRCQACGYTANADVNGARNILAAGHAVLACGEMVQSGRSLKQEPTEMIXXXXXXXXXXXXXXXXXXXXXXXXXXXXXXXXXXXXXXXXXXXXXXXXXXXXXXXXXXXXXXXXXXXXXXXXXXXXXXXXXXXXXXXXXXXXXXXXXXXXXXXXXXXXXXXXXXXXXXXXXXXXXXCQACGYTANADVNGARNILAAGHAVLACGEMVQSGRSLKQEPPEMI

SEQ ID NO: 18788 - protein, 405 aa, unknown
  TnpB Polypeptide
MRLRFRYRLDPTPAQRQEFARAFGCARVVYNDGLRLREDAYKAGLPYVPDGTLLQQVTTAAKLREDRAWLGEVSAVVLQQSVADLNRAYRHYFHALAKVRAARAQGRKVRLEHRKPRFKSRRSGQAVRFTSNSRFRLLPDGRLSLPKIGDLKVRWSRSLPAEPSSVTVTLDGAGRYHASFVVEVRETPLPVIKTAVGVDLGLSTLVALSDGRKEGNPRWLSQRQKALRRSQRNMSRKQKGSKNREKARRRVAGLHVKAADARRDFHHQLSTRLIRENQTVCVETLNVAGLGRSNLAKSIHDAGWGQFTAMLAYKANLYGRTVVKVDRWFPSSQLCSACGHRDGPKPLKVRIWTCPGCGVTHDRDLNAARNILAEGLSVAACGGGVRPGETPAATDEAGTAPGAAA

SEQ ID NO: 18789 - protein, 383 aa, unknown
  TnpB Polypeptide
MPSSGQLLGHEEREPTSPAIPEEGIYEVKYTNRRTNVVRLLPNGFQERKLRKLADACAKLFNEVNYERRQQFFRGEKVDFKLTWDKYYDKYKDILGVNAQAVLQKNNEAWSSFFSLLKLKKQGKLPPHMNHVSPSRYWKESKKRKLILVVRQDRYEVDEKNNKLILKDFGLEIEFAGMLRWYGKQGRLEIYYDDAENAWYASIPVEVGVEHTKTGKKSKWIVRGERKAIQIASPKGNKVASIDLGINVLVSVIIDDGTWLLYKGVRAKEDYFYLQRKIAEVQSLADKARNIAEYEAQEGLNREKRRLFKKLTRRLLHLYRSLASDLLKQLYDQGVSIIYLGYPFNIAQDKGNKFTVNLWLYRKLMNIIELEGTRVRYESIRSC

SEQ ID NO: 18790 - protein, 811 aa, unknown
  TnpB Polypeptide
MQSTSTVDEFKIVEYGFPDTLLHRNNGALTRASDLIGRKVFYWRNKKCTLTRRGEMVLKPTANPDHVTLRDIYVIEDDGTLHSITSFTRPTCRGWLSRHLAVDWANVVDQTFIHETLNGISEHLVVQSTSYQERTYFMVNTLYYDLKTYVVNHKICMSEQNKPVPNSVSPQRPSVGGPSAGTSTQSAPTATNTSTMSIPIKKPRKTSGSKEPDPDNSPKPQRPKLSTVESPPPSKKPISKDKSSVSKKNTLTMKSIRKLQVESTSNGKHSTGFWNERCPGNSKRLWLPTGTDCVGLPGTISSGCSRNSESISKWTVTTTTMPLPPNNSLMTSCPSFTCSPADTTVFEHNDEKTKHLKTRQKARQKIEYQNAKRLQRDPTVINLAPSDKTIVRSRVVRVFPTLKQRKRFDDWLAAFRKTWNLCVDDTYKHPDDPIDERVLRDKFVTRKTAVIDNKKNEWVFRTPKRVREYAVKDYFASVKSCETKLKKKQIKKFRMGYKVEDDPRQTISISNEALNRVKPKPSVPPKSSKKKRAAYDQNKEMLLGMTAQELRPLAVEAGIKKPENYTTDDLVEFILCKGDDSAHQINIHGEIVRTKEHVLFSDLESNARLTRSGGGWFLQIPYYTTEDELQSKPMVDNDDIISLDPGVRKFISFYSPRGDCGVSGHDLSPWIGKMLGRIKNAHNKRKRAKLTRRLENSVEDYHWKLCHWLLRNYRTVLVPRLYVHKKAGKYLRDRQRYMKHCGFVDRLRCKVLNYPGRRVIECKEYWTSKTCGKCGVVDKKMQSEEVFSCRKCGFECDRDINGARNILLRNM

SEQ ID NO: 18791 - protein, 526 aa, Caldivirga sp.
LVGIFVSGYVLIPPLPCVFSVLGLVPPGGGSISLDEPVGRSPTVSTNPGTPSSSTPKLKGSRKLRDENMRTVRLRLLPSGAQERKLWRIADATARLWNELNYTRLMQFRMMGKIDFKGTEHEFYHRYKSVLGVNAGQVIRLNNSAWKSYFETLRLYRQGKLPKFMGKPSPPGFWKDRLLGRRKLVILVRNDRYYLEPTNGGEGYLLLKDWNLRIKYTGRIKWSGKQGTLVIKLEGNRWFAYVPITVGEKPARSNPRGYVKGVYDRVQINKPKGTNKAFIDVGLNNLFAVAFNHTDVAILIKGSTIKAEYYWWKRETKTYQAIRDWLRNRGFKTWRKYHAFHLHAKYKQHERLRHYYRTAIRFLAKTLHGMGVNEVFIGYPYMLNQNNSNEYNANIWWYVKIIKWLGEVLQEYGIRLNVVNEYGTSKQCSICNANHENGRIKRGLYVCPVTGIKINADLNAARNIAKRAGYETPIPRKILSYIVTSNGVKPLTPKEGVTVETPTVKNPTPQKGGKGVIRSRRTPGLR

SEQ ID NO: 18792 - protein, 388 aa, unknown
  TnpB Polypeptide
MLNQKTSQKKQVPKQSFVLRTESILLPKGETKHLTSKCNISRIVYNSANHHFRPIYQETGKGPNRSSVWNWLKNHHDFPLWKDAIGTKTCQQIVNLLVHNYSSYFKALKAWKVDSSKFLSKPKSPGFINKTICAKRLFILPIAAQSLRVNHELGILKLPKRFDLTVRFNQSKGKEVRNGRIIPIADNRFVFQISYRDKAVPISVKNSRIASIDLGVNNLVTLSTNFGSQPFKINGGPVKSINQYFNKEKARLDRIYAITNAKGSSKRDKLIEKRNRKLSDFFHKSSRSIINYCISQKIDTIVIGLNDFWKQNVKMRKKDKQNFVYLPFRKLIDQIMYKAADSGIQVIVNEENYTSKCSFLDNEFPQKYSSYLGKRVKRGKFRANDGTY

SEQ ID NO: 18793 - protein, 342 aa, unknown
  TnpB Polypeptide
MERLQFSVNIKQRICGFGMKKKQFLHIWQNQNYRMLMRWIRCQKELLRIPTDRVLLPSSVKKIRGRLRVYVHITVEGKAISKRRKDSTPRHYYGKGNIGCDIGTQTIAYTSNTEVGLENLAERGNSIQHVERQEALILRAMERSRRAMNPNHYNENGTVKKGHKQWNFSKRYQKLKQRHQELCRIAAENRALAIREQVNHLRSLGDCFITEPPNAKKLQKRANPENPVDKNGRMKRKKRFGRSIKNRCPGYLQAKAKQLFESTGGMYIEVPILYRASQYDHTSDTYIPKKLSQRMYHLADGTKVQRDWYSSYLLYCINKTYTQINKLKCRSNLPLCIKKKRT

SEQ ID NO: 18794 - protein, 390 aa, unknown
  TnpB Polypeptide
MLVVERHHIAGNDTIIRLCSNSRELYNQCNFLMRHAWFGGHPLPDINILTTAVKDLDCFKSLHNTKTAKQTVRKCLTDWTNFKKALNAYKKDPSKFIKRPKPPYYKDKLAQVIFYNETIKGGQNKKKAKPNTITPTNDCFGINSTRDYKQVILTPKRFGFVVDVQYEQPAEPKSKAKGIACVDIGLNNLCAITTDQTTTSILVNGRICKSINQKFNKHNTKRESQKRYFRLENYFHHVSKFVVAHCLKNGVGKIIVGKNDGWKIRMNLGKKTNQNFQYIPFWRLLEKIRYKAILAGLEVVFTEEAYTSQASFLDRDPLPAYEKGVSHTFSGKRVKRGLYRAADGREVNADVNGSCNIGRKVIGNEDLFLRLDKSLAARPVRINPLKAFCV

SEQ ID NO: 18795 - protein, 390 aa, unknown; identical to SEQ ID NO: 18794
  TnpB Polypeptide

SEQ ID NO: 18796 - protein, 363 aa, unknown
  TnpB Polypeptide
MMRSKLIGSKGAIENFQFVTVNGKVIFEDKDKIVRIARAYSQVVKSAIKPLFDGKSVDELTKEFYNILPNYIYLETALKQAKTIVDGLLEREDEKGEIIHARIRRFWFGSRGNKSDKGNRNIKFHVLEDHVLIKVKDPWGKWVFGKAYFGKEYLPLLKELEDLASKKVEGYGAVISFEEKPMIHLQIPLWLYLKHFSSPKPNGYGLIAGFDLNSDRLNVVVVSKDGKVIANKTWRYSDVVRPGFPKGKAMALRLNALSQSLIFLSRIGVDYVVFEDLFLVKRRKFTRSRSGNRKVSRFAKRQMLTHGVIKALRLGFNVILVNPKGTTNSEEHEKVMREKGFDRHTASAYLIALKGLGMLNDIK

SEQ ID NO: 18797 - protein, 480 aa, unknown
  TnpB Polypeptide
MVFWMAQAEREVLASQEFYDLAVKALKGDRPYGALTSWGRKKLSRYPFSFQKYNMNEMLVNNVVSTLGLYAMSVGLFQMMSTHPKETRPERILFHYRSTYPDAPQPTSGMVRAHLIRFHKKGERKASIPGVSAKLNLAVCDTKFSPKSFREENDPLSVVIQLRTYHYGLVSVHLKLPDNIERFGTGKVCRPTIRLNNKGQVVFDIAIEHEIDKRQTKKFVGVDLGKIEPFVATVIDPEDKYRSTPYHVRYKGRLGSLVKKEKKRRDLATHLHEKADLCEGYNRTDHADTLRTEAKRVSAKATRIKHEISQCIANQIVSVADKSDAHISLENLSWLDSQGGRWPHAEIQSRIESAAKRYGLKVTKVSAKDTSRICSHCGGKTSNNTVTRVGTCNICGFSLDRDVSASREIALRAVSNTRNRERMRSLLRQRAQMQSSADTRQPKPVTALSGIQGHTGTSSKSLEATLMMVRENLDSRGSPT

SEQ ID NO: 18798 - protein, 504 aa, unknown
  TnpB Polypeptide
VTRHRFTTDNGADAEQVSADLAQMVAWMAETEREVLTSTEFHDLALGVLKGDRPSGALNSWGRKRLSRHDFSFQKYNMNEMLTTNVVSTLELYAMSVGLFQVMSTHTKETRPDRILTHYRKTYPDAPQPTSGMVRAHLIRYHKKGEVKASLPGVSAKLNLAVCDTYFAPKAYRDDSDPLNIVVQVRTPSHGLTRLYLRLPENMERFGDGKVCRPTIRLNNKGQVVFDIAIEHESQQRDTSKVVGVDLGKVEPFVATVIDPESKHRSAPYHANYRKRLGSLVKKEQKRHELASHLHKRADLCDRYNRTDHADVLRIEAKRVSAKATRIKHEISQCIASQIVSVADQNNAHVSLENLSWLDTKGGRWTHAEIQSRIENTAKRYGLKVTKVSAKNTSRTCSHCGGKTSNNTVTRVGICSVCSFKLDRDVSASREITLRATSPSSRSREKIRSLLRQRREMRSSAATRQSKPVTALSGIQGHTGTFSNSLEATLMMVRETLDSRRSPT

SEQ ID NO: 18799 - protein, 426 aa, unknown
  TnpB Polypeptide
MRYKAIKIRIRLDKDQTRFLLLLMRSAKNLYNQALYNVRQHFFETGEFLTYNENYHLLKTSENYRMLNSSLGQTVIKKVDEAMKAFFGSIKATNTNIVRLPRYLDKLGYYSLIDRMVYKPHSGYYTLPRGNFIKRVSKYYKLPKTKVQLINSLSLPKELKIKIVTPKCIINKQIKEITIKPKFDGKYMEVIHTYLEEDALEKKNLKTETMGIDLGFNNLATCAVTNTNHLLIDGFKLKSLNQWYHKRMSHLNSTRPNQNVLTKQMMSLIIKRNNQMTYGINKAARLIINHAIANNIGEIIIGYNKDFKDTNLSDRYNQMAKSIPLARLRDRIIYLATEYGIESKVINESYTSKASYLDNDVVPELDYKKHTFSGRRTKRGLYVSKEGKIINADLNAALNILKKGNPNTERLGYSGVNTPKRTYLFG

SEQ ID NO: 18800 - protein, 379 aa, Paenibacillus sp.
MLVHKAYKFRMYPTTEQAVLISKTIGCSRFVFNHFLGKWNTTYKETGKGLTYGTCSAELTKLKKELDWLKEPDKFSLQNALKNLADSYSRFFKKQNDAPRFKSKKSPVQSYQTNFTNNNIAIIDNKIKLPKLGLVKFAKSREIEGRILNATVRRNPTGKYFVSIRAEVEVEALAETNSSVGIDVGLKKFAVLTNGGNFPNPKFFRTLEAKLAKEQRILSRRKELALIQKRSLAESRNYQKQKLKVARIHERIANSRADYLHKISTHIVKNHDNIAIEDLQVKNMLQNGKLAKAISEVSWTQFRTMLEYKAKWYGRTVVAVCKTFASSQLCSCCGFKNKEVKNLKLREWTCPVCYSHHDRDWNASKNILHEGKRLLSAQL

SEQ ID NO: 18801 - protein, 362 aa, Streptomyces sp.
MATRVKRAFKYRFYPTDAQAAELSRTFGCVRKVYNMALAARTEAWARQERVNYNQTSAMLTAWKKTEELAYLNEVSCVPLQQALRHLQTAFANFFAKRARYPRFKVKKKSRASAEYTSSAFRFRDGRLTLAKMADPLDIVWSRPLPEGASPSTVTVSRDSAGRWFVSLLCEDPAVKPLAPTTTAVGIDVGLNHLLTLSTGEKIANPRHERRDRVRLAKAQRGLSRKAKGDGANRRKARAKVAKIHARIADRRRDVLHKLTTRLVRENQTLVIEDLTVRTMVRNRSLARAISDAAWAQFRSMLEYKAGWYGRDVIAVDRFVNAANNLLAAGLAVSVCGAGVRPQRRTPGGQSAMKQKTPRREP

SEQ ID NO: 18802 - protein, 392 aa, unknown
  TnpB Polypeptide
MYLTERHIIKNNEELDILCFKSKNLYNKALYLVRQHYFETKNYLDWIKVYRLMVDSKDEDYYALPTKVSNQTLRLLDRNFSSFFALIKKKKSSNYDKPIRIPRYLDKEGRYIAVFYKEAVSKVYLRKGIIKLSSLSIEIPTKKANESNLVEVRILPRNNHHIIEVVYEIEDKEVKSDNRRYASIDLGLNNLATVGSNVVKPFIINGKPLKSINQYWNKEKARLQSLLKGNKKTSKRINSITNKRNNKVKDYLHKSSKMLVNFLVSNDISTLVIGYNEEWKQNINIGKRNNQSFVNIPFYTFIKQLEYKCKLEGINIILTEESYTSKCSFLDNESVEKHESYLGKRIKRGLFRSAKNKIINADLNGSLNILKKAVGEFQYPIEVCSTPLRMNI

SEQ ID NO: 18803 - protein, 496 aa, Escherichia sp.
  misc_feature (26)..(26): Xaa can be any naturally occurring amino acid
  misc_feature (243)..(243): Xaa can be any naturally occurring amino acid
  misc_feature (248)..(248): Xaa can be any naturally occurring amino acid
  misc_feature (394)..(394): Xaa can be any naturally occurring amino acid
  misc_feature (445)..(452): Xaa can be any naturally occurring amino acid
LSGLTKTSSGSGLLFPDSKSGDRMMXQAFKFQLRPGGQQEREMRRFAGACRFVFNRALARQNENHEAGNKYIPYGKMASWLVEWKNATETQWLKDSPSQPLQQSLKDLERAYKNFFRKRAAFPRFKKRGQNDAFRYPQGVKLDQENSRIFLPKLGWMRYRNSRQVTGVVKNVTVSQSCGKWYISIQTESEVSTPVHPSASMIGLDAGVAKLATLSDGTVFGPVNSFQKNQKTLARLQRQLSRXVKFSXNWQKQKRKIQRLHSRIANIRRDYLHKVTTTVSKNHAMIVIEDLKVSNMSKSAAGTVSQPGRNVRAKSGLNRSILDGTVSQPGRNVRAKSGLNRSILDQGWYEMRRQLEYKQLWRGGQVLAVPPAYTSQRCACCGHTAKENRLSQSXFRCQVCGYTANADVNGARNILAAGHAVLACGEMVQSGRSLKQEPTEMIQAXXXXXXXXTANADVNGARNILAAGHAVLACGEMVQSGRSLKQEPTEMIQATA

SEQ ID NO: 18804 - protein, 422 aa, Escherichia sp.
  misc_feature (3)..(3): Xaa can be any naturally occurring amino acid
  misc_feature (220)..(220): Xaa can be any naturally occurring amino acid
  misc_feature (225)..(225): Xaa can be any naturally occurring amino acid
  misc_feature (371)..(371): Xaa can be any naturally occurring amino acid
  misc_feature (422)..(422): Xaa can be any naturally occurring amino acid
MMXQAFKFQLRPGGQQEREMRRFAGACRFVFNRALARQNENHEAGNKYIPYGKMASWLVEWKNATETQWLKDSPSQPLQQSLKDLERAYKNFFRKRAAFPRFKKRGQNDAFRYPQGVKLDQENSRIFLPKLGWMRYRNSRQVTGVVKNVTVSQSCGKWYISIQTESEVSTPVHPSASMIGLDAGVAKLATLSDGTVFGPVNSFQKNQKTLARLQRQLSRXVKFSXNWQKQKRKIQRLHSRIANIRRDYLHKVTTTVSKNHAMIVIEDLKVSNMSKSAAGTVSQPGRNVRAKSGLNRSILDGTVSQPGRNVRAKSGLNRSILDQGWYEMRRQLEYKQLWRGGQVLAVPPAYTSQRCACCGHTAKENRLSQSXFRCQVCGYTANADVNGARNILAAGHAVLACGEMVQSGRSLKQEPTEMIQAX

SEQ ID NO: 18805 - protein, 413 aa, Halorubrum sp.
MHYAYRFRLNPTLEQREQLDYHRDTCRQLYNHAFNELEQIPDSAGTLNQRVRQVRDQLTDLKEWWNELNDLYSTVAQAAVMRIEDSIKALSELKERGYNVGSLNWKAPQDFRSFTYVQSGFEFDSKNGQPVLSLSKLADIPIVNHREIPDDVTIKEVTIKKEPTGEWFASFAVDGKQTPEKPTDSERCVGIDVGILKYAHDTDGTAVGSLDLSDERERLERAQRDLSRKEHRSNNWEKQRKVVAQRHSDLTRKRRDFLHKLSNYYATEYELVAVEDLDAKGLVELPGNSRNRASAAWGTFKRMLEYKCDREGTHFVAVDPKDTTKECASCGVKTEKPLWVREHSCPSCGFETDRDANAAINILSRGYDQLGVGYSESTPVETALPVDTSVSAKRVVEAGSPTLKKRTASAVGE

SEQ ID NO: 18806 - protein, 448 aa, Bacillus sp.
MKIVKTLKYKIINHSKIFHSTLDIYNRALTFIMDVIDKEFDHLDSISTKTIVPAVEKLIHVTKSNPQPKYPEFNRLFYKFPSYFRRSAIAAAFGKIKSYRFNLKNWEEEKKMAFSEGKKFKKKPPRLQLEHKEFPVFYRGNMFKKTSHTTAKIKVFHQNDWIWKEIHFKPQDEYKRGVWNWKENNPKLVQVGKKFFLHVSYESQVKLNHTNIQNQRICAVDLGINQSAVCSVMDAKGTVLARTFINQPIEKDQLYTITNKLRKAQSISGRITAPNFWRRINGLQKQIVNDTSHEIVTFAKEHRCDVIVFEYLDQMKMPKGFWGAKKLRFKLRYWRKKGIQNKVEEMAHYLGMRISRINARNTSVLAFDGSGKVQRNAKKDLATFTTGKVYHADLQASYNIGARYFIRGMQKSISEKKWLALQAKVPELSKRTEQTLSSFISLNQALET

SEQ ID NO: 18807 - protein, 657 aa, Acidimicrobiaceae sp.
VSNSAAPACHTRGTTKSPTGNWRRPPDQATTTLVLNLDTTSPGVAGRLENLYFTMFNLRRALQRDAQSLAKQYWAAKEERDSLGWKVVAERLGISRSGFADRARRHFQCAGWASDHVSAALVQHMSDGVFENLTRHLWSDASGKRQGALHVTPYHQFATITGRARSHTTANKWETFRLYGSLQGHLDAYRHPDRGVETVEQVLALGAGLPVVRQRRSRPPSSQRWSLYRGPFVMVFAGGPTSHQPEMVLPVLVPTGSGRWARLAHFLNDRDTWHKIDLVRRPDPNRAGGWRYEMHLLVLNDGYHSPRVRDQLAAAPRDRVACVDVNVSNLSVTSRNHELTSLETTVVKVSEIERERLVREVLQRRRRQRSLDRSRRATNVAQYQKSKAQVRRDQRRAAHGLSEVTTLARGARRMRTKEKPIQAYRRDTLSKQYVHLRTIDAARARATSITKGQAAWAISRELIAIHGPHWIIEDCHLPTWSRSWGKAMAISAPGMVTCALAATSAELNGSFTKVSTATTALSSTCLCGAKVRKVLGERVHRCASCGLVGDRDLVSAALGTCVTPATTADEHDLVDSAIATALRQMIAIIGCEDTLVSQTQPLELGRHGSVQAARPDPMGPGCSRERPLRAPSTKGRGRPRLAKVARLRGLALRHPTG

SEQ ID NO: 18808 - protein, 304 aa, unknown
  TnpB Polypeptide
MGGKYLYVKVPKIGLVKIRSHRHLPDGAILKQLQFIKKNNGWFVNLRLEDPTVPTVTPDSILPAWENSMGLDAVLHKDDYLATSEGVKLPSLKVLRKSQQKLTRISQKKNTRKRSSKARRKLAKREGRQHQKIARARKDFQYKTAHKLVRTGKKVFFHEDLNLKGLTKRNAPKQDETGAYLPNGQSAKSGLNLSWADAAFGQFFQILGHIAGKAGAVAIAKNPAYTSQLLAYRDEFIFTDCNIREYWDEVENIRVDRDVNAAINLKRVGLDVFPRIKRRKGGIATIGSITDDTSKEVLRILRSA

SEQ ID NO: 18809 - protein, 241 aa, Halobacterium sp.
HVRTKADVDDPVPAENGTVLGVDLGVENIAVTSTGAFWSADELNHWRTEYVQRRKSLQECGSRWAHENVQAVGRKEKGRFKQYLHRVANELVDEAAENGCTMIAFENLTGIRERMPDARKFHEWAFRRLYDYVSYKAEVRGIQVEQVNPKNTSRRCSSCGFTHEDNRPAQDTFCCQSCKYENHADYNAAKNIGYRLLRNQTGGEGGAPVGVRLNTGMLNANGVKPLPDSARAGVHGEHHGP

SEQ ID NO: 18810 - protein, 328 aa, unknown
  TnpB Polypeptide
VNNQLWYNINALHELKKKGKKVGKLRYKKIVKIINYNQSGFKIDEDKLILSKIGEIKVLFHRPLEGEIKGVIIKKSATGWYAIFQVEVKKKPLEKTGKVVGIDLGVEKLVTTSDGVEVENPKVFDEVEKRIKTLQKTLSRKKKGSSNYEKVRKKLAKIHEHVKNLMNDYIHKVTSWLIEQYDEIYVEDLDVKEMVEDSESKVLRKHIIYANFSKFISYLSYKASRAGRRVVKVDPRNTSKTCARCGYVKKDLTLADRVFICPKCGWVADHDYNASLNILRAGSGLPLEPVDRKPLIYIPFSEGVYSKFPGRSRKSSPRGEDAPSVRAG

SEQ ID NO: 18811 - protein, 453 aa, Pseudomonas sp.
MLNGIRCRAHPTTEQAKKLAQWIGCARLIYNAKVSEMQYFRTFSRKALGAGQAVIDQAYSQFKDAELTPFLSEVPSQILRNSAVQFMNGWQRFLKGLASPPTHKRKGERDSVHLTNELFRFVDEGLIEIGTKRFPVGTLRFTQHREITEPKSIIVSRKAGRWYVSFNFEDATLAPPRPRDEILADLSHLDEAQLTAMTWAGDRGVRDMLHGSDGQVFHLTVSAVAKNRRRELTKRRLQRRLARQQKGSRRRDKTKRRIAHISSGQAEVRRDFAHQTSRKLVDSPYQVFVFEDLKITNMTRRPKPKQDEATGEYLPNGAAAKAGLNRSILQSCWGNIVLYTHYKAERANKVTIKVHPHFSSQTCSQCGHTSSENRSGKQFSCTSCGFKADADANASAVLRARGAKHIIDGEWREQKAKKTVSFRKRGSERVPQNHVERPVALCAQISVKRGCPA

SEQ ID NO: 18812 - protein, 382 aa, unknown
  TnpB Polypeptide
MMLKSYKYRLYPLKAQERLLEQTLETCRRWYNTCLAERKEVYEIEKRTVGKYAQLRKVKGWKTSDPYAAKVHSHILQVAVQDLDKAFQAFFRRVKDGKEPGYPRFKGRNRFDSFGLKEYGNGFKIDGRRLRISGIGRLSVRWHRPIEGTIKTVRLCRQAGKWYACFACEVDLGKPLPPTGQSVGVDVGIHHLLATSDNEIVDNPRWYRKAQSQLRVLHRRVSRRKIGGANRKRAVLALQRQHEYISNCRKDFLKKLVHSLIIRYDRIALEDLKIQGMVRDHHFSKSILDAGWGYLKQCLVDKAVEAGRQVVLVDPCYTSKTCSSCGELFPDLSLSDRWIECSCGLSVDRDVNAALNILWVGHTHWDKSTDNGLRLFQEAPPL

SEQ ID NO: 18813 - protein, 382 aa, unknown; identical to SEQ ID NO: 18812
  TnpB Polypeptide

SEQ ID NO: 18814 - protein, 362 aa, unknown
  TnpB Polypeptide
MINYQLKLKLTKYQEQQLESWLPILTSIWNWTIRKIELDAKDNIYYNSKFDFVNLLVNHSEKLGVSSHTMMCTTMTAYNLYQQYIKKKCGKPKFKGQRNKLNSILFPDIIKQPQNNKIQLRVIGKIKYHKQQIPEGNIKCVRIIKKVSGWYAVLTIDTKPKKISIISNNKVGIDPGFKHLLTLSNGDKIEHPREFEINAERLAQAQRGHNKKLAAIINEKIANQRKNRNHKLSRKLVSENELIVFSKDNHKNVAKKFGKSVSSSGHYQLQKMLEYKCRTDGRQYIEVDCKFSTMTCSTCNARTGPTGWEGLKVRNWECTECGTLHDRDINAAINTLNSGLGISHENTVKTEIQKTSNEWGNI

SEQ ID NO: 18815 - protein, 375 aa, unknown
  TnpB Polypeptide
MLKTVTTVLEVSPADKQKIMDSLKGMSDAQNYVVDQCYEYEESNSFRMHKFVYKPLREKFKLPAQLAVVANKYACSAVKGAVRRKGKKPVFSGKAIHYDMRSSTVDLPKQSASILTISGRIKAHLRIPRYFQRFVYWNLRESNLVLCRDGVLRLMICIEKPSTPSAKTGKVIGVDRGIDALIATSTGCLVEGKEVFEIKKRYVALRSRLQGKGTRSARRHLKKLSGREKRFMRDVNHCLSKKLIGEAGKDGVIVLESLKGIRNAKHRKKQNWLFSNWAFYQLEQFLVYKGEETGVVVEFVPAKDTSKICSLCGSLRTGQRQGSVFRCKACGVVLHADLNAAKNILYKYTLLMGCSSTSPLLPTGLSKPSISMDSS

SEQ ID NO: 18816 - protein, 375 aa, Breznakia sp.
MKQVKKAFVYRIYPNDLQKEMFAKTFGCARKIWNLMLDDRINSYKQYHEDATPIKETTPAMYKKDYPYLKEVDSLALANEQMHLRRAFTNFYRNSKTVGYPKFKSKNRNRNSYTTNNQNGTIAIIDKQGIKLPKVGVVSMDYHREHTGKIKSATVSQDATGAYYVAILCETEVEAFAKTNSSIGVDMGIHHYVVLSDGTKIENPKYLKKDMQRLQKLQRKLSRKAEIAKAKGIKLEDAKNYQKLKITIARLHKRIYNRRHDFLHKLSTYLIKNHDVICVEKLSVKKMLESHLAQAITDAGWTKFLALLKYKAEWYGKSIKEVEPYYPSTQICHVCGSKESKKALHIREWECSSCHSYHDRDINAAMNIHQHGLAI

SEQ ID NO: 18817 - protein, 353 aa, unknown
  TnpB Polypeptide
MLKTIKASVVSLTKHKKELLDNDYNNHQWWMIFGVDNGLLSCFKSTKNFKQKKINYKEYPLPLWSCLIKDWFRKKDTKLTKDWLKIPNSKLKGQGLWLPLKFHQPIPENSIIKDSCLVLKNNQYYIHFSVEINEPKLIKPRNIIGIDLGLKNPVTLTNLNDKKTIFLGKEVNQVRGKSFYLRRKLSQSKKLSTIKKLNDKEKRRVNTLLHGLSKWIVNKAYLTKSAIVIGKLDNLPKNYSRKFNRKLNNFPYYKLTNYIEYKAKERGVPTVLVNEAYTSKTCSVCDTIGQRTKNWFKCNNCHYEDNADRNASINIGKRGLSYMLRSGVVTSALKSLAKSEEVSTNIIKSKLAA

SEQ ID NO: 18818 - protein, 358 aa, Exiguobacterium sp.
VSQALTVNIKLHPTKAQQSILERMMDTYIRTTNQLVSDMVQARESLKLTSKNVSSDLPSAVKNQAIQDAKSVFRRAKKKDFQIVPVLKKPYCTWNNQNYSFDFESISFPIIIDGKVKKTAIRAEIVEPDNRHATLLAHKLGTLRITKKSNKWMAQIAVTVPTTEKGGTNVLGVDLGLKVPAVASTSCDKVRFFGNGRENKYMKRKFRAKRKELGQKKKLNAIKKLNNKEQRWMKDKDHKVSREIVGFAKENHISVIRLEKLANIRQTARTSRKHNKNLHTWSFYRLALFIEYKAKLEGIKVEYVNPAYTSQTCPSCGERSKAKDRTYACPCGFKKHRDLVGAMNIRYAPVVDGDSRPA

SEQ ID NO: 18819 - protein, 403 aa, Streptomyces sp.
VSKTDAQAHAARALWNLLHAWWQMMPKEKRTLADADAAIRQARRDIDFLAVLPAQAAQAVLKTYFQAWRNCWEGRADAPNFKGRFRTVMSVDIPQGRDLNITRVHRRWGMVNIPKVGRVRFRWTKDLPVGKRADAENRITGARLIKDALGWHIAFRVQTLEVKPGPHQGPDVGIDVGVTVPIALSDGETYEHGAWLTGKEKARLLHLEQRAARRKQHRRPGEPTSRRLHRTYDRIAGLRAKAKRRALDWQHKTTTVIARTYGTVVVEALTITNMVKSARATVEESGNNVAQKSGLNRSISGEAWGRTVTMLTYKTTRFGGTLHKVPAPNTSRRCSACGFTTPGSRESQAVFVCKNTGCGWSGNADHNAARNVLHLYRVGLALIPAAGRAVVRRAERVKPAAAR

SEQ ID NO: 18820 - protein, 448 aa, unknown
  TnpB Polypeptide
VPYAAFSKTGGALDLGEVLDGIRSDAELVAHYALQEMTEQNLALVTYFDKLKPAEAGRQINLKLPAEVKKQFRSGISRLERMFREQVVSNLRSWATRAGVVDRTYSDYVSAGWKRTARDSKPKTLQPRLALSATDKGYHKNFSVTPERISLEVVVQGQWVTLHFPTPPQLLEVGCEPGVPDIWVDNNNHVMFGFHGITNPGRPKFSERYVVGVDVGVTNPAAYVVWDTEKKQVVERSLLGQRARSLSNKIKRTQTQVSALQRKNRSEEVAPHRAHLSNRRKELSILVAQEVADAAWRHGNALVVFEDLSHIKNTMRFGRWFRGEVLRRTRDMVEANGGRVLKVNAAYTSQRCHVCGESLDMSDYSQPLCNTCGITHHRDLNAAANIAQRVNVKKACQTRRRHATKTKRVRRSKCRVKPLKHPGTKNRPTPKAPQNRPKTLARSFLPSG

SEQ ID NO: 18821 - protein, 420 aa, unknown
  TnpB Polypeptide
MRWQEKCHIFSVAYELPQRFNKLNIVEFLIIILIDYKKSIIKNYTNKKIMMKAYEYRIYPNSQQEEIFNQTLGLCRLYWNIVVFNKNQDHNFQIEGYKQVFTKYKPEALEWTKNTACSIPLSQMWSDVRAAYTNFFKSCKGQRKGKFSKSPKFKSKKNPKDSFRYSCSNCTPKIDENGLYLTKKLGYIQGSFDCRFAQGKWKNITFRRTATGKWFVKICVEKKDEPKNKNKKIVAIDWNCRDEDFIVRSDGVKTKCPRYLQKSQKQLKHWQKIMSKRYVSGSETQSNNYKKAKKRVALLHEHVSWQRKDWLHKESRKLCNEFETIVVEDINLQTMSKMNHGVVISDQGFRIFRNMLSYKSHLEKVNPKNTSKMCHTCGYVNPKVKVGINYWKCPVCLTEHDRDINAALNILSKYVTSQRA

SEQ ID NO: 18822 - protein, 415 aa, unknown
  TnpB Polypeptide
MRTYRFRIYPTSRQVNMLNSTLNLCRELYNAMLQQRIYALRSGKKVNYNSQQDELPELKKAFPEFRNIHSLAIQDVAHRVDKTFDNFFRRVKEKKKGKNIKAGFPRFKSKDRYNSITYTQSGFRILDNGHIWLSKIGKIRMFMHRTITGNIKTLSIKRDTVGDWFVTITVEIPKEEFPFPDTETKQQIEILRPVGTDLGLTSIITTSEGLQVEPPQYLRKSEKRLERAQRELSRKKECSGKRSKTRKRVAKIHRKINRQRDDFSHKISRNLVSNHDLISFEYLNINGMIRNHHLAKSISDAGWNKIIQYTMYKAESAGICVVMVDPRHTSQKCSRCENIKHDLKLSDRIYHCNACGLTIDRDLNAAINVLNDALIKIGRGTPKFTPVEIEALPGRATSVVETGSPQRQLEGGCHS

SEQ ID NO: 18823 - protein, 400 aa, unknown
  TnpB Polypeptide
MLSRLGFRYRIYPTLEQEARLLDWEDALRALWNAANEQRLEYLKRHASMPSAFDQSNQLKDLRADLPWQADLPRHSADKLLVDLDAAWQRCFMKLGRKPRWKKKGRGAISITEPYSKGFRLTATGVVFPKLGEIRAVFHRPIQGIQKICTISREVNQWFVSIQCEQDVPEPDRRTGPVVAIDRGITNLLADSDGAVIKNPKYLEGAIKRLARAQRVVARREKGSRRRERAKFKVAVLHRKVRRRRQHTLHVLSSNYAKSHGVVVLERLNVKGMVRSNLGRQISDAGWSTFRSMLRYKLEATGGTLVEIPAHYSSQTCMACGVVNAANRSGEVFSCVTCGYTAHADLNAAQVLLSRRNGGGAGRGGFPEVRGPAKRQLRVVRRGRSTRQFGLPKSPDFKVG

SEQ ID NO: 18824 - protein, 536 aa, Streptomyces sp.
MAAPFVVSGPAGAAIRDRLKGLTVEDEEVLRLVGGHLGSLASRDLKARCADGLEHGSERWAVRKRALTGESSSRWAGSITKATHDQWGLARRGQAAHLHDLEAGIDTVRHRLSLPLVEWGPKRAAGGYRSQKEWFAKSRRLHVLEDRLAAVRADQEAGRVHVVRGGKRLLNTRHHLEKAQLDKAQWRTRWEASRRFLQADGESGKRCGNETIRVSPDGEVSIRLPVPLAHLANAAHGRYVLAARVAFPHRGETWRDRITANRAVAYRIREDTDRGRWYLTASWTVPPVQTVPFSTARASGLIGVDTNADHLAAWRLDAHGNPVGAPRRFDYDLSGTAAHRDAQVRHALIRLLHWAKRYHLAVAVEDLDFTAETTREKHGRRKRFRKLISGMPVARLRARLLAMAAELGIPLVAVDPAYTSKWGAQHWKKPLTSSKRKTSRHDAAAVAIGRRALGHPIRRRTTPPPAHQSDEQGHRTVQAGPATPGREGPRPRIPGPRSRVVPPGRGAKAGNQNTHHRSECSAEHETWQQDSPPLSL

SEQ ID NO: 18825 - protein, 380 aa, Streptomyces sp.
VCNTALEERTRAWYGEQRRISYVQSSAALTEWKKFARRAKYPRYKSRKKSRASAEYTRSAFKWGDGRLTPAKVAEPLDVRWARPLPEGAEPTTVAVSRDSTGRWFVAMLVEDTVAPAPATSAAVGPDAGITSLVTLSTGERIANPRHERRDRARLAKARRELSRKGKGSANREKARRKVARVHARIADRRRDFLHKLSARLVRENQTVVIEDLPVRNLLKNGKLARAISDAAWTDLRMMLEYKCAWYGRELVMADRWFPSSKLCGACGTVREKLPLDVREWTCDCGTVHDRDVNGARNILAAGLAASACGDGVRPQRESSRTGRSSVKQETQRATAGIPRLQAGEEVNGRAIRRGRRRPGRSRPTARRTPRAPSAGSSRR

SEQ ID NO: 18826 - protein, 542 aa, Streptomyces sp.
VDRLREVAASFVAPGPTGVAIRDSLKGLTGRDQRVLRLVGGLLGSLASRDLKDRCAAGLDRDSEQWARRKRVLTGQSSSRWAGSITKATHDQWALARRGQLAYIQHLQAGIDMIARRLSLPVGTKGSKGSPGGYRSRQEWFAKSRRLHLLQGRLERERADRDAGRVRVVRGGRKLLRNRHNLQAARLTEAKWRVRWEAERWFLQADGESGKRYGNETIRVAPDGEVSIRLPAPLAGLANAPHGRYVLTCRIGFRHRGQQWADHVQANRAVAYRIHLDLERDRWYLTASWQIPPARMAPLEAVRSGGLIGVDTNADHLAAWRLDAHGNPVGAPRRFDYDLTGRAPHRDAQVRHALIRLLHWAKRHHLAIAIEDLNFQADTTREKHGRRKGFRRLLSGMPVSRLRSRLVSMAVELGITVVAVDPAYTSRWGAQHWQRPLTTKTRKTTRHDAAAVAIGRRALGRPIRRRTPPPPPHRSDAVGHRTVQAASGIPGREETRPRIPGPRTRSVAAGRGAKAGDQCAHNRSGHTAEHESLHQDSLPLSP

SEQ ID NO: 18827 - protein, 391 aa, Desulfosarcina sp.
MIIITRKSFKYRIYPTKSQISNLENQFSMCRHLYNQALNERKESYEKEQKSVSYHDQAVQLPAFKIERPWYKGVHSQVLQDVLKRLDKGFQSFFRRVKAGETPGYPKFRKRGQWNSITYPQYKTPPSSEITVPKVGKIKLVHHRKTPEDAKIKTLTITKEADKWFACFSVELSLDIEPKQDLFTAIGIDLGLIDFYYASDGSQISVPKYLRKKEKQLQRLYRRFSKAKKYSKRWCKLLSALQKCHYRIKCQRNDFLHKEANALLENSDVVVHEDLKIKNMIRRPKPKQDEETGQYLPNNASAKAGLNKSIADAGWGKFLEIATYKAFVLGKKLLAVPPHYTSQQCSACGEIVKKSLSTRTHRCRCGFVANRDHNAALNILRIGMDTLQAST

SEQ ID NO: 18828 - protein, 450 aa, unknown
  TnpB Polypeptide
MYKVEMTRGRKILFPISNKKLDAALREELRTFVKTTNMFLRELVSWLQKSEFDVIGFSTHGELYISDPEWYIGPAGGFHKPFTHKERSGEPLPYPKIKDSQLKYLFSYVFRECGCTDSHAIWKDNISASAINKLKSVIRRFKKPKVESIAEYIRRMVPPQVTNGTIAHKKSLMKYKDGVVKMTLANRNVVEIKDFSLPQTMYQEIHKSTFGGNLTIKNKANSKNHCYTVLFNCDKTFYEPKKWIGMDINKFDPYWVVIAENSGDGFEEIIAKPSQIKELEDKMKEVDKKIGNKDRKSISNKERALLREEKFRIVDLYNKAVYNLLAKNPHGESFLDFLENNQYGVGLDGVQTKGYAFGQSAINPILIKECERRRIPYLLTKAAYTTRDCYYCEARNKRPKGQDPYICENPICEKFESEEIPHVNAARNIAKKANAGFLELARKQSMVHSS

SEQ ID NO: 18829 - protein, 395 aa, unknown
  TnpB Polypeptide
VRLVERHIVKDNRFEDICLKSGLLYNYVLYNVRQGIFSGNYLKEYDFSTKLGRENQFDFRNLPCAVSQQVIHQVFSNINSWIKLKNDFEKNPGKYNNHRPRLPKYKNGKKQNMVIFTTSACRIKNGYIHFIKNIVEPIKTNIGDNKLCQVRIIPQATCYVVEVIYEKKEQILDLNKDNVLSIDLGLNNFCSCISNVDIKPFIVNGKVIKSFNQWYNKKKAKLMSFIGDKGTSNRLINLNNKRNFWIEDKIHKASRHIIDLCKENNIGSIVIGLNKGWKQNINLGKKTNQKFVDIPFSKLIDKITYKGKLVGIDIITTEESYTSKVDHLAFEPLKKQDIYLGKRKKRGLFQSSVGKLLNADINGAIGIGRKVVGDSYVNRIISSGLAFNPVKVNIL

SEQ ID NO: 18830 - protein, 373 aa, unknown
  TnpB Polypeptide
MRRSFKYRLYPTTAHTLLMPGQLDIARELYNACLEERRAAYKMAGTSLTYYDQANQLKEIRLLRPDVAAVNFSMLQATCRRAHRSFETFYRRRKGGLKGGFPRFKGYHRFDSITFPSYRDGCKLVGNWLTLQGIGSLKVKLHRPVLGTIKTVTLKREGAKWFVVFSCECEAVVLEQTGCSVGIDMGLTDFLTTDTGDTVANPRPLKTVLGKLRTAQRKLARCKRGSMRRRTQRLRVASLHRKVAHTRTDFHHKTAHALVQANDTIVHEDLQVANMVKNHTLARSISDAAWSAFIATLTAKAEGAGRTVIAVNPRGTSQTCLCGASVPKTLSDRWHDCPDCGLSLPRDQVSAMLIRRLGQSRQAPTQRIAAHVA

SEQ ID NO: 18831 - protein, 569 aa, unknown
  TnpB Polypeptide
MGMAEMVGDGGAGDCSVNIAVAVPVARPVLNADGSVRKPRARKRPKDALTHVVSVCLRPTPGQQSQIETRLDSGRKVYNACLAEFLARSRRVRADPEFEAAKKMPTGRQGTKVSADRSRAFAAVDERHGFTASAAMSFGSSLRQSWVRQHVLAQEAQTMAGRAFTAVHDWHVGVRGRPRFKSWRQGLRSMECKDNNGALHPKIVDGHVVGVLWGRGFLLELAPTDHTDTAERIRLDAWAAAGKVRSTRIVHTLIAGRDTYRAQMVIDGPAPIRHPVGTGSVSIDLGPSQVAVVVADNTGAPVSGQIHRLADGIEAQTKLLRRWQRKLDRQHRAGSPDCFDAKGKHRRGRCGWKDRSKAAQRTTMRIADAHRRIAAHRRSSHGHLVNELLAHGSDVRAEKLNYVSWQKNFPRSDRAPGLFMQELGRKAENAGGPYLAYSPWSTALSQTCVCGARVKKPLSVRLHRCPCGWRPVGTCSRRTSGCSSTGWSTSSPGPVVMCSTCLRRRKIFRCSVVSSRNPVSLRGRAPEVSSIEAGVARQCGQRRGSANDTTNAVVSGAARQRCSESNCPP

SEQ ID NO: 18832 - protein, 392 aa, unknown
  TnpB Polypeptide
MINVTRYRVYPNKTVQDTIFHQFGLCTEVRNHCLDTQCFNVRILPGLKESNPELKDVHSVVLQNMIFQIQDNLKTLSKLKSKGRRVGRLRHKPVRSLVYEQTGYKIVGNKLVLSKIGEMPIVISRPVPGTIKQIVLKFNRTHKWFVSVISRTEDEPLERVGMRTVGIDMNLLNFSIDTDGKIFEHPHNVKKSARQLGRAQRKMSRKVKGSHNRRKQRLKVARIHETVENRRDDFLHKWSNHYIQNYDRIAVEKLNIKDMLEGQKSRGMNRNTLDAAWGKARTFLTYKAERAGCQLVAVDPSYTTQDCFRCGIRVKKELSERTHICPSCGYTVNRDLNAAFNIRKRAFDVGWGTPKSTLIEIRTPIPVNAPEQVLVDEVRISRLQPWRVSRGT

SEQ ID NO: 18833 - protein, 220 aa, Helicobacter sp.
MGDYFLCLVCELENNPNKQTACDKSVGFDFGLRTFLTGSDNTKIESPLFFSKYLPLIKRLSKNLSKKIKGSNNFKKAKKKLAQLHQKIKHLRTDFFYKLALKLSRKYQSIFIEDLNMKAMQKLWGRKVSDIAFSEFVKILENKAHVVKIDRFYPSSKTCSNCLSVDENFNKDIKKLGKTDKEREYHCKYCGLELDRDLNASINIHRVGASILGVEFVRPT

SEQ ID NO: 18834 - protein, 417 aa, unknown
  TnpB Polypeptide
MAVTHLSNRMDSIRQDMYTEEQSVFTSSKVLFAMSIDSKTKSEMLSTMKQIASKTKKDKAFYEDCISILNEMSDDEFTFKQVEFMDMYISLSMEYRVPELRRAHMPLDSRLMKIEVSTDTVMPYVIKISDALHKNAERIVIPINTSRHPANKIKSHKMAGTVMASIDENGILQVGWSYESKMKQPKTSNVVGVDVGISDTLHTSEDKAIGSMKPVIAFYHDTVEKSFASLSDMRNKKRSISHYLRRHKALPEDVRRSLIKKMDRLDQMIQKADAPYRKKRCYYETLDHEIKSSIDRYIESISHDTLTVLEKLDIREFNKSRKSNGMMSTFARGKLQKKLMETLNWYGYDFKEIIPDYTSQTCPVCSHLEKDNRNGKSFKCKCCGYEADADYVGSLNIKANMESVDCMVQRPQSQSRC

SEQ ID NO: 18835 - protein, 526 aa, Oscillatoriales sp.
MTKYVTPREACKILQVSDKTLRNWELADKISAIRTPSNQRRYDIDSVLGTGHDRITAIYARVSSYKQREDLDRQVSYLQSLYPQAKVFKDIGGGLNFKRKALLALLGQVMSGDISAVVWLKISLPSSTSLAVDSTASENTNLLSKKIRVYPETKLAAKWRNWIAASRWCYNQAIAILKDERIGKYDLRKKVMDSAPNWVSEQPYNPRQMAVFQAFEAHKAAKKAKGIAKFRSRFDTSGTIRFQTSNWKFGTFYPTSTLGLSFKTSEPIVEVMQHEPTLSLINRQWFICYGIDEPKLKPIDSDLVVALDPGVRTFLTGFDGNDFIEIGKNDIGRIYRLARHLDKLMSRIGTNKGGQFKRLRYCLRKSAAKIRIKIKNLVNELHKKAAKYLAAKYKLIFLPTFETQQMVKNGKRRLATKTARAMVTLSHYRFKQMLKHQAAKHGGVVVDVTEEYTSKTCSKCGHIHAKLGGSKVFKCPECGHTLDRDKNGAFNILLKALRDTSLTGELAAFSVLPYTVIPGLVRDLPG

SEQ ID NO: 18836 - protein, 408 aa, Streptomyces sp.
MQLRYTFRVYPNGPQRAALARAFGCARVVFNDALRTRKDAHEQGLPYPKAGNLSKQVITEAKKTRARAWLGEVSAVVLQQSLRDLDTAYTNFFASLKGTRKGPKIAEPRFKSRKDSRQSIRFTRNARWKITPGGDLSLPKIGAVRVKWSRVLPSAPSTVTVIKDAAGRYFASFVVETEPETLPAVEPVVGIDLGLGHFAVLSDGTKISSPRFLRRAEKKLKREQRGLSRKAKGSKNREKARVKVARAHAQAADARREFHHQLSTQIIRDNQAVAVEDLAVNGLARTRLAKSVHDAGWASFVAMLEYKAALYGRVFIRIGRFEPTSQVCSACGVKDGPKPLHVRVWQCRTCGVVLDRDINAAVNVALAAGLAVSACRAQVRPGLRLPAQREEAGTHRDGQQTVAGIPVL

SEQ ID NO: 18837 - protein, 477 aa, unknown
  TnpB Polypeptide
MGQASRTTTLLLDLGKRDQGGANTEKRAALDGTAEVLTAARAFYIEFFLAHADKLAERVTYYSEEHLGMRERLISAHELLTWVEACTVETREHPHPWTGWNFTQRFPGMPFAYRRSVIKDAIGKVRSYLSNRANWEKSGKKKGEPGLPGATDHPTLYQGCIALDLETLNLKEAFVRINVYTGEARSGWIWMHYPVCSSRYTLQRLKEADWQRQSPTLVLRAHAAELHIPQVKKIEAKKVMERRQDPNLVTVAVDLNVKNLAVITVRQKATIIETVFVTDHGLDAHRYRHLKRIAKKQWQSGRPVAGEHSNQQLWRHIERLNADAAHKVARRIADVCAKYPGCILLFERLRKIKPGPGSKSARMNRKRANQLRGKINQHSRDKAYVEGVVTVEVNPHGTSQYCSRCGTKGERFSYRGGKRIVEKWGKLFCCPVCHYEANADFNASANVHHSFYRQWHWRPRTVKAQKASLSPALEDGP

SEQ ID NO: 18838 - protein, 405 aa, Acetobacterium sp.
MNRKRSLTIKEKNKLLAAEGKRLRCFGMTFRILPTLEQIAQINQTLGCHRLIFNSYLASRIEAYQTNQTTLSVAAFKKDRLNALKDEKPYLKAVDKFSLETACEQVQAAYDRFFAKRGGFPKFKKKHSSKQTYTTKYTNGNIAVTPEAIKLPKLGLVALFPKKTNRKRLQSLLDGTLKIQAATITRTATGYTVSLSVQEVVAISQPVVLTADYRCVGIDLGLKTFAVVYDGKDFADYSHGAYIKQAEKKLAKLQQQLARCQKGSKNYDKQRTKVAKRHEHIANQRKDFHHKLSTTIANENQVVVVEDLNIRGMVKNHKLAKAISNAGWRQFITFLAYKLDWRGGRLVKVNRFFASSRLCSACGHQYVALTLDERHWACSHCGTVHDRDHNASVNIRNEGLRLLAV

SEQ ID NO: 18839 - protein, 392 aa, unknown
  TnpB Polypeptide
MLKAFKYRILPTTEQAELINKHIGSARFVFNLALECKQMAYAGSKVNLSCFDLVKQLPELKKECAWLKEVNSQSLQQSIVNLDVAFTKFFKGQADFPNFKKKSTSKQSFNIPQNVILEKDKLIIPKFKKGIDIVLHRETKGAIRQATISRTSTGKYFVSILCDTGETIKSKAPIKEKTTIGIDLGIKTFLVTSDGQEFDNPKFLCKAQSRLKFTQSKYSKHKGKRTKHRLAILHEKVANQRKDFLHKTSTKLIRDNQSVAIEDLQIKNMVKNHCLAQSISDAGWGTFVTMLEYKAEWYGKNILKIGKFEPSSKTCSCCGSINKELTLKDREWTCGSCSTVLDRDVNAAINIKSFALKNHLSVERRPKNRGELPTLVGVLIPEAHPISFAVGG

SEQ ID NO: 18840 - protein, 543 aa, Streptomyces sp.
VGGLREVAAAFVVPGPAGVAVRDRLKALTAEDEKVLRLAGDHLGTLASRDLKARCAAGPDHDSERWAERKRTLTDEASSRWAGSITKASHDQWALARRCQLAHIQSLEAGVRTITYRLSRPVGEKGTKRAPGGYGSRQEWFAKSRRLHALEHRLERERADREAGRVHVVRGGKRLLNTRHHLDAAGMTEAAWRQRWQAERWFLAADGESGKRFGNETIRVTPDGEISIKLPAPLAECANSPHGRCALTGRVQFRHRGSEWADRVTADRAVAYRIHYDTGRDRWYLTASWQRPVVKTIPLDAARAHGMAGVDTNADHFAAYTLDRYGNPVGNPHRFFFDLTGTADHRDAQVRHAITRLLHWAKQCGVAAIGIENLDFAAEKTREKHGRRKRFRQLISGMPTGKLRARLVSMAAEQDLAIVAVDPAFTSKWGAQHWQKPLTSTRRTMTRHDAASIAIGRRALGHPIRRRTAPPPHDQSDRAGHRTVQAPSGTQGREGNRPRISGPRTRSVGAGRGANAVDQNAQHRSGRSAEHESWRQDSLPLSF

SEQ ID NO: 18841 - protein, 318 aa, unknown
  TnpB Polypeptide
LKDEQYAWLNEQNTKVMKQSIRQMITAYDNFFKHQKGFPKFKSKRDKQSALFPIDAISRCNAFETRRITLIKQLKNIKFRCSDLYFNRLRKYKDDVKSATLSKTKSGNFFLSILIEMNNNELLKFKKTNKEVGIDLGVNDFVITSDGKKFENKHFFKADERKLKKLQRQLSKKRKGSNNFHKQCKRIAKTFEHITNKKENYIHHVVNELLGNYDTIYMENLSINGMLRNHHLAKAISEVGFFKFKEILKNKAIVNDKKVVLIDKFYSSSKTCSCCGYKNKDLKLSDRNWQCPECGEIHDRDLNAAKNILREGQRISVA

SEQ ID NO: 18842 - protein, 451 aa, Microcoleus sp.
MAQKTAPKTIRTDKWRILPSAEQRQYLLNTVQEYRRLSRFLVTVISTHWVELGRLSSDKLVPSVEKLVHATTQNPTPKYPQIDKAFYKFPSYLRRAAIMFAFGQVSSYMTRCRDWQSGQSRNRRDAKPPILNSDAGCYPALYKGQCFKLHEFEQVELKVFTGTDWIWIAVPIISKRDRHKVSTNQMKSPSLIVNERHCHLSVPFECHPAHVKGSGVVVAVDLGINTTATVSVVSRDGTVIHREFIHPGRDIDRRDRRLKSVSGRAKKTMGSCGKLSKGFCQNTYRKCRNINQQIGNIVSKQITTIAQAYSADAIVFEDLKGWKPKGGKKRSNLKQKFHGWLKSLIVELTECKWTELGGKTITVIAAYTSKLAYDGSGVVKRDPKNYALATFTSGKKYNCDLNGSYNIATRGWQKLDSRKDYEKRPSKNSGRLPRSWACLCDLWTGGSLRLA

SEQ ID NO: 18843 - protein, 401 aa, Haloterrigena sp.
MQRNVSTTVRVKLHSLTNRKADLLAREYEAFQTEVHGGDADLYSATDQQASKVQRQKDPNPGTEQPVVLRNDVFDVAYDEDTVLSSWWVKVPVYDPEKGQGNSIWCPAHVPRKDAQLVREGNLRDSELVRHDGDWYVHLVVKRSVTVADEYDDVLAIDMGARWVATCAFLSDRKTTFYGEEVRCIREHYKQLRKSIGKAKPRQGQQVVKRIGNAEARKVDDRLHKIARQIVEDAEERNAVIVVGDLGGIRKDNHKGPYVNDKTHKMPFARLLNYIEYKAHDSGIDVQLVEEYDTSKTCNRCACEGVRATQGHFECPECGLDDNADKNGVFENLRFSDVCEPSVRNTLNIGKRALGKFSKPLSEAGAVLAQPETQVIVHRDDEPANLPLLVDSTPSGGTPRL

SEQ ID NO: 18844 - protein, 373 aa, unknown
  TnpB Polypeptide
MANRELVVVMQVQKVVKGKVVGLTNIKRVILDHEYEGLQRFLRGDLDVELYSANKQQAKRFYKRIKPEREYPLSIRKDLIRVERRDTKIARYWVRIPVRLRRGGVWVAVKPHCEIAADLEICESKLLKRNGEYFIHLVVKREVELKQSYSSVLAIDLGIRHAACSVDTRSGETHFHGRELRRARGHFFHLRRRLGEKKLLKVVKRIGDKESRTTNDQLHKIAKAIVDEAERANALIAIGNPKGIRKNGKGRRFNRKLNSWPFWKLRQYIEYKANWRGIAVVEVSEAYTSQWCWRCGTIGVRSGRHRGLFECPRCGLRENADRNGAFNIGRRALGQVSKAGAVVSQPVTGALPSSELGSVVQCPTPEATLFKGW

SEQ ID NO: 18845 - protein, 184 aa, Streptomyces sp.
MDRAAVRARPGAHVQGFGPVPDSTDREHLTGGLEPADLHKDASVPLRLVLQHREELRPAGVVAVRNMVENHRLARAISDAAWSEFRSMLEYKARWYGREVIAVDRWFPSSRLCSACGTLRDRMPLNVCTWTCDCGVTHDRDVNAAHSLLAAGLAVTVCGAGVRPQRSTPDGQSATKKKPSRREP

SEQ ID NO: 18846 - protein, 238 aa, Oscillatoriales sp.
MVLILEQLKLFVYQRSSKIYYLMVSVEVETPKIDPLKITIISGVDVGMRYLAVETDLQNKSKFYSGKNARHKANRYHKARMTLQRKDTRSAKRRLIALSGRERRFIADVNHQISKDIAKANALIGLENLTGIRDRTRTKSGQKASKKRRRANRNKAKWSYAELHGYIDYKANLNGSLATKVPAHYTSKSCPKCGHTSDANRPNKGLLFRCECCGHELHADLVGARRCDSFSRNREIGG

SEQ ID NO: 18847 - protein, 353 aa, unknown
  TnpB Polypeptide
MKIMKAYKFRLYPNIEQKILINKTIGCTRFIYNYMLEKKIKNNKLSRFDLNNLIPSVCEEYPYLKEVDSMSLRCAIKDLSEGFNKYYNGKGGLPNYKKKRKKDSYRTNLITSIYKGKKYENIKLDLQKRIITLPKLKEIKIRGYRHLTNINGRIINVTIEQEVNKYYISVCVCEEYELPPKKEQTVVGIDIGVKSLVVTSNGETFRNPKYNQKYEKRIKRLQKSLSRKIKGSNNYKKNKILLARCYQKLRNARKKLVEKIVSKVTEYNDIIVCEKLKVKEMIEINKCLRKNIVNSTFGLIITKIKDKCKYLNKEFIQGDTYYPSSQICSRCNNIDKGMKNLSKREYKCHKCRI

SEQ ID NO: 18848 - protein, 279 aa, Methanosarcinales sp.
VQRRTFKCRMYPTKTQIIILLHWLNLCRYLYNEMLADRKNAYNRCGIELNYNQQAGQLKYMNLNRYSQVAQDVFCRLDTAFQNFFRRVKNGDTPGYPRFQCKSMYNSFTYPQSGFKVLDNGKLKLSKIGTIRMFVHQEIVGKIKTCTILPTAISDTLGFSVEIPSVKKVEPKTSIGIDLGTSTLATPSDSTVIENPETPDKYDSKLRKAQKDLSQKKKESNNGNKQKTVFKGVYRNARNVRKDYIHKASRILADTYDQIVFEDLQIKTMVKNHHVKMVA

SEQ ID NO: 18849 - protein, 468 aa, unknown
  TnpB Polypeptide
MGQAIRTTKLLIDLGERTQGAANTRKRAYLEETAKILDAARAFYVAFFLAHPEKLTERVTYVSDRDQQERERLISPNELLTWAEFQTVETKEHAHPRPDWNFSERFPDMPFTYRRSVIKDALGKARSYLSNLANWRASGKKSGQPGPPGASNHPTLYEGAFALELDETDLRQTFARLKVYTGATWEWHHYPVKLSRYFEARRTDPAWEQHSPKLILHGNAAALHFSQAKAVQAKKVKQSKADPHLVTVAVDLNVKNLAVITVRQDGTIIKTLFVRDHGLDQHRYQHMKRISKKQWLSGKAVKGEHSNRQLWQHVRHMNAAAAEKTSRTIAEVCEQYPGCVLLFERLRKIKRGEASQSRRLNRKQANQVRGQINARSREKAFAAGTVTVEVNPHGTSQYCSRCGAKGERFSYRGAVRIKARWGKLFWCPHCQYEANADFNASVNVHHSFYQEGHWHRRERPPPKKKRSG

SEQ ID NO: 18850 - protein, 1048 aa, unknown
  TnpB Polypeptide
LGPGHRVPGDQRHRASRRGQELRHADADRIPDRIVHHDRARRELPQPPGLRQLEHLEGGAQLHRAIGVWEGPGHRSRAHEHVTPGRGPAREIPRIDRGGELDGDAESSALCLQPVGQELEPVAPGTGGGRSQHAPGAGPTVDHPHPPTGQRGHPGRLEAGGSGADDQHLALGRGASLFVDRRALALPLETRGGFADAADQRVAGVADEASLVAQDARPDLFTGPARELGAELGVRDLGPGHLDQVRRPVGERLLGHRDLDDRTLRHDRHRRRQGPAQRPGQRQREAGGRVAVGPGTELVVGRGSHRHDVVGQGPEGEGDLLPGLGRDAGPGRELVAAEPQPEYRALTEGGARRLEYLAGEAQAVDPIGVDPRVGQAREEMAQEAERGGVHLDAVEPAGRGQRRGGGEPLGHRRDLPLLHLLGHLPGDGVGHARGRPEHALAVGARPLSAAVAEGGQRQPAVRVDGVGHGRPAGEALGRQRGPLVGPVTGVDGGRLGDHRAAAAGRPPLVVGDVARRERPADAQVGLVRPEEQPVGRPLGAEVDGFEEPHAHLSTRAAQRAAPGAASAATGNVCTVTAAGHDGTVPRKRPVAAPPIVHRTTRVALRTTPGQSRRCFGLLRSGGDVWACVLELSALRRQRGVPALVTYQELCRELSAAGPGTFGELSSTGARSILRRYSDAWMSTAKRRQAGDRSARYPRRKKGLVPSRYYAGTFWIEGRRLRIPTAKGAAPLAVRLTREVPYPAPSIRSVTLLADGPRLCVDVTAKIEVEHYLPGAAPDPDRIAGVDLGIIFPFAVVADEGSLLVSGRALRAESRLQLAEAKARRRAVARRAPGKGQRGSRRWRKYRVRTKVLQGRHRRRLAQARHEAAKTVVDFARQNGIGLLVVGDPRGVLDRDAGVRQNLATRNWRVGQLMGVLEDKARAAGIEVTTVDERATSSTCPRCGNQVRKPRGRNFSCPHCALAAHRDLVGAINIASRSPQGGINVDPAGLAITHRRAGRHLPGRTRRDPRRVALEQRGRLVGLWPAVARPGAVEHDGSGESLARGASVA

SEQ ID NO: 18851 - protein, 403 aa, Bacillus sp.
MCLIGLRKRQQKLEQKIEMYETHIKNGTLPPIIFGGRKNFYERMKDKISNREWKDLRTRQLYSRGDKSKKGNLNMRITVDDCGQGWLEIANSLGRTNGKTKSPRIKVPIIIPYRFYHEITNVVMGEQIGVNPKGKPIIDHQKYSVEIIRKQNDFYVNITFDETEIGRVLDFKETPQSDLIAGIDVNPDRIAVSLCTKQGNFKGSKIFYLHNLDTFSTNKRTTVIGQIVQQIKKWLIENNVGGIVLEDLKFQQSHDTDKYSNRKFHQFTYKKMLDSLIRMALRNGFSVKTVNPAHTSVIGKLKYCKKFGISVHETAAFTIVRRGLGFQERLPKEVVLLLKNKITTKLRIFVASMEESEKDTNTKKVYKKWLQTIKTWKDHHNWKLWSILHKTVYMSNQQLLFKI

SEQ ID NO: 18852 - protein, 389 aa, unknown
  TnpB Polypeptide
MQIFPDEESKRILLDTMHAYRDACNYVSGFVFSTQSLDLKVLQNKLYYNIRSKYKLKAQMAISVLRTVRTCYKARDSRIDEWSCIRFNKPQVELLWNRDYSISKGKVSLCTLNGRLKIPFDDNRLSYKGRFGTAKLVYRHNKFFLNIPVTTEIPDAHLSDINCVVGIDRGVRFLATTYDSYGKTIFFSGAEYKNKRNHYCELRKQLKNVGTPSSKRRLKSIVLRENRWINDMNHCISKALVEAYPMGTLFVLEDLNNIQSFIRKRNIKNQYILSNWPYFDLEAKLIYKAALKGQVVLKVDPAYTSQTCPLCGRRDKRSRIRDKHLFRCSSCRYKSNDDRVAAINLYSKGMQYLVQSGESMPLFGGARSIVPDAMPVLESPFPVSIETVS

SEQ ID NO: 18853 - protein, 406 aa, Natrialba sp.
MVTVELRRTAVVKLDVDDDAHHLLQETIDRFKQAAQMVADDGWNGTEDGYIVTSKTELHDRTYDDIREATDELNADLVCAARNRAADALDSCAEQRKDGDNPSKPQFTSDSVVYNLNAITYYDEYATLATVNGRIEAEYVLPDEAVPPATYFSEEWEKREATLHHRDGDYYLHIAVVRETDTEPEDAENGTVLGVDLNVDGHLAVTSSGAFIGNADYLNHKRREYENRRGNLQQAGTRSAHLTMKSLGGRFANWSEDYLHRVSKALVQETLAHDCTHIAFEKLTHIRKRISNASKFQQWAFQRIQEYTEYKAAEYGIAVETIAPQYTSQRCSHVDCSFTHEDNRDGDEFSCLKCDREYHADYNAAKNIARKLLQNWHKSGSGGATSHLALKSGTVNVNGIFTPTTA

SEQ ID NO: 18854 - protein, 520 aa, Enterococcus sp.
LLNQIDFLRHFANGRGIILDDIIQDIGSGLNYKRKKWNLLLDQVMNNEIDTIYITYNDRFVRFGYYWFESFCGKFDTKIIVLNNPDLSPQQELVEDLVSIIHVFSCRIYGLRKYKKRLKVIQVLLTYKTELNPNTKQKQKINATIGTIRYIKNMYLAHNNDVYANGGKFVSAMTFSKWLNNTYLPMHPDQSWIKKVSSKAIKQGILNTEKAFKQFFQGKANYPQFKKKNRQNVQMYFVKNDSKTVIACERHRIKIPTLGWVKLKEKGYLPKHDENQIIKSGTVSIKANRYYVSVLVEVPDSYAKVVPEPQNEGHGYDFGITHTATGSNGAVYENINKSSKIRSLEKRLRREQRRLSRKYESEKRRIQNKEISKGESTRQNIQKQTLKVQKIHQQLTNIRNDFQNKMVHEMAKTKPGYITIEDLNISGMMKNRYLSKAISQQKLYGIRMKLEQKAKHGYFELRMVHRFYPSSKLCHCCGSKKIDLRLSDRIYKCDHCGYVEDRDVNASFNLRDAKEYEVIA

SEQ ID NO: 18855 - protein, 338 aa, unknown
  TnpB Polypeptide
MAPESIGEEYNGTKPEFVNTTYSKLELRNLITPVSVCCFTEWLLETPKSIRESAVFEAHKNLRSCFTNLKNGNIKYFNLGFMSKRKQSWSIGVTKDAVKPYGKSIGIYEASTGMRFKLTEPIYEVNHDIKIQFDGLHYYLCVPYAKELKINNKFWFTSLDPGVRKFQTTYSPDANEHLIIGDRASTRLYSCLLSLDKMISNHVPSKKILKLRKKIQNLQSEMHFKTVNFLTDRYQNIYVPKLTKCNDIISKEYRKIRTKTVRNMVVLAHCKFIERLKTKAEEFTNVTVKVITEEFTSQKCLNCRENTKTSSEVYVCNNCNFTIDRDILGSSNILVKNW

SEQ ID NO: 18856 - protein, 390 aa, unknown
  TnpB Polypeptide
MRDYKYRIYPSNKQKVRLLNQFRICKEVYNIILSESKELMITRKFDLGSLIVDVKRTCPSYYYQAYSQVLQNVSDRLHKAFENFFRRVKEKKYGKKIKVGFPRFKSKIKSVTYPQRGFKFISDKKLYVSKIGNIPIVLHRIPKGKIKTMTIKQNKVGQWFACFCCEFGTQTVKHTSTKRIGIDVGIEYFATFSNGEIINNPKFLIKSEKRLKRMHRKLSRKKKGSTNRRKAKFRLAKQYIKVANQRNDFLHKLSSRITKTYSFIAVEDLQIENMVKNHHLAKSISDVSWGSFIQMLSYKAVICGGQLIKVNPRGTSKTCSQCGTVVDMPLSKRTFHCSNCGLVLHRDLNASINIYDRAGLAQISTPVDDCVRPSLLKATIVEAGTICQTS

SEQ ID NO: 18857 - protein, 364 aa, Singulisphaera sp.
MKLVAQIQLMPDADAAAKLRSAVERFNEACDWLAGVAFDKQVSNRIELQRIAYRDVRDKFSLSAQATCLCIRRVCEAYKRDKTIRPTFRKDAAMPFDPRTMSFKGIARVSLLTLDGRVIVPFVVGSYGADRLAMPKGQADLVRRKDGKWFLIVTVDVPEATPIPVTDFIGVDLGLANVATDSDPETKPHCGKPAERVRRKHNLQHKRLQKKGTKGAKKKLQRVSRKEARFNRHENHVISKAIVEVAKGTGRGIAVEDLSGIRDRLPAWGKDARNRLSGWSFGQLVAFMTYKATLAGVPIEAVDARYTSQTCSACGHCCRENRTSQAKFLCVSCGMGMNADKNAALNIRARALSKRALELVDFTV

SEQ ID NO: 18858 - protein, 375 aa, unknown
  TnpB Polypeptide
MKLTLQTQLLPDRDHAVRLQATVERFNEAANWLAGKAFEVQVSNKIVLQRLHYAELRERFDLSAQMAVRCIAQVCEAYRRDKAIRPVFRPHAAMPFDQRMMSFKGVDRVSLLTLTGRVLVPVVMGKYQTERFTNAKGQSDLVLRKDGKWFLLMTVDLPESAPAPVPSTDFLGIDLGIANIATDSDPDTEPHSGAAVEAVRRKHNLQRKRLQRKGTKGAKKKLKRVSAKESRFRRHQNHCIAKAIVETARRTDRGIALEDLSGIRERTRARGGDARNRLSGWSFAQLGSFIGYKAQLVGVPIVFVDPAYTSQTCSVCGHVAKSNRKSQSDFRCQVCGYESHADKNAARNVRALAVSCNAAIGLDSPSGLSRKAAPL

SEQ ID NO: 18859 - protein, 268 aa, unknown
  TnpB Polypeptide
MIIPVCFAERIKFKHAVSEVVRKGKDWFLMLAVKSPDVPSLEGERPHFGVDLGLANLAVLAGPGVRKFFDGKPLRYVRGRYHRYRQALQEKHKVGMVKRSKGKESRWAANENHRITREIVDIVAKVGGVIHIERLTGIRERCKATAKVNRMIASWPFAQFGQFLRYRAAMVGVPVIEEDPRHTSQRCSKCGHTERANRSSRDCFKCKACKYELNADLNAAINLAAKGACPLGVGDVTSPVPEQSGRSGEAVGARKGRHRDNRNLSSSS

SEQ ID NO: 18860 - protein, 359 aa, unknown
  TnpB Polypeptide
MKLTIQVQLLPDAAQKAVILSTMERFNEAATFAAKAGFEAKVFSQPSIHKIAYREIREQFGLSAQMAVRAIGKAVECFKRDKTKCPAFKPHGAVTYDERILGFKGLDRVSLWTMTGRMVLPLVYGEYQAERFDRIKGQCDLIYRGGKFFLYATIDLPDQPPVEVKDFLGVDLGIVNIATDSTGTKDGGEKLDRKRKQRATARKQYQRKGTKGAKKRLKAMAGRQHRFQTQINHEISKRIVAKAKTLGVGIAIEDLDGIRDRVEPTVRKRFRRRFGNWSFSQLRLFLEYKARREGIPIVTVDPRNTSRTCSICGHCERTNRPDQATFRCKHCNHSEHADVNAARNIRAWAVRSAASKLVG

SEQ ID NO: 18861 - protein, 351 aa, Halorubrum sp.
MSWKREASGLDPEAIHQNLTGLSEQKQNGNTVGKLTWKAPRDYQSMTYSQSGFELKNTSGRNATLWLSKIGDIKLRYHREIPDEAAIKEVTIKKETTGEWFVSFGLETDEVDLPKKPDVEKLDTSNSVGIDLGILNYIHTSDGKTVNWLDLEDEYDRLRREQRKLSQKEHGSNNYENQRETVAKVNRHIRQKVLDYQHKLTTWLVTEYDAVFVEDLKVAEMLQADGNARNKQDAAWRQFITLLEYKGELYGTHVVEVEARGTTKECAKCGVETAKPIWVREHSCPSCGFEADRDANAAMNVLQRGFSELGLGWPESTPVETALPTDTISVSAKRVVETGSPTLNEATPVAE

SEQ ID NO: 18862 - protein, 338 aa, Parageobacillus sp.
MCYNQTILSRKKRRDSHASWPKSILPGIESGFGTIVLCNRESARVWNECLRLAKEYFLQHGCWITKSKQKESSIFTANRFKRSTTNISSQGKLRTKPSNKDMLPATPTRIKKYFPTKWSKDGFKVYENRKIELSMGIHHGKREKPIVVYASHLPKGTIKEIECCFDHGLYLAVTYEDGQKEKAYEPGKAVGVDLGEVHTIGAFCEHGQAILITGRKVRSLHRLRNKKLAEIQRRQSKCQKGPRQWKSTNRRKNLYYPNPKDSYGCVASNDETVCRLVLKAVRLRCVYRKRQRSRAEHKKEYTSRHVLSAKRDKKCLPACLCAGVGMRNIVTFTAREIS

SEQ ID NO: 18863 - protein, 228 aa, Nocardiopsis sp.
MKLVARVKLLPSPEQAQALQANLKAQNLGRKGSARRARIESTPICFRAHAAQPFDDRCLSWQMDARTVSIWTVAGRMKNLGFTSSPEQLKLLAECRQGESDLTCQDGQWYLSATCEVPERVENPDPAGWVGVDLGIVEIATTSTGDRFAGRHLNRQRRQQSQLRAKLQAKNTKSAKRVLKRLRRREARRARDVNHRISKRIVERAERTDHGIVLEDLRGIRGRVRQAK

SEQ ID NO: 18864 - protein, 380 aa, Pseudonocardia sp.
MGSRVARRAYRYRFYPTPEQAEQLARTFGCVRYVDNRALAERSRAWTQEQRRVTYAQTDKWLTAGKRDPDTAWLTEPPKGPLQAALRHLQAAYVNFWTKRAGYPRFKKKGTTTDSATYFRGRFTYRDGKLTLAKQDRPLRIGWSRPLPEGAVPSQVTVSRNARGQYHVSTLVETTVHDGPRTDAAVGIDAGITSLVTLSTGEKIVNPRHERRDRVKLARALRALARPQRSSKNRAKARARVAKVYGRIADRRRDLLHELSTRIIHENQTVVIEDLSVRNMVRNHSLARAISDASWAELRRMLEYKAAWYGRDVITIDRFSPSGKTCSACGRIVDTLPPGVPEWTCRCGAVHDRDVNAAKVILAAGRAVAACGDGVRPPRT

SEQ ID NO: 18865 - protein, 400 aa, unknown
  TnpB Polypeptide
MKQTIKYKLKTSIEQEKHLSNLCFYATKLYNTDNYQRRKTWEDTGKIPDYYSQNKILKHNHWYKLLSSQTAQHVSMVLQNNYTSWFKLRKKDDKANPPKFRKKSMLSPVQFYQQFKIINDKIRLSMSMKYRAEQKIKFLEIDFLEWKKIAGIAKMCEIMKEKDSWYAHIVYEVPELNGRLSNNVMALDLGIFNTAVSIDTEGNCNIYSGKQILAIQHYFNKERAKLTGRLAKQYPKRHHSKSLDILQKKQHRQISQGLHTYSKKIIEDCIQKNISVLLAGNLTDIRERKGKGSVYRQKLHSWSFSKFIKQLEYKCMRAGIRFVLVNERFTSQKCSCCGLIRKANRKKRGLYVCRYCGSVMNADANGAKNILKKYLQDFLSRSIGYVAQPLVVRLDNVVPC

SEQ ID NO: 18866 - protein, 422 aa, Cyanobacteria sp.
MPLNPCKIKAGQTKNAMIVYSFKVKGKIEQYRKVDEAIRTFQFIRNKALAFWMDNRGVKLSQLSKLSAVLAKEFDFAACLNSQARQAATERASCSIQRFYDNCKSGKPGKKGYPKFQKNNRSVEYKQTGWKLSPERKFISFIDKVGIGKLKLIGTYDLHYYQIDQIKRVRIIRRSDGYYVQFVIEAERHVDIQPTGRTIGLDVGLSAFYTDSQGQKVENPRHLRKSEKALKRCSRRVSKKKNGSNNRRKAVNRLGRKHLKVSRQRQDFAVKTALCVVKSNDFVAFEKLLVRNMVKNHHLAKSISDAAWSQFTEWLQYLGKVYGRIVVGVPPQYTSQNCSNCGAIVKKSLSVRTHICQCGCCLDRDHNAAINILDKALKQTGYHLANTVGHTEIKASGEKILYADLATSLSKIAGVNEESAVF

SEQ ID NO: 18867 - protein, 633 aa, Catellatospora sp.
MSAVVESSGLGVSERLLVQRVGWLCGLVSAMAGRIVAEHWNSPDLDVLAAGLGADGRGLPAKGWMALRRLDWAATVPEGVYVNDRVRRCSQEEAARALRLAVHRRQILTAIVTTWPQGARRDDADWRALRALLPPGVSAAQIANRTRQVHAYRHSHHGELPHDLADLETAPAVAAQVLLAAADRQLTTITRHDGQAVLRVQLPLTAQPRGRADWAWHVLPVALPPTVAADAKICAPTLRISGHRVRVDLPHRVTVTATKPSGHRLALGLDWGVNTLMTGVAGRLTDQGRVVTDGRMLRYDATAISAKLHRLRGHREHLAARRDHHAALAAGLPATDPRTPRLHALAERARVEHERVCARIRHLNKTLAWSAARWAVDHATALHATVIYIEDLSTLQARGTRKGNARLSGQVRGVVFEAIHHLAAKTGITVVTVPARGTSKYCPRCGNGSTELAHTPAPDRSDQRGWKWAGCPRCGLSTDRDHAAAMRITARGLLAQNHVRTDRKTGRHTTTTTVEGNVATVRRPKPCPAKQPAAGRGPKSTPTPKRPPAPASKLSHRVPDRRTAPAPPSGGQRPAGQEPKNHHPRAAASGPAHELLNPRHHPTGFHHVHATPVTALSGDFGPGTTRPRPDRNV

SEQ ID NO: 18868 - protein, 410 aa, Symploca sp.
MPHQAVKVRLYPTIEQEEILLQHFGCARWWWNYALRLCIDTYLATGKGLTRVALNQYLPKLKKEQETQWLSECYSQVLQATTLNLVTAYKNFFEGRAKYPRFKCKKNRQSIQYPQKVQVVDDCLKFPGRVGLIKAKLHRPIQGIIKTVTISMTPCGRYFASVLSEIEGDKPSPSTEGKTAGIDLGLKDFAIVHDGVKTSKYDHPKHLAKHERNLARKQAKLARKVKGSISRNKARKLVARVYERVSNVRQDYLHKLSRKLVDDNQVIVVENLHVLGMVGNHKLAKAISDVGWGMFVNFLHYKLDKEGKVLVEIDRWFPSSKLCSKCHYQVDSMPLDVRQWTCPSCGTHHDRDGNAAINIRAEGIRILSVSGTGTAADGGDFRPMRGRKSKLRHSPVKSEARDVPDRVITG

SEQ ID NO: 18869 - protein, 419 aa, Symploca sp.
MLILNYRYRIYPDAAQEQKMIEWMNICRSAYNYALREIKDWCNSRKCWIDRCSIVSEYIIPTDTKFPNQVNQLNNLPKAKKEFPRLSEVPSQVLQQAIKQLHQGWEYFVGRGFGFPRFKKYGQFNSLLFPQFKDNPITQDHIKLPKIGAIAINLHRPIPSGFTVKQVRVLRKADRWYASVNIQCDLNVPDPMPHGHPIGIDVGLEKFLATSEGTLVKPPKFLKGLQSQLKLLQRRLSRKRKLSSNCEKARIKVARLHHTIDNTRKDFHFKQAHTLCDVGDMVFMEDLDYRLMAKGLFGKHMLDAGFGQFRQIVKYVCWKRGKFFAQVEARGTSQECPECGAEVSKDLSVRLHQCPNCGYTTDRDVASAQVIRNRGIALISTAGLAGMETACADDLPGAEVTQSRQVSKSRLRVTRKLKK

SEQ ID NO: 18870 - protein, 390 aa, Okeania sp.
MYGCQQELIKIPETIPFLEYLCTTANKLINCGIYLARQWYFKLGKIPGKYNLEKKLKSNSNYQFLYSQAAQQTLRGVAEAFKSYQALSQKYLKGELTDKPQLPKYHKKGGMGVINYPKQALKLENGQVKVPLGRKVKAAFKVDSFLLNFPSNLEFKEIREIRILPRNCCFYVEWVYELKADQPQLDQAKVIGIDHGIDNWLSCVSNVGTSFIFDGKHLKSKNQWYNKQIATIKDNKPQYFWSNKLACITEKRNIQMRDAVNKAARLVINHCLKHGIGRIVFGWNKRQKDSINIGAKNNQKFVQIPTAKLKERIIQLCELYGIEFIETEESYTSQASFLDDDLLPKYGEKPRSWKPSGKRIKRCSAVLGVSPMSDCIKTTRTLSNSKRFVS

SEQ ID NO: 18871 - protein, 192 aa, Okeania sp.
TNNYQKARLILARIHAKIKDSRLDYTHQLTTQLIRENQTIVVEDLAVKNMVKNHKLARAISDANWGELVRQLEYKADWYGRELIKIDRYFPSSKRCSNCGHVVDKLPLSIREWDCPECGSHHDRDINASINILRMGTRVGVRRKGTPTKKAAGLAVSVCGATVRPSESKSPKAGALKQKVSNSDARESRAVS

SEQ ID NO: 18872 - protein, 435 aa, Okeania sp.
MYGCQQHLVKNTSEVMAVLEYLCTEANKLTNCGIYYCRQMLFKAGRFVSKAELDFELKSNLHFKAMRSACAQQTLHSVIESFNSYARLAKMFTSGELAQKPKPPKYRKKNGLAVVSYPARWVKLVNGMLKFPLGKQVKAWFGIDHFLLPMPSNLDFNQIKELRFVPRNNCFYLEFVYEQPTREKGQPIAENVLGIDPGLNNWLTCVSNVGKAFIVDGKKVKSQNQWYNKQVAKIKSGKSADYWDDNLAAITEKRNRQMRDNVNKAARFVINWCIEHQVGTIVFGWNQRQKDSINIGKKNNQQFVQIPTAKLKARIAELSEQYGIKFVETEESYTSKASFLDEDFLPTFGEKPVCVAFRRKRWEPSGKRVNRGLYRSATGKLINADANGAGNIIKKVATQLSLDLAKVGREVLMLPQRYKLDDLTRKYRKQCLAWQ

SEQ ID NO: 18873 - protein, 342 aa, Lactobacillus sp.
MLVADKKYWQYTQSARILQLAISDLGKAWKNFFDKTQPSWGKPKFRSKREARQGFKSDRSKIKDGILYLEQARGSSVPKDQWRGFKLSEKPLSDEFGTVSYFKEKGRYYVAIPYKIKAEDVKLPDKTGKATAVDVNVGHFDYTGGRVNVLPKKLDRIYKKIKHYQRKLAKKQVENGEVACKIENYLKTKAKLQACYRKASNIQNDLIHKFTTELVNDYDKIVIENLSVKGMLMSHVASKGVHRSMFGKFKQILTYKCDWYGKELILANKLYPSTQRCAACGNVKKGDDKIPLYGNKKHGTKHNEYVCYNEKCPNYNKVVDRDKNAMLSLLALTEYPELNHAL

SEQ ID NO: 18874 - protein, 378 aa, Chlamydiae sp.
MKRTVSIPAQLNPSIFLPLLEQCAEIFNAHVDWSPENKTYNKSKAHAALYEQMKKKHSEVPTAFIQAVRDTAMEAVKATAFKKRPRKKKYSGLRFDKRTMTLRGEQLSLSSMGKRERVVLKVPDYFRPIFDSWKLKGATLTYSTQTKQFWIRLVYETETPSLKIAGTILGIDRGIQQLAVTSEGQFFLNGNIRAAQRRYLYNRKTAQAKGTPSARRRLKAMGGKEKRFSRDVNHRVTKQLVSLEGVKTYVLEDLKGVRNKNRGKKQNKRIGSWPFHQFGFFLAYKAQMLGKEVVYVDPRYTSKKCSCCKEIQKGSRNKSKYHCRKCNFQLHADWNAAINIRDNYILSSTSKASEEQVAVIQPSVMIGNNQSQAYCLVQ

SEQ ID NO: 18875 - protein, 612 aa, unknown
  TnpB Polypeptide
LLRAGVVEATGEMLTSAQVTQRVGWLGALASGMTARLLAERWNPADLGLLAAGVGGDGRKLPSSGWMALRRLGWKATPPGGVYASDRVSRIAGEHAARLLRVALYRDGVIAGVLASWPADPARRSPDEWAACWAAVPAGTTRVEVRNRSRQVAAYRREHDALPTSITELEAPPVVAPMLLLAAADKQQVTFERVSGGGAVLRLQLPDRPEPRTSRDRSWVALPVRIAPHIPAGSLLHTPTLRTRAGRVLVDVPFSQLAPPVKRTGHAVALGVDWGLNTILTVVVGTLDAAAVVRTNGRPCSFDAKGVQAKIARLRRQRQTLAAKTDQYAALSPGLGPVTARHGRLLAEAGHVGDRQRRLSDTLARAGARWAVGQAICAGATVIYVEDLTSMEGRAMGRRMNARLSEASRGKLLAAMRHQGGKVGVAVVTVPARGTSKFCPRCLGALKHTRAPDDPRAGRKWASCPSCGLSADRDHAAAERILSRGLSGQAHTRMSRAKTLAVTRVVDTQVRVSRDKRTPTTSKGRTPQVSCGPRLTRPVPAPAASLVAAGQRPAGHHPSGTPSSGVPQVLQATPTACTRRQKRRRRALSAGFHPHAHTSPMGRPVHAVVTPT

SEQ ID NO: 18876 - protein, 432 aa, unknown
  TnpB Polypeptide
MHKKNAVSAVSNLVVIIHKLNYYLSMQRRQAYKYELMPNGGQQRDIRRFAGSCRFVFNKALALQKARYEQGEQKLGYAGLCKLLTEWRNSLETPWLKDAPVHPLQQTLRDLERAYTNFFAKRADFPCFKKKGMGNSFRYPDSMQIKLDQANSRIFLPKLSWLRYRNSRDVLGTVKQVTVSQSGGKWFVSIQTEREVEQPRHESCSMVGLDAGVVWFAALSDGTVYAPVGSYRKFEARLAFLQRRMSRKTKFSNNWKKAKNRVQKLHFRIANIRRDSLHKTSSEISKNHAMIAIEDLQVRNMSKSAAGTVENPGRNVRAKSGLNKSILDQGWFEFRRQLEYKQQWRGGWVIAVTPQNTSRTCQACGHVAKENRKTQAKFECVECGYSENADLNAARNILAAGHAVLAHGESAQSGRSVKWEPAEATTQELAHV

SEQ ID NO: 18877 - protein, 392 aa, unknown
  TnpB Polypeptide
VQPHEAGLLDDGHLRRVAGLRREEVAQLANISVDYLARLDQGRLTSVSAGVLHALADALGLSTDAREYLVAIAGDAGAKGSRPATHRVRPQTQQLLDSMSNVPAILLGRKLDVLAWNRMGAALLADFNAIGDVEVRWSRDLPADPASVTVIKDAAGRYFASFVVQADPAADAARFPASAAEVGVDLGLTWFAVLSDGTVIRSPRFLRRAERKLRRRQKALSRTAAGSSNREKARAAVARAHAKAADSRRDFHHQVSTAVIRDNQAVYAENLCVAGLARTRLAKSIHDAGWSAFTAMLEYKAKRYGRHFGKIGRFVPSTGPCSACGISEGRKPLHVRRWTCPACGTVHDRDLNAAKNILAAGLADRLNACGGGVRPPLAVAAVSETGTLRGAA

SEQ ID NO: 18878 - protein, 245 aa, unknown
  TnpB Polypeptide
FKDGQVYFNRQHFKVWDSYGLSQYKFKSGSFNEDSRGRWYFNVVVEVKVEQSKGTSAIGIDLGCKEAATDSDGGRVVGRQYRKLESKLGIAQRARNKRRVKAIHAKIKNRRSDDLHKYSRHLVDSNAAIFVGNVNSLGMAKTKMAKSVLDAGWGMLKTMLEYKCAHAGVVFEEVNESYTTQTCSSCEEIPASSPKGRAGLGVREWSCSSCGATHDRDINAAKNILAVGLDRLAEEKVAAKHCPSL

SEQ ID NO: 18879 - protein, 273 aa, Photorhabdus sp.
MPMLILKAYKFRLEPTVAQSQRLRQLCGCARFIWNYGLAETQRILGSGGRLPSAFELNRMLTGWKKMPEHAFLQAAYTDNLQQKLKDLHGAWQRCFDKTLAAKAPVFKRKNDGRDSVRFVNFEKYCRLESRRVKLPAGLGWMKFRPSRDVSGKIKNATLSQQAGHWFISLQVEIDVPAPQHQSTSIVGLDAGVAKLATLSDGTIFEPVTRFKTRQRQLARLQRHLSRKVKFSANWQKQETKNSAPARAYCQYSPRLSSQDHHDNQQKPRDDSD

SEQ ID NO: 18880 - protein, 394 aa, Geobacillus sp.
MYRTVKIPFQTSKKDIDRLFECNRISAQIWNDCLVIAKNYALKNNGKWINQTELQKQTKGKYPIHSQSIQAVCHKYLNARDSAKKAKQKGLDNKYPYKQKKYFNTKWANNGFIIHPNGTIELKMGRWERKNQPPIVVKIDKEQIPNGTVKGIELIFDAKHWKLMLCLSYENGEQPTTKKEGTIAAGDPGEIHAISAVSENGSSIIITGRKIRSIHRLRNKKIAELQKKMSKCKKGSRKWKKYNRAKQYILSKSEAQLKDCLHKTTKQLVDWCLEQNVKHFMIGDVEGVQRNKKKKRSKLVNQKLSNWCFGKLYDYLKYKLEAKGITFEKVDESYTTQTCPVCGKKKKPSSRNFICACGYSQHRDVHSACNILTKHLYGEFRPMKITNHKYLRIA

SEQ ID NO: 18881 - protein, 589 aa, Geobacillus sp.
MLHEKKGPGSDFLGWVDWPIRYDKDEFARIKQAAEKIRNHSDALVVIGIGGSYLGARAAVEALSHAFHNQMNDMTQIYFAGQNISSTYLSHLLDVLEGKDLSINVISKSGTTTEPAIAFRIFRDYMEKKYGKEEARKRIYVTTDRAKGALKKLADQEGYETFVIPDDIGGRYSVLTAVGLLPIAVAGLNIDRMMEGAASAYYKYNHPDLSTNESYQYAAVRNILYRKGKAIELLVNYEPSLHYVSEWWKQLFGESEGKDQKGLFPASVDFTTDLHSMGQYVQEGRRILIETVLQVKKPRIELTIQEDPENIDGLNFLAGKTLDEVNKKAFQGTLFAHVDGGVPNLIVELDEMNEYTFGEMVYFFEKACGISGHLLGVNPFDQPGVEAYKNNIRVAIDPGEIHTIAAVCENGENLIITGRKIRSIHRLRNKKLKELQKLMSRCKKGSKQWKKYNRAKQYVLSKSEAQLKDALHKTTRQFVRWCLENQVKEVVIGDVEGVQRNTKKKRNKKTNQKLSNWSFGKLFDYLKYKLNAEGIEMEKKDESYTSQTCPVCGKRSMGSTLCPPPRDENLASVLHFHGKDPWAMVCPPL

SEQ ID NO: 18882 - protein, 337 aa, Geobacillus sp.
LLSYCLFWPFSVYPHGSGAYTALTKWWGFSRKKGEKIKYPYKKKKHFNTKWAKDGFVLHEDGTLELSLGIWNRKRQSPLVVKIDKEKLPNGKVKEIELVYDRGLWLCLSYEDGKKPKENPCKNRVAIDPGEIHTIAAICENGESLIITGRKIRSIHRLRNKKLKELQKLMSRCKKGSKQWKKYNRAKQYVLSKSEAQLKDALHKTTRQFVRWCLENQVKEVVIGDIEGIQRNTKKKRNKKTNQKLSNWSFGKLFDYLKYKLNAEGIQIEKKDESYTSQTCPVCGKKNKSSSRNYTCQCGYKRHRDIHGAMNLFAKVYYGEIRPLEFTVKPFTYRRIA

SEQ ID NO: 18883 - protein, 471 aa, unknown
  TnpB Polypeptide
MTGMKGQRFSIKPSPALAQTLRQWIGCQRFVYNAKVQDDRYFRRFARKSLQLAGQFAPVDQTYSQYKAQVPFLSEIPSQILRNGAVRWYQAYQRFFKKLGGRPTIKTRHGRQSVYVTRELYRFKQSEHGNWYVELGTQTRPIGAVKINCKPGAFIHAPNSICLSVHAGRWFISFALPELGADGEPVLPPEHTELLDGLRSYNLEELTNAVNGIDRGVIIPACDSKQVVATELLTANDARRASRERRRKRYQRKMSRQVKGSRRRERTKLRIARIDRYKASCRTNQAHQVSHRLTTDDSSRVIALEQLNVKGMTASAKGDKENPGRQVKQKAGLNRSILGSGWGELRTYLKYKCFKRGKLLVSVPSHFTSQECSRCGTIDKEARQTQSHYACNACGFQGNADWNASLVIAKHAAWGIHQHLHSGQELSTSGIGKKPKPQTPVELLVSREMLKAYHAQNCETGNPTLNTLKAS

SEQ ID NO: 18884 - protein, 437 aa, Proteus sp.
VTKTKWTCIRNTQCLPRRIFVSFFMDQSIIGNMKRLQAFKFQLRPNGQQEREMRRFAGACRFVFNRALARQNENHEAGNKYIPYTKMASWLIEWKSDTETQWLKEAPSQPLQQSLKDLERAYKNFFQQRTAFPRFKKRGKNEAFRYPQGVKLDQSNSRISLPKLGWMRYRNSREVVGEVRNVTVSQSCGKWYVSIQTEYEATEPQHGSTSIVGLDAGVTKLATLSDGTVYPPVSSFKVNQRKLARLQRKLSRKIKFSAFSANWQKQKRKIQRLHSHIANIRKDSLHKVTSEISKNHAMIVIEDLKVSNMSKSAKGTTERHGRNVKAKSGLNRSILEQGWYEMRRQLEYKQLWRGGQVLAIPPAYTSQKCACCGHTAKENRQSQSQFECLECGYTANADINGARNILAAGHAVLACGGRVQSDRPSKQEPAEVIQTSV

SEQ ID NO: 18885 - protein, 332 aa, Escherichia sp.
LKDSPSQPLQQSLKDLERAYKNFFRKRAAFPRFKKRGQNDAFRYPQGVKLDQENSRIFLPKLGWMRYRNSRQVTGVVKNVTVSQSCGKWYISIQTESEVSTPVHPSASMIGLDAGVAKLATLSDGTVFGPVNSFQKNQKTLARLQRQLSRKVKFSNNWQKQKRKIQRLHSRIANIRRDYLHKVTTTVSKNHAMIVIEDLKVSNMSKSAAGTVSQPGRNVRAKSGLNRSILDQGWYEMRRQLEYKQLWSGGQVLAVPPAYTSQRCACCGHTAKENRLSQSQFRCQVCGYTANADVNGARNILAAGHAVLACGEMVQSGRPLKQEPTEMIQATA

SEQ ID NO: 18886 - protein, 422 aa, unknown
  TnpB Polypeptide
MKLVERHIIKQSNINYKALLHLSNLSCNLNNRALYVIRQHFFNKTNKQYDNDIATDIESTYLNYYDINRLLKSTNDKDYFALTSNVSQEILKLVDKNFKSFFTLINKKKSKAYDKKCNIPKYNKTNKNILVYNVSTLSKLWLNKNIVRLPKTNIKLNIIHNKTAKQIRIIPRNNHFIYEVIYERQEQKEKKDNGSYMSIDIGVDNLASCASNKIKSFIINGKPIKSINQYYNKKKSLLQSKLKVENNKYNSNKIDRLTLKRNNKIEWYMHNASSYIINQLVSNNINTLIVGSNKEWKQDINIGKKNNQNFVSIPFDKLKLQLKYKCKLNGIRYIEQEESYTSKCSFIDNEPICKQDNYVGKRIKRGLFKTKENHYINADINGSLNIMRKYLNVASNTIIDERSRGLVVSPNIVIFSKYIKQI

SEQ ID NO: 18887 - protein, 481 aa, unknown
  TnpB Polypeptide
MFTPKSVKLELVADEKIFRILDGQSKICNWLYNCLLEHANRAKEEFCKTQNPELSKTVYSKRGLRNLIPDLKKECPFLKSVYSAPLKNAALRLSASIQAHQKGKKGQRKGKSGWPSFRSWQTRWFSLLYDEPQKGYKVTGNALTLSLGVDSKGKRLSVSLRLKGASCLQGLLIRNLRLTYTAGTYYAIFAVEVPLPAKKSIRRVIALDPNHKNFVYGVDTNGNAIEVASPRFCKLQSKRIDELKSQRDRCLKKSKKVVVNDINGQPLGKEYFIPSRRWKHFNSSLERALHQRQEQTKTYAYTLAHKLCRDYDCVGIGNYTPHGDQKFRSFNRSMFNNSLIGRFKIILSWVAAKSGKTYVEYDEKGTTRTCHNCGYIFESGLAPNIRKWRCPQCEIEHIRDENSAQNGLRLVLRDLSQKEGMDVPVVPGSGLVRVSERWAWRVLPSGVETLRGGKNSVQTQRQEIKTESMVAFDQKLVTCQL

SEQ ID NO: 18888 - protein, 471 aa, Bacillus sp.
MTASKVKSPSFIATIRLRTNAQEEKLILILSDCGRQLYNACLGEGLKRIRAIQNTKLYKETVQLSKTSETDIEQRRANFIYLNTSFGFTDYSIQSFGTKTKNASKFIAEHLGTHVCQKLSTRAFKAVQKFAFKKAKKVKFKRKGEFVSLEGKNNKTFLTYSNGYVFIGKTLSLKCLFDPKDLWMQHALKHKIKYCRIIKKEVKGKNRFYIQLILEGYPYRKYELGKEEIGLDIGPSTIAMVGDSKAELKEFCEEVVGIYKEKRRINRKMDRQRRANNLNHYQSNGVMKKGKKKWVNSKRYIKTRSEHRELERKMKEVRKQLHGRDTNQILQLASSILTEKLSYKAFQKMFGKSIGRKAPSMFLNMLKRKVESQGGRFREFPTYSTKLSQTCHCGAIKKKRLKDRWHICECGVLAQRDLYSAFLARYVSKSNEVDIQKAEKEWPQLSNVLNECILNLKNMRLERKFISTFGI

SEQ ID NO: 18889 - protein, 378 aa, unknown
  TnpB Polypeptide
MKIHRAYQFRLYPTKEQEVIIRKTFRCTRFVYNYCLDLKKKNNYLTKFDLMKELPKLKKEYPFLKEIDSCSLQNAITDLMVGFRLFEKGHGGYPKFKKKGVKESFRTSFITSSYKGTIYENIKLDLKRRIIELPKIKEIKIRGYRNLDKISGRILNATIREVGTRFYVSVCVEEEIKLPERKNNQAVGIDIGVKNLVVTSNKEYYGNPRYLEKYEKKIKRFQQELSRKIKGSKNYIKCKKKIEEVYRKLKNARKKTVEEIVAKVTSFHDIIIAENLQVKKMLEHKNNHKHLRKEITNATFSEIIRVLKYKCNWLNKIFIQVNPYYASSQICSGCGNKESIMKDIRVREYKCSKCGLEIERDYNASLNILKEGLRCYNN

SEQ ID NO: 18890 - protein, 233 aa, unknown
  TnpB Polypeptide
MLLSKKTSIKVSREYANLIGHMCYAASKLWNVCNYERQHYKETGMEQYPDWYYQKKAHKEELWYKQLPSQTAQEVCRLLDKAWKSFYALKRSGGIETPRPPRFKQESIPITYMQMGIVHERDTDRVRLSLPKTLKKYMEETYQIHENFLYLENKIFRGMDQIKQLRIYPPEKGSCKIIVVYEVPDQEELPQNGHELSIDLGLHNLMTCYDSENGNTFILGRKYLGLESDKKNL

SEQ ID NO: 18891 - protein, 490 aa, unknown
  TnpB Polypeptide
MLTTSVFRLHPSEAQINQLNEIFTVYNRMKRKGYQFIFNGTTGIQQKLMQICQNNPYVNTLMTENKTKLAQQKTWQKKRETYLEQKIEVVIRQIAGNKEKNPKDRSLKGLYSLLSSFQNRLAYMTLKPGVFGTKSLFRKRIRGTISRDEFLIQRDASFGCMGKVQGGVQNNNLKLLPSDELRISTFSKARGKIPKRLRVPLAVNPQQRALYQALLQLDKYTVVVKRKFIKEELRYYAHISYDTPGPTTRFGFQHGAIGLDFNYNFIILVNMDKEGTFLSYHQIPFQNLHSYRKGRQDDYASFKLDKVINYCLNKGKGLVIEDLTFEQSFSYNKKRNRKLTQLKTSMLSVLERKCARHGIAVRKVDPAYTTIIGVLKYSWSFNCSDHVLASYVIARKGLGFKEALPACYKRLLTQVGGVLKPRLKPSSPYRQWAQLYDLFKHYGVTPFRSPDPATNLKKNLLVALETVLDGLNLATGVPPDNLTAGLLAYG

SEQ ID NO: 18892 - protein, 380 aa, Chloroflexi sp.
MMPDYALVRRTYRYRIYPTVRQRLALEAQLDFACQLYNAALEQRRYAWRGRHRSVSLYAQFRELTEVRAANMGPTEMSCSAMRDPLRRLDRAFPAFYRRVEAGTKPGYPRFRSARRYDSLTWSGFGVRASRLVLQGIGHVKVKWHRPLPPSATIRTATVRRVAGRWYTSFSLTVSRSSQVRPAGKPAVGLDLGVLHFATLSTGEQIPGPRAYRAARRRLRVVQRRLCRRQKGSHRREKARLLLARRHERICNLRHDHAHKLTRRLVSAFGLIVVEDLNVRGLAAGSLAKQVTDQGWAAFLTVLEYKAAEAGTRLIRVPPGGTSQTCSGCGVVVPKLLSDRIHRCPDCGLVTDRDTNAARNILRLGLSRQASTWPMGACVA

SEQ ID NO: 18893 - protein, 373 aa, unknown
  TnpB Polypeptide
MKQTLMVKLSPSPEQRESLLQTMECFNEACNAISEAAHYLHRYGKFTLQKLVYQDIRSEYGLSAQMAIRAIAKVSESYKTEKKSQHEFKPHSAMVYDQRIFSWKSLDAVSLLTVQGRQTIPISVGDYQRTRMNYRAKQTDLVLRHGDFYLALVIDVLVPVADVAIESLGVDLGVNNLAVDNDGKFYSGKEVDNVRERTDTLKAALQKADTKSAKRHLRKISGRESRFRRSVNHMISKQLVSKAKDTQRCIALEDLGGVGEATVRHSQRRRHKSWAFFQLRSFIEYKAKAAGVMVRLVNPSYTSQECPCCHHIAKSNRKSQSVFVCQQCGYSLHADIVGAINISRRASVNVPIVSPFFLGGWAGTSSSALAVSG

SEQ ID NO: 18894 - protein, 362 aa, unknown
  TnpB Polypeptide
LYPNRKQEILIQKTFGCVRFVYNYFLNERIKQYKETGKSPTRFQQDKSLTMLKTELEWLREPDKCALQEAVKNLDMAYKNFFRRVEHGEKPGYPRFKRKRDHRKKYKTNSNIKVFDCAVQLPKLGMVKCAISKQVEGRILSATISQNPSGKYFVSLCCTDIEVTPLPKTGTAIGVDLGIKSFAVTSDGVEFPNPKYLYKSEAKLAKLQRRLSRKQKDSKRYERERVRLARIYEHISNQRLDMGHKLSTKFIKENDVICIEDLTIKNMIKNHKLAKAISDVAWGEFKRQLIYKSEWYGKTVVVVDRLFPSSQLCSSCGEQWDGTKNLSVREWICPQCGTRHNRDINAAKNILNEGLHFLAKST

SEQ ID NO: 18895 - protein, 412 aa, Rhodothermaceae sp.
MTVEVQDREYRGVEYRLLPGSRSNARKLSGIAGACRFVWNHFLAKNKEEYELAKKNGAKKPSTSFFSLGKEFTQLRKEIDWMQEYSFKIVRHTLKYQADARQGLYKGVRKHPRFHSKYGKRPSFTIPEDVKIKDGQLLIPKVGWMWIRRKGGNPYPDGKPVKGTVKKEGRRWRVSVIYEIDTQARTENGVAVGVDLNTYNVACTHSAGEQEMLDIPKPDKKEIRIRRYQRKLARQQKGSNRRRVTKQKIAKWKRKQKNARKNAAHHHSKTLASKAETLVREDLNIKGMTKSAKGTVENPGKNVMAKAGLNRVIQNAGWGRFNQYCDYKFRNVVEVDARYTSQRCSVCGHKSKDNRKTQSKFKCVACGHADHADLNASANILASGIGACGRGGAFSLETPMSRQIEGIFNYAL

SEQ ID NO: 18896 - protein, 458 aa, unknown
  TnpB Polypeptide
MFLAWWVDELVRWLWRAGGWRVRVIQAYRFALDPSAAQERALRSHAGAARFAWNWGLAKCQERYAAEGKWYSAVDLHKLWNAQKKADPALAWWAQNSKCSYQEAFRDLDRALRDFTASRSGVRKGRPLGFPRFKKRGKCRDSFRFSTGAMRCAGSTVTLPRLGAIGTHESTRKLARRLGNGTARILSATVSRTAQRWFVSFTVAVDRTVPGRHTRPGSAIGIDLGVKTLLTGMDDRGKVITVAGPKALRSSLRRLRRASRAHSRTQPGSASRRKSAARLARIHAHVRSVRTDALHNATTDLATRYETVVAEDLNVAGMTRNHKLARAIADQGFGQARRMLGYKTTWHGGQLIIASRWFPSSKTCSACGTVKTKLALSERTYICPRCGLIRDRDVNAAANLLTLAASGAESQNASGGTVRPGLAGRVPVKEEPGTATAGQTGTASAQPLAAEQKHTHAH

SEQ ID NO: 18897 - protein, 458 aa, unknown; identical to SEQ ID NO: 18896
  TnpB Polypeptide

SEQ ID NO: 18898 - protein, 187 aa, Escherichia sp.
MGSVGIDLGLKEAATTSTGHKLQIKQTQKWANKLATAQRAKNKKRVKAIHAKIKNTRLDLIHKFTTKLVQGNALIVVGDVKSRSFTNKKTKLAKSTYDAGWFELKRQLEYKCKHAGCQLEIVNESYTTQTCSCCLKISDSSPKGRAGLRIRGWRCAECGTWHDRDINAAKNILAVGLDRLAVGIPSV

SEQ ID NO: 18899 - protein, 248 aa, unknown
  TnpB Polypeptide
MIKVPKLGLVKIRGYRNLNELTDRIINITIEKEKTNKYYVSVITQKEEEIPQKITPTSIVGIDLGIKDLVVTSDGEKYPNPKEINKREKRLKRMQRKLCRQVKGSNNYNKTKEKIARIHSKIKNSRKHNIITIANKIVKEHDIIVSEKLNVKKMSSNHKLAKNILDAGFNKICELLKWKSKLLGKYYYQVDTYYPSSKICSHCDNKTEITNDLKVRMWECENCGNTNDRDINASINIMFEGIKIHFAS

SEQ ID NO: 18900 - protein, 360 aa, unknown
  TnpB Polypeptide
MVITLNCKIYPTKYQEKILKQNSLEYIRAVNQLIHAEYQNDEWKKFTSKDVYADISGNLRDSAKQDMKSILAKYNRELKKHKNPTLPTLKKPVLKWSYVGYTIRDNGILRLQCWDEKTIKVLMKTDISQQQYNVINSGKIGGLRITKKNNKWIAQIAVTISDSKPNDSNYVMGVDVGIKVPAVAVTDTGKTKFFGNGRMNKYYRRKIMVYKRRLGKAKKQKAINKIKNKEKRWMTYQDHCISKNIVDFAIQNNISQINMEKLSGIRQTTSKSRKNVKYIHKWSFYRLQSFIEYKANRVGIKVVYVNPKYTSQICPCCGHLNKAEDRLYTCEACGYSTHRDRVGAINIMRVSAIDGNSLSA

SEQ ID NO: 18901 - protein, 328 aa, unknown
  TnpB Polypeptide
LLDKNWTSFFKAIKDWKKNKNKYLGMPKLPKYKVKNGRCFLGIDNIKFFNTDGYIRFSYKPFHCMNHIFRTKIPQTAKLMQCRFIPHANYYTMEIVYQIDVPETNTDSEHIASIDLGVDNFATVTNNIGLQPIAIKGGVIKSMNQYYNKKKATLSSDLMKVNNKHWSKRLQKLSDKHYNKIKDYMHKVSKYIFDYCILYSMDTLVCGYNEGWKQKSEMNHKTNQTFEYIPYLMFVNQLAYKCQNNGIRFITTDESYTSGTSFLDCEEPTKVNYNKSRRIHRGMFKSNTGTLINADVNGSYQIMKKVFPNAFVNGIEGVGLHPLSMKIA

SEQ ID NO: 18902 - protein, 385 aa, unknown
  TnpB Polypeptide
MKGGVDMQFTVTAKIQVIVSFEQRQLLDETFETYRNACNFVANYVYQTQDLKQFSLNKALYYRLREDFGLKSQMSQSVFKTVIARFKTILENQHEWIKPNFSKPQYDLVWNRDYSLNGKVFSVNTLSGRVKLPYFITGMEKYFNNSYSFGTAKLVKKHGKYFLHIPMTTEVPEFIDSEVCNVVGIDRGINFVVATYDSNHKSGFVSGKIIKQKRAKYKQLRKELQQRQTSSARRRLKVIGQRENRWMQDVNHCVSKALVENNPKHTLFVLEDLSGIRSITECVCRNNRYVSVSWSFYDLEKKLKYKASLNESLVINVDPRYTSQTCPVCGHTEKSNRNKHLHIFKCKCCGYTSNDDRIGAMNLYRMGINYLSDSQVPDTVASQYI

SEQ ID NO: 18903 - protein, 458 aa, Catovirus sp.
MTKKKKKFKKKKIFYKKYHKFNWLSRLFNDNQFSDLSSYIFFHGDHFWKHKYNLPFKSQLSFSWFDFHKSIQISPANPIMPSDARFVDKTKFNAKKTESFVLHPNPLQKKILLTWIDAFTDMMNETIKFQKNRLFHKKQLILDSRKLRDHNLKTIKNKIIARTGVNSHVMDQAIKLICEMYDSSIANIRNHKRPFRIRYIKKNKNKRILKMEKILISKNGKTFCSSVFGKFLDNRLSNVTSDFTIQYDKLKDRFMLFYTKNANKIKTNKKDQMGLDPGIRTFLTGYSNNHAIKIANNAHDRISDIHKKIDEIRGSNLSKRRKIKALEKRESKIENLVKDLHWKTAKYLTDNYGEIIIGNFSTKKMGEQEGMNKMVKRVGNSLSLYKFKQKLQYKCLLKNVKYKEVDENHTSKLCSNCGVEYKWNLQGKKIYDCNYCGLEMDRDINGAKNIMIKSIIRK

SEQ ID NO: 18904 - protein, 374 aa, Clostridium sp.
MLKAFKYRIYPNDSQKIQLSKTFGCVRFIYNYYLAKKIDLYKTDCKSISKYDCNSHCNKELKKSEQFKWLKDVDKFALTNSIYSLDSAYKKFFKEHSGFPKFKSKKIHNYSYTTNFTNNNIQADFMNNKIKLPKLKWIKCKLHRKFEGKIKSATISQVPSGKYFVSILVDVENIQFPKNNNQIAFDLGIKEFLIDSNNNHIDNSKTLYKYEQKLAKLQRQIAHKKKGSQNWIKQRIKIARLHEKITNIRKDFLNKLSCQITNDYGIIISEDLNIKNMVKNHHLAKSISDVSWGEFTRQLAYKSEWKGRIYHKIDPWFASSQLCSNCGYKNKEVRKLSVREWICSECGTIHQRDENASKNILKQGLKELNLEIAI

SEQ ID NO: 18905 - protein, 219 aa, unknown
  TnpB Polypeptide
LSATVSQVPSGKYYVSLNYTDVEEVLFPLTYNETGIDLGIKDFIVLSNGEKVENPKYLKKSIEKLKKLQKQQSRKTKGGRNWIKNRIKIARLHEKIANQRMDFINKLSTRIIREYDIICIEDLKVDNMIKNHNLAQSISDVSWSKFTTQLEYKAKWYGKVIKKVDTFYASSQTCHCCGYKNEGTKDLKVREWTCPKCHSNHDRDINASINILMQGILAN

SEQ ID NO: 18906 - protein, 426 aa, unknown
  TnpB Polypeptide
MAKQVVTRTYTASIRNQSRVSDDLDSLGFAASKLWNVGRWTCGRVWSEIGHIPSHTELTAYLKSHERYDDLHSQSSQRVLQELAEAFNGWYGKRRNGDTTANPPGYRKHGDEHPRSTVTFKAAGFKLDTKYDRVRLSKGSNLKDYWSDFILCEYQTRPDVDLSTVESVQQVRAVWTGDEWELHFVCKVEIEVSESPGERTVGVDLGINNFAALAYEDGHAELYPLNCLKQDDYYFSKRIARCDDSDSEQATRLNHKKSDRRTHYFHTLSKHIVQRCVEKRVGTIVVGDLSGIREDEENDEVKDWGTHGNLDLHSWAFDRFTDLLEYKAEMEGISVETVSERDTSKSCSCCGRKRDANRVDRGLYVCDDCGTVANADVNGAENIRQKVSPSSPNLSVNRSNGWLAQPSTFLFDKETGAFAPQEQVTS

SEQ ID NO: 18907 - protein, 343 aa, unknown
  TnpB Polypeptide
MLAERKKIYEQYKDNKEELKKQKLPTPAKYKSEFEWLKEVDSHALCNAQMNLQSAYNNYFRDKKVGFPNFKTKHKNKNFYTTNNVDNFTSIRIKNNKVRLPKLGFVKFIQHRKILDNQTIKSCTISKTPTGKYYISILVEYEQEINNITNINLNNVLGLDYSQHELYIDSLGKKANYPKYYSITLDKIKKEQRKLSKMKNESKNKNKQRIKVAKLYERVCNQRKDYLHKLSKTLTNNYDTIIIEDLNMQEMGKQLHLGKGVYDNSWGMFTNLLEYKLKNMGKQLIKIDKWFPSSKMCNECGEINHELQLSEREWVCRLCGSIIDRDYNAAKNIRDEGIKLLLS

SEQ ID NO: 18908 - protein, 462 aa, Mastigocoleus sp.
MMSKKITNTQSVVRTDVWNLVATSIQKQQMIATIEEYRRFLKPLVLIVNAQWISLDSLTSKERINAVERMIHRTVKNPHPKHLYFQKIIDKYPSFRKFPSYLRRAAISDAIGIVSSFHTRYKEWQSGIRKKRQSSPPKLTAMCNSYPALYKGQQVRYGLNYKTVDIKVWNGFDWIWLTKIPIIKHGLNRHLVEGNKIQSPALVVNKNKCQLSMPVQIKKVVFEESDFVCSVDMGINNAATASIVGRDGTVKARNFVNPARDIDRRNQRRMMIAKKSKQTRDITKSDFIKGFCRGLYRKSANINLEISRKVVRGIVSFAKSHNIKLIVFENLAGWKAKAGRKKSLQKQKFHLWCHRKIVELTQDRWMELGGKVVFVNPKYTSAYAFDGSGKVKRSKINYSLCRFSNGKNYNADLNASYNIGARYWYSYILGDKNFSRVFVGKSSNDTLRTPVTLETLRSLKAA

SEQ ID NO: 18909 - protein, 388 aa, unknown
  TnpB Polypeptide
MELSKTVVCKLKPTAEDAEKLLKTLEAFRDACNHISKLAFERKVFNPVALHHMTYRETREKFKLPANLAIRGRDRVAKAYKLRRDKVLRFKALSMDLDERLFRLIYKPDGVYASISTLQKRVKPPLDIGEYQRKLLEDIKPKHAVLVYRDKAFFLHIAINEEAPEPKGDNSVGVDVGIKNLLVASNSFKVKGGEALHKRRHFRELRSSLQAKGTASAKGKLKRLSGRERRYVNTVPHQVSRAFVNSLREGDIVVMERLTGIRRNARHRRSQNGDFHSWAFRKPQSLIEYKALEKGIPVVYIKPRNTSITCPRCGRIDKANRRSQSLFRCVECGLQNNADYVAPLSLSRVELAPSRRAAVNQPNAGMSGDFGMSHHDSPASPQASAVGS

SEQ ID NO: 18910 - protein, 351 aa, Escherichia sp.
  misc_feature (272)..(328): Xaa can be any naturally occurring amino acid
VKRLQAFKFQLRPGGQQEREMRRFAGACRFVFNRALALQNENHEAGNKYIPYGKMASWLVEWKNATETQWLKDAPSQPLQQSLKDLERAYKNFFQKRAAFPRFKKRGQNDAFRYPQGVKLDQENSRIFLPKLGWMRYRNSRQVTGVVKNVTVSQSCGKWYISIQTENEVSTPVHPSALMVGLDAGVAKLATLSDGTVFGPVNSFQKNQKTLARLQRQLSRKVKFSNNWQKQKRKIQRLHSRIANIRRDYLHKVTTTVSKNHAMIVIEDLKVXXXXXXXXXXXXXXXXXXXXXXXXXXXXXXXXXXXXXXXXXXXXXXXXXXXXXXXXXATCQSQQRVRSASRGAMSGQNQV

SEQ ID NO: 18911 - protein, 422 aa, Lachnospira sp.
MKGNSYMYLTVKQQVKHLSKEDYKSIKELCHIAKNLTNQAIYNVRQYYFNEGEYLNYEKNYALLKSSENYKLLNSNMAQQILKEVDGSFKSFFGLLKLAKKGKYAFKDCKLPHYLPKDGYTTLVIGFVRLNGNELILPFSNTYKKTHKSVEITIPPILIDKKVKEIRIIPKANARFFEIQYIYEAEKIQRNLNQNNALALDLGINNLVTAVSSEGKSFIIDGKRLKSINQWFNKENARLQSIKDKQHLGYRLTNRQKANTRDRNNKVNDYMNKAARKIIDYCVSNNIGTLVVGYNETFQRGADMGKRNNQNFVNIPYGRLRSKLEYLCELNSIVFVKQEESYTSKASFWDKDELPVYNNDNPKTYTFSGNRIYRGMYQCKNGKCLNADVNGALNILRKSNVVSLDGLYTRGEVDTPVRIRVS

SEQ ID NO: 18912 - protein, 382 aa, unknown
  TnpB Polypeptide
MALIQSRIKIRIYPNEEQEVLINKTIGCCRFVYNQTLEICKQLYEQLKHFPSRKERFNNLTYLKEEYVFLNEVSTVALQQSIRNLDSALNNFYKNRGHFGFPQFKSKHKGKQSYRTPYNNGRAGVLDNRHIKLPKLGRVKTKRFDIPEVYKIFNIVIERTATGKYYASICIETETQPLPKTGKQVGFDLGLIDLLIGSDGSRIERPKFAYAFKDKLAKEQHKLSKMRTKLMRAKLNLDECKNYQKQKHKVAKLYEHVSNCAKDFNHKLSRKLVEEYDFIAMEDLNISGLVKNHKLAYSISDVRWSQLVNFIQYKCLWYGKEFRQVDRFYASSKICSECGTYHKDIVNSLSVREWTCPDCGTHHDRDVNAARNILNQALSVGA

SEQ ID NO: 18913 - protein, 284 aa, Streptomyces sp.
VSTANVPQQPQPTPGAPPAPAPTPPHASEATRLLCAGTYLDSHYRDRVIEELHLNEQRARWEEPEPGSAVGIDLGLTHFAVLSDGTKIDSPRFLRRAEKKLKKAQRELSRKRKGSKNRAKARVKVARAHAAVADARKEFHHQLSTKLIRENQAVAVEDLAVSGLARTRLAKSVHDAGWAQFVTMLQYKAQRYGRTFVRIGRFEPTSQVCSACGYRDGPKPLHVREWTCPACNTLHDRDHNAAINVKQAAGLAVSACGAPVRPGLVPAQREEVGSHGIPAESHVA

SEQ ID NO: 18914 - protein, 351 aa, Geobacillus sp.
MPTITLKLELHKPTKAKQEMYERMTNINTQFANWLLNHPELNKATSKIFREFSSQWFPSAIACQTIRDVKSQKKHQKAKQFRKRWCCFNNQNWKVERKGDFYTISFPTLEKRIGVPVVTRPYQEAWLNRLLNGTAKQGTAKLYKKKTKWYFAITITFEVEQRNETNVMGVDLGLRYIAVASVGTKSLFFKGNPCAFIRRRYAALRRELGKAKKLHMIRKIGHKESRWMKDVNHKISRQIVNFALVNGVGVIRMEDLTGIRKRATSAKEAGRSLHSWAFHQLQTMIAYKAEMAGIKVEWVNPTYTSQTCKCGHREKENRNGIHFQCKKCGYTIHADLNGAINIAKAISGLSA

SEQ ID NO: 18915 - protein, 573 aa, Halovenus sp.
MSDHLSLPICLPDEDDQRFERLATLSRRVANHVLKDYWTPVHLDGVDDTSHQAWKYFDEHDPFEELDLYLPSRFRRCILQKVGETLRSHADRRDAFQSIQSVLPDHKIRRIHRRQIKEQLWDDGDYLSSGYVDILIDQLNSYYDRHGAYPATYFEMQDCPEYDSGVLPFSADDGPTSGQAVKYQYDADSGMLIIRLKTPDTPSPETRGDWSWTEYERGGYEAFHDLLSYGDLSAPEFQPSRRKTGDAYYELSFPVEVDQTEMNDDVDCVLALDAGMRKDMTAVVVTDDGEQLSTPHFIQFTDRDGMRRLHRERTRLNDRLAALCRDGRSHTDEFAHIQSEYERVNSKIRHKREQLTHDVANQVLALALTYDVDAIVHEDLRSLSPPSDEGTLSWELSSWARREIIENIEYRADCAGVAVERVYPQGTSRSCPRCGSTGHTCKSPDHQQEHWWGGHFRCDNARCGFESDRDYIGALNVARVFFSGTDELDHGFTSSYTGDCETVLAGRSAGTRLTFGSGIVAYEPGQAAATAGGGSAVIAPAVAVPESNADGSDGRGPVVQQCTRFIRCTTERY

SEQ ID NO: 18916 - protein, 220 aa, Halovenus sp.
VRRQRQVCPTFEGYGRPARRRPRAGAAVRRTGPGLRRTGPGLRRILAWKSNHKRREYERQRARLQQKGTRSAHLTIQSIGDTFANWSEDFLHHASKELVTEAVSHGCTTIVFEDLENIRERISDASKFQQWAFNELKRQVEYKAKQEGILVETVHPAYTSQRCSETGCGFTHEDNRDGDVFVCQKCSKELHSDYNAARNIAHKFIQNRRKSGSGGVTYHL

SEQ ID NO: 18917 - protein, 418 aa, Halovenus sp.
MEVRRTVPVKLDVDSDDAVLLEDTVDTFLWCAQYVTDHAFEGEYVTTSKTTLDDETYDDVREATDGFNGGLVQAARNKAAEACKSVVAKWKQGKKASKPSFTTPHVVYDHRTATFHDDYVSLATTDGRIEADYVLPDEDSDTPHAKYLFSDEYETTGAELHHKHGKWQLHIHCKKDVESDTPEQATTTHGTVLGVDLGVNNLAVTSTGTFWTGDEFDHWRREYEKRRGNLQEHGTRWAHENMQAVGRKEDGRFKMTLHRISNELVAEARNHDCSVIAFEDLSDIRDRTGASWGHKWAFNRLYEYVDYKAEKYGITVEQVDPENTSRRCSHCGFTHPDNRDGENFECLKCGYENHADYNAAKNIGLRYLRRNQTGDDGGAPLGVRLNSGMVNVNGEYEPPADDSARTGVHAESHPFTGG

SEQ ID NO: 18918 - protein, 394 aa, Bifidobacterium sp.
MCSPSWRAVRRRIGRCTRSGVGGTSGKPRSRRGGASTARRHTTARSNHWRPRCGTSSTRRPAGARAGAWAGPNTGSKRRGTPRFAYTTGSFGLVEGDPKRLKLPRVGRVHCMEDIARRVGDAKVVRMSVSKRAGRWYASLTVERDTPTAPAAPRGGGVGVDLGVKALAALSDGTVVPNPRHMSGSLRRLAHAQRVLSRRREGSNRWWKARTRVQRIHARIADQRRDGLDKLTDRLTRTYTDIAIEDLNVAGMVKNHRLARAVADCGFAELRRQLVYKSMRTGARVHVINRWYPSSKTCSNCGTVKAKLSLNERTYHCDACGFRIDRDLNAAINIEKRIVAPSAEETLNARGGDVRHDRRKPAAQTPAKREPSSHNNGMRLGASLGNETVQTTTD

SEQ ID NO: 18919 - protein, 183 aa, Salmonella sp.
MVGLDTGVTKLATLSDGTLYQPVNRFKQASASWQKQKRKIRRPHSHMANIWRDYLHKVTSEISKNHVMIVIEDLKLSNMSKSAKGTSEQHGCNVRAKSGLNRSIPDQEWYEMRRQPEYKQHWRGGQVIAPPAHTSQRCACCGHTPKDNRQSQSKFKCQICGDTANTDVNGARNILAAGHAVLA

SEQ ID NO: 18920 - protein, 372 aa, Acidimicrobiaceae sp.
  misc_feature (36)..(37): Xaa can be any naturally occurring amino acid
VGGRDRRAGPLDPLLLAQGVEPGKGRVRSLVERELXXSTGVIRVLDDRHVQLPRLGVIRTKEHTTALSDQVVAGTARVLSATIKEEAGRWFVSFGCKVVRRDPVATYPEAIVGVDLGVHHFAVLSTGELFENPRPISQRARRMARLNRELSRRQKGSKRRARTRAKLTRCHARVANLRRDTLHKLTTQLATAYGTVVIEDLAVKNMTACPRPKADPENPGHHLLNGHAAKAGLNRSILDASPGELRRQLSYKMSWHGGHLVVADRWFPSSKKCSSCKKAKATLSLSTRTYRCEHCGLVLDRDHNAARNLAAYGREHLVAGSGPETQNGRRGDAWCTSDTGAHSPKGPRGRKRQDGSGQPVKAVTASSQGEAA

SEQ ID NO: 18921 - protein, 401 aa, Coleofasciculus sp.
MLVLEYKVKAKPQQYKAIDEAIKTVQFIRNKAIRYWMDAPKDAKINRFALNKYSTELRNEFAFVKDLNSMAVQAATERAWLAIARFYDNCKSKKPGKKGFPRFQKNNRSVEYKTSGWKLHSTKRRITITDKKGIGELKLLGKWDIHTYSVKSIKRVRLVRRADGYYCQFSVDAECVDIQSPTGQEIGLDVGLEYFYTDSNGHHEPNPKFLRKAESSIKHAQRCIYKKIKGSSGRRKARSQYSRKHLRVSRQRTEHAKRLARHVCKFNDLVAYEDLRVANLLKNHCLAKSIADASWYQFRQWLEHFAKKLGRLAIAVPPQYTSQECSQCKVIVKKSLSTRTHVCLCGLILQRDWNAAINILLKAKSRDGQSRSNATGVGASTLLGASLVEQVLTMNVESHAL

SEQ ID NO: 18922 - protein, 400 aa, Bacillus sp.
VEKMNIHKAYKFRLYPTAQQATMINKTIGCCRYVFNQALGNQKKKDAYWYIVQEMVQNGQLLKNEWKSGFFHAGRAQKELTEIKKQIDWLREVDATALQRTLQDLGKAYQDYYKKAKGKPHFKSKKNDVQSYTTKCNYNKKTGVGTIRIENDRFVRLPKVELVRFAKSREIEGKLPSATVRRTPSGRYFISILTEQAAHSSQSSLFEVGIDVGLKDLAIFSDGTKLKNPKWFCKLEEKLAKKQRILSRRQVGSTNWNKQRIKVARIHEKIVNVRNDFLHKVSSSLVNENQVICIEDLRVKNMVKNGILAKAISEVSWAEFRRMLTYKCKWYGKELIVVGSNFASSQLCSSCGYKNKEVKNLQLREWECQCGAKHDRDHNAAKNILQEGIRLRTAGHAGLA

SEQ ID NO: 18923 - protein, 382 aa, Escherichia sp.
  misc_feature (12)..(13): Xaa can be any naturally occurring amino acid
MRRFAGACRFVXXRALARQNENHEAGNKYIPYGKMASWLVEWKNATETQWLKDSPSQPLQQSLKDLERAYKNFFRKRAAFPRFKKRGQNDAFRYPQGVKLDQENSRIFLPKLGWMRYRNSRQVTGVVKNVTVSQSCGKWYISIQTESEVSTPAHPSASMVGLDAGVAKLATLSDGTVFEPVNSFQKNQKTLARLQRQLSRKVKFSNNWQKQKRKIQRLHSCIANIRRDYLHKVTTTVSKNHAMIVIEDLKVSNMSKSAAGTVSQPGRNVRAKSGLNRSILDQGWYEMRRQLEYKQLWRGGQVLAVPPAYTSQRCACCGHTAKENRLSQSKFRCQVCGYTANADVNGARNILAAGHAVLACGEMVQSGRPLKQEPTEMIQATA

SEQ ID NO: 18924 - protein, 345 aa, unknown
  TnpB Polypeptide
LVKESEPYKDLGSNVGQGTLRILDKAWKSFFKAIKDWSKNPSKYLGKPKLPKYRQKDGRFILSLDSNKVKLKDEYVYFAWKPFKQFNHRFRTNAKERILQCRFIPKASHYVMEIVYEIEVSDYTNSSDRVAAIDIGVDNFITMVNNIGENPIAVKGGVIKSINQFYNKRKAEIQSELKKINKQDWSKQLQKLTDKRYEMIKYQMHCISKYVIDWCVLCGIDTLIVGHNDEWKQKNKGMQNFTYIPYEMFIQMLSYKCENNGIKFVETEERYTSGTSFVDNEAPMKSNYDKSRRIHRGLLIGNNDVQINADVNGAYQILKKVIPNAFADGIEGAGLHPLIIKKLIA

SEQ ID NO: 18925 - protein, 551 aa, unknown
  TnpB Polypeptide
MSKARKRKDTQFNSKMSKCVFLYGEPTNDKAVKIKKMQAEFVKLINNYIKALNDNTKITLQLVKSDNKDSQMRAFEKSIRPEKVNASYCQNAFDMAVIHLSNRLDNIRLDMCRECKSIFTTSKVLFAMSIDGRSKTEMITAMQDIAKSAKSKKDTFFYDDCAEELKSIEDSEFEFMQQEFRVIYDMVSCEYKIPYVTRSQIPLDSRIMTIEPSENIKAPYVIAISNMLDVGGGRIVVPLNTTKHSIHKINTHKMAGMVSISMDIQKFLKVDWSYKNCVSQPKTSKIIGVDTGISDAFHTSEDKAIGSMSPVIDFYKNDVEKSFASLSDMRNKKRKISHYLRRHENLPEDVRRSLIQKMDRLDQMVQKAEAPHRKNRRYYGMLEHEIKSSIDSYIKSIDHETLTVLEKLDIKEFNNSRKANGKRSMFARGQLQKKLMETLNWKGYDFKEIEPDYTSQCCPVCSYTDKANRNNKSFKCQCCGYEADADYVGALNIKARAEDTEILDVCEKYKYNHDEMQKHIKMVYHARNEKYKAAAGKAMQQSEGSGSRDAA

SEQ ID NO: 18926 - protein, 344 aa, Lactobacillus sp.
MPSRCQIISKFLEDKRIDSLAKANAIRNYRKAWQAFRKVHSTGVPKFHRKSYAWGYQTNCQYIRQKTMQLTNGTVCFEDCQHVLVPKLGRLRIKGSHKRLLNRKAETRIGTVTITKDAANRFFLSMQLGSDTPFMTKPAKTNRQTGIDLNTENFLTTSDGKIVANPRYYRTIKGRLAKEQRILSRRARRAKKEHRSLRNSKNYQKQRLLVAKIHAQVLDRRKNFLHNVSTTLIKNHDLVVAEELRSKNLLKNHALAMSIADVGWRTFLGMLTYKADLYGRQFVTVNPKNTTQTCHHCDFVMGTEGTDKLTLADREWNCPKCQTYHVRDHNAAQNILIKGIAKLA

SEQ ID NO: 18927 - protein, 225 aa, Cyanobacteria sp.
LERYLKGDSKSSCSGKPRFKSLSRYRTFTFAQLKQDCLQGKFIKLPKLGNLKLIKHRSVPDEFKLKTASITRKRNGYYLSLSIECENVANGSPDPDWSKTVGVDVGLKDFLTRSKGETVAIPQCYRKAERKLKRLQLRVSRKKKGSNNRKKAVHRLAKQHKKVADTRKDFHFKTSKWLLDNYDVVAHEDLNVRGLANSRLSKSVNDAGWGNSCLFWKSKPKMLGF

SEQ ID NO: 18928 - protein, 399 aa, unknown
  TnpB Polypeptide
MLDAIGYKIRLKPNKTQIKLLYKFANHSRGLYNILLAEAERAYHEEDIRTNLNGLFEYYKYIKYLDAYSWLQDLPHACANRVAKDLMNAYIWAWKSGFGFPKFKSKRCSKLSFYQRTDRLKFSNDFKSVNITGIGYIKCIQGDYPIEGYCNPRVTFDGKYWYLSFSIVNNFECTLEGDTTDGLGIDLGVKDLAVLSNEDKLKNPNKCLPELNRLVRKYNRLQRQYSRKLEINKLPNGKVLHTKNSEKLRKELNLISRRIHNIKTTYYHNFTMNLMRTKPEFIGVEDIDIKGLKSRERFKEQKARGKMKYRVAKSMQQVALYEIIRQLRYKGACYSIPVYQVDRYFPSTKMCSRCKSKQDMTLEDRTYECPVCGLVIDRDLNAAINIREEARRLHLASLA

SEQ ID NO: 18929 - protein, 336 aa, unknown
  TnpB Polypeptide
VASNRKTAKQKKHLVRKFQPTSAGYDARIFLFNEAHWTVKLTLLNTRETFNLLIGNYQKHLLSGQIPTSATLVKRQDGDYYIQIQVKPKPPEIVKSDDFLGVDLGRKDIAYTSEGDSWDAESINCVRDHYALLRQSLQKRASEGTRSTRRRARRLLKRLSGKERRFQAWLNHTISYRLVQKAKSQKLGIAIEDLTGIRERTNQKPRNQTERRRSNNWSFFQLRQFLLYKCLKFGVKLTLVNPAYTSQTCHNCLHIHPEPDKSYRSGKSFKCGHCDWYGDSDFNASCVISLLGASINMPRGPYLSCVIWLNEPIQLNLFDWDAGLLKTSSMPQAWAG

SEQ ID NO: 18930 - protein, 428 aa, unknown
  TnpB Polypeptide
MIVLETKLKGTEEQYEQLDEAIRTAQFVRNSCIRYWMDNSCIGKGELSKLCAQLAKEFEWANKLNSMARQASAERAWQSIARFYSNCKKKKLGKKGYPRFKKNTRSVEYKTSGWKLSDDRKSITFTDGFEAGSFSMWGTRDLNFYQIAQIKRVRIVRRADGYYTQFCVDVERNVQHEYTGKIVGIDLGLEYFYTDSDGQMVANPRRLRKSEKRLKRLQRRVSRRRKGGKNRKKAIKKMARQHLKVSRQRKDHAVKTAGALVASHDLIAYENLQVRNMVRNHKLAKSISDASWSMFIEWVEYFAKLHKIVTVAVPPQYTSQDCSGCRERVQKTLSQRTHQCLKCGTILHRDHNAAKNVLVKGLEVLGVKQAENHASRSTWAEPKTALAPYSRVQKERRGIFQDSTGGTRKLIRLGMRTTSGQSKATSAG

SEQ ID NO: 18931 - protein, 416 aa, unknown
  TnpB Polypeptide
MLWMLVKGVTFRLTSNLPPEAIQLLQDFRLAVNRAVRAGLNARVSSRNGITRLLYAAFREDHPGMYAQHLVSSFEVAAGILKNYRRQTRNGRHCKLPFVKRLMMKAENQAYKLNRTEGVIDLPIRAGCHVELRLVLSRFHRRYLDDETLSLGSITVLPNRVIIAFRKEVPRPFAAGSVLSLDTNERSLDGIFVESGQDREDSCIQVKAAFPEVAVIQQRHHDRRRRLQKKKAHDRRLGRSSCRREGAREHHRIDYRLHGIANAVLEFAEDHKSAIVLEDLKGMRSTINKDLNRRLSLWPRRKLHQIIEYKAAWKGIPVIKVDPRYSSRKCPACGRIPDSRMGTRTEFACECGWHLDRHINASMNLLQTAVSKGLEVAGGLRFSPGAFQHDVMMILYEPAMAARSEPNGTSQMTGVT

SEQ ID NO: 18932 - protein, 411 aa, Lachnospiraceae sp.
MEICREAVRYLMPVIDGEWESLSRISELKRRFNAAEKLIHTTRRNQAVYRFDEAFPKMPSYLRRAILQHVLGAVSSARTRAEQTEAAGGSREEACHYMPVFYKDNMYKKQEDRVYLKLYNGKDWIWQEVHLKKTDLEYLRKNWSDVEAKSPVLVKRHRKYYLQFAFEQQVRLTQKPAGERKICAVDLGINTDTVCSIMTADGTVVARKFINFPTEKDRLWHMLGRVKRKQRENGPSGVRGLWAYAGRLNEEIARKTAGAITAFACAHGADVIVFEHLEMQGAGRGKNRQKLHMWKKQEVQKLVGHQAHRAGMRVSRVNAWKTSALAYDGSGRVKRDPGNHALATFGNGKQYNCDLSASYNIGARYYIRELLKPASETERSALEAKVPAVQRRTSCVYADLLELRKAMAEAV

SEQ ID NO: 18933 - protein, 404 aa, Selenomonas sp.
MEGNVLVEKLLPADNRRCSYRYNQKIHRKSRQVNMMNKAYRYRLYPTNEQKIMFAKTFGCARFIYNKMLGDRLDHYKKTGEKLNNTPAQYKEEFPWLKEVDSLALANAQLNLNKAYNNFWKNRKHFGKPRFKSKKTGHFSYSTNNQKGSVRLEGNKIKLPKVGWVKLRLHRPLMENSTIKTVTISKTPSGKFYISILMEYENQILPIIPKKFLGLDFAMHGLYVASDEDDAEYPNFLRKAEKQLAKAQRKLSKRQKGSHNRDKQRLRVARLHERIANQRRDFLHKKARYLVDRYDAIGIEDISVKAMAKHKKGGKFSFGKSVADNGWNKFVNILEYKLAWQGKSLVKIDKWYPSSQLCHVCGYQNSKTKDLSVREWDCPNCGSHHNRDKNAAINIREEARRISA

SEQ ID NO: 18934 - protein, 268 aa, unknown
  TnpB Polypeptide
MIVLEFKAKGKTTQYAAIDEAIKTAQFVRNKCIRYWMDNRGVGQKELYRYNTALRAEFPFVKALNSHACQVSVEWAYSSIARFYDNRKRQVPGQKGYPKFKKNCRSVEYKTSGWSLSETGKQIIFTDKKGIGKLKLKGTWDLNFYQIEQINRVRLVRRADGYYVQFVIKIEHQVDVKPTGKTIGLDVGLKELYTDSNGYSEPNPRFYRKGEKRLKFRQRRVSRKKKGSTNRKKAVNRLGRVHLKISRQRQEHAKRIARCVIQSNDLVV

SEQ ID NO: 18935 - protein, 400 aa, unknown
  TnpB Polypeptide
MIRTYKYRLYPHARQSRGLNYLLSLSRDVYNAALEQRIVAYRENGYGVTYAAQCKRFGDLRRADPDRLGTLNFTCMQQTLRRLDKAYRAFFRRVKAGEKAGFPRFKSASRWHSIEFTYGNGCKLRLGGTGRTLLYVQSVGEIKVKYHRDIPDDARIKHVIIKRSLDRWYVCLQIEMPDKEIVDRLPSEVGVDVGLHNLLALSDGTFVDNPRWLRKSLKELRVKQRRISRRKRGSGRRRKAIFQVAKQHSHITNQRRDFWHKETRKLADTYTLIAIEDLNLIFMTHNHHLALSAHDAGLGMFRQMLESKVENTVSQVVAVPPAYTSQMCSGCGEIVPKDLSVRVHNCPYCGLILDRDVNAAINILKLARTEPSGVNVSHGTVRSLRSSPLKRRESSRIIRV

SEQ ID NO: 18936 - protein, 388 aa, unknown
  TnpB Polypeptide
MLKSYKYRLYPNQDQKELMSKIFGQVRFVYNLGLETKTLAYVGNKTNYTCFDLNKQITELKKTDAPWLKESPSQALQMSMRNLDNAYTNFFKGAGFPKFKSKYTKQSFQLPQGVFLSENNKQIYIPKLKLVDIDLHREFKGDIKTITVSKTTTNKYYISILVDNKKELPEKKPIKLETTVGIDLGIKDFAITSDGKKFKNHDFFKSSMKKLRVEQRSLSRKQKGSNHYNKQKLKVALLHEHTRNQRKDYLHKISKYLVDNYDTICIENLGVSNMVKNHNLARAISDMGWGEFKSMVDYKCEWYGKNLSIIGRFDPSSKTCSNCGSINKELTLKDREWICSKCGIEHDRDINAAINIRNFGLRNQPSVTQSEWLHCACGVETHQSLADV

SEQ ID NO: 18937 - protein, 466 aa, Nonomuraea sp.
MIICSSLGVGGKGVAGVRLRYNYRLYPDPAQQAALARLFGCVRVVWNDALAMRKAARKAGLPWVGGGDLQKICITAAKRTPERRWLGEVSPVPLQQAIRDLDQAYRNFFDSVSGKRRGPRIGLPTFKSRRDHRQAARFNRNAFSLRPSIGPADGPAGSAGAVGGAGRLYLAKIGDVEVRWSRPLPAIPSSVTVIKDAAGRYFASFVIEVEEAGQVLPEALTPDGDLAETGIDLGLSAYAVLADGTKISNPRWLRRRERKLARLQRALSRKQKGSKNRDKARAALARQHAKVTDARRDFLHQSTTRVIRENQTITLESLAVRALSRGPLAKSVHDAGWGTFIRMVEDKGARYGRAVTKVSRWFASTKTCPCCGWVNTELTLADREWDCRQCGEHHDRDVAAALNLLAEGIRLRTLPGADTGIGSEVDREQQVAAGLADTGNDCGGQVRPGEAIPTLAQPESYGAQAA

SEQ ID NO: 18938 - protein, 222 aa, unknown
  TnpB Polypeptide
LAVAREVSQAVAPKEEVGLDLGLEHIATTSDGEKLRSGHFYRNIEQKIATAQRRGHKRQAKRLHRTAARRRKEALHRFSRKIINEYQSIVIGDVSSPKLAKTRMAKSVLDAGWGMLKTQLQYKGQQAGRCVSIVSERNTTRTCSSCKALTGPAGLDMLVVRTWVCSACGDTHDRDVNAARNILSAGRSPPSVSGNEPSVSHAPPSQTSSRCEARKSALKTAA

SEQ ID NO: 18939 - protein, 297 aa, unknown
  TnpB Polypeptide
LKENPTQKPEHKIGNEEIGLDVGPGTIAIVGGTKAELKQFCSELVSKQEEKRKLQRKMDRQRRANNPQNYNTNGNVKKGKKKWKKSNHYNKTSSQAAELDRKLAVHRKSLHGKDINEIIAMGTRIKTEKISYKSWQKNFGKSVLMRAPSMFISNLKRKAENAGGYLNEFPTNSTKLSQVCHICGNAVKKPLSQRWHICCGIEMQRDLYSAFLSKCVDVKSNSLDIARAKLLWPGLEPVLNEAVSRAYQSANGGKILPASFGVGRRLSGSPVKPEATITEAVDAVIRINEDESHREVI

SEQ ID NO: 18940 - protein, 221 aa, Fischerella sp.
MLKQAQQKIEELGLQNIELIEADAECIDFKNENFEQILRRTIGCVRLVFNKALAARTEAWYERREKIDYVQSSAMLTQWKKLEELQFLNEVSCVPLQQGLRHLQTAFANFFAGRAKYPNFKKKRSGGSAEFTKSAFRWKDGQVYLAKCSEPLPIKWSRQLPKGCEPSTITVRLESSGRWFVNLRINDPTDETLRPVDSAVGLDVGISSLVTLSTGCCINAG

SEQ ID NO: 18941 - protein, 245 aa, unknown
  TnpB Polypeptide
LDKAIQLPKLGAVKCRISKEVKGRILSATVSRNPSGKYFVALCCTDAEVAALPRTGSVIGIDMGIRDFAVSSDGIAYKNHKYLAKSEKKLAKLQRQLSRKAKGSRNRDKARLQIARLHEHISNQRKDMLHKLSAQLLKENDIICIEDLASKNMVKNHKLAKSIQDASWSEFRRQLEYKAEWYGKKIVVIDRFFPSSQLCCNCHGIWSGTKDLSVRKWTCPVCGHTHDRDRNAAINILNEGLRLLA

SEQ ID NO: 18942 - protein, 291 aa, unknown
  TnpB Polypeptide
MGTGLSFRTQQRIRSIINRSITIPPVLADKTIKEIRIIPKADARFFEIQYTYQVEAAQRNLNPTHALAIDFGIDNLMTAVSNRGESFLIDGKRLKSINQWFNKRNACLQSVKDKQHYGKKTTRRQAVLQRKRNNQVRDYMGKAAKQVVTYCIRNDIGTLIVGYNTTFQRSSDLGRQMNQVFVGISFGILRRKLKYLCEMNGIRYVEQEESYTSMASFWDLDEMPVYGEAGLVPPVFSGRRICRGLYQDRSGRRINADVNGALNIMRKCNIVSLRALYDRGDVDTPVRIRIA

SEQ ID NO: 18943 - protein, 219 aa, Geobacillus sp.
GTVKQGTAKLYKKRKKWYFAITITFEVEPRHETRVMGVDLGLRYIAVASVGTKSLFFKGNQCAFIRRRYAALRRTLGKAKKLQMIRKIGHKESRWMKDVNHKISCQIVYFALANGVGVIRMEELTGIRKRATSAKEAGRSLHSWVFHQLQTMIAYKAEMVGIRVEWVNPTYTTQTCRCGHREKANRNGIRFRCQKCGYTLHADLNGAINIAKAISGFAA

SEQ ID NO: 18944 - protein, 399 aa, Massilia sp.
MFVAHRIRLDPNNVQATYFARAAGTARFAYNWALSEWRKQYEVCKTDPTLTKPSEAALQRLLNSIKRESFPWMLAVTKNAPQTAIMQLGRAFENFFAGRARYPRFRRKGQNDRFTLTNDQFRVEGRRIRIPKLGWVRMRETQRFAGRIVSATVARFANHWYASITVETSDPPAPPAENQGAVGVDLGVKALATLSTGETFEGPKALCTLLMRLRRLSRDLSRKVQGSRNRAKAKLKLAKLHARIANIRRDSLHKLSTSITRRFHTIGIEDLNVKGMLSNRRLARAIADMGFFELRRQLEYKAAWRGGQVVLADRWFPSSKLCSGCGYRLDELGLDVRHWTCPSCGASHDRDVNAATNLRNMAVSSTASACGGEGADPARERRVKPAPAKQESNGKVNQG

SEQ ID NO: 18945 - protein, 388 aa, Bacillus sp.
VYRLKQHKAYKFRIYPTKEQATLINKTIGCTRFVFNHFLGKQKQIDAYWRTVEEMVQNGQLPQNNWKGDFFNKYEAIKEVKELKQHYTFLKEVDSISLQKSVEILHDAYTRYYKKQNNVPRFKSKKNPVQSYTTKFINGNIAIDGNKVKLPKLGWIRFAKSREVEGRILNATIRRNASGKYFVSILGEVDIQSLPKTQQEVGIDLGLKDFAICSNGVVYQNLHFLRNMEQKLLKEQRILSRRTIGSSNWQKQRIKVACIHERITNSRKDYLHKISTVIIKNHDVICIEDLQVANMLKNHKVAKAISDVSWAEFRTMLTYKSNWYGKKLQIVAKTFPSSQLCSCCGYQHKEVKNLNLREWTCPSCQTLHDRDINASRNILQEGKRLLSA

SEQ ID NO: 18946 - protein, 389 aa, unknown
  TnpB Polypeptide
MIRTYKYLLRPTSEQEQSLDYLLWQSRRLYNVALEQRINVYQETGKGINYQAQWAHFRDLRHSEPETFGKLNATSMQQLLRRLDKAFSAFFRRLKAGETPGFPRFKGRNRFKSMEYTYSDGCKLRCNEQGRFAFYVQNVGEMRMCYHRAIPENASIKHVVVKCVNNRWYACLMIEVPDKPIAPRTEPRAIGVDVGLKSLLALSDGSLIENPRWLRESLAELRVVQRKASRRMKGSNRKRKAYEKVAKLYEHITNQRGDYLHKITNTLVSKYSLIGIEDLTLAFMNRNRSLALSSHDAGLGMFRQLLQYKAEEAGTLVVAVNPAYTSQVCSGCGEIVQKDLSVRIHECPSCGLVLDRDMNAARNILSLALQKQPGWGCQDVTWAAAPCVS

SEQ ID NO: 18947 - protein, 420 aa, unknown
  TnpB Polypeptide
MKCGQVEIIERRFYRMKLNYQVRLYPNKTMKHVLDSLCDYRRYCWNKAISCWNDQYESRLIGLPESVIDKLKDDVDSLTLEEQELLNQYPIPSHYSVQSELVEQKEDWQYGLSSRVLQQAVKDVAKAWKLFFNNQDTAGRPTFKTKKSPKQGFKTDRASIRGGKLLLDKPRGHQGKWYTIRFRGLTIPDGKITHCVVTRVNNKYTATFTIDVEPTLLPKTGKKTAVDANVDHFDTTDGRTTLKPETLNPLYDKVKHYQRILTRKRCKNPRITNSKSYQVTRTKLQRTYERITNIQKDLLHKFTTNLYQQCDTIVIEDLDVKKMQMSKKAKNLHRSLFGKFRQMMEYKSQKFRKTLIVADRYYPSTQRCSSCGFVKSGEDKITLSGNKKYGTRHNEYICYHCGYKDDRDHNAVLNLLALAK

SEQ ID NO: 18948 - protein, 412 aa, unknown
  TnpB Polypeptide
MRSQKIRLRLSKEQERLAWWYSKVSRNYWNLLVDIDNRNNKGEFDDILGKNGNATYHSKVHGREVYSLNQSDYMYLAKIFVAKNYENDADNWSWYYQPNQSVIYKSLAKELVKVRRLNKGRLNFRTIGKVQPSFNVRCDMSSDKKRPSRIYLKDNGKLQIPTIGEVRFGSARPDFDLSSKKKVARISFDGKYWYLSYVEDVESTISDLPDYTDGIGIDLGITPLATMSDGTIVPNIKTFRRFRILSKRLKRLQRKLSRKYHINKCNKHNKTKNIIKLERQIKLIYRSIRNIRINHIRKFVSELVKKQPQYISIEDLNVKGMMKNKYLARDIANCSFYTIREQLIRKAKERHIVVRLIDRFYPSSKTCSNCGNYKVDLKLSQRVYHCEHCKMQIDRDFNASLNIAQTDRYTLA

SEQ ID NO: 18949 - protein, 354 aa, Chloroflexi sp.
MCKFRIYPTKPAQHSLENTLRLCRELYNAALTERREAYRMKGITLNYYDQQNQLPEIKEIRTDLTTIHSQVLQNVLKRVDLAFKAFFSRVKRGVKAGFPRFQGRNRYDSFTFPQGGWALKNDKLTLSKIGTIKVKFHREVLGRVKTCTIKREAGNIWFVVFSVETKIETPQYHSGYAIGIDVGIEHFVNLSNGEQVENPRFYRKAQKKLTKIQRKCDKVKRLSRRNPLKRKASLALSRAHRKVKNCRLDFQHKLSRNLVNTYSLIAVEDLNIKGLAAGMLAKSVNDAGWSCFIAMLRYKVAKTGSKLIEIDPRQTSQICPNCGVITKKELSVRWHSCPCGCEMHRDTAAARRGE

SEQ ID NO: 18950 - protein, 425 aa, Nostoc sp.
MRQVEKHIIKKGHEWFDYCTEITTTSRKLYNRSQFTQRQAFFYGWQTQSQGQLDSVFKQDENYKALPAKVAQLVLKQNADAWTAYYKALKEYKLESTKFTGKPKPPGYVDEKNLVKFNNQAVGKGQFNKGWVVPSMSPIRIPVKPGLLFNDLCEVRIIPKTGCYVIEVVYEIVENSQFFCSLNPQLAASFDIGLDNLATIVFNDPTIQPIAINGKPLKSINQFYNKQVAKYRGLIKVGTSQRIQNIVRNRNNFVDSYLHQSTKMIVDECLRLGVTHVSIGKNEQWKTHLNLGKRTNQNFTQIPHARFIEMLTYKLHRVGITVVVNEESYTSRASFIDWDNIPTYQPNTHLKHTFSGKRVARAWYVSKHGLKIHADVNAAFNIGRKCNPKGFDSLVSILRDRGCLVVHPRRITPLFWRVCAKSAVA

SEQ ID NO: 18951 - protein, 410 aa, Bacteroidetes sp.
VKLRIYPNKTQKILFKKCLNVSRMIYNRAIDEINNRYVNKQFEFENSKTCIFCKLLKVDNLYTCIKHKNKKLPWKLNITLPSIRKSVMLSDKQLKGTSEEYLSEIPYDTRQLIIKDAITMFKSASTNKLHGNITSFKLKHKEKSNRSIFWIDDKALKIINNKVTIFVKRLKNKSKIRLSAPNIKKLPISNTADCKILFDKGAYYLVLSTNTKNNIIYNKKEHIALDPGIRTFQTCYDPLGNILEFGKVDASKIKKIYTRIDYLKSLLNKVKNKTCKSISSRILKLNKHINGIVSNLHNQCASFLAKNYKHILLPSFNTSVMLRSKNLYKSVKRLMSSFSFYKFKEKLSYLCFKYNSYLYIVDESYTSKLCGNCGKLNNIGCSKIYTCQCGITLDRDINGARNILLQYLYI

SEQ ID NO: 18952 - protein, 407 aa, unknown
  TnpB Polypeptide
MKLTRKVVLKPNKAMQEVLDSLCDYRRFCWNEALELWNTLYEQRLIGLTEEERSMIQELVTSKQPLTAELQDLNALYPSPSDYTVRNLLTSQKDDWQYLLSSRVLQLAVKDLADAWSRFYKNSKEFGKPTYKSRKTPKQGFKTDRSRIVNGKLVLDKPQPYKGEWYPISFRGASLPDCKMSLCSITRVNSKYYATFVVEVETPNLIKTGKLNAVDVNVVHLDTLDGRFDLQSKHLNKLYNRVNYYQRVLARKRLENPDYKNSKGYQATRAKLQATYERIRNIQDDLLHKFTTSLFVNYDTVVIEDLDVKKMQMKKQAKNLHRSLFGRFRQYMEYKAIKFDKELIIADRFYPSTQRCSSCGFVKTGEDKITLEGNKKHGTKHHEYVCYECGFTADRDNNAVLNLLALA

SEQ ID NO: 18953 - protein, 358 aa, Deinococcus sp.
MFTPHLERLEMDQKRQRRHVLRVDRRSYAQLQAAVQQGLLLPCDTVVGSMRNGTVYRPAPWSLQHQQLLDDDRLQLGDLVIQGAMTHVPAPEFRALVQASPTYMTYPGLAPLVQQLRDQTPAFKDDLWQAGLRAAVAAGRVTVGVNGTVVGPGPAYRWLPQETRLTQHLGHWFVLLAFEAEATPRTTSTLVAGVDVGLNPLATAVCRDVAVAGIRRADLRGLRIEERLLGEHLLYAAARGALCDLTKWLAERAGVVVVEHLDLTTFASRYPQRSREHALTDWQMSWLPQELHARGIRLARVDPARTSQMCSVCPSFTLGTRVGRVFECPNGHQIDAHINAAQNIIRRWWATRRRAHQA

SEQ ID NO: 18954 - protein, 263 aa, unknown
  TnpB Polypeptide
VPIEDAVRRAKAFRELLKKGRAYTGKPEVRMVKITYSDNQDWGLENGGIMLRTHRGWIELRYRNNKQLYRYLYSGWRLSSELKLESNGRRVIAYLAFSRSFEITYDPSNVVSLDVNENNVTILVFRDGFLAGIIRVETSLGKIVIAYSVERERISRRRSTVGRDVRRKLRKLRERDRKRDILYKVASIIEDLARENKTVVVIGDIDGDDKERMERNRGRRLMHRIHRWSVSKPRKLLEDRPIHVVRVSEKGVPKRGSILDEED

SEQ ID NO: 18955 - protein, 277 aa, unknown
  TnpB Polypeptide
VPIEVGREPPKSNKKGYVKPNYKDKKGRIVNPRSIKQKDPIGDKEAFIDMGLNNLFAVTISDGSAMLIKGGTIKSEYYWWKREIATYQAVRYMLKNAGIPTWKEYHEKYLKAMYKRDERLRHLYITAIRFLADELHKRGVRKLYIGYPIMLSQNNGNEYNTNIWWYRKIVLWIVDIFMEYGIEVEIVLEDYTSKECSICRIRHKNGRKHRGLYECKKTGKKINSDINAALNIARRLGHRIRIARKIESYLVTHNGVKPLIPLQRANTRDPEIRNPTP

SEQ ID NO: 18956 - protein, 402 aa, Escherichia sp.
VKRLQAFKFQLRPGGQQEREIRRFAGACRFVFNRALARQNENHEAGNKYIPYGKMASWLVEWKNATETQWLKDSPSQPLQQSLKDLERAYKNFFRKRAAFPRFKKRGQDDAFRYPQGVKLDQENSRIFLPKLGWMRYRNSRQVTGVVKNVTVSQSCGKWYISIQTESEVSTPVHPSASMVGLDAGVAKLATLSDGTVFEPVNSFQKNQKTLARLQRQLSRRVKFSNNWQKQKRKIQRLHSCIANIRRDYLHKVTTTVSKNHAMIVIEDLKVSNMSKSAAGTVSQPGRNVRAKSGLNRSILDQGWYEMRRQLEYKQLWRGGQVLAVPPAYTSQRCAYCGHTAKENRLSQSKFRCQVCGYTANADVNGARNILAAGHAVLACGERVQSGRSLKQEPTEMIQATA

SEQ ID NO: 18957 - protein, 420 aa, Cyanothece sp.
MATKRITFRLYPNKEQNEKLHYWRRLHKDLYNACVVNRKTQYKKFGKSINYFDQQNSLPEFKKDWPEYKDLGSHALQATVKRVDFAFQRFFKIKSGYPKLKSSRRYKGWTYPDKAGWKIDSNGHHGKLTLSNFGTIKMRGKARDWGTPNTCTIIFKQGKWYASVTVSCDPKRETGKEACGIDFGTHHALAFDDGTVIDNPRFLKQSQDKINKTAKKSRKKRAGKKGVKGSRRWKKAVRKIGKIQSLVGRQRQNWHHQVSTQIVSCNSLVATEKLNLKGMTKKAKRGSKRKRQKTGLNRSILDVGIGNLKSLIKSKVTEAGGFYIEVPTRKVKPSQTCPNCGHQKKKTLAERQHNCEKCLYSCDRDVASAQVCLNWARGQELSSLDVESPSSTLCGSMRQLGAKKHNNAKKRQKHLAQQSG

SEQ ID NO: 18958 - protein, 417 aa, unknown
  TnpB Polypeptide
MRTAYKCRAYPDSEQVSVLNRTFGCVRVVWNRTLAWRHARYYGEQASTSFTQANAYLTAMKASEDLGWLNEVSSVPLQQAIRHQQVAFSNFFAGHARYPRYKSRNGRQSAEYTRSGFRYRDGRLLLAKMSTPLKFAWSWPDIDPAAINATTVTVSRDPCGRWYVSSAVDAPDPEQLPATGAVVGVDLGIKDFAVTSDGEKIPNPCRLARKERNLARYQRRLARRQKGSANRAKAKAKVARAHRKVRASRQDFLHRTSARLVRDRDVIVIEDLNVTGMALNRSLAKAVSDCGWGTFRRMIEYKAARGGRHVIVIDRWYPSSKTCSACGHLLAELPLSTRHWTCPSCGTRHDRDINAAKNILAAGLAVTRKPPGDACGAGIRHEGTPPARSAVKQESRPARTGILALRAGSSQTGVINR

SEQ ID NO: 18959 - protein, 463 aa, unknown
  TnpB Polypeptide
MARFKVPEGMTVQAFRFALDLTSEQASCVRRQFGGRRYAYNWAVRSMKEDITAYNDHGTESPAPSMIGLRKRWNQAKDAECRDADTGEVWWPEISKEAFADGIKGAVDAYWNWQESRAGTREGPRMGFPRFKKKGRDRDRVSFTTGAIRVEPDRRHVTLPRIGTVRVHENTRRLERLIAKGRARILAVTVSRMGAQVVAAFRVLVTRPQQPGVTSPDSTVGVDVGVRVLATVGAPDGTVLERVPNPRALETALKEIRHLSRERSRRTIGSRGYRRTQRKLTRLHRRVADIRAHRIHVLTTRLAKTHGTIVVEGLDAAGMLRQKGLTGARARRRGLADAALAEPRRQLRYKAGWYGCRLVEASRWYPSSKTCCRCSHRQDIGWAEHWICEQCGTRHQRDDNAAVNLARYEETAEQAGSAVGPVGAADKRGADRKTGPRPAGGDEARKGSRHEPAEQPRDGVPVR

SEQ ID NO: 18960 - protein, 368 aa, unknown
  TnpB Polypeptide
MKTYKYKIYNQSNLIRLGNLLDDMWQVHEYFHKWQRQRYKDGLPYANYNAMSAHLTALKRTTHPHWKALPSQAMQEELRRIDAAYVRFFKKFGGRPKIKKRHKFKSFTLKQAGWQIKNNRIMLTLRKWNAGKWKRDPVPYTFFKHREFHGNIKHVTLKRDACNAYWLCITTDFQDAEPLPTTGENVGADFGMKDAYLTLSTGEKIHHPQPLKQSLNKLRSLNKSLSRKKKGTNGWWRCVGQLARLYRKVANQRKDWHWKLATALCKRFDTLVLETLNLDGMKRLWGRKVSDLAFSQFVEILKYKCQKHKRHFVQIGQWRATTKPCSDCGHRNENLSLSDRQWICPNCGSHHDRDINAAINILQAGIAA

SEQ ID NO: 18961 - protein, 390 aa, unknown
  TnpB Polypeptide
MMVYIPKEVFMQYKTYTFRAYPNKTQEQLMYLTFTMCRTIYNSMLKAILKNYSSYIYEVEKCISNEKSFDSKKFSNSHKIPKVSTLKKQNENYKKVDSLALCAEYSNLVRGMELFYRGHSKLPKFKGRKDKNSYTTSQVNNNIRINKNKIRLPKLGFIKVRGMREIPCNFKIKRAIIFEDKKGKFYISIIFEYEESCNKRAIINSKVIGLDFKINNIFVSSDNFIPEFSTRFFYLLQDISKLQIKINKKNRFSKNYWKSINKLRNLHRKIVNIRSDTLNKLSSFLYKNYDLVIIEDISIQEIVFKLGNGKNTYNTGFMLFVKKLLYKFNEYLIKVNKWFPSSKKCSKCGKRKKKLKISQRIYRCKYCGLVIDRDLNAAINIKNEGIRILK

SEQ ID NO: 18962 - protein, 172 aa, unknown
  TnpB Polypeptide
VLNVEFEPQPSPNHGGSIGIDVGIKDFYSDSNGKVVSNPKYLEKSMRKLIREQRILSRKQKGSNNRNKQRVKVALVHEKMTNQRNNFLQKQSTMLIRENQTICIEDWKVKNMICNHKPAQYIDSAFWRKFFDMLKKSAWYGNDLIKVPTMYPSSQTCSCCGYKNPPVKNLAV

SEQ ID NO: 18963 - protein, 399 aa, unknown
  TnpB Polypeptide
MLKSYKYKIKPDEEQKVLLNKHFGAIRFSYNYFLNERKVEYETNKQTLNYNDNSAALTKLKKQEEFKWLKEINSQSLQHSLKGLDDAYNSFFKKRTGFPKFKSKHNKNSFKVLQCVRVIDSKLIIPKFKDPIKIIQDRKFKGEIRQCTLSKTTTNEFFVSILVETDHKKFEKTRKLIGIDLGIKDFVITSDGFKYKNNRYTKTYAKKLKENQQHLSRKVKGSNRYNKQKLKVATIHKKITNSRIDNLHKVSTELIKKYDTIFLEDLNIKGMIKNHKLAKHISDASWSKFISMLEYKALWNDKEIIKIDRFFPSSKQCNSCGYINQNLKLDIREWTCPSCKTKLDRDLNASKNILKEGIKIISSGTDDYRRGDEIRPVLTGTIGETSKKRILNGSETHQI

SEQ ID NO: 18964 - protein, 472 aa, unknown
  TnpB Polypeptide
MRHSLILNNNKFAGIEDTIDAFTAQKDDFLVDYAHIKYMGKLKTYDIRDDLVKNDFISRYNLKARMWKCALKDALQTIDMYWEATLTDVAGHIYRNDNLSDDEKQDTLKIIRKLEDVQLLFTHNTSNNYLLRRIRKSLGKRPRVNLHRSAAYDQDMYRTFNEKGTQYISIMSLDKRIVIPLKGNAKISGNIRIILNRENKTVEVHVPQDVKQQQATGEDQGIDWGITELLTDSDGDRYYTDFGDDIKAYADAVNRKGKNRNKLHALSRNKPKIAKKLKKYNLGKKKLNRQSRRFRAMLETNINNGLNKFLKKQPRRIGKEDLSNYKPPVGKGCFSRQTSFWVRSIMNDRFEFKSTVGGSDPVSVNGAYSSQTCFDCGWVSRLNRNGDLFKCCICNMMSHDDHLAAKNNKARLDDDEIKVWMKPYHVKAILVRRFEAMKNSKDFGATVSGKTLEPAQRKLTAVGQSKSETSRV

SEQ ID NO: 18965 - protein, 414 aa, unknown
  TnpB Polypeptide
MQLSQQIKINPTNEQTKVLWNLSERCRLCYNFALTERMENWKENKDKPKEERTYIDYEKQQNDLPSIKEKYEEYKWVYSKVLQYTLKTLDADYKSFFSLWKKGDANAHPPKYKGKKYFTTMVYNQSGFKCYNNKIGLSHKYDKTSLEFDIPEKFKFSKIYQISIYQKNNDFYVSVTYEKEEKPYIDNGLYQAFDLGVTKQTAVNIHGKFKEFKNKRPDKYWEKRIEEVQAKRDHCKRYSRKWSFYNKSLKYMKRKSANQLRDFQHKLSRKIVDNTKSNTIIVGDLSVKDMSKKSNKIENLSKKANKSIHRSMQNTGTIGRFVKYLTYKSEIVGKKTIDICERGTSKTCCCCGKQHDMPLTKRIMECDCGNVIDRDKNSSINIMLRFLSQNGLWAAYQQFVGNLRQTGILIGIHS

SEQ ID NO: 18966 - protein, 187 aa, Clostridioides sp.
  misc_feature (5)..(5): Xaa can be any naturally occurring amino acid
MIKIXALKLKKNITAITRKQFKVWNKRNNQVKDYVNKTCFYIIDYCIKNNIGNLIVGYNAKLEKSDNMERKIYRNFIRIPFGEIKGKLEYLCKIKNINFIRQEESYTSKSDFFANDFLPDINVDNVKKYDFKGERITRGQYKSSVGIIINADVNASLNILKKSQVVNLSNLQNNPQILKQPQRVRIS

SEQ ID NO: 18967 - protein, 338 aa, Paenibacillus sp.
MMKSPKEVNARMLHHKAFRFRIYPTEEQTALKKEWPWLKDVDSIALQSAVRSLADAFDRFFRKQNDPPRFKSKRNPVQSYTTKFTNGNIAVACDLLKLPKLGWVRFAKSREIEGRILSATVRRNGTGKYFVSILCEVDTQPLPQVDTAIGIDLGIKSFAVCSSGENVASPKHLRTYEKQLAFWLRRLSRRLKGGSNYLKAKQKVARIHERITNARQDFLHQHSTKWIRENQTICLEDLQVQNLMKNHKLAKSIAEASWSTLRTMLEYKATWYGRTISKVAKNYPSSQLCHVCQSRNPEVKNLNLRAWTCSGCGTHHDRDHNASMNILQEGLRLLAKTN

SEQ ID NO: 18968 - protein, 387 aa, Lactobacillus sp.
MVVETVQVIKGIKLRLYPNAQQKEQLWQMFGNDRFVWNQMLTMAKERYQNNPSSHFVNEYGMNYLLKRLKQEYPFLKASDSTSFLVVNHNLAQAFKMLFRHQGGYPRFKSRRSTRQAYTERSVCWVLAKRRVRLPKLGSIRTSKTTWLANGKIKRYTVCLAPTGHYYLSLQVAVKAPKHLSKTGKTVGLDVGITDLAISSDGIKYGIFNAKWAEKQATIWQRKYSKRRHQATIAVRQWNHHHKTMKKELSDYQNWQRAQQQKARYQVKITNQRKDYLHKLTTTLVKQYDLIIIEDLKAKNLQKNHCLAKAIANASWYQFRTMLAYKCAWYGKRLVVVKPNYTSQICSHCGYHSGPIREWTCPSCGTHHDRDINAAVNILHQGLKAVG

SEQ ID NO: 18969 - protein, 391 aa, Lactobacillus sp.
MVMEMVQVIKGIKLCLYPNAQQREQLWQMFGNDRFVWNQMLAMAKKRYQNNPSSHFVNEYGMNYLLKRLKQEYPFLRVSDSTSFLMVNHNLAQAFKMLFRHQGGYPRFKSRRSTRQAFTGRSVCRVLATRRVRLPKLGSIRTSKTIRLTDGKVKCYTVCREPTGRYYLSLQVAVAAPKHLSKTGKAVGIDVGITDLAISSDGVKYGTFNARWYEKQTVTWQRKYSKRYHRATVAVRQWNHNHKTVKKELSEYQNWQRARQQKARYQAKIANQRKDYLHKLTTTLVKQYDLIVIEDLRVKNLQKNHCLAKAIANASWYQFRTMLAYKCAWYGKRLVVVKPNYTSQICSHCGYHSGPKPLNIRKWTCPNCGAHHDRDINAAVNILRKGLKAVG

SEQ ID NO: 18970 - protein, 295 aa, Lactobacillus sp.
MLFRHQGGYPRFKSRRAIQQAYTGRSVCRVLAKRRVKLPKLGSIRTSKTTRLTNGKIKCYTVCLAPTGRYYLSLQVAVAAPKQLSKTGKGVGIDVGITDLAVSSDGIKYGTFNAKWAEKQATKWQSMYAKRKHRATVAVRQWNYNHKTMKTELDDYRNWQRARQQKARYQAKVANQRKDYLHKLTTTLVKQYDVIIIEDLKTKNLQKNHCLAKAITNASWCQFRTMLAYKCAWYGKRLVVVKPNYTSQICSHCGYHSGPKSLKIREWTCPNCGTHHDRDINAAVNILRKGLKAVG

SEQ ID NO: 18971 - protein, 421 aa, unknown
  TnpB Polypeptide
MTLVEQHQYSRDSEHFKELDHLCFLAKNLYNSALYQIRKYFFETNKYLSYKKLNKLSYELFPKDYSALPIKVSQQVEKLVDQNFRSFFALLRKKKQHPESDIKVNIPGYLDKITGRQELTFTNQAVSYNNRNTPKGYVRLSGLSFLVKTNVENIQFARIVPHKSYITIEIGYEVEEPKIISNDRYASIDIGVNNLATVTSNVFKPIIINGKPLKSINQNYNKRISKLASKNSTTLDDWFEWSKLMNLITRKRTNKIKDYMHKASKFIVNHLVENHISLLVIGHNDEWKQDTKFKKKNVTQNFIQIPFNQFIFMLKYKCRLAGIQVVMQEESYTSKCSFINQDFIPTYGINDDLFKPTGYRRKRGLYKNHNTSKDKTFINSDVNGSLNILRKFLTENVAWNEKIFSDCVEVCSTPTVYTVKV

SEQ ID NO: 18972 - protein, 382 aa, unknown
  TnpB Polypeptide
MIFLGKGSGMVANRAYKFRIYPNDEQKILFAKTFGCVRMVYNHWLDRKIRQYEENKTNVTYTICAKEMAAMKKTEEYGFLKEVDSIALQQSLRHLDTAFQNFFKQPKTGFPRFKSKKRNKNSYSTVCINGNITISNGCLKLPKIGQVRLKQHRIIPEEYRMKSVTVSQIPSGKYYASILFEYEDQVQEKELQKFLGMDFSMHELYRDSNGKEPAYPRYYRNAEKKLVREQRRLSKMQKGSSNRNKQRIKVAKLHEKVSNQRKDFLHKQSRQIANAYDCVCIEDLDMKAMSRSLNFGKSVSDNGWGMFTTFLKYKLEEQGKKLVKVDRFFASSQTCCVCGYKNAKTKNLALREWDCPQCGTHHDRDVNAAINIRNEGMCLVIA

SEQ ID NO: 18973 - protein, 407 aa, unknown
  TnpB Polypeptide
MKKSFRYRIYPNKKQEVKLETALSQACFLYNQMLDISQQVYLGEGVTLSKYDMDYIIKDFKTDQLHSQTKQNICKRIAEAYSHFFRRVKNGETSGFPKFKPRVFYTSITFPQYKQKIKNNKLILSRIGNVYIKEHRELQGDVKTLTIKKENDEWYACFSCDNVPIEIQEIKPISEVEGIDVGIKTFLVCSDKQEVDNPKWLRKSEKKLKNLSKKHSKKKKGSKNRNKSRIRLARKHQKVKRQREDFHKKLARNLAMKIKYIAVEDLNIKGMVRNHCLAKSISDAGWGQFFSYLKYYKTIFDGEIIEVGRFEPTSKTCSDCGHKQNMELRDRVFKCNECGLELDRDYNASLNIKQLAIKKLVAEKSKYNTEGYSEFQACGDSIRPCFVFEKIQNEAIVHETGSCRKIV

SEQ ID NO: 18974 - protein, 512 aa, unknown
  TnpB Polypeptide
MVKYKKSLDFYNQKYNELKNNIDLFSNKVPLYNIFLSNNKLVTDSWYDAKIYNSSVKDNNNYTFIDYDLERPKKILKCEKIILLPTKIQIKSLLNMLEGYRLIYNYTLKFIKTREYNNIHNKRIILDNEIIDSNEKLNYLKEIRDQKKNLSDNEKICVSLIDDVIGNIFKKDIRQSKISKLKEDDNNDMILDDKILKTYFLKDEIHRVSKKFKTPVHTLNYAVQLACASYKSCLANLKNGHIKNFNIRYIKSTKSSLIMDIEKCVINKKTFISSVVGKEIKNTQNLDYIANNDCKLHYNRNKNIFTLLIPKEIPEIIKKNEKNEYISIDLGLRTLMNCKTNKEYIEIGNNVKDKLKKYLEQEDKYKLIKNNKIKNKLLKRLRENIKNKVDDLHWKSINYLTSNYKNIIIGKWSTKNIISRKDSILHRMNKRIIQSISYYKLIERLKFKSIINNNNLIIKEEWYTSKTCTLCGNKKEDLGGNKIYSCVKCNLTTNRDYNGCRNILLSCIKSIN

SEQ ID NO: 18975 - protein, 404 aa, Halonotius sp.
MAEIRRTVIVKLDVTDSDTALLHETIDEYLWACNYVVDDAWQDDFKPTSKTKLHDRTYADVREQTHLQANLVQSARNKAAEAIKGVVERWKQGEQASKPHFTTPSIRYDKRSATFHDDHVSLSTVDGRIDAEYVLPPEGGNPHTTYLRNDDYEVTGATLQYRETTDTFFLHIGTKAEMEAEMPDDSDTEHSTVLGVDLGIEQLAVTSTGKFWSGGYLNHRRREYERIRGDLQRTGTESAHRTIERMGDRETRWVEDYLHRISKAIVQEAIAHNCDRIAFEELIGIRERLPGIKKFHTWAFRRLYDYVAYKADAEGIETTQVGPAYTSQRCSKCGTTLQENRRSQARFCCQKCGYEAHADYNAAKNIGFRLLRAGQKSPHGGATRHLALKSGTLTVNGEYSPAGQ

SEQ ID NO: 18976 - protein, 398 aa, unknown
  TnpB Polypeptide
MLGSVRRCRSFRFLVSPTVCQRAALVGLLGLQCELYNAALEDRRGAWRWEHRSVSYVDQCRTLTTLRAIRPEVLTCGVTVCRGTLKRLDWAFAGFYRRCRAGQAPGFPRFRSRSRWDSLQWEDRSGWHLDEASRRLHLKGIGGLKLRLHRPIRGTPKAITLHREGRRWWVTIRCVDVPAEPLPAAGRQVGIDLGVQVLVATSDADLLLNERFGARAAARLTAAQQVLATKQRGSQHRRRAVERVAAAHRHVRNCRTNALHQLSRRLVDDHDLIVHEKLAIQNLVRRPRPRPDGTGGYQPNGAAAKTGLNRCIHDAGWGHLLAMISYKAESAGRTVIAVDPRNTSRRCAHCGHISAGNRRGAAFRCLDCGHQAHADTNAAINILRAGRAQQHTTAQGRN

SEQ ID NO: 18977 - protein, 416 aa, Oribacterium sp.
MYLTIKQQVKNLSKDDYCSIKELCHTAKNLTNEAIYNVRQYYFVEGKFLKYEKNYSLLKNSSNYKVLNSNMAQQILKEVDGSFKSFFGLLKLAKQGKYDIKDCKLPHYLPKDGYTTLVIGFVRLKGNKLILPFSNSYKTDHKPVVITIPPILVDKKVKEIRIIPKANARFFEIQYTYEAVCIQRNLNKNNALALDFGVNNLVTAVSNKGRSFIIDGKRLKAVNQWFNKENAKLQSIKDKQHFGKETTNRQKSLARIRNNRVGDYMSKAARKVIDYCIANDIGTLIAGYNVTFQKKSHIGRQNNQNFVNIPYGILRNKLSYLCELNGITYIEQEESYTSKASFWDKDDIPVFDADKSKEYRFSGNRIHRGMYETANGFRFNSDVNGALNIMRKSSVVDISVLYGRGEVDTPVRIRVA

SEQ ID NO: 18978 - protein, 433 aa, unknown
  TnpB Polypeptide
LDRTVKNREIGEVLRRTKAKRKNQACKTYELKIDQSHLNAATKRHLSRLFLEAKWFYNSLVAQGKANRDGLWNANYKVRTVKVKRQNIFEERELKCLSSQMKQEIIGRAKDNIVGLSRLKQNGKRVGGLKFTGRIRSIPLNQYGVTYWISNNHIHLQKLKQPLRIRGLRQIPKDAEYANATLIQRNGYYVHVTTYQPKKAETFKQKSIGVDGGIRKQLVLSNGVEIEESVPITEKVRRLHRELSRKEKGRNRAKAQEKLNRAYDELTRQRRDIRNKISGKLTETFEIVCVQDDNVSGWQRLWGRRVLATGVGGLMSALNKAHTPAPVDRFYPSTKTCSRCGHVQDVGLDERVFRCEECGLVIDRNLNAAINNEREGLKQIGVPVVRREFTPVDTKTAAELVGYFNGIPRVRASLVEEAGSRASARKPTTSVVR

SEQ ID NO: 18979 - protein, 404 aa, unknown
  TnpB Polypeptide
MKRAYRFRLYPKAKQAEILEQTLTLCRRLYNAGLEHRIITYRSGQSVTYLQQQNELPRIKQEMPEYASVHSQVLQETLRRLDRAYKAFFQRVAERRNGGNVKAGFPRFKGENRYDSITYPQSGFKLLPNGHLQLSRVGEVRMFMHRSPKGKIKTLNIKRDKCGCWYAVLTVEKQTVQRRRAPVVGVDLGLRNLVALSNGEALLAPKFLRKSEKKLKRLQRWTSRKKKGSCKRQKVVLRLAKEHRHVERQRTDFLHNLSRDLARCDVVFEKLNISGMLKNHRLAKSIADASWSRLVQFTVYKAEEAGGRVVLVDPRYSSQECSVCHSRVKILLKDRVFVCPNCGLIICRDVNSARIILGRVGRGTAEFTPVENLPLLKSASALVEAGSPLLQVGEDVTKMCSYRS

SEQ ID NO: 18980 - protein, 311 aa, Okeania sp.
MVDASYKFRFYPTPEQESLLRRTLGCVRLVYNKALAARTQAWYERQERVGYKQTSAMLTNWKKQEDLDFLSEVSSVPLQQGLRHLQTAFTNFFSGRAKYPNFKKKRNGGSAEFTKSAFKWKDGQVSLAKCAEPLPIRWSRQLPQNCVPSKITVKLDPSGRWSISLRVNDTRDLRLNPTNKQVGIDLGITSLLTTSDGEKFANPKNHYKLHKKLRLAGKSLSRKTKGSNNYQKARLKVARIHAKIKDSREDYTHKLTYVANPTAPLQLIRENQTIVVEDLAVKNMVKNHNPPPSPPGRGARGVGSDATGEKW

SEQ ID NO: 18981 - protein, 529 aa, unknown
  TnpB Polypeptide
VQIRWRFKLQPNIGQQALMSEWLVTLRKHRNYCLAERQRGFETNNQKSDEPVMYQYGAFSDLDSQIEYGSYCPLTCPIVKHGVMSAELTKNSKKHGLVWGSASDIQSKRTTELRFESEWYSRINSDVLQGNLAKLDTAYSGFFQHKRGFPAFRKAANFKTFQFKPGQAKLTINRTSKKKRCYSHVYLPGCGSMRYLDSRTIPINADIRTVTVIKEADGWYMSVLLNLPESLPKVPDIETVKSAVGIDVGINKLISLSDGSFVQNPKFATNKKTRRQLRIRQRRVNRKIKGSNNRKKAGITVAKLHKKIADKRNNHQWKAANKVVGTAAAIVQEDLNVKAMKSRCKTKREKGRFTRNALCGSIPVDTIAQSSPPGILPVADFAANGQSAKRGLNRSISDASWGELFSKIAWLASKSGKPVLSVNPKFTSQECSDCHHVSKDNRDGEKFICESCGHIDHADTQASRTILRRANLKFVTKDVKKLPGDSRKVTLVRDDSASNGKQNQGKNRTSKVIPEKRILFEQLCLQLFN

SEQ ID NO: 18982 - protein, 499 aa, unknown
  TnpB Polypeptide
MKQTVKNYSKGISLVDLDELSEIARRYSYVKNEVFDRYGSIAGLHYLSYPRQIRDEWVKAGCADKFGLQARYWKQAFDEAWANIKTNWSLCFRKVRRSIHQSENLTQDEKKYCYYLLKSPSFLYKVITNQSFEKPPAIADLEISPRVNKWLKSKIRKYQNKKPHDKKMRSFVVDSAMYSYSGEGRLEIMSLVPHKRISLKLSSRIEFEGDLRIVLRGNRVEVHYARDIEPEQIWEKEREIAIDKGFTTLITTSEGGQYGTEFSQLLKTESNRLSDKGKRRNKLVALAKKYERQGKHKKARNIQRFNLGRRKHREQKAAGRARVESYVNQSLNQFYQTSRPSTLIVENLNFKIWARKLSKKVKRYFSSWLKGYLQERIDFKSGINGVALATVNPAYSSQTCSFCGYLDRDNRNGDRFHCLNCGRVLQADHSASLNLLQRLHDPEITVFTPYAEVKRILEDRFRASVGGSLRATGSTRTPDTLMGQSESELLIFAGVCADL

SEQ ID NO: 18983 - protein, 405 aa, Aquificae sp.
MTKAEKIKQSLKQTKEKRKLQTPKVFQLKLQNLSKSDIETLNRLFLEAKWFYNYLVADIDNRLNKKAEKLKEVKIKTPNGFEKRELKILGSQIKQGIISKIKDNLKALKRLKEKGYKVGKLKFKSDFKSIPLKQYGITYKIDFKRNRIKIQGVKKWFRVLGLHQIPENADIANAYLVKKPSGFYLYVVCYLWKEEVLKEIKQKQVSIPVGIDLGIKYQLTLTTGEKFRWYIPETKRLKRLQRILARKKKGSKNYQKVKALIQKEWEYITNKRKDVINKVISYLKRFAFIAVQKDSVKSWHEGLFGKQVQNTGIGGITARLKHLATLIPVEFVPKFEATTQTCSKCGFKQKLSLNQRTFKCPNCGLEIDRDLNSAWNILKLGLKQLAKKNKAMADRLSLTPRFARG

SEQ ID NO: 18984 - protein, 376 aa, Salmonella sp.
MKRAYKYRFYPTADQVELLAQTFGCVRFVYNSILRWRTDAYHERQEKISYPQADKRLTTIKSMPEYSWLSDVSAVPLQQAIRHQQTAFSNYFAGRTKYPTFKSKRHKQAATFMSTAFKYRDGKLYMAKSKAPLDVRWSRGLPSTPSSITISRDAAGRYFVSCLCEFEPVSLPITASTVGIDVGLKDLFVTDTGFKQSNPRHTAKYAARLALLQRRLSKKARGSKNRAKARLKVARLHAKIADCRMDALHKATRKLINENQVVCVESLKVKNMLRNPSLSRAIADASWGEFTRQLQYKGEWAGRSVVAIDQFFPSSKRCSCCGFTMKKMPLDVRKWSCPECGTDHDRDVNAARNIKAAGLAVLAHGEPVNPESQYAA

SEQ ID NO: 18985 - protein, 517 aa, unknown
  TnpB Polypeptide
VSSVNRAYPRRPYACFDEDGKGIDIHSILKEIRCEATECARQAVKHLTWKNMVRVADYKGMKPSVAGSRMGIRLPPGKRSKGRSRFERMVREYAVSQLRSWNERFLAYRGGSSKYVSAGWRRTANALPPRTLAPRLSLSTTDNQYHSISVDGNTTVLRMVVSGRWVSFYFKTPERFLEKGVRPIAPDIIVNSHGQVMFNWFAEIPVERAEFSDRYVVGVDVGRNSAAFSAVVDVTTGDVVEASGGNRRIRTLENRISRTENQIRSLHRAGRHEEAALHREGLANRRNELSILVGQEVADLSFRYDNALVAVEDLSGIRNTMSHGRWVRGQMVQRATDMVEADGGRVMKVNPAYTSQRCHVCNTQMDMRDSRRPRCLVCKVTWDRDENAAINIAKRAPHGKACSTRKRHASPRHRRNSKGSVTPLKHPLSKGRPTPKAPQNRSINHELEHSRRTRYEKRKEGAENITTCAVGWSPVIKTDVSVPTVGSSCEDVQTTSRTTTPCSATSIDTACCRKNKV

SEQ ID NO: 18986 - protein, 500 aa, Sulfurihydrogenibium sp.
MKSLKNKEEKLYRALPYKHFANKSKLKTIRILFKLYQKDANTIFKYIWEKFIKSKTPITKRENIKQIKTILSERYKYTIFNYLVYPTYSSYLEIAKNYIKNLITHSTLSEENKLQLYILNKRGLWLNPPDEIQIKVKKENKEETKTIKISQQNKHLIKKLFHRYLKTNKIPKFNNAPLIVDNKTGEFQQSKTSKKFKQWIRLSTHIKRQVLYIPVEETDYYNQRKGKDTNIFHITKNDLGTIEIKRVKEIKKENTDTQENIIALDFGLKSLFTTNKGDLLGRNFFEKIKEYADKIDKLQRNLQRQKINPKQSKRYIKLNFKLKQFTKNEIRRIINRIVERYKLSIILVENLKYFLKQVINKFPNSVKRALIRIGRKEIKNKLKEISEEYGIQVVEINPAYSSQTCNNCGYVDKENRKTQEKFECRLCGYKLNADVQASRNLIKRFDKGMFVCGRKQALRLQIEEFIANLQLERYKCLWSKALRLLTQNPYFKGLSDSSLT

SEQ ID NO: 18987 - protein, 424 aa, Bacterium sp.
MKEKVTVTAKLQIYLGEEERKQVIATGCLYRMACNEVSRYVLDNDCMNFYEVNGALYHSLREKYGLKAQMSQSVIKTVIAKYRTVKGNGHGKRLIEFKANRYDLVHGRDWSFTDGLVSLNTVKGRVKVPFATQGMEKYLDAPDCKYGTATIVAHRDGKALLHVPVTLEVEKVDSPSTVVGIDRGIRKLAVAYDGKKTTMYSGNAVKNRRAHFSRLRKELQQRQTPSARRRLKAIGNRENSWMRDVNHCVSKALVESNPSGTLFVLEDLKGIRGATERVCIKDRYVSVSWAYYDLEQKLTYKAALAGQKVVKVDPKYTSQRCPVCGCVDKHSRDKSNHVYKCSHCGYQSNDDRIAAMNLYQLGLEYLKGTEHPRIQSPSGRPGDGGCSQPPCDVTPRPKGRKKVGAQPGVRTTGQTQAHKSSVCG

SEQ ID NO: 18988 - protein, 361 aa, Escherichia sp.
VKRLQAFKFQLRPGGQQECEMRRFAGACRFVFNRALARQNENHEAGNKYIPYGKMASWLVEWKNATETQWLKDSPSQPLQQSLKDLERAYKNFFRKRAAFPRFKKRGQNDAFRYPQGVKLDQENSRIFLPKLGWMRYRNSRQVTGVVKNVTVSQSCGKWYISIQTESEVSTPVHPSASMIGLDAGVAKLATLSDGTLHSRIANIRRDYLHKVTTTVSKNHAMIVIEDLKVSNMSKSAAGTVSQPGRNVRAKSGLNRSILDQGWYEMRRQLEYKQLWSGGQVLAVPPAYTSQRCACCGHTAKENRLSQSQFRCQVCGYTANADVNGARNILAAGHAVLACGEMVQSGRPLKQEPTEMIQATA

SEQ ID NO: 18989 - protein, 194 aa, Hymenobacter sp.
LLRLINQLPDLKTECPWLKLVNSQSLQMALRNLDNTFTNFLKGRGDYPNFRRKANGGSFQIPANGQVDFEKGTISLPKFKSGIKAVLHRRFKGTVKTVTIRRTPTGKFFASVLVDPNQQAETLVPPTPDNVVGIDLGIKDFLVTSEGEAVANPKHLRKNIARLKVLQRRASRKPQAGASHIRRELGRISAAATI

SEQ ID NO: 18990 - protein, 498 aa, unknown
  TnpB Polypeptide
MKKSATDSFVLTMPFRYEPWQRDCLDKAFRIAGGIYNSLVANRKKALEQLEKTKAWRANQRALRAAYEAEGSGSKSELKELYQTRKDMLVEYGFTEYAFHARVQKWRKPYAHLVGTHVAQKIATAVWRQFESYLFGNGELISFKPWTELRSIEGKTNSAGIRYKDGMLFAGKKLNIPVVAPRNDYEREALACRVKYCRIVRIPWKDGRWLYRLQLILEGAPPVKRNVDGSEKHPVGSGRTGIDIGTQTVAAVGDKAVELSELAPKANLTEKQLGRILRRMDRSRRTMNPEFFDPGTGEVIRRDKLPPELLDRQGRRKWVESEAYKRLAGQRRYLCAKLARTRRCEHQAMANRMLGYGDRFFVETMSFKGLAKKAKRQEPKPGEREKRRKRYGKSVGNKAPALFLNILEKKVQDKGGQFHRIDTWSAKASQYDHTDMSCKKKDIGERWALLSDGHRIQRDLYSAYLLKTPYLRPPQESGPAKIAVSGLTVCALYDTIKM

SEQ ID NO: 18991 - protein, 416 aa, Crenalkalicoccus sp.
MFLIWAARRRYYLNVRFRGYTFALRPTQEQAAQMAQAAGVCRLVWNLALEQRRDHWRRYQARTGNNLNHTTQCRELTLLRAEFDFIRAVHVTPQQRALKALDEAFRRAWAGLGGYPQPKRKGLNEAFSHHGREIAVEKINARWGRVRIPKIGWVRFRRSRDIEGSLREATFSLTPLGWQVSFGCLLEGERPDPGGAVGIDRGVAVALMLSDGTSYAVPESLAAVERKVASAQRVVSRRKRGSNRRRKAIQRVARLRAKQARIRKHWAHRATTEIASRYGTVIVERLRTKDMTKRARLAGVAQKRGLNRAILNVGWHQIETMLAYKAARLVKVNPAYSSQTCASCGTVDRRSRESQAVFACVACGHRDNADRNAAVVILNRGNTPGVEVAGCGADEARTVQVAKSLGNPTPSGGGRC

SEQ ID NO: 18992 - protein, 185 aa, unknown
  TnpB Polypeptide
LHRPIAGEVKTLTIKQENGRWYACFSCLVDPEPLPENRAAVDIDMGLESFAVTSDGEIIDNPRWFRAAQKGLRRKQRHVSRCVEGSSGWRKACQLVAKLHRYVFHQRHDFQHKWSRELVNHYGFIAVEDLRVKGLAGGRLAKSVQDAAWSSFMAKLSYKAESADRLLVKVDARRTSQQCSCGAPA

SEQ ID NO: 18993 - protein, 433 aa, unknown
  TnpB Polypeptide
MILTYQYRLQPTPDQAATLSHQGELLRRHWNYSLGERLDWLRRTRCQIDRCSLIAEPVGEIPLKVDYYSQAAKLKDTKSLFPEYKNIYSDCQQQNLMRLDKAWKRWLIPDKNGKRGRDVLGGSFPPKARFGRPKFKKQGDICSITFPRVNAPKAGAHLIDGNLKLSKIGEIPVILHRPIPDGFEIKQATIVSKADGWYVSFSIEDNTVPLSLPIDEIKSAVGIDIGLEKFLTTSDAEAIAVPQFYRKAQKVLARKQRKLARQEKGSNNYKAQANKVARLHLHIARQRKDFHYLAAHYLCANYDLIGFEKLNIKGLARTRLAKSILDVGWRTFLNILQAVAVRCGKHTQEVDARGTSIQCFNCGERVVKNLSVRVHNCPNCLVSLDRDLNASLNILQRTVGQPFAACGGLGNTLPVKQEISFVNLRSPRQSVLA

SEQ ID NO: 18994 - protein, 224 aa, Thioclava sp.
MIGSLDRDREILHRAFLHIILLCVGKYGFPGPASSCQRLSAATRARKISRPALRAHRRALARRHAKIAARRKDFLHKASARIAGQHRLIATEALTLRNMTTSARGTAEAPGRNVAQKAGLNRSILDTAPAGFLNMLRYKAEEAGAEFLEAKTRELKPSQRCLDCGAVRKKTLAERHHDCDCGCRLGRDEAAARVLLSWGLEESHRRQNAETINPAGTVGDQAAA

SEQ ID NO: 18995 - protein, 441 aa, unknown
  TnpB Polypeptide
METVRIYRLKDLPTTVFQRLREAQMEAARVWNLCRDIHLEARSQGTRWPDRDDLQKATKGKFALHSQTVQMICHAFLANIETTRQVKKQNPKMRYPYKEKRFYPLLWPEQAVCVEPGRVVLPMGRGRRSIVLRVDVPKNAGACKIVWNDGYQLHVSVSVETASEPPGTARATADLGQIHLAAVTMDSGVALVVSGRGLRSAKRRLSKALGEIARKRSRCKKGSRRWWKLQRARAKVSARVERQVRDLRHKGTRKVVDFCKKHGVGALYIGNPDGVRSRKAGRHHNQRMSQWEYGRDIDYLTHKTEQSRIVCFTGTERGTSSRCPECGHRQRPKGREWVCKNCGFHGHRDVVGSANMHPIAYGGKIAFPQRITYLRPGPVKGSRGGIKNRPRSREPERSSRPDTGHGSLFPRCPGESAGQPPAAVSYRARVSQEAGHAAEIV

SEQ ID NO: 18996 - protein, 423 aa, unknown
  TnpB Polypeptide
MEIQRTVTVRLPDDADLRATLAAFRAVQNAVSGDAFNAGKPLAAVPLQRLVYGRVKGIINSQMTITALRLVAGAYASALKGRNRRVRDEARRKARHEAKGWRYKPRQIKPLGVCHFDCMAALFLVGVRGRDADFRADGTLSIWTVGGRKRLSYTIVEAHRALFDAAKEIDSVTVIERDGHLIGRVALTLDAPEAKGVAPVGIDLNETNALVAVDADGRELFISGLATKVRNRRTMQATKRVQRKLATRKAEKRDTRSTRRVLQRLNGRRSRRTRDTARVTAKTLVGWAPTDAVLVFEDLQMARPEKGLTWGVALRRRLSLWQHAAIRRAVTSKAEMAGLAIAYVNPAYTSQDCAACGRRGVRRRHTFTCPHCGHTAHADHNAAVNIRQRFVQSRLDGPPSVGPEALPVFVTGEGKPLPLAWSN

SEQ ID NO: 18997 - protein, 351 aa, Microbispora sp.
VQRGAGTAGGRPGRGSVRADDAEGQGRWSFSSQQATLRRLDKAFAAFFTRVREGRRPGFPRFKGRGWFDTVEWPKDGDGCRWDSQPERPAATYVRLQGIGHVWVHRHRQVQGRVKTISVTRVGSRWYVVLSCDDVLAEPLPRTGAAVGLDMGVASLATTSDGDHLDNPRHLASSAGRMAAAQRALTRKKRGSNRRRKAVARVAALHAKVRRQRLDYAHKQALTLVRGYDVIVHEDLRIVNMTRSASGTIEQPGRNVAAKSGLNRSILDAGWGVFLRVLAHKAESAGREVIAVNPANTSRTCSRCGHCAKENRLTQAQFRCQACGHEAHADVNAAKNILRAGLALRDAAEAA

SEQ ID NO: 18998 - protein, 179 aa, unknown
  TnpB Polypeptide
MPRLWAKVNGINHDISVKTAEFIMDIAALYNADVIIFEYLEKKGKKHGSRKQRLHLWKSQEVQRIVTDKAHRLGMHIARICAWNTSRLAYDGSGRVLRGKQAGFSSYSVCQFQNGKVYNCDLSASYNIGARYFIREILKSLHEKERLALEAEVPQAAKRSTCTWSTLIRLNAELVSSVA

SEQ ID NO: 18999 - protein, 442 aa, Blautia sp.
MQIISSYGVELRKQNIPIRQTLEIYRSAVSYLIGIYVQVWEELAEIPDAKRRFNAAEHLVHTTKKNHACFDFDIRFPKMPSYLRRSAIQHALGTVSSYKTRLDLWEKTDGKSGKPKLVYENHAMPVFYRDVMYREGAEGKDEAYLKLYDGHDWKWSCVRLDHTDMEYLRKCWSGKKASAPTLEKRHQKYFLRFSYKEEVTLTKTPVKEQIICSVDLGINTDAVCTIMRADGTVLGRRFIDHPSEKDRMYRTLGRIRRFQREHGSAQTQGRWAYTKRLNTELGKKTAGAIVRYAEENHADVIVFEYLEMQGRISGKKKQKLHLWRKRDIQKCCEHQAHRKGMRVSRICAWNTSRLAYDGSGAVTRDWENHSLCTFQTGKRYNCDLSASYNIGARYFIRELLKPLPATERSLLEAKVPPVKRRTSCVYADLRELHLQMEILKVA

SEQ ID NO: 19000 - protein, 403 aa, Spirulina sp.
MRQVVKVRLYPTSEQKLKLTKAFGSVRWLWNYCLALTNETYKATGKGVSGMELKKQLPLLKQQEETAWLSETYSQCLQQSVLNLSQAFVNFFEGQAKYPRFKSKQGKQSLQYPQNVKVLENGLQFPKLGAIKANLHRLCDGQVKTVTLSRTQTGKYFASILFETNEPELTAKTEGKAVGVDLGLKHFAVTSDGQKIASPKHFRKHERNLRRKQQKLSRKQKGSNSRNKARRLVARAYEKVSNARQDFLHKLSRKIVNENQVIIVEDLSVKGMMSNQNLAKSIADSDWGMFQNFLAYKASRDGKTYLELSRWFPSAKTCNHCLNIVDSLPLDTRSWECPKCHTHHNRDLNAAINIRNEGLRVLASGTGATADGGSVRRNRGRKSSTVQLPTKSETHAVPTVSTG

SEQ ID NO: 19001 - protein, 275 aa, Spirulina sp.
MRNVVKVRIYPTTEQQVALSKAFGCARWWWNYALNLNNETYKATGKGLSRQGYNDRLPALKKEFPWLAQCYSQVLQSVSLNLSRAFISFFEGRAQYPNFKSKHGKQSIQYPQHVKLLDKAIKLPKIGDVKAKFHRVFDGKLKTVTVSMSRTGKYSASLLFDDGLPKPEISSQGKAVGIDLGLAHFAITSDGSKFDNPKPLKKREKNPETQQQKLSRKQKGSKRRAKARRIVARVHERIANTRKDFQHKLSRKLVNENQVIVVEDLSVKNMVKTTI

SEQ ID NO: 19002 - protein, 394 aa, Spirulina sp.
VLNLTYNYKIIPTKEQTEKIELNLTVCQSVWNYALVQRKLWYNSRSCQVNACSIRSEYIVAPFEYPNYPTQSANLTQAKKTNDFLKSGNAQAMQQTLRKLERAFNDMKSKGLGFPRFKRNMKSFNLVSSRIEVNGNKLKMPLLGEVKFVKSRDIPEGFKIKQVQVIKKASGYYVNLAIELDVNIPTPIPHGHALGIDVGIQSMLATSDGLTLPRPKFLDKARRKIKLLQRRLKNKDKGSNKWQKLQHRIALLYEAVANRRKDYHFKLAHQLCDGVGMVFVEDINFTAWSRGLFCKQSLDMGLGQFFTILEYVCSQTDTYFAKVNPDYTSQVCPECGTHTGKKELSQRVHSCSECGYTVDRDVAASIIVKQRGLTAVGAPVVKQPSNGVLSGTSV

SEQ ID NO: 19003 - protein, 398 aa, Spirulina sp.
VFRAYKFRAYPTEEQKLTIAKSFGCCRWYWNYALNLCQETYQTTGKGLSYFTIKGLLPNLKEENLWLKDAYSQCLQVVAKNLSTAYKNFFEGRARLPRFKSKKERQAITYPQNVKLEGDYVKLPGKVGKLYCRQHREVVGKIKSATVSLNPDGKYYLSILVDDGCEQPNPSAEGKVIGLDLGLTHFVVTSDGSKFDNPRHLAKHSRNLKRKQQNLSRKQKGSKNREKARKRVARVHSRIARCREDFLHKLSRKIVNENQVIAVENLNVKGMVKNPNLAKAISDCGWGMFCTRLKYKAEGEGKIYIEVNRFFPSSKTCHVCLNQVGNLPLEVRSWSCEHCGTVHDRDLNAAINIKNEALRILELGTRSTAFGRERKSSGRTLVLLDAVPVEQGSRSSIA

SEQ ID NO: 19004 - protein, 653 aa, unknown
  TnpB Polypeptide
MEIKEKPPEDFFKGIKTSLKSVLKHPDINTPKITNAVILCNKIVINVLLFMKLYLLNYYETHHALPVIDKVFVNSCMKIMCNEKPQGRPAKKEIKELKDNLTAFNKTDFEPLIQKDTLEYTHMNTILDYLTIDILTMYENNIKLHFVEYVERYVNVVWKKKFIVSKIRKMNITKKEKDAKINKLCNQLRKIKNDLLNVETTQYKSNIYYHTWINQQKQHIIPVKTFKKNLYYDLQCSPMDYFPCMIKMMKQVEKEEQTICNVFPMRNEIIPKHIRLDTTTLVHLLMTKKQGNKSDYLTEGNLKRNENKIWKFFFRTERKCFHKKHYEFHHMIETDGVSCSLLLLRKDLIGKKLPMMKKGINNEEYIDELKDYSQLKNKKIVSIDPGKCDLIFCVDADNKEANKFRYSQDQRRKETKKKKYSKIQLELKQEKINGKTIIEWETELSRLNRKSLNITKFKEYIQKKSEINTMLFQFYEKYIFRKLRLQSYRNTKKSEQKMLNNFKRIFGNKKEVVVCFGDYEQKQQLKYKEATKGKGMRTLFRKAGFQTYLVDEFRTSCRCSKCEIGICAKNMVMTNPRPYKTGNILVHGLICCKNGCGYWNRDVNGATNIYKIAYNAINNKERPNYLSRSNNSSGFLEEFPKPKFTRSAKGKPF

SEQ ID NO: 19005 - protein, 389 aa, unknown
  TnpB Polypeptide
MIITKIHKRKLYANDSRNKFLESRLVLSCEVYNHCIALHRRYYRLYKKHLGLFTLQKHITKLKKRDKKHWCLLNSQTIQEITERIDLSYKAFFRELKKKNNRKTSTPHFKKRSMYNSFTFKNTGWKLNDNDIIIQGKKFKFNKDRKINGDIRLVTVKRDSLGCFWICVCVKENVNPRYSQTGNSVGLDFGLKTFLTTSDNEKIDSPEFLKKDLKMLRRKSRNLSSKVKGSHNRIKAKTELSRLYQSISDKRNDWQWKTAHSLISKYDMICVEDLNMKAMQKLWGRKIGDLALTEFYQKLEYLCSVENKKFVKIDRFYASSKICSCCGHKLEKLSLKQRTWVCPSCNTKHDRDINASKNIKMVGASTIERVKCKSGLPAVHVCISEPHCL

SEQ ID NO: 19006 - protein, 331 aa, unknown
  TnpB Polypeptide
MHTVQLLLKTSKYERHEIDRRFHALAHLHNVCVKHARKCMIRLQHDKRYAELRQLYNELVKKEKMSKEEKSQKKKLAKQLAACRTEQGLSKASLEHYLKVCGKQFSKLLSSQQVQAEADRVWCGVERCLFGNGKELHFKKLMDFDTIGGKSNKNGARFDLDAMYVNWLGLSLKCYLPKSENSLSYVWESLKGKISYCNIKRLMFSSGWRYYAEIVVSGAAPTRVSIGTSTMGIDPGVSTIAGVSEDACVLEELAPNAIQYEKKIQKISQSMDRSRRISNPNKYNEDGTINRSNRDPWKYSKNYVKMCRLLKSLYRKSMLISLTVTENCVIS

SEQ ID NO: 19007 - protein, 371 aa, unknown
  TnpB Polypeptide
MKTVATIKLKIKHNKELLDMSKTFLQAVQYAIDKGFEAKISNRFKLHHLVYRDLRQWLPADFACEAIAKASENLKSIKFKKKPIMKSCPISFNRKLFVFSFEKVRIATFTPRKRKDIPITVPEYYWKYLDWRYKTLEIIKDRKGRMFFHITFSRDIHAVTSCCSDRIIGVDVGVNNLAVCSDGKVFTGYKTKIVQYQYLRRKLQSKGTKSATRKLKAVSGKQKRYMRGVNHTVSKEIVASADAIVLENLKDIRKSRNKFMGKRLNRWLNSWSFYQLQSFIKYKAGREGKRVVFVNPYMTSQTCSGCGKHGSRYFDSFFCNHCGFSSQSDYNASCNLRRLHVTQPIVSADDTKGQLTTAVDVRDNIPESPRL

SEQ ID NO: 19008 - protein, 348 aa, unknown
  TnpB Polypeptide
MIYRHLKLKLTKVQEESVHRWIPSLTSIWNWAICKIENDSKGGIYYSQKEFQNILCGTSKVLNIPSHTVQGVLISAHMAWQMCYKKAAKKPRFKGNRNRLNSIPFPDPFRVPKDNRITVPGLGRVRYHKQDIPEGKIKCGRVVKRASGWYLCLFIDAEPAKISGTGEGAVGIDPGYKHLLTLSTGEKVAHPKELQHSIKRIGQAQRGGNKRLVARLNERIANQRKDRNHKLSHRLVAENAVIAFSKDNIKGLSRAGFGKSVAAAGHGQFRLMLAYKSRAGGRQYIEVPSKGSTRTCSTCGASTGPQGRAGLSVRQWTCSACGTPHDRDVNAAINTLNAALGMSVERAI

SEQ ID NO: 19009 - protein, 400 aa, unknown
  TnpB Polypeptide
MEILQAYKFQLRPKAGQESLMRRFAGCCRFLWNKALALEKETYAADKKRLGYHALAGKLKDWKKEEETAFLSEAHSQILQQALKDLDRAYKNFFAKRADFPRFKRKGVHDAFRYPQGFKLDESNSRIFLPKIGWIRYRNSRKIEGTPKQVTVSLSAGKWYVSIQTEREVPEPVHPSQSVVGIDMGIARFATFSDGSSIRPLHSFRKHEKKLAKLQRKLAKRVKFSANWQKLKAKIQHLHRTIANVRNDFLHKTTTIISKNHALVVIEDLKVRNMSRSASGTLEAQGKNVRAKAGLNKSILDQGWYEFRRQLEYKLKWLGGVLIVIPPQYTSQTCSHCGCVDRANRPTQAKFSCTACGFECNADHNAALNILAAGQAVTACGAGRAQAPALKQEPACGAAH

SEQ ID NO: 19010 - protein, 375 aa, Clostridium sp.
MIKALNIRLYPTEGQIILMYKHIGCMRFVYNWALSAQIENYKINNKKLSVSELGKELTILKNTEGYEWLYEVSNATLKESIRDLDKAYKNFFNGSKFPKFKRKKKSKSRFYSRYDKVYFKENFVNLEKIGKVKCRVDYDINLSTITKFKNPRIHFNGRVWVLSVGVEIPVEKTKLNDFSLGIDLGITQLAITNIDNLDTKNINKTHTVKRLNKKLKRLQRQCSRKYEKNKKGGSYQKTKNIAKLEKKIKKLHSKLKNIRINHIHQTTSKMVKAKPFRVVMEDLKVSNMMKNKHLSKAISEQGFNIFINQMKYKCENYGIEFIQVPTFYPSSKTCSHCGSIKKDLKLSDRVYKCSCGFSCDRDKNASYNLANYGLV

SEQ ID NO: 19011 - protein, 362 aa, Chloroflexi sp.
MKLVAKVKLNTNQKSKNALLDTIRTANQAANYISDIAWSEQTFKKYDLHKLVYYDVREQFGLSAQMTVRVIAKVADAYKLDKETKRTFREYGAIAYDSRILSWNLDNQTVSIWTTQGRMHIPFSAGKHQLELLQSQQGESDLVFFRDEFYLFATCEIEEPDPADFEDVLGIDLGIVNIATNSDGNIYAGDALNQKRAERKAFRKHLQKVGTRQAKRLAKKQSGRESRFSKHVNHEISKQIVNLAQGTNRAIALEKLSGIRGRVTVRRNQRYGLHSWTFYDLQQKIEYKARLAGVRVIYIDPRNTSRTCPCCGHVSKSNRPNQSTFKCVRCGFADHADIVAAKNIRQVAVTQPYIPDMPDQMA

SEQ ID NO: 19012 - protein, 448 aa, Moorea sp.
VKTPAKVIRTDKWQLNPTPVQKLLFGETIKVYRRACRYLVSIIYTHWTELGELTVDQLTPAVEKLMHASAKRPNIKYPQFNKTFYKFPSYLRRAAIAFSAGQVSSFVTRYREWQSGSRKRKDAKPPKLNADTGCYPALYKGQCYKLHGFEQVEIKVLNGSDWVWTTVQITGLRERHLVATNKIMSPSLVFNERYCHLSVPFTCKPEKRKTKANVTAVDLGINTTATVAVVTHDGTVIHREFIHPGRDIDRRDKRLKSVSMRASKTMGFGGKLHKGFCSKTYEKCQRINHQIGHIVSKRIVEIAEKFNSEAIVFENLKGWKPKGGRKRSNLRQRFHGWLKAKIRNFTETKWAELGGKVIEVVAAYTSKLAYDGSGTVKRNSKNYALATFPSGKCFNADLNGAYNIGARGVIKLTRRNDGEGRSSKRSGRPPRSWASLCELWVRDNSKLA

SEQ ID NO: 19013 - protein, 442 aa, unknown
  TnpB Polypeptide
MQKRKFTVVTQLHLNNNKDVIDYLESSRKDYARAYRETYHTFKNSTKFNQSRYDTYLQNKYGITTRTANSIILGATGRYNAIKALKKYELQQTKSKLNYLVDKVIPNLECKRREYVGTLIKGVSINLVQYRNLKLKLFSKKVKANRLRQRIENLEWQLSTGKFRICFGTKHLLKTDYNKFVDKRDSQLSYIGAKAETACNQMLQLRFSPKLNQFLFQLRKDFGGYKTIHGSYVYGRVYFNHHKKEILNILSTGSSPLSYRFIKRNGRWYLYCTFEIVVEDPQFVTTDSYGTIGLDFNKGFVTLSETNKYGHLVSTGFYPYRFKRGYATKTDLESIVNKVVTYATKTGKDICIEGLDFKNTKSKVESKQGKKYNDLLHSLAYSTFVQLVESMAFRNLVYVKKVNPAWTSWIAKQKYCSPMKLNIHTGASYVIARRGQGFVDTV

SEQ ID NO: 19014 - protein, 430 aa, unknown
  TnpB Polypeptide
MILVERHQIDKKHPSFKECDFLSYISKNLYNSAIYHIRQFYFNNNTFLNPKVVNGKTINYWVFDKTQLYHELKDTKEFRTNEHPEYNGYSCNTKILKQTMIQVSRVFKGYKKALKTYSNNPSKFTGRPKLPTYKQKNGRNEVTVPKEAISFVKHKGYAKIANTDIFVKLVNVTEETTKEIKIVPRASHYEILVSYEAPEAQLKPQSGKLAGIDIGLNNLVALSSNDIAMKPSLINGRPLKSINQYYNKKAAKMKSLLPKDVFWSKALSQLTRKRNNKVQTEMHNISTYIVNELIKHNIDTLIVGNNKGMKQGIGIGRKNNQNFVSIPFHKLRRMLEYKCKKAGIHYIETEESYTSKCSFLDMEDMRKQSVYKGNRTHRGLFIDSNGNEINADLNGSLNIIRKVAGNAYFVYQNTSDLVEGYAVSPFKVTV

SEQ ID NO: 19015 - protein, 388 aa, unknown
  TnpB Polypeptide
MRRTVSIPVDLPSDRFLPLLAECAEVFNRHVAWALAARTYSKAKAHHALYAEQRSAHPAVPSALIQTVRDTALEAIKATAFAKRPRKKPTSGLRYDRRTFTLRGAQITLSCIGPRVRAILPVPEYFRTVYDTWACKSAMLTYARGSRQFWVRLVFEAPDPPRQEGASAEAATIGIDRGLYHLAVTSTGQTYSNSHVRAAQRRYLHNRKTLQAQGTKSAKRRLRRQSGREQRFSQSVNHVVTKAIAHLPATTFVLEDLSGIRVQRRGKKINKWLGSWPFHQFGVFLTYKAEALGKRVVYVDPRYTSQKCSRCKRRSSAYRHKSRFRCGSCGYRAHADRNAADNIRDDYILSSTPQASEEQAAVNRPYVSPLGQRIERVGTSHTPRGCGR

SEQ ID NO: 19016 - protein, 285 aa, unknown
  TnpB Polypeptide
MFPTIRPPRHSPEYIRGYISYKSLYSSPPLEGARLSVVNPRSIKQRDPIGDKEAFMDMGLNNLFAVVTTDGSVMLIKGGSIKSEYYWWKREIATYQSIRDMLRRLGISTWIYYHEKYLDAMYKRDERLRHLYITATRFLADELYRRGVRKLYIGYPIMLSQNNGNEYNTNIWWFRKIVLWIVDIFMEYGIEVEIVPEDYTSQRCSICGAKHKNGRVYRGLYICRKTGKKINADINAALNIARRLGYRIKIAKKIESYHVTHIGVKPLIPFQGANARDPSIETPPL

SEQ ID NO: 19017 - protein, 486 aa, unknown
  TnpB Polypeptide
VRQKVRIDGVKHTGASVFLGVDHCGNPCWTRNPERVMVWLCDGWRTRFNQRREQRPRNVPVKDDATGEVVDWLKEPLGGPDVADLLSDREARLQCSWMAAVPSPILASTNKVESSEWFAGLKRKKTIGGRIPGFKSRHRGLGFVCWRNASKTGNAIFHKTGWKSGVVVITGMNPPRWVKPGEKAHWRVIIHVRVSQPIRPYTSVHIDWTHRGLVFVNMPLPLPRTGDGVIGLDRGCVHTLASSNGTFMDMPKPSKAESKRLKYLQRRMARQDHINEARGGKTAKFASKRRQRTLIEFNALQGRIIRRRNDWIEKTTTRLAQENILVAMENLDVQAMTRRPKPRPDPNRTGHYLSNGAKAKAGLNRSILSNNWSRLMKRLQDKMDANGGKLVIVPAAYTSRTCHKCGHVAKENRESQAVFHCVECGYRANADTNAAMNILGRALAKTGGGTASDVEEPHWRSDEASTPSTQAGSSFGVRAVKGIPRL

SEQ ID NO: 19018 - protein, 815 aa, Streptomyces sp.
VAAVTGPAVAGPGGGGPPRFHRTRLPGSAGREPVRQLQPVRPQQRLVGQQLRRRPVGHDRAAGEDQRARAELHRVRQVVGDHQDGDVQRGQDLGELAPGGGVEVGGRLVEDEDLRLHRQHRGHRDPAPLPERQVVRGPAGVLGHADPFQRPGHPGFQLRAAQPGVGRAEGDVLADGGHEELVVGVLEDDADPLPDLRHVGAVHRQAGHPHAARAGREDAVEVQHQGGLPGAVGAEERDAFTALQGEVDAEQGLVAVRVGEGEAGDLQGVRHIVRGHRVHHSFQGTTGFSRWENWTSRCVTEWRTSRARPDVLSVSDRTRCAYMLVMCLCRGRVRRDRAAVHRHPVGTPVEEGERRVIRAYKFLLRPTVRQEQALEEMLRDHCSLYNGALQERRDAYRHSSRTTLRYGDQSAQLKEIRAFDPERQGRWSFSSQQATLRRLDKAFAAFFRRVRAGQTPGYPRFKGVGHFDTVTFPKDGDGCRWDSTPDDRPTRVRLQGVGHVRVHQHRPAKGRVKTISVKREGGRWYVVLACDEVPVDELPPTGAIIGIDLGVTHFLTTSVGEHVANPRFLQAMSDELAEAQRHLATFPRRTKQRTKKHRAAARKVAGIHAKIRRQRSDFHHKTARALVRGHDVIAHEVLNTAGMTKKPAPRPDPERPGVFLPNQRAAKAGLNKSILDAGWGQFLGILANKAESAGRRTIPVDARNTSRTCPPSLGGCGHTAKENRVTQATFRCTACGFTANADHVGATNVLDRAGLVLCAAAWPATQETRAFTRGWSHPSRHTAARVASAVTGRASADDHWCRVAAEPSSTGMTPV

SEQ ID NO: 19019 - protein, 562 aa, Streptomyces sp.
MGLVGAVEGGRGVRGVSSAVAASQPLRAPFVVREGTGCAIRTRLKDLNGQDVEVLRLVGGHLGSLASRDLRVYAQAGFERNNRSWAVRKQALTAACSSRWAGAITKSTHDQYALARRAQAAHLHRLETTMKVIRHRLAQPLGAKGSKRAPGGYQSAREWRAKAQRLRVLEARHTQVAADWETGRVRVVRGGKRLATTRHHLEEAGLTEYGWRVRWEAARAFFSADGESGKRFGNETIRVTPDGEVSVKLPRPLEHLANAPHGRYVLTGRVEFRHRGEEWADRVSSNRAVAYEIRHDPVRDRWYLTASWKRPAVQTVPLETARAHGVIGVDMNADHLAAYRLDAHGNPVGEPRRFDYDLTGPASHRDAQLRHALTRLMHWAVRSGVGAVAIEDLHFSDSTTREKHGRRKRFRQTVSGIPTGRLKARIVNMAAEHRLTIVAVDPAYTSQWGAQHWQKPLTTANREMTRHDAAAIAIGRRALGHPVRRRTATPRIHQSDGYGHRAAQATPSARGREETRPSIPGQRTRFVPPDTEAKAGDQRAQHRSGHATEHEPWAQGSLPLSL

SEQ ID NO: 19020 - protein, 422 aa, unknown
  TnpB Polypeptide
MRYKAIKTKLYLNENEKKFLLFLMHEAKHLYNQALYHVRQHYFEYSTYLSYVDNYKLLKDNIHYRTLSTSLGQSVIKKVDEAMKAFFGSIKSNKSKKVKLPRYLKKDGFFSLVDRMVYKPNDHEYILPRGNFIKKISKDFEDISKQLSKHALSLLEIETLSLKIDTPKCISNKRIKEITIKEKYDGKYIEVIHVYEDDDVINEHNIKKEVMGIDFGYNNLAMCALTSGHHLLIDGLRLKSMNQRYWKRISKLASLRENQHVLTKRMISLIEKRNHQMTYGIYKAAKLIIEHAKKEHVKEIIIGYNEGFKDAKTNKKNNQWFKSIPIARLRDRIISLAEANDMSYQVINESYTSVASFIDQDAFHQKEYSGRRINRGLYESKKGILINADLNASLNMIRKCNPDALGTGFKGWNTPKRTYLFG

SEQ ID NO: 19021 - protein, 184 aa, unknown
  TnpB Polypeptide
MLNSNLFWINRSVLDKQGLKTSIKLDKLWTKRNNIISDYILKSCRYIVDYCKANDIGTVVLGFNKDMNRNINLGKKNNQNIAVLPMGKIKSTLEYMCKLENIDLHIQEESYTSKASFFDKDNMTKDTVFSGRRIKRGLYKTKTGNILNADINAALNIPRKSKVVGLSALYTRGFVDVPKRIRLI

SEQ ID NO: 19022 - protein, 392 aa, Lachnoclostridium sp.
MRKLLKSFKTEIKPTPEQIQKINKTIGTCRFVYNFYLSHNKELYEEQKKFLSGMDFSKWLNNRFIPGNPAYQWIKEASSKSVKQSIMNAEKAFKRFFKQQSRFPKFKKKNRPDVKMYFVKTDAKTVIPCERHRIKIPTLGWVRLKEKGYIPASKQGYVIKSGTVSRKAGRYYVSVLIDIHDTEKPQLNNFGLGIDLGIKEFAVISDGMVKKNINKTRTVKKLEKKLKREQRCLSRRYEDLKKRSKKKGEVTRQNIQKQILKVQKLHQRIDNIRTDYINQCVNEIVKTKPSYITVEDLNVSGMMKNRHLSKAAASQKFYEFRTKLEQKCDENGIELRIADRWFPSSKICHECGNIKKDLKLSDREYICKCGYRADRDFNASLNLRDTAAYKIA

SEQ ID NO: 19023 - protein, 265 aa, Okeania sp.
MKSIRTKLKLNNKQKTLFAQHAGYSRWCYNWGLSLWNAAYRDGYKPNPSFGMLRKRKLREVFTNHTKPLYPWMKNLSSKVYQYAFPSECFPTGCYANANINLGEAFKRFFSCGMLPYGMLRKRKQGLGKRPRFKKKGRSDSFPSECFPTGCYANANTIDNCGKPIELNGWSHKLPFLGIVKTYESIEVTTQKITISRQAGDWYLSCSYEFTPTATSKTTEVVGVDLGIKTLATLSTGEVFKSVLPYKKAQNKLAKLQRPRMRSIN

SEQ ID NO: 19024 - protein, 380 aa, Amycolatopsis sp.
VGSSRAGARGRPRQRIALARAFGCARVVYNDALRTRQDAYKAEEKISDTDVQKRVVTEAKRTPERAWLSDVASVVLVQACQDARAAYRNWFDSMSGTRKGRRVGRPRFRSRKDNRQTIRLTRNGFSVKPNGKLYAAKIGDLRITWSRELPSAPSSVTLIKDAAGRYFASFVVGVDHEPLPETGTDVGIDLGLSTFAVLSNGKTIESPKFLRRAERKLRTAQQALSRKAKGSNNRAKARLRVAKAHAKVRDARTDWAHKNTTALIRDNQAVYVEDLAVSGLARTRLAKSVYDAAWATFLRMLEDKAQRYGRVVRKIDRFYPSSQICSECGRVDGPKPLSVREWSCPCGAHHDRDLNAAKNILAAGRAERLNACGETVSLSA

SEQ ID NO: 19025 - protein, 392 aa, Clostridiaceae sp.
MMIKAIKVRLYPTKKQEELMFKSAGVARFSYNWGLYYLNNCYKDNKKSLSIGELRKVFTKLRNSNEFPWLKEVSAEIPQQALKDLGEAFSKFFNKEADYPKFKKKGKCEVSFFHLNNKFKVENKHISLEKIGYVKMKDEDRLPVGNYKKDKIKVLNPRIKHNGKFWYLSLGLEFDDMEKQKLTNESIGVDLGIKDLAIVSNINKPFKNINKSKEVKRLNKKLKRLQRKVSRKYDKLKSEKAFQKGERLTKTQNIIKLEKEIKLVHKRIADIRLNHIHQTTNAIVKTKPSRIVVEDLNVKGMMKNKHLSKAIGEQGFNKFLTILKYKCEWRDIEFIKADKFFPSSKMCSCCGTIKKDLKLKDRTYKCPNEKCNLVLDRDKNASINLANYKLVV

SEQ ID NO: 19026 - protein, 573 aa, Streptomyces sp.
MGKRRKKRALRPITAPFTVAAPAGARIRDRLRLSAADAEVLTLVGSHLGRHQRADLAERVAIGQVPVKRNQRAERKKALTAVSSSRWAGAMTRASEDQYQLSLRCLYDEAAGLRRAIGTIERRLAVPCQKRVGRVRGYADQNERFHKQRRLLALKTRLAAVEARIASGRPAIAAGGRRLLKARHNLADAQLTEAQWRRRWEASRLFLTADGESAAPFGNYTITVDPHDGTVSLVLPEPLRHLANAPRGRYRLTCTVRFSHRREEWLDRVTANRAVRYDIAHDPARGRWYLDASWSTDKTVLPTPEEIRASGTRMLSVDLNADHLAATVLDEYGNPVGEPVTIPLELTGPTGRRDGRLRAAITRLTVLAHEHGCAGIVIENLGFDDARATGRETMGRGRHGKRFRRTVAGIPTARFRERLRGMAYHQGLIVIAVDPAYTSIWGEKYWKTPLQQQTRTTVTRHHGAAVAIGRRGLGHRVRRRPGVTAPDQRIGQRRATGQTAPLPRPRGTTSPPRTAGTPHQGDKTRPRRGDQLVLFPDLEDRSRGHQALTGPVYGDLANTGQLPQERSHHLPGA

SEQ ID NO: 19027 - protein, 481 aa, unknown
  TnpB Polypeptide
MPRQRAADAPRIVHRTSRIALRTTSAQRRRCFGLLRSGGDVWATVLDFNEIRRRNGATLVVTYQGLCRELAVAGAGCFGELSSVGARSILRRYADAWMSAAKRRGAGDTRARYPRRKKALVPSRYYAGTFSLNGRHLTLPTARGAAPLLLRLTRDVPYEPSTVRAVTLVADGHRLSVDVTAEVPVDWYAVGTGPDPEQSAGVDLGIIHLYALADQEGALLVSGRALRAESRLHLAESKARSRAATRRAPSRGQRGSRRWRRYRARTKVLEARHQRRLKQARHEAARAVVDYALERRIGTLVVGDPRGLLRRNAGVRQNRAISEWGVGQLISSLTDKAEVAGIAVVLVDERGSSSTCPRCAGPVPKPKGRSFSCPACHLNAHRDIVGAANIASRSPRGGIVIDPAGLATMHRRAGQHLPGRTRRDPRRVAMGNRARSKGLWPAVARPFAVPQDADGESLALDIDPSAARNRIPSLIQGEGNW

SEQ ID NO: 19028 - protein, 389 aa, unknown
  TnpB Polypeptide
MRKTYKYRLYPSKSQEAKLLSTLDVCRILYNSCLVDRKNHYESTGKGLSRIRQQEILTADKKRVLLLKEVHSQVLQDVLFRVERAYQGFFRRLAEKQGKAGYPRFKPEGRYDSITYPQEPGFRIEEGKLKLSKVGHLKIKMHRDIVGQVKTCTILKDGNHWYACFSVEYEPEKRPVPAQSTGIDVGLKSFATLSDGTEIANPKHLRKAEARLRRTQRSLSRKKKGGANRKKAKLVVASLHRKVRNQRLDFHHQEARKIVNAFGLIVAEDLKIRNMVRNRHLSKSISDAGWGSFLLILASKAEEAGCQFEKVDPRNTSVNCSSCGEKVPKSLAVRTHRCPACGLVMDRDHNAAINILQRATAGTAESYAWGEPVLSGHSLNQEATLLAAW

SEQ ID NO: 19029 - protein, 468 aa, unknown
  TnpB Polypeptide
MRIKRTNNKQFFRKKIADLLPNNAKYKTINKSINNTWFNSKFTKSKSDNTPLFPIMNNDDNDNTPLLRVRKVEILFTNPQKNIINEWLQLYKYIYNVTVKYIRLNPNVSKTFYTLRPIIKNSLNSSIKLRIKKSKIPSHTIDNAINDVTKAYKTSFALLKNKRINHFLVRYKKNNSKESLTLESSCFPSYVLLKKKEKQDKITDIDERNNLQDIDLNTAPNTFCPSIFGKEIKSVEAINQIFHDCKLSYHKGTDKYFIFIPIERNREISQNQDTAILDPGMRTFQTCYSKNNIIDYGNNVSIEIKKQLKKADKYNKKESYNRRVYYRTLNHIQNLTNELHHKVSNDLCKRYNCVIIGRLSTIGTNNKKTSCLTKMTKRILQNLSHFRFREILKAKCEERGVKYFEVNEDYTSKTCSHCGNYKKDLGGVKTYKCKKCKITLDRDQNGCRNIFIKNYTSIKEDLIKKGYM

SEQ ID NO: 19030 - protein, 418 aa, Natronococcus sp.
MEVKRTVPVKLSVPEDRHDDLHQTIEQFNHACNYTVRHGRNDDGYLILNKSTIHDKVYHDLRDETDLPANLCVRAYSKSVEAMKSTVADWKKGNSRPLPRFNEPSAVYDKRTLTIKDRSATLSTINGRVAVDYVLGDYQKSYLDDDDYEKRMGTLHYREDEEAFYLHIVIKKEVEERDGDKVLGVDLNLKNVAVTSTGSFYDGGELLWGQNHYFRVRRSLQHKGTRSAKQVLRRLSGRENRFVLNRLHTISRRIVEEADAHDCSYIAVERLTRIRERMDNRNDQVKRQIHNWAFRELQEMLAYKASEYGIHVEQIPPAFTSQTCSKCGHQSSTNRDSKIGWFECNDCGYSVDGDYNASKNIGLKLLTLPEGKRPSGLGDGHLALKSGTLNGNGDYTAYDVSSADRESTDKPTTSVVGR

SEQ ID NO: 19031 - protein, 187 aa, unknown
  TnpB Polypeptide
MAVCSNGMTFKNINKTKEVKRLKKVLKRKQRQCSRKYEQNKKGKEYVKTKNIAKLEKQIKLIYRRLSNIRLNYIHQVTTKIVKTKPSRVVMEDLNIKGMMKNKHLSQAVAEQCLYNFKVIIKYKCELYGIEFVEADRYYPSSKTCSSCGSIKKDLKLKDRTYKCSCGLNINRDYNASINLSRYGLAI

SEQ ID NO: 19032 - protein, 364 aa, unknown
  TnpB Polypeptide
  misc_feature (285)..(349): Xaa can be any naturally occurring amino acid
MSQVLSHKIRIEANNKFKTYCRKAFGCSRKAYNWGLAEYKKELEKYKEAMSLYRKELGRYEEAPLQFSQVPEKPRLPSVLDLKKRFNSIKAKDFPYMYEVTKYASQQPFIFLGKALNRYYDAKKKKIGKVGFPVFKKRSETSGSFYLGGDQVELQRFKTCSGAEKKSGKLFLRIPNFGWVKLTEELRFSGHVNNVTISQDGDEFFASFSISVQEESIEKKPAPKNTGVGIDLGLDAAITLSDGIKIYAPKPLKKNINKIKALQRKLSRKQHPKTKDDERKYSKSXXXXXXXXXXXXXXXXXXXXXXXXXXXXXXXXXXXXXXXXXXXXXXXXXXXXXXXXXXXXXXXXXQIPFSISWLLLRKLA

SEQ ID NO: 19033 - protein, 439 aa, unknown
  TnpB Polypeptide
MEITQQIKIKPTEEQEKTLVNLSEKCRLIYNFALKERIEAFENNKEFVGYIKQQNDLPEIKKEYPEYKWVYSKVLQYVLRILDADYKSFFSLRKKGDKNAKPPKWKGKKHFTTMVFNQSGFGIKDNKVSFSHKHPSGIKLDFELPKKFDWLNQKPIKQINIYKKDNDYYVSITYENPSKKYKDNGKYQAFDLGIIKQTAINNQGKFIEFINPRVDKYWDKKEKKIQAKRDTYSKGKKKKSRKWKLHHKVLCRIKRKKSNQIKDYIHKLSNKIVNNTKANTIIVGDLSVKDMCNNKKTKARRDKKIAEGKLVLRKKQEKGLHRSQHNTGYISRFVSFLTYKAELLGKRVIEKDEKNTSKTCSLCGNIKDDLKLGDRDYICDCGNNIDRDKNSTINQMCLYLSQNVSWTHFQEFLGNLEKNQGIVVTKPMISNLKEAPYIS

SEQ ID NO: 19034 - protein, 386 aa, Actinomadura sp.
VKIVVQVKLIPDAAQASALERTLYTVNKCATQVSAASFTAYGLKGSVKDLRSMAYGDLKARGLGAQATQHVIKRVADAYTTLRANIRAGNLGGEGSPRRRKATSKPVVFRPDAAHTYDDRCLSWNYDAQTVSIWTVDGRVKNVRFACSAAALKQLTEYRKGESDLAFRDGKWFLAATCEVPEAERYQPKDWLGVDRGITNLATTSDGDNHSGRRLDRYRRWQARKKAEIQARRTRSAAQLLKKRARRESRHATHINHTISKTVVAVAQRTERGIALEQLQGIRERVTVRRDQRARQSSWPFHQLGAFIAYKARRAGVPVIEVDPAYTSQRCPRCGHTAKANRPSRDAFCCRRCGLAGPADVVAGVNVRDRARSAWVFVNMPPPVPA

SEQ ID NO: 19035 - protein, 277 aa, unknown
  TnpB Polypeptide
MLPRERSLSWQAKPNHKRKKRWICAARCIWCWLCAALCCWSASASRWCSSAASTSAARTPRASPPWTARPWSSRAAIIKRKTPSTRRPTPRPFWSRAPMPASNKSARLKKLEKRLVREQRCLSRKYENLKKGESTQRANIQKQKLKVQKLHHKIDNIRTDYINKTIAEIVKTKPSYITIEDLNVSGMMKNKHLSRAVASQKFYEFRIKLKAKSKENGIELRVADRWYPSSKICHCCGTIKKDLKLSDRTFRCHCGYVEDRDFNAALNLRDVKTYKIA

SEQ ID NO: 19036 - protein, 411 aa, unknown
  TnpB Polypeptide
MRTAYRCRAYPDEGQQAALNRTFGCVRVVWNRTLAERHRLWRANRTGMSYAESDRALTAMKQDPGLAFLSAVSSVPLQQALRHQHQAFAAFFAKRARYPRFKSCRSRQSAHYTRSAFSLRAGVLRLAKMGAPLKFVWSWPDVDVTALDPAMVIVCREPDGRWYVTFTIDTDDPEPLPQVGHAVGVDLGVTHFAATSDGGKIANPRHLDRKARALARYQRRLARRQKGSANRAKAAGKVARTHRKVRNARSDFLHRASIRLVRENDLIVIEDLNVADMVRNRHLARAIAGCGWGEFRRQLAYKCQRYGRRLVVIDRWYPSSKTCSACGHLLTDLSLSTRQWRCPSCGARHDRDINAAKNILAAGRAVARGSLGDACGADVRHSGTSRVRSAVKQEPQPARAGIPVLQLLGGE

SEQ ID NO: 19037 - protein, 393 aa, Acidimicrobiaceae sp.
VGQCRTFQFGIHPICKQAIALDRVLRLQRELYNAALEARRGAWRWERRSVSYFQECRSLTELRGARPEVLEFGGTVCRGTLTRLDRAFDSFFERCQRGEKPGYPRFKSRSRFNSLQWDDTKGWKLKADVRRLHLHGIGDVRVHLHREVTGTPKAITVKREGRRWFVSIRCVGVEPTPLAPTGREVGIDLGIVNLVATSDGELIDEGRFGRNAAAALARAQRDLKRKQRGSNRRRRAVERVAQHHRRVRNQRRDLAHKVSRQLVNDFDLIVLEDLKVANMLRRPKPRLGPNGTFEPNGAKAKSGLNRSIQDAGWGQLTWMLAYKAEDAGRELHIVAPQFTSQRCSRCEHTDEASRRSQAVFRCTACGFEAHADINAACNVLWAGRAQRALARAG

SEQ ID NO: 19038 - protein, 262 aa, unknown
  TnpB Polypeptide
LGELRNVTVSHLAGKWFISIQTRREVERPVVQATSAVGIDVGIDRFATFSDGSHIEALNSFRRHEKRLARAQRCLSRKVRFSSNWEKQKGRIQRIHACIANARRDYLHKASATISQNHALVCIEDLRVRNMSKSAAGSVEKPGKNVRAKSGLNKGILDQGWAEFRRQLEYKLDWSGGWLIAVPPHHTSQTCPRCGHISADNRTTRAKFLCAVCSYENHADVVGAINILARGHRVAACGEVVPSGPSVKQEPAEATTQEMSHA

SEQ ID NO: 19039 - protein, 235 aa, unknown
  TnpB Polypeptide
VKIKQHRQIPENQRIKSATISREPSGKYFVSVLVEYDYETPERHLDKTRALGLDYSSHSFYVDSQGREADYPKFYRNAQNVLAKEQRKLSLMKYGSNNYEKQRVKVASIQEHIANQRKDWVHKLSRHLADTYDIICMEDINLQGMAQCLTLGKSTNDNGFGMFRDILKYKLEEQGKRLVKIDRWFPSSKMCHVCGCINENLKLSDRVWTCSCGEVLNRDHNAAINILNTGLNQID

SEQ ID NO: 19040 - protein, 596 aa, Photobacterium sp.
MKQELTTTIETRIPKLLLPLVDDVMLKYSEIYSHAKWCYFARKNRGETINKPSFCREFQIPSRLYNAIKGDVDGMIQSQLSNIQRYIVEAHQKIADAEAYIEEQQSKIAVLNAPSRQSKTNTVALDKAYRAIRGKRRLIQRKQSAVEKWLSQLESGRVSVCAGSRKVFSKQHSLFENGYRSHKQWLKDYRLARNDEFYIKGSKDEATGNTLCRLTKDGDQYALTLSLPESMKEQGFLQNLVLNNLTFNYKSSILDDAITDNQRRAELGSKANLSSQFILANHTKNIEEMKIRNNNIVSNMMKRGDSKQKVDDAIKSYEKRLTAFSAPTKSNLLCDFGQAISYRFKHDSKGWRVIVTITRTVDQPYITNAINGCIGIDLNEHHLAVTEVDSNGGKVGTEDLFFHKNKSHDISSRQTRTALEEAIKMVIAKAIATKKPIAIEDLDFKVSKANLKKGFNQTFNRTVSSMITARFLAVLKARCIENGIELKIVKAAYTSMIGRIKFANQFKFNIHAAAAMSIARRGMGKIDLNFPSKVIIVVRNLQMTFPVPEDTGKYDAFGYYKLVKAAYDNWLKFTLVLLRENTKVLTQGGYDEDIFI

SEQ ID NO: 19041 - protein, 653 aa, Photobacterium sp.
MNSIYYTVSTRTPKAQDALVNRVLDFECKLFAGATGAVLNDIKRRVLAGEKLDELKPTSYKTPVSRHFEISTTTAYCAANFALAMYRSRDTNTREQYLPKAKNDLAKAQRNFKSLQRRLKKANSELKELRSANSHAANIGRKVSEITRLRLKISGSNRRRQITATRVARLEREIETGQYSICLGSKKQFKARSNLNKNGYSNHESWAQDFQHMRLSGCNFIGDPTAKGGGRQFGLYRDTSGYKLMFTLSDKAREKFSNEINSSEYKQFFTKKDLVIKNIGFARSKDLETVEHVLGLHKYRSDKEKAFTDYKKKNPLEVKLSEYRHKYIKDVVKDLKAKAKDESDKALAADLREQASLLTGLLTDFVYTKDQFSKGSGCSVSPKLLRDHKGWRFDISFELECKPQAESYADMKVIGVDTNYDHFAAAVIGENGRFESSVTLPITHVHNGKIDNDAIWIQAAAIVEEAKNASASIALESLSFVKKKQELYSAQNKRYNRMLSSFAYRFMTDAIKRKALESGVEVIEVAPAYTSFIGRALFNELTGSVHESAAYVIAVKAQNIQLKSLKKQQTAFDFSKIKIPVFKKGRMLDIFTNNTYRADHVDEACRSSLVKVPELFYKFKQFETEQYRRSKAQTKLWRDNLSLTKTYDLEIPF

SEQ ID NO: 19042 - protein, 380 aa, unknown
  TnpB Polypeptide
MIKTVKRTYRFRIYPNDSQKELIEKTLGCCRQVYNDFLSMCIESYEANHNRIVSKYDLIKLLPEYKETFPYLKEVDSIALQQTVVHLFDAYMNFFRHNAEFPKFKKKKNDYGYTTMNINNSIRFVADDIQIPKVGRVKIKLHRKLPESFKFTMVSVSRKGKYYYVSLLGEEEYFDYAEYIKESLDPNNSIGLDFSLAHLFVDSNGNHLDMPTYYQDSLTKLAKEQRKLSRMKKDSSHYKKQLLRVRNLHEHIANQRKDFLHKVSRKLANAYDYVFVENLDLQEMGERKDNLKFGITIFDLGYGTFLNYLKYKLEWLNKKLVKVDKFFPSSQLCSYCSYRKTDLTLNQRSWVCPICDFKHDRDYNAAINIRNEGIRLVTSN

SEQ ID NO: 19043 - protein, 388 aa, Lentzea sp.
VKIVVQVKLLLDAVQVSALAATLHGCNESADWVSRIAFEHGVFREYALRKHTYAELKARGLGAQAAQHVIKKVADAYAALHATIRAGNLGRPGSKRRVKAESKPIVFRPDAGQPFDDRCLSWNHDAGTVSIWTTAGRMKDVRFAGSPDQLKTLREYRKGESDLVCRDGVWLLIATCEMPEEPLFEPVDWLGVDRGIVNLATTSDADNFQGRGLGRYRRWHARVRTELQARRTKSATRRLKKRARREQRHSTHVNHKIAKQIVAVAERTGRGIALEDLSGIRDRVTVARHQRATHSSWPFHQLEAHIRYKARRAGVPVLVVDAHYTSQMCPRCKHTSRSNRPTRDTFCCRRCGLAGPADVVAAVNVRNRARSAWVHVNAPEPAAVQATG

SEQ ID NO: 19044 - protein, 435 aa, unknown
  TnpB Polypeptide
MKINKAYKFRLEPNAEQEVILNNLVGSARFVWNQVLAVSFEMFAKNEFINATNLVNKIMDIKANPEFAFLKTSSNAVSLQQKVRDLASAWSRFFDPKVHARLKENKKKPKKPKFFKLPDGTEIQLRPLMPRFKRKSDGCDSIRLVQFDKYCRVEGNRVKLPNGVGFVKFRKSQDILGIIKNVTISKKSGHWYVSFGTERELEQNPIHPSKTAIGIDLGVSKLVTGSNGQCFKPKSSFKANQGKLAKLQRQLSRKVLFSQNWKKQNRKIQKLHHHIANIRHDYLHKISTDISKNHAMIVCEDLKVVNMSGSASGTLENKGRNVKAKSGLNKSILDQGWSMALTMLEYKQQWQGGLLIKVNPRYTSQTCFECKHVAKENRRTQAKFECVECGYIANADVNAARNILAAGHAVLSVEGGCSKGRPLKQKTCDGREKVA

SEQ ID NO: 19045 - protein, 404 aa, unknown
  TnpB Polypeptide
VPTVIRSHKIRLVPNKAQEVLFRKAVGAARFAYNWALAEWKRQYAEGLKPSEGEMRKHLNAVKRVEFPWMYEVPKTVVQQAVKNLGTAFGNLFAKRGKYPKFKQKHGGHQAARLDDGPGSFRFDGLKVKLPIIGWVKMREELRWLDGRPISAVLRLEGGKWFLSVAIQIELPEKGENQALPSVGLDLGLTSAVTLSTGEKLAAPAPLRRELGKLAMLNRSMARKVKGSSNWKKEKARVGQLHWRIAAIRRDWQHKTTTMLTARFGTVCMEDLNVKGMMGNHCLARSISDVGWGELKRQLSYKGNVVEVGRFFPSSKTCSCCGHVVQKLPLKIRTWVCEKCGSEHDRDHNATVNILTEGTRILAGRHLVINRGEGGADAKQVASVKPPSVKRLKPARRGVTPARA

SEQ ID NO: 19046 - protein, 409 aa, Pleurocapsa sp.
MLVLFVLEAKLRGSTKQFAVIDEMIRTAGFVRNSCIRHWMDGLQSGEATSPASPHNRGVGQYDLSALCAVLAKEYEWAKKLNSQARQASAERAWQSIKRFYDNCQNPAIKKKGYPRFKKSRSVEYKTTGYKLSEDRQSIAFTDGFKAGSFRMIGAFDLNYYQGEQIKRVRVVRRADGYYAQFCVAIDRLEAIEPTEQVIALDVGLMHFYTDNQGNKVENPRHLRKSAKALKRLQRRVSRKAKGSNKRKIAINKLGRKHLKVSRQRKDFAVKLARCVVKSNDLVVFEKLTVRNMVKNHRLAKSISDAAWRQFFEWLEYYGQVFGKIVIAVPPQYTSQQCSSCHRIVKKSLSERTHACECGCILDRDENASRNLLAKGLEYLSRGGHSRINAQGHLNLCSVSESLLNKFGG

SEQ ID NO: 19047 - protein, 409 aa, Pleurocapsa sp.
MMIDMIRQAQKVRIYPTDEQKQQLAGAMGCCRWWWNFALNKSIETYKETGKSLSRVGLNALLPNLKEENEWLRTEVYSQSLQQTSLNLSRAFINFFEKRARFPRYKSKHGKQSVGFPQSVKITGDWVKLPKIGLVKAVFDRRYCGTIKTVTVSKDSSDKYFASILYELDACFISGNGDQIIGLDLGIKDFCIAHDGTKTSKYANPRHFKKHEKNLARKQQKLARKQKGSKTRYKAKRLVAKVHSRISNARQDFLHKLSRKLTNESKVVVVENLNVKGMVRNHKLAKAISDVSWGMFVNFLSYKLEREEKRLVEIDRWFPSSHICPDCLTQQPKMDLSIREWICLNQSCGKTHDRDEAASRNIRAEGIRMIKTDGTAVSASGGSVRQDRGRKTKVMQHPAKLETCSKSSI

SEQ ID NO: 19048 - protein, 331 aa, unknown
  TnpB Polypeptide
  misc_feature (185)..(201): Xaa can be any naturally occurring amino acid
MKRAYKYRFYPTPDQVELLAQTFGCVRFVYNSILRWRTDAYYERQEKIGYVQASARLTALKKEPEFAWLNDVSCVPLQQSLRHQQTAFANFFAGRAAYPAFKSKRHKQAAELTASAFKYRDGKLYMAKSKTALDVRWSRPLPSVPSSVTISKDAAGRYFVSCLCEFEPVSLPITASTVGIDVGLXXXXXXXXXXXXXXXXXALHKATRKLINENQVVCVESLKVKNMIRNPSLSKAIADASWSELIRQLQYKGEWAGRSVVAIDQFFPSSKRCSCCGYTMKKMPLDVRKWHCPECGAEHDRDVNAARNIKAAGLAVLACGELVIPKPLNAA

SEQ ID NO: 19049 - protein, 370 aa, Anaeromusa sp.
MSNDTSKTRTIKTFKYRLYPSKEQAQIIDQTIETCRRLYNYWLEDRIYTYQEIKSSPTKFDQTSQLPKLKLSNPYLSLVHSQVLQDVAARLDKAYKNFFRRVKQGTEKPGFPKFKGRQHYDSFCYPQSGFNLGESHLQLSKIGTIKIKLHRPICGTIKTCLIVCKNGKYYACFSCEIEMQTMLSTGDSVGIDVGVADFVITSDGQFFPKLDKYRQAEKRLKYLQRQVSRRKKGSKRRRKAVALLAKQHEKVANQRRDIAHKVSRELVNNNDLIAHEDLQVKNMVKNHNLAKSITDAAWFMLFNFLAYKASDAGRQVVAVPPAYTSQICSGCGKLVPKKLSERWHNCPHCGLSIQRDVNAAINILAIALES

SEQ ID NO: 19050 - protein, 396 aa, unknown
  TnpB Polypeptide
MRKIHRTYKFRLYPTKAQTELLAKHFGCARFVYNYFLNQRQEQYRLTGKSDNFYAECKALTELKKQEETAWLKEVNAQSLQFALRCLETAYTNFFKKRAKFPKFKSKRAKNSFTIPQSAYISVGRLFIHKFKGGIKCRVHREIKGKIGKVTITKTPSGKYFASVSTEEEYVSPFEKTNKPVGVDLGLKDLLVTSEGETFKNNHYTKKYERKLATAQRHLSRKKKGSRGFEKQRLKVSRLYEKISNSRADYLHKCSISLVRKYDIICIEDLNVKGMVRNHKLSKSISDASWYSFVSMLTYKAEWNDKKVVKIDRFYPSSQTCNVCGYINKETKDLAVREWECPSCHTHHDRDVNAAINILRVGLKQYTSVGTADYTGGEEVRADLFGKPFFCETRSS

SEQ ID NO: 19051 - protein, 362 aa, unknown
  TnpB Polypeptide
MNLTHKIEILPNKKQQVIINKACGTARFTYNYALKKHEEIYNKYKENNNKPKPNINEIKKEFNKIKESQFPWIYESPKDANQQPFANLKTAFDRFFKGQSKYPKLKKKKHNESFYISNDKFKLNEKEVTLPIIGKVKMREKLRFNGKIANATISKIANKFYININVQLNEDYKRTRISNNKIGLDLGIIDFIVDNNGKKVKSPKPLKRYNKVLKRTQRRLSKKKLNSNNRKKAKMKLNKLHFRISNIRNDFLHKLSTNICRENQIINIENLKVGNMMKNHKLAKAISDLSWHSFRTMLEYKCKLYSNKLNIVDTFYASSKLCSSCGNKKTNLSLANRKYNCDVCGVCIDRDINAAINIYNYI

SEQ ID NO: 19052 - protein, 375 aa, unknown
  TnpB Polypeptide
MKLTMQIKLLPTDEQAASLLETIEAFNAACNYVSQIAHAQNMVSHVCLHKEAYYAIRETFGLSAQMAVRAIGKVSEAYKRDRKTLHTFREHGAMVLDDRILSYKGIDRASIATIAGRILVPFVVGKYGTERLSMMRGQADLIYRNGMFFLLQTVNLPDPPTINPDDFLGIDMGIVNIVTDSDGQRHAGNTVNNVRHRSQRLRSKLQKKGTKSAKRLLKMRRRKEARFARDVNHCISKQLVKKAKDTGRGIAIEELKGIRTRITAQKPQRYRLHSWSFSQLRSFIEYKARLAGVPVIAVDPRNTSRTCPECGCIDKKNRPSQSTFSCVSCGGAGHADTIAAENIRRGAINCPYVDGAICAELQTQQQYSLAKAAAG

SEQ ID NO: 19053 - protein, 636 aa, unknown
  TnpB Polypeptide
MSNQKIGTVEAIMMILAIVVSHTLLYLPKNILSFMKSASILNIIYVSIFAILIAYLIYRLLRNFPGLDIIDISEFVGGKIFKNIIGIIFILYFITSFSMFLRSFCESIKIIYYPMTNIFFILSFFIIAICIANRLDFNATLKTTLIILPIVLISVIFLFLTNLGQFTPQRMFPIFGEGIYNTFVLGLVNLYSFAGIEYIYFLPPFLKKPENMKKILLISIGISALYLLLSVATLLFIFAFFVSTNEITPLYNATRYIEFGNFFQRLESIFLLFWILVFACYLSIVIKFSMEIFKKLTNISTKKPLIDVFGLLILGISLIPKNYAISQKFERNIYPYLVLGIVFFLGLSILIVANFKKKGSSDVKMYFVKNNPKDCRCERHRMNIPSLGWVRIKEKGYVPTTKDGYVIKSGHVSIKADRYYVSVLIEIPNNKIANHSSEGIGIDFGLKDFAIVSNGKTYKNINKSAKLKKLEKQLIREQRSLSRKYENLKKGESTQRANIQKQKFKVQKLHHRIDHIRTDYINKTIAEIVKTKPSYITIEDLNVKGMMKNRHLSKAVASQKFYEFRIKLQAKCNENGMELRVANRWYPSSKTCHCCKNIRKDLKLSDRIFKCACGYIEDRDFNAALNLRDAMTYEVA

SEQ ID NO: 19054 - protein, 322 aa, unknown
  TnpB Polypeptide
MSQKQAIKDACGAYKNFFKRLAKFPKFKSRKHSTPSFYQDTVKIQFTDTHLKVEGFSTSKKKNKQKLNWIRLAEHSRIPTDCKYNNPRIKYDGINWYITVGIEYEDSDAHKSDTHQSNEGIGIDLGIKDLAICSDGNKYQNINKTQKIKKLEKRKRRLQRSISRQYLKNKKGESYCKTSNIIKSEKELLKLNHRLTNIRQNYLHQTTSEIIKREPSFICIEDIDVSRMMKNKHLSKLVQQQRFYEFRRQLEYKANWNNIQVIIADRFFSSSKLCSCCGSIKKDLKLSDRIYKCECGNVIDRDYQASLNLKIYGENVFKQSVA

SEQ ID NO: 19055 - protein, 391 aa, unknown
  TnpB Polypeptide
MDRTIRLRLAPTPEQAAALEATSQQFTVTFNMVCAHGWRAGEKNGVALHHATYRQSKRQAPDLVSDLHIQARVKATEALTSALDRLKKGRKAACPHAALCPPRYNVHTYRLDWAARTVNLATTAGRQRIPFHIPAYGAKYAGFPVATADLVHRRGRWYLHVVVRLPAPEVPAVEAVVGCDLGLTRAAVTSDNRFHGERRWRELEARDFRLRRALQKRGTKSAKRHLRQLSGRTARRRRDHDHVVSRRIADGVPAGATIAVENLTHIRSRVRARKANGGQRRLHAWSFASLRAMLVYKGEERGIRVAGVDPRHTSQTCHRCSFQSRYNRRSQSEFWCRSCGYRTHADRNGALNIATRLLASRGMTAAGGPSSTGLTFPAVPLTTEGQAVRFS

SEQ ID NO: 19056 - protein, 489 aa, unknown
  TnpB Polypeptide
VKRYKVLKQKLKSTKGEFFIYRFLSRMCKKAYNVALANIKKNYELNKTFIDKYDNYEMLKNHEVSLWLNSEVFQKTTFSANEAYESYFNLLKYQKDNNLEITAKEPGYIKGYYPITFSYLGKKMENGKRVFNIPLSVLFKQFLREIAPDIKILEKYINPSMFELPDEYFIRLSIPRYLTNKKIKEVSIIPLYNGKKFEIAYTYLDEDEIKESKGDTTLAIDLGVNNLATCVTTKGNSFIIDGKRLKSMNQYYNKKMAKLKSENQYVLRKNKNPLTGERIYLKDLRKNLSENESYKNIMTKRMIRLMGKRDNKIKCYFYKSSKMIINYCLENNINRIIVGYSKDFQNKGFVLSKEYYAKDNYSKHIEKEMKKKNNQNFLMIPFEKLINRIEYLCSKNGIECIIQEESYTSASSFFDLDYLPIYSKGKNKEYTFSGERIKRGLYKTKEGKCINADINGALNIYRKSSVCDINTIEYLLRRGVNTPKRLQVI

SEQ ID NO: 19057 - protein, 410 aa, unknown
  TnpB Polypeptide
MSKFLRGYRIELDPNKCQMTMFRKHFGASRWAFNFALQKKKEAFDKKEKIPNNIELHRELNKLKGTDAIPWAYDVSKVAFQSGLINCDRAFQNFFNRCKKKIKGKKGFPKFKSKKNETQSFKLDGSIYLTDKFHIKLPRIGKVKLKECGYIPNDAEIKSVTISRKSEKWFVSCLVESDIKMLPQTYKKVGIDLGIKTLATCSDGIVFENPKALKFNLRKLKRKQRQLSRKKKGSQNYKKAKLRLSKLHNKISNIRKDSSHKATTKIIRDNQTIVLENLKIFNMLKNHCLAQAISDMSAHEFRRQLEYKAKWYGREIIIADTFFPSSKTCSCCGWKNDNLTLKDRTFKCEICKNEMDRDSNASKNLLKLSTVSSTGNYALGDGSSVCPVMDKSSPSLKKESNGKFTYTLKI

SEQ ID NO: 19058 - protein, 370 aa, Salmonella sp.
MKRLQAFKFHLRPNGQQERDMRRFAGACRFVFNRALALQNENHESGNKYIPYTKMTSWLIGWKADQETQWLKEAPSQPLQQSLKDLERGYKNFFQKRAAFPRFKKRGQNDAFRYPQGVKLDQANSRISFPKLGWIRYRNSREVVGEVKNVTVSQSCGKWYVSIQTEYEVPEPAHNATSMVGLDAGVTRLATLSDGTVYQPVNRFKANQRKLATFQRQLSRKVKFSSNWQKQKRKIQHLHSHIANIRRDYLHKVTSEISKNHAMIVIEDLKVGNMSKSAKGTAEQHGRNVRAKSGLNRSILDRAGTNYAASLSTNSSGVVVRFWRYLRHIPASGVPAVVIQRKRTACHKADSSALSAGIPRTLISMVRVTF

SEQ ID NO: 19059 - protein, 451 aa, unknown
  TnpB Polypeptide
MYYAYKYRLKPSDAHREELDRHRDICRQLYNHTLYRLNEYQDEHGELPSMTTLRSELPDLKKWWDDLSDVYSKVLQTVVERLFDNLKGLSALKENGYGVGQLKWKPPREFRSFTYSQSGFKLDKKGGQTVLSLSKLADIPIRLHRAIPDVHKSDSSCAAHQKSPISEDDANLKQVTVKKEPTGEWFATFGVEMDREPPEPPENPKKCVGIDVGILKYAHDTDGTAVGSLNLSAERDRLEREQRSLSRTEHGSNNYETQRRRVAECHADLRRKRRDFLHKLSAYYAREYDFVAVEDLNVKGMMESPSNSRNTASAAWRTFISLLEYKCERAGAHFVAVNPRGTTKECASCGISTEKPLWVREHSCPACGFEADRDANAAWNILSRGLKELGVGRSEGTSPEIEDFWCANESRSDSLTPVETALPTGTSVPAKRVVEAGSPTLKERAASAVSE

SEQ ID NO: 19060 - protein, 245 aa, unknown
  TnpB Polypeptide
MPPSHSNIKLRVAVSLSVDSQSSASPHDGSSWAFASYRCNYSKPEFTAPTVKYDANTMTLFEDNTVSLATTDSRVRCELVLPDDDEDGYQYQYLDSDEWEVMESTLTARDGDYYLHLGFRKPNPGADESPAEDRTVLGVDLGIENLAVTSTAHFESGQELLHEHREFVRVRGGLQETGTESAYRTLVQRGNREERYNRERYNRDYLHRVSNRLLAEAVAYDCTHIAFEDLTHIRDSMPSKRKFHQ

SEQ ID NO: 19061 - protein, 200 aa, Burkholderia sp.
VIEMPDVQARPVRSGVGIDLGLKDFATLSTGEKLPNDRFGRRAAEKLAKAQRARKRKRHIAKLHAKVANARADFQHKLALDLVRRFNYIAVGNVSAVKLARTRMAKSVYDASWSSFRNKLRYKAIARGATFEEVDESGSTQSCSACGSKDSTTRPKGIAGLRMREWACSDCGVEHDRDTNAAMNILRCGRASPGVGITCL

SEQ ID NO: 19062 - protein, 423 aa, unknown
  TnpB Polypeptide
MRVKRVKRTNKFRLRPTPEQEKALFAFCEMSAVLWNKVNYRRRQSFFAGEINWNADEEYEEFKRILGAATAQQIIRKNDEAWRSFLKLLKLKREGKLPEHVRKVSPPGYWKDRETGKRRLMTVIRNDRYRIEEVDGEKWLVLPKGLRVRITGEVKWKGKQGRLEIYYDDLTGRWYALQSVEAEIDCVESAKRAYADLGVVNIITAWIEDERRCVAFSGKQLLSDWWYWTEKISEHQSELKRVNGRNTSKRLRKLYRKRQQRFRHAINTIVRRFVGLCCERGVGEIVVGDVSHIRENNDKGKKINAMIHNFWSFRYIIERLRTTAENFGIKVRLVGENGTSSRCPWCGSENVRRRKRLFKCLSCGIEAHRDVVGVLNIARLHGDGFNGVLAHPLLLRTDDAPEGRSPMWARMSVKPSEARISPL

SEQ ID NO: 19063 - protein, 441 aa, unknown
  TnpB Polypeptide
MAYKHNSSYAIEIRSAHKALKRTLDLYRNAVTYLLTPVIEHWNEVAVIKGSNQRMNYIESIVHNTKVHKASYDFDDRFYKFPSYLRRSAIVAAIGAVASYKSNYENWLKAGSNGKEPAFSYDRHQCPALYRGDMFKWDMNGNALIKVYENNDWVWRELSLRKTDVSYFEKRTAVNNICKFFSPILEKKHGKYFLRFALKEEVELSDRSIYERKVCAVDLGLNTDATCSVIDVHGTVLSRRFINCGIEKDYVKNALHRVSVFQRLHGSHDVQRLWSVAERRNHNLANLVAHDIVEFARECGCDVIVFEYLDTRGKKRGSKKQRLTMWKHRDIQNTAESLAHKYGMRVSHVNAWNTSKLAYDGSGIVKRGRAVSQHTPYDVCRFSNGKMYNCDLSASYNIGARYFIRELIKEIPGIQAEVPDIGSGTRRTLSDLWRINDAIVL

SEQ ID NO: 19064 - protein, 378 aa, Herpetosiphonaceae sp.
LYARAGAPAGGFWQYWLSLRLRWGCGCGRKQAHYAATGKNLTYNALAAALTQLKRDADHLWLQACVAQSLQQALMDLETACTNFFANRAKYPRFKSRKRTPHSMRFPQCVMVVDDTTISVPKIGLVRAVIHRPLQGVVKGATVKQDATGAWWVVFVCHIERPDVAPTCDRPVGIDVGLESFTTLHTGVKVKPPKFYRRGEKKLKRLARKLSRATKGSANRRKAKQRLACAHQRIRNQRADWLHKHALEIIQQFDTVCIETLNVKGLARTKLAKSFSDAALSTFMQMLHDKAEWHGRRVVKVGRFYASSKTCHRCHEKTILTLSDRVWTCGTCSTIHDRDINAAINILDEGIRLVAAGMSETQNAAGDAVRPASAGGRR

SEQ ID NO: 19065 - protein, 178 aa, unknown
  TnpB Polypeptide
MCCYINNRNFRISDDCISFPVIINGKSKRISVKTKISKRQKSIFSSSKLGTMRIVVKGHDLVAQIVYDAKEDAVFSNDNVMGVDLGIKCPAVSYCPDGSVKFYGNGRKNKYIRRHYNNLRKRFQKAKKPKAVVKINNKEQRIMKDIDHKLSREIVNTPPIRNELVSHQYWQVTRTPCL

SEQ ID NO: 19066 - protein, 413 aa, unknown
  TnpB Polypeptide
VERLQAFKFELRPTGEQTSKLRQFAGACRFVYNKALALQQENHKAGAKYIGYVSMANRLPSWRKDEQTSWLKESPAHPLQQTLRDLDRAYQNFFGKRAGFPAFKKKGRGDSFRYPEPKQFKFDQANSRIFLPKLGWLRYRNSREVVGKLRNVTVSERGGKWFFSIQTAREVEQAVHPSTSSIGIDLGVAVFATQSDGVQHKPLNSFASHQRQLARAQRALARKRKFSNNWKKQKAKITRLHSRIANMRADYLHKTSHRISQNHAVVCVEDLKVCNMSRSASGTKDSPGKSVKAKSGLNRSILDQGWGEFRRQLSYKLDWAGGELIAIPAQYTSQTCSGCGHTAKDNRKSQALFCCVSCGFEDNADSNAAKNIHAAGHAVLACGGDVRPAKRSCAKSAAPMKQEPTEVTQAVLV

SEQ ID NO: 19067 - protein, 283 aa, unknown
  TnpB Polypeptide
LIVFEFKAKGRDSQYQAIDEAIRTYKFVRNSCLRYWMDNEKVGKYDLNKYCRVLAKQYPFADKLNSQARQSAAECAWSAISRFYDNCKKRCDPAPSHGALRNAHQERKYLEKNARSVEYKSSGWKLSENRKAITFTDKNGIGKLKLKGTYDLNFYQLKDIKRVRLVRRADGYYVQFAISVDVRIETEPTGKAIGLDVGIKYFLADSFGNTVENPQFYRSSEKQLNRANRKKSKKYVRGVKPQSKNYHKARCRYARKHLRVSRQRKEYCKRVAYCVIQSNDLVA

SEQ ID NO: 19068 - protein, 365 aa, unknown
  TnpB Polypeptide
MLFGLTGIKNLVFLSEKLTLPKFLDYKDFAFETDLSARAKSSAVQQASQIIRAVIEKQRRVLWVQENKKALIKNKKFSKPRLNFVQPMLSSKCCDWQDDPEGKFLGFVRLKSIGRSYGAIKIPVIKTPRSQGILQAGFSFSKRSVQTAWDQPTKPVRKGTKVLGIDQGILDIVTMSDKQVTPKTCPHGHSNSSILDKLARKTKGSKGFARTQKHRKNFINWSINQLNFRGVKEVRLEKVTNIRFKTRSSRKLSHWSNPEIRDKIIRRCEELEVPVIEQSCAYRSQRCNRCGQTRKANRKGKLYSCKNCGLKIDSDLNAAKNHEQDLPSSTSLRGRKLSIGDGFFWKPEGFFNFDGSELRVPSCYQ

SEQ ID NO: 19069 - protein, 408 aa, Crenarchaeota sp.
MEGSGSYRSLLAVKSVRQRYAPTLDVLGLLEVFRRMVNESIRIGLANNVSSLRKLSLLSYNQLAQYNSPSCYKLCAISRAAGILAARKKSLRRGFPTRDPYSVRPQLVSCYGYKTKNEGLEIPIARGKRLSIPLTKHTLAVISQPGVEIRSFTLTRNRLCLCIAREVAPVDCSSTVGVDRNLRNLTVGNDQETGQYDLSRTVRIASTTIRIIASFKRDDARIRTGIASKYGERRTARTGHLLHTATKTIVAVAVQQREAIVLEDIRGIRALYRKGNGQGRRYRGRMNGWSFGEAQRQIEYKARWIGLPVIRLSRRETRASSLVCPRCGERLQSDKRLTRKLWCNKCRILMDRDKIAAVNLAWRGRVRFARSRPPIEAQGGAGEAVKGNPTPTVIPGVDAPKLTQPTKS

SEQ ID NO: 19070 - protein, 420 aa, Streptomyces sp.
MRAAQVHGRTIRLVQLRYNFRVYPELDQRAALARAFGCARVVFNDGLRARQEARAAQLPYIKDTDLQKQVITAAKRTEERAWLGEVSSVVLVQSLRDLHTAYRNFFSSHAGKRKGPKVAPPRFKSKRDNKQSIRLTANGFSLRDNGKLYVAKVGDLRVRWSRQLPAVPTSVTVTKNAANRYWASFVVDTDPEFLPELDTETGIDLGLGHFAVLADGTKVDSPRFLRRAEKKLKKMQKTLSRKAEGSNNRAKARARVARQHARVADRRRDWLHKLSTDLIRDNQAVYVENLAVKGLARTRLAKSVHDAGWSQFVAMLEYKAVKRGRHFGKIGRFEPTSQVCSACGIKDGPKPLSVREWTCQACRTVHDRDVNAARNIMAAGRADRLNASWSAGKTGSVPAQRVEAGSLQKGQTTQAGILVP

SEQ ID NO: 19071 - protein, 385 aa, unknown
  TnpB Polypeptide
MTDSVTRTLKLKVRGESYRWLQAAAVEVNQVFNYCNEISFATSTRTDRKRNWLSGFDLCNLTAGATEYLDHIGADTIQRVCTEYAQKRSAVKRLKLRWRVSRGARRSLGWVPFKAASLKRKGSALRFCGKSFRVFERERLEGLRWQQGCFAQDAVGDWWLCLPVELRIEESVAPKECVGIDLGIKAVAVTSDGERLNAGHFYRHAEARIAQLQRRGHRRQAKRLHRKVARQRRDACHKFSRSIVDCYQNIYVGDVSSPKLVRTRMAKSVLDAGWGQLRRMLQYQGEHAGRSVIIVDESYTTRACSSCGAPFGPSGLRLLVVRTWQCALCGDWHDRDVNAARNIVRFGSRCGTSVSGNELVQEQLRVEPDIFVSARDGRVSAYALA

SEQ ID NO: 19072 - protein, 332 aa, unknown
  TnpB Polypeptide
MERFNSACDGIAEVAFREKTANKLRLQRLVYGQIRDRFGLSSQMAIRAISKVCEAYKRDKTIRPRFRPHGAVPYDQRIMSWKAPDRVSLLTLGGREVMPYRLGEYQRARMDRIRGQADLILGRNVFYLYCTVDASEAAAGEIQDFLGVDLGIVNLATDSDGESFGGEQVEVKRRISSHRRRNLQREGTKACRRKLRQISGRQRRFQTDTNHCIAKRVVAKAKGTWRGTLTGPSDSCAPSWSTKPGAREYPWSWSILATPPALAWSAGRSTRPTAAPRPTSDVSCVGALRPPTTTRRGLSVPGLSSCSRWSRIRPLGRSARDKPPALAVGFMT

SEQ ID NO: 19073 - protein, 428 aa, unknown
  TnpB Polypeptide
MSSYRRYNYRAYPTQGQREALSCLYGACRYAYNWTLDQRELMRRRHGRMQSCTQLSNMFTQWKRDPGMEWLLGVSSTPLQQSIRHADMAYRNFLRLYKAGRTHIVTNHRTGKRHRTGLSRYKSRRDGEQSAEFTKSARFKVEHADGCKWAFLTLPKIRRVKLRWTRELPSTPNTVTIMRHADGSYEASLTVQVEDKTDAPKPLHEACGIDMGLDSLMSIVYIDGTREKIPHPRTLKRKERRLRKLDKQLAREKKGSANHAKTRLLKAKTYGRIRNQRRDMAYKLASKVAGENQAVALETLNVKGLARTRMAKSLLDANWTRIIDRIQQLGVQYGRTVVRIDRWYPSSQICSQCGRRDGQKPLNIREWECPQCGTRLDRDWNAALNILDAAGLAESLNARGGDVRRRLAQTDRNADARETGTHRTAQLH

SEQ ID NO: 19074 - protein, 367 aa, unknown
  TnpB Polypeptide
MLEFNITNRMAKAIIKTAKNQLKLLKESAQYQFNNLYKRKRSLHRQIQKLKFHLSSSSTSLKQRKLAKLHLFWTQMKLNKVNQLISNGLKPHLTFGTKHLLKTNKAKFLAKRDNQVVYIGDKDKTCGNQQFQLSFNSKHNRFDYKLRLDNLWASGTDRYIYGSFILKNKEAKVHILKTLSNKKSNPLTYRIIKRGDSLYLQIMYRRETTDTTRYNQGVLGVDFNKGFISVSEISSDGKLQSLTRYNYLHRGKATKTKTSMLELVSRLVAQAVNLGKDIVIEDLVSLDSNKKQEKTTSKNYNRMINSLKFGLFKRCLLSKATKEGVSVHTVNPSNTSKIARESYTDRMKLNVHDAASYVIARRFYQYD

SEQ ID NO: 19075 - protein, 369 aa, unknown
  TnpB Polypeptide
MRLTRKVVLKPNKTMKQVLDSLCDYRRYCWNEALDLWVTLYEQRSIGLTEEERSTIHHIVKSKQPWTDELQELNTLYPSPSAYTVINILVSQKEDWQYLFSSRVLQLAVKDLATAWSRFYKNSKEFGKPTYRSRKTPKQGFKTDYSRIVNGKLVLDKPQPYKGEWYPIPFRGASLPEGRISLCSVTRVNDKYYASLVIEMETPSLPKIGKINAVDLNVDHFDTVDGRFNLHSKLLNKLYSRVKHYQRVLARKRLDNPDYKNSKEYQATRAKLQATYERIRNIQDDLLHKFTTSLFVNYDTVVIEDLAVKQMKMKKQAKNLHRSLFGRFRQYMEYKAIKFDKKLIIADRFYPSTQRCSQCGFVKKKVKIR

SEQ ID NO: 19076 - protein, 404 aa, unknown
  TnpB Polypeptide
LKLTGEQEQLAWWFSKVSRNYWNLLVDIDKRNNKGEFDEILSNNGNKTYHSNFYDRDIYILSQMDYLNLAKIVVAKNYEEDNETWSWYYKPNQSFIYIFLAREVGKIRRQNKGRLNFRSIDKAQPRFNVRCDRFTNKRPSRIYLKDNGKLQIPTLGEVTFGSTRQDFDLSCKKQVATISFDGKYWYLSYTEDVDTQVIELPDYTDGVGVDLGIKTLATVSDGTTVPNIKTFRRVRILEKRLKRLQRKVSRKYLINKCNKHNKTKNIIKLERQIKLIHRSLRNIRINHIRKFVSNLVKQQPEYIAVEDLNVKGMMRNKYLAKDIANCSFYTIKEHLIRKAKERKISVRLVDRFYPSSKTCSYCGSYKKDLKLKQRVYRCNNCQEKIDRDLNAAINLANTDKYVLA

SEQ ID NO: 19077 - protein, 412 aa, unknown
  TnpB Polypeptide
MTVIQQVEKHVIKKSHPYYNMFCEFTHLSKNLYNHANYLVRKEFVDNGNWLRYFDLCKLLRSDLDFPDYTNMPTAQSAQQTLRLLDTNWMSFFKSIHDWSKNKDKYLGRPKLPKYKPKDGKMVLIVTNQQVKQKENLLHFPKSFQGFTVKPRCVTLPKFEKLNQIRIVPQNQVFCVEIVYSVSIADTMLPDNGRYMSIDLGLDNLATVVTNTSLQPLIINGKGLKSNNQYYNKKKVYYQSIAKQVNNQHYTNRLYKLTQKRNLKVEDYLHKVSRYLVDFALEHQINTIVIGNNKNWKQSSSLGKVTNQAFVSIPHQKLIDKIYYKAQLCGIQVILTDESYTSGTSFLDNELPEKSYYNKKRRVKRGLFVSNKGIKINADVNAAFQIMKKVFPNVFTDGIEGVVLRPVRVGIV

SEQ ID NO: 19078 - protein, 430 aa, unknown
  TnpB Polypeptide
MRQVERHWIKEGHKLYPICDDLTFKAKNLYNAGLYQIRQSIFERDECKEEVKPSVLSWVELSTKFRREKQDDMLRLPAKVSASLLRMLGSTIHSYYQLLRCYHDKSNLSVTHKPKPPRYLHKTEGRYVVEFTNQTFSKKRGKHGELILCPKDLNLHIPTKVENPKSVRIVPKLGAFVIDVIHEVEEVPLKHTGNYAAIDLGVDNLASITFFNGVNPLVVKGSKIKSINQGYNRLIAKAQSKLPTNQRTSKHIHRLWRNRELKLQAELHKITSFLSLYFDEMSIEKVFIGKNVGWKQEVALGKKTNQTFVNIPYNTFISQLAYKCKLRGIEVVEQEESYTSKASFVDQDEIPVYGEVEGKPQFSGKRISRGLYQSKTGFLLNADVNGSYNILVKGLATLGKVVDRALVSYHTRSLRLCSNVSNLDLISNYM

SEQ ID NO: 19079 - protein, 453 aa, unknown
  TnpB Polypeptide
VILEGYKKGGELMQCVSSYAVEIKKQNIPIRQTLKIYRAAVSYLIRVYGEAWEELSGITNVKKRFNAAEHLVHGTKNNRARYDFDKCFPKMPSYLRRSAIQHALGSVSSYETRIGLWKSGKLTGKPKLVCENHAMPVFYRDVMYRNAEESDDSAYLKLYDGHDWKWFYVNLLHTDMEYLRKNWSGVKASAPTLEKRHQKYFLRFSYTEEVALSKADVKDQTVCSVDLGINTDAVCTIMRADGTVLGRKFINFPSEKDRMYRVLGRISRFQKKHGSRQAKGRWAYAKRLNMELSRKVAAAVTMYARESHADVIVFEYLEMTGKKSGKKKQKLHVWRKRDIQTICEHQAHRAGIRISRVCARNTSRYAYDGSGPVLRNPGNHRLCVFQTGKQYNCDLSAAYNIGARYFIREHLKTLPETERSLLEAKVPAVKRRTSCVYADLRTLSKELGNLTAA

SEQ ID NO: 19080 - protein, 514 aa, unknown
  TnpB Polypeptide
MRAQTPSYVISTKILLSESIAKRLEKSLRISNSAYNEALSFGLKRFEALKQNSYYQDLLEARRLSLKGIAQLEKAKKKAKGLKQQVKCYNKALSGLRKAYSLTEFGLSAHLSQQRRKPGSPYQQFNAGEIQVIAGQAYKTLEKVLFYQIKPHKVRFRSKFDLDVSFRNRVNTTGTRLEPSDRKDIAYRLYIHKASTFVDIPVKAFNTYQQMSLLRCEKIKYVQIIRKTIRGKKVYYLQIVCQGFPPSKVSKGQGVVGIDPGISTVAFASPSEVALVDLVPKNITQKEKLLKQLDRKIERSRRVNNPECYDECGKIKKGARFKRPSNRQVRLRNRRRKVYRALTEERKKLQGQLVSRIVSQASHIKVEELNVKGLQKRSREIHINPKTNRPYSKKRFGKAIFRAAPSTLRVALEVRAFQLGIEFEVISPKDVKPSQYNHITQTFEKKPLSTRVYDLSSDYPGVQRDLYSAFLIGHIEKGHYNQKQLNQDFPDFYQQMKAFLQQPIETKRLAWYLN

SEQ ID NO: 19081 - protein, 374 aa, unknown
  TnpB Polypeptide
MRKAFQYRLYPTKKQQHILEQQLEECRWLYNETLALRKNAWEQEQRHVSYYESKKRIPVLKAERPSLKVVYAQVLQNVTERVELGLQAFYRRVKAGENPGYPRFKGYGRYDSMTFTQAPEGCKIQDGKAVLFGVGHVKMVYHRPLKGKMKTATVHRSSTDKWYITYTVECEPERLAPANTQVGIDVGLKTFATLSTTEEIDNPRFFRKEEKALARVQRKHSKLAKGTPERKKHRKVVARVHERVKFKRHDFTHQASRQIVDQFGVICVEDLNVNRMLHNHCLAKSISDAAWSAFFSQLSVKAEEAGRQFIKVNPAYTSQTCSGCGHRQKMPLAERVYHCPCCLLSLDRDVNASKNILRLGLESLGIQPLEAPAF

SEQ ID NO: 19082 - protein, 399 aa, unknown
  TnpB Polypeptide
MIYKAYKYRLYPNKEQQELISKHIGCSRWIYNYALDKKVKSYQETGKGLSRFEIQKDLPLLKKDETTSWLKEVNSQSLQASLENLDKAFTKFFKDKKGFPKFKSKKDNHQSFSIPQNTLVDFENNYINIPKIKTNIKCKLHRKFYGIVKTSTISITPTGKYYISILVQLEETIPNKKSINENQAIGIDLGIKTFAVLSNGIEIENPKYLRKSINKLKKLQRKVSKKTKGSNNRLKMIKQLAILHEKVSNKRNDFLHKTSHYLVTNYDTLCLETLKASNMIKNHKLAQSLSDIAIGNFNNMIDYKAEWYGCNILRIGQFEPSSKMCTCGVINKELKLSDRVWKCKSCGTTHNRDLLAANNIKHFAFLKNNTVGTTEIKACGDDGLPLSMKQEAQHPLGSE

SEQ ID NO: 19083 - protein, 398 aa, unknown
  TnpB Polypeptide
MKITRAYKTELNPNNKQKSFFAGSCGMARFIYNWALNYWIEEHERGEKRTGWMKLNTELTKLKQLEYQWMYNYSNWIRVYAIKQCDEAYQNFFRRIKQGKKPGFPKFKSKKRSKASFTINGGVINISETDIRLPKIGWVRLKEHGYIPVNPDKICYVTISEKNGRWYISVTVNETIPDEQTTKNIIGIDLGIKTLAVTSDGVYYENPKELYKAEKRLKRLDRWLSRKKRGSSNYQKAKLLRAKAYEKVKRIRKHMLNEITTELAKTKSILSVEDLNVSGMMSNHHLAKAISDVSFSEFRHQLEYKCAWYGSELFVVDHWFASSKTCSNCGAINRDLKLSNRIYKCDCGLEMDRDLNAAINLKNRAKHVRINACGQESQTDRISPAAWMKQEAGNRSYV

SEQ ID NO: 19084 - protein, 393 aa, Nitrosococcus sp.
MTERDSTTIQRSYKLRFYPTSVQRQQLAMEFGHARWVWNTALAWRRRQYRVHDKRVTGVDFSRELTFLKGLGFYAWLNEATRDCLMQKLRDQDTAFRNFFAGRAKYPKFKKRAHGQSIRYCFDHRHRGKMKAWIEGKLVLPKLGSLKLKGSRKPQGIPKMVTVSRDCAGRYFVSFMCEETLQPLPRKPNGIGVDLGVCDVVVTSEGWKSGNPRHLKTYARQLTKAQRRLSRKRKGSVRWHHQRIRVTKAHAKVRESRQDWLHKLTTTLIRQAGLIALETLNVRGMMANRRLSRALGDVGMHELKRQLEYKAKWYGRELVQVDRWAPTSKTCSVCGAVQKAMPLKVRQWTCPDCQTAHDRDINAAKNILRLATGGRPESHARGGVYPPEVAYGC

SEQ ID NO: 19085 - protein, 372 aa, Nitrosococcus sp.
MIKAFKYRLYPNAHQARELEIMLETHRRLYNECLAQRKERFETAQESVKYTQQSAWFKSARGANDWYALLNFSSAQATMRRLDKAFQAFFRRIKAGGKPGYPRFKARGRFDSWTYPAHGDGAWLLNGKLRLQHLGVVKVRQHRPVEGTVKTVQLKNEAGKWFVVASCDVGAAPPPRASETAVGIDVGLEYFLSTDQGEHVDNPRYQKEALRQLRVAGRAVSRKKKGSRNRRKAVARLRAVHAHVANKRRDHHKVARDLVSRYAFIAAESLTVRNIVRNRRLSRSISDAGWRQFLNILRAKAKSAGSVLVEVPPQGTSQACSGCGAMVRKALSVRMHQCLECGLILQRDVNAASNILARGPARMEPVQLNVAQ

SEQ ID NO: 19086 - protein, 159 aa, Nitrosococcus sp.
VDTEDYKDYSHNRAPSVGVDFKAVLHELSHQLTASYDRIAIEDLNVKGMVKNRKLARSIADAGFGMLRQLIEYKATLRGCTVELVDRFFPSSRMCSGCGQLHDITLADRALACDCGVTINRDLNATINLNRYRRDTLKPDLKRTQEPRKTALAAWVWSA

SEQ ID NO: 19087 - protein, 394 aa, Nitrosococcus sp.
MSIEAMTKRDFTTIQRSYTFRFYPTSAQRQQLAIEFGHGRWVWNTCLAWRSYVYRHRGQSVSAVDFSGHLTKLKKTAAYGWLKEASATTLNQKLRDQDTAFKNFFAGRAKYPRFKKRAHAQSIRYQLDPRQVAGRYRAGEFLKLPKLGLLKLKWSRKPQGIPKMVTVTQDCAGRYGVAFMCEETLQPLPREPNGIGVDLGVKDIVVTSEGWKSGNPRHLRTHTRQLTKTQRRLSRRRKGSVRWHRQRVRVAKAHARVKNTRQDWLHKLTTALIRQAGLIAMETLNVKGMMANRRLSKALGDVGMHELKRQIEYKAAWYGCEFVQVDRWAPTSKTCSVCGAVIDAMLLKVRQWSCECGAVHDRDINAARNILRLATVGRTGSDARGGVYKLEVVA

SEQ ID NO: 19088 - protein, 358 aa, Nitrosococcus sp.
LLARSFGCARFVWNDALRLRTDAYYQRGESLSHSRLEKRLVTLKAEYPWLVEVSSVILQQALRDQQQAFKHFWDRRAGYPRFKSKHRRQSIRLTRAAFRYRDGQLFIAKSNVALPVRWSRPLPSAPSSLTISLDRAGRYFVSCLCEFDAKALPVTPKMVGIDVGLTSLLVTSDGARVGNPHHLKRYGRVLAHRQRQLAKKQKGSANRAKARRKVARLHAKIADCRQNHLHQLTRRLINENQVLAVESLSIKGMVKHPRLAKHISDAGWGEFVRQLEYKGKWAGRQVVKIDRWFPSSKRCHSCGHVIEAMPLSVRRWDCPACGAEHDRDINAAKNILTAGLAGLACGATGTGAVVNTAV

SEQ ID NO: 19089 - protein, 390 aa, Nitrosococcus sp.
MTERDSTTIQRSYKFRFYPTSVQRQQLAMELGHARWVWNTCLAWRGRQYRLHDKHVGGVDFSRQLTFLKGLGPYAWLKEASATCLIQKLRDQDTAFRNFFAGRAKYPRFKKRTHTQSIRYQLDQRQVAGRYRAGEFLKLPKLGALKLMWSRRPQGVPKMVTVTQDGAGRYFVSFMCEETLQSLPRKPNGIGVDLGISDVVVTSEGWKSGNPRHLKTHARQLRKAQRRLSRKRKGSVRWHHQRIRVAKAHARVSNTRQDWLHKLTTTLIRQAGLIALETLNVRGMMANRCIAKALGDVGMHELKRQLAYKAQWYGRELVQVDRWAPTSKTCSECGAVQKAMPLKVRQWTCPDCQTAHDRDINAAKNILRLTTGGRPESHARGGVHPLEVVA

SEQ ID NO: 19090 - protein, 384 aa, Nitrosococcus sp.
MVTQRAYRFRFYPTPTQKRQLAIEFGHARFVWNWALETRTEAYQEHGESLNTIRLSRKLTAMKKAEYPWLSEATAGCHTQKLRDQDTAFRNFFAGRARYPRFKSRHHTQSVRYQLDQRHVAKNFNAESKWLKLPKLGALKLKWSRKINGIPKMVTVSKDPCGRYFASMACEVEILPLPAKRNAVGVDVGIKDVVITSEGYKSGAPKYTYRYARQLKMAQRRLSSKKKGSQRRRRQQVHVARIHARIKDSRRDFLHQQSNRLINENQVIGLEDLNIKGMLRNQRLSKAIADCGLYELRRQIEYKAAWYGRDVLIVDRWAPTSKTCSACGALQESMPLKVRDWVCECGAVHDRDINAAQNVLFFGTAGSAGTSKARGAVKTPRAVA

SEQ ID NO: 19091 - protein, 373 aa, Nitrosococcus sp.
MIKAFKYRLYPNAHQARELEIALETHRRLYNARLEQRKAAYELEKKSVKYAEQSSWFKHERSTNPYFARLNFSSAQATMRRLDKAFQAFFRRIKAGEKPGYPRFKARGRFDSWTYPAHGDGARLLHDQLRFQHVGLVKVRQHRPVEGAVKIVQVKNEAGRWFVIASCDIGDGPAPRAEDTSVGLDVGLEYFLSTDQGERVNNPRYQKEALRRLRIAGRAVSRKRKGGRNRAKAVARLRAIQARVANKRRDHHHKVARDLVSRYAFIAAESLTVRNRVRNRRLSRSISDAGWRQFLNILRAKAESAGSVLVEVPPQGISQACSGCGAVVRKALSVRTHKCPACSLRLQRDVNAARNILARGQARLESVRLNVAQ

SEQ ID NO: 19092 - protein, 290 aa, Nitrosococcus sp.
MVTVTQDCAGRYCVSFMCEETLQYLPQKPNGSGIDLGVCDVVVTSEGWKSGNPRHLRRHTRQLRKTQRRLSRKRKGSVRWHRQRIRVAKAHARVSNTRQDFLHKLTTALIRQAGFIAMETLNVRGMMANRRIAKALGDVGMFELKRQLEYKAKWYGRALVQVDRWAPTSKTCSVCGAVQAAMPLKVREWTCPDCKSVHDRDINAAKNILRLATRLGEPEVMRVEGYTHRRWLMAAEGLRGNANCSRRGSLSGTSERDLAANSKSRHIPARVTAGCLKLILGRTIMPYHHR

SEQ ID NO: 19093 - protein, 368 aa, Nitrosococcus sp.
MKLVANLKLTPTPAQERALRLTLERCNKACNWLSERAWESQMFRQYDLHKLTYQDLRAQFQLSAQVAVRCIAKVADAYKLNQKTKHTFRKHAAQPYDDRILRFVCDEKVSLWLLCGREKIGYTCGDHQRKLLEYRKGEVDLMFVRSQWYLAAVCDFDDPKLLTPEGMLGVDFGIVNIATDSLGERHCGAKVQAYRERYAKRRATLQRLGTRAAKRCLRHISGRQKRFQKYENHCISKRIVSLAERSRLGIGLENLKHIRARVKANKAQRKRLHNWGFAQLRAFIEYKAKRAGVPVVIVDPRNTSRECPACGRIDKANRPTQSEFRCVECGHSNHADHNAAGNIARRAAVTQPMFAHKCAPCAVESRML

SEQ ID NO: 19094 - protein, 367 aa, Escherichia sp.
MTRQNENHEAGNKYIPYGKMASWLVEWKNATETQWLKDSPSQPLQQSLKDLERAYKNFFQKRAAFPRFKKRGQNDAFRYPQGVKLDQENSRIFLPKLGWMRYRNSRQVTGVVKNVTVSQSCGKWYISIQTESEVSTPVHPSASMVGLDAGVAKLATLSDGTVFEPVNSFQKNQKTLARLQRQLSRKVKFSNNWQKQKRKIQRLHSCIANIRRDYLHKVTTTVSKNHAMIVIEDLKVSNMSKSAAGTVSQPGRNVRAKSGLNRSILDQGWYEMRRQLEHKQLWSGGQVLAVPPAYTSQRCACCGHTAKENRLSQSKFRCQVCGYTANADVNGARNILAAGHAVLACGEMVQSGRPLKQEPTEMIQATA

SEQ ID NO: 19095 - protein, 494 aa, Geobacteraceae sp.
MTNKPDYIERFMNQGSEATSANPEKAYLTLKVPITLDAKNLSKLRSVSSAVAFAWNRLTEHQENNGWADSYFEIKKLLPEIKKATPWLKDASSQVLQEVAKSHSGATKSWRTKRAKTSKVTGAPIREAKANPPGYKASRIFQSHKYPQRGVSFSIAGAELKLSYGSKPSDWIVTSLPQSVPPESVKAVTVTYDPELQQHFASLETEFVLAKEQTQWHVLAIDPGCKTALTCLRSDGTVWEYDINNLRDLNMKIYKKIDTLMTGRDNLPCAKQLAAFRKDRKAASRFVGPKPEGTLALEYPKLSREYRRYEAKITKLFASIRNRSKQYLHTLAKRIIEDHPLVAEFFVGDWAKQETVADTPFKAVNELINRAVQNNNPLGTLIEYLKYKAPLKGKQVVKFDERGTTKTCSHCDHVGGKLPPSQRTFTCRKCGFIAPRDVNATLNQLKFVSYGVWHTLKAIPALSIVRTTLLLLSCEKSFRSKSGVILNYQDARCL

SEQ ID NO: 19096 - protein, 360 aa, Moorea sp.
VAESFKSFYKLNKLFLTGKLEDRPKPPKYRRTGLFTVSYPKRWLKNTNSKIRLPLGKQVKAWFGLSEFFVDLPSNLDWDSVKEVRILPRNGDFYIEFVYKIDFKENVLDKSKALGIDHGIDNWLTCVETIGNSFIVDGKHLKSLNQWYNKRVATLKKGQSKDYWTKLLSIITEKRNRQMRDAVNKAAKLVVNHCIDNAIGTIVFGWNPGQKNSSRMSRKNNQKFIQIPTARLKNRIAQLCELNGIQFIETEESYTSKASALDHDEIPVFGEKPAEWKPSGKRVKRGLYRTAQNYYVNADCNGSANILRKVARTAGIDLSGLSRGALTTPVRVRLWTLNESPRMRDRGVSIPKLFISYYQV

SEQ ID NO: 19097 - protein, 486 aa, unknown
  TnpB Polypeptide
MINLLSYYNNNVIDGQEVVNLLKEHDKDLSCENFVSNTEEDDENYLVEKHCFREGSREFSELYPILLQAARLRNVVVFITRQHFFNVTGRNYTCDMFDDVRGKYLSYQKIEKYLKSIEQPDFRIMPANVAQAVVRSVITEWTVYKELKRKKAIGEYDGYVGIPKYSKTDNNATYVAKYFKATLSKKSLAERMIDIPKTDIHFKTLVDPELIRSVNVSYSPGQCLVNVVYENRKRIPAKQDNRIYLAIDPGLDNICTVVSNLESFKSFIIDGREIKSINRYYNYKISTYTEKMKAKDSSFTSDEYARKMWADRKNILDDIMHLISAKLIEIARIICANTIIIGHNDRWKDNLPFRKDTKQNFAFIPYTSLIEKLEYKAAAYGITVVRQEESYTSKASFLDEDEIPTYVEGDNTVYRFSGKRIKRGLYRASDGTIINADVNGAYNILRKYLKVNSIDAEISRECMGAVIPPVRVRISELKARKRLLNK

SEQ ID NO: 19098 - protein, 535 aa, unknown
  TnpB Polypeptide
MKNKHKKEDITDLGVFSIRINSDKIEKQLLSLLYKYRHFENMLLILIKENYNLYIQGKDTNDFKYLTNKNILRNALFDYNSKNKSVTYLKEKYKNNELWKSLKEVAKSLKSHNLVYVIDRVKTDYKNYFADLKFWKEDPNSFTGMPKPPKPKRISKLRNYSIELDKYNALSFVNLESKNIIGINLSNKMIYIHCDVERVLRKRRDGKRLTEIDKLYSARLVYDNGFLYLQISYLKDKKKLNERSGKLAGIDVGLNNLASIFIDDETTPSLLVDGKPFKYYNAKFNRLVSKLNEEKSKEVLEYGITKTGTKYPLKYTERGERINKFIKFLYAKRNRYFYDQFHKASKHIVEYLYLNGVQDLYISRNLSQIKNNGECNLRKDIKQSFIEIPFIQFLKYIEYKAQEYGITVHWIDERYSSKVSALSDDIHGIQNDPQLTNAFNGKRVKRGLFLDTRINKVFNADINGAVNHIRIGTGKSFEWLKHYLFKLSNPVKIKSDYEFCKLLKDLQNSVGDKSISTMDMESSQPDRLVDAINFC

SEQ ID NO: 19099 - protein, 417 aa, unknown
  TnpB Polypeptide
VAAPAFQAREKAPPPPSNIRYNVRVSRYRLTPSPEQESILLRHCADARYVWNLCIEQESHWRPGRGRMPGFTERCRQLSQARADNPWLADGSVMVQQQAIRDHAQAMANFFARTSRPPTWRRAGRAVGFRIVAVRSADVRRLNRRTGEVRVPKVGWVRFRWSCAVPAGAKSYRVTRDRAGRWHVVFATIPDPIPAPGNGRVVGIDRGVKVSAALSTGEMLTVLGLTLSERQRLAQLERKLARAQRGSNRRRNVKTAIARMRAREADRRKDWAERLSTDLARRFDIIRVEYLSIKNMTRSARGTVDAPGRNVGQKAGLNRGIQRSGWGLLVRRLQDKAPGRVERVNPAYTSQRCSACGRVDCKSRESQADFRCTVCGYACNADVNAARNIAAGHAVTARGGDRVAGPASREPQLLASG

SEQ ID NO: 19100 - protein, 470 aa, Streptomyces sp.
VTGESSSRWAGSITKATHDQWALARRGQLAHIQSLEAGVRTIAQRLSLPVGAKGSKGSPGGYRSKQEWFAKSRRLHLLEDRLERERADHEAGRVRVVRGGKKLLRTRHHLQAAQLTEAGWRVRWETERWFLKADGESGKRYGNETIRVSLDGEVSIKLPASLAALANAPHGRYVLACRVSFRHRGEQWADRVAANRAVAYRIHYDTVRGRWYLTASWQIPPVRNVPVEAARSGGVVGVDMNADHLAAWRLDAHGNPVGGPRRFGYDLTGSARHRDAQVRHALIRLLHWAKRHGLAVAIEDLDFAADKTREKHGRRKRFRTLISGMPTSKLRSRLVSMAAELGVTIVAVDPAYTSRWGAQHWQKPLTTKTRHTTRHDAAAVAIGRRALGCPIRRRTAPPPQHRSDAVGHRTVQAASDLPGREETRPRIPGPRTRSVGAGCGAKAGDQCAHNRSGHTAEHESWHQDSLPLSL

SEQ ID NO: 19101 - protein, 362 aa, Mamestra sp.
VTYIVIFPQPSHGLKHVTYTSKGWHELLRRVTPLTITSSWPSITDHKKELWAPYLDTSVVDMKKFGCCIQTDGVAVSLSMNRPKRKQTSTLPKSYVTNTFNEDRIVAVDPRSRVPVAACDSRTGFKRITKRWVRSHTLEWKRERYRSQKLRHVELNEVADRHRVELDRGVQITCRNGHQVKLYTDFRLKWFDARQRPFERTRKLTRLSFNKYMMTARTNERIVRETFLNDTPSDKVLVLYGAGVNFVNVACYSGRKFKHTDLLRRLRSRRNIRVRLVDESYTSKACSDCNELRNGTYTRLRMNHRLRRGVCPDCNADVERDYNAAKNILVNFQRSAVCRPSPSCDSGVTTDKDSHSIRPIIQ

SEQ ID NO: 19102 - protein, 385 aa, unknown
  TnpB Polypeptide
VKTIRTTKIKINGSSKAPTIIQNYIQALNWLSPIVFNSKELNSNRIAKAHYPVLRDKFQLPSQLACSICKQIAATYNTAKSNKRWKLAVFKNAVIPLVWKRDFNKSGKGVTLWGERISLYHPSIAPTNTWKDSKLKQVKNKLYLLLSYEKDIPEPAQQGCIIGVDSGIKRMLVASNSSNNKAFFFSGGKLNHQRKCIRTRRSKIQAVGTRSAHRLLQRLAHRERAITEQLMHVASKALTQYAVKSNARVVVFEDLSNIREASLKKGKDLREKVCRWPYSSLQFKAGYKLAEKGIKTETVDPAYTSQTCPKCGHIAKGNRIGLQFRCMACGYRGDADLTASKNIRGRYILREQGFRRMGSVNTQERSGYGLEVVSRHSVTCSGIQV

SEQ ID NO: 19103 - protein, 417 aa, unknown
  TnpB Polypeptide
MMQLVEQHIIKRADPRFAPIDAAAFKAKNLYNAALYLVRQSFIFENRYLGYEAVYHQMKGHDAYRALPTKVAQQVLRLLDKNWQSYFAACEAYREDPSKFRKRPKMPHYKHKTDGRYALVYTIQALSRPGLKAGLIQPSMLPITVQTKQTRIAQVRIVPRIGFYVVEVVYERAEAAPAGNPALSAAVDIGVDNLAAITSNKKGFAPRLVNGRPIKSTNQYYNKRKAELQEALGHEGTTARMERFTAKRTRRINHYLHTASKAIIALLVQEGIGTLIVGKNPGWKQEAELGRVNNQHFVGLPHARFIAMLEYKAKLAGIRFVLQEESYTSRASFLDGDAIPTYDPQQESKHTFSGKRVKRGLYRAKDGRCLNADVNGSYNILRKALPTAFANGIEGVVVRPVWLTFAWSVQPRALAAA

SEQ ID NO: 19104 - protein, 353 aa, unknown
  TnpB Polypeptide
MYRTIKIKLDRSNELIQTVRLWNAACQDVIDYGFAAHDYNKTRLNKATYKDLREKYPTLPSALIQTARDQASDMLKRLKFETKPFKHPFGAVRFDVRTMKVFLESGYCKLTTAFGRLRYDFKLAEYYKKYATWKVMNAQLRITKNACYLNVQVEQPDPEATVGDKRVGVDLGINNIAVCSDNTFWKSGPVKAVKGKYQYLRSKLQSIGTRSAKRKLQMLSGRERRFIKDSNHQIANWILSKPFDVIALEDLTHIRDGKKNKKLGKWSFAELRSIVEYKAAAIGKKVVAIDPRYTSRTCSKCGFQKKENRNGRTFKCKSCGFQIDADLNASRNIATFSRSDRSRLSVNQPIVAS

SEQ ID NO: 19105 - protein, 722 aa, unknown
  TnpB Polypeptide
MPPPTGKFVKPAAAEKHFGVDRRTLKKWVERGHLRSVRPGDVGPWLFDISGTAPVTVGVGAGAEPEAHPSPSVNDEPVDVIYARVSTRKQLGNLTRQIASLQAKHPGCRVFKDCASGLNFKRKGLQALLQLAAQGRVRNVHVAYRDRLCRFAYDLVRTPTRTPTPAPTLDSALALARSSSYSGSTTQRSSWTQTTRTPPSRTSPTTSSLSSPFSALASTGGGAAAAVANKRPKKAATPTAPTPMPPAEEDRKRKTPLPFQRKVAVEGHLRCFKVRMLPTPEQTRELKRAFSASRRAYNWALDRVKNHGERPNNIALRNAYRKEPPPPWAAGKQAVASRIVAGGVKQLADAYASNHAKQKKDPSHAFEIKFRSTRRCPSEALKIDKADAKGGQSPLNRFAPMAHPYPKRFAEQRRCGRTECLAFLGNNFGGVGGIVLQDKPRVIERMLAEGNRLKEDAKILWDRRTGHFQFVYTFEQPRLADPDPTFAAKRVVAMDPGVRVFQTWYSPTSGAYGELNAGFQQQIEPRIHALDALHSRVERRYDTVFEGKRVVRKTLKAPPRNRTARQHYTTTRRLARKLARDRRRHVGWVESAHYDAANFVLKDHDVIIQPWLHSARLTQKSERVIRSKVARNMLTMSHYKYRQRLQWASTRYAGRHVLVTEEPGTSKTCTLCGHWHAGLGSSETFECPKCDLRIGRDLNGAIGNFYAAYGEAVGVGWDRRSG

SEQ ID NO: 19106 - protein, 342 aa, unknown
  TnpB Polypeptide
MMEGILVPRINSVSLWLVDDHVWKPVNPTKIRINGFENIFFTSVAINTHRGWAHLDLEPSKEFYKLLTRGFKPASHAKIKLDRKNRRAIFHLSLEKEVKIYRPGNIKPVDVNENSVATLYEAFAVILETDLAKTILGYSYRKESIQRRNGSGSRETRKAMKKLKEGKKKKDYRMKTANLVVRDAMRMRGVIVIERISGEDIRVMIARYKNKQLRHRIYQSALKGELNAIIDKAREYGVPVLMVDPRNTSKTCPIHKAVIEYGEDRIGVCSKGGERWHREVVALINIYLKTLEALYEGYAQKGFGVLGIALDGSTVPLGSTATNKPIEIPRFLWRVEAPMPQG

SEQ ID NO: 19107 - protein, 299 aa, unknown
  TnpB Polypeptide
MVDVCITVGIEENVSSLKTLSLKAYHRLSHDMLSYYRLCATSTATGILRNYRKAKKKNPRTMLPYAKKLMLTTCYGFKIQNDLLRLPVKPREHIYVRLNIHTLQTLSGLNVRSVTLTPNSLGITYSKETIEIEPDGYVGVDRNLDNVTTAATDGAVKAFDLSKATRIKSTYRFVKSRFKRNDSRIGTRIHRKYGEKQRNHVAPLLIYVPARDTSKRCSTCGYKTLESTQRRLWCPHCGAILDRDENAARNLAARGLRFSPNGPPGEAVKGNPTTTVILRVDGGKLSQQTNATTIHPTKT

SEQ ID NO: 19108 - protein, 257 aa, Okeania sp.
LIIHRKPIELNGWNHKLPFIGIVRTYESIEATTKKITISRQASDWYLSCSYEFHSHATQKKTDVIGVDLGVKTLATLSDGKVFESVRSYQKFEAKLSRLQYLNRHKEVGSANWKKTQLKIAALHRKVVNIRQDALHKLTTYLAKNHGSVVIEDLNVRGMLANHKLAKSIADQGFYEFRRQLKYKCQWYGCDLVVVDRFFPSSKTCSNCGHVQDMPLHLRTYDCPDCGLSILLRFKRQYKFKKCGRLDRECLCMNACG

SEQ ID NO: 19109 - protein, 205 aa, Okeania sp.
LGEAFKRFFQGLGKRPRFKKKGRSDSFTIDNCGKPVELNGWSHKLPFIGWVKTYEPIEATTQKITISRQAGNWYLSLSYEFSATPTPKITDVVGVDLGVKTLATLSTGQAFPSIKPYRTAQDKLAKLQRELSRKVKHSNNWHNAVIKLARQHRRVAFHVAQRNIRKDALHKLTTHLAKNHGHVVIEDLNVSGMMANHKLAKSVSR

SEQ ID NO: 19110 - protein, 236 aa, Okeania sp.
LEKSSPPGKTHACIDLGLLHYAVTSDGEFIEVPKFFRLSEHRLSKVQVRLAKRRKHSKSWKILKGKIAKLHQLIARQLLDWQFKLAYHLFSDVSVIFLEDLQIASLVRRCKAKLDDNGQFLPNGQSAKSGLNKSLQDAAFGQFIQVLEYVAWKLGKRIIKVDPRGTSQHCWECLNKVSKSLSERFAARHERHSCPKCGQELDRDYNSALLIQKIGLLSTQGEDITSHARSGQSFSD

SEQ ID NO: 19111 - protein, 374 aa, unknown
  TnpB Polypeptide
MANRAIIYRLYPNEKQKVQFQKTFGCVRFVYNQMLTVQEERYKNNESHLSKFEMNYYCNNVLKIEHVWLKEVDKFALTNAIYHLEDGYQRMFKHLGKHPKYKNKHTAKRSYTTNFTNNNISIGDNYVKLPKVGKVKAKISLDVSLLKIKSATITQNRDDSYQVSILVEYDEVPITVGVATEDNTIGLDYKSDGLYVDSNGDIADMPHYYRKSAHQLAKRQRKLKNKVVGSNNYYKQQKKVAKIHRHIANQRKDYLHQKSTEIVNQYDFVCVEDLNMKAMSNKGFSNGKATMDNGYGMFLVFLDYKLQERGGKLVKVDKYYPSSQLCSCCGFQNAELKNLFIREWICPNCGTYHDRDRNAALNIKTEGLRLLGAS

SEQ ID NO: 19112 - protein, 221 aa, unknown
  TnpB Polypeptide
LGINNLATCVTNTGESFIIDGRRLKSINQWFNKKNARLQGIKDKQGFGKRTTNRQKAIARDRNNKVKDYMSKAARIIINYCIANDIGTLVVGYNETFQRGSNLGKQTNQDFVSIPYGKLRDKLRYLCELNGIAFVKQEESYTSKASFWDKDNIPVYNADNPQEYEFSGNRIHRGMYKTKDGITFNADVNGALNILRKSSVVSLETLYGRGEVDTPVRIRIA

SEQ ID NO: 19113 - protein, 383 aa, unknown
  TnpB Polypeptide
VNTTFRRISIRLFPTEEQEKMFYRHIGCCRFVWNHMLAEHIKAYEARQKTLYGPDMTKMLTKLKSEENFGWLKEVSAYSLNRICKDLDRAFSMFFKRISGYPKFKSKKKQNKSFPVRTNENRFYFTKDFVKVEKIGKIRYGFEHTGIIGKNKKFYDARIYLKDDKWILSVVIDCENQAVELTDKSLGIDLGIKELAVCSFGGEKLVFHSINKTKRMKNLENKLKHIQRTISRKYRVNGNYDKTNGIIRYENILRGIFYRMSCIRENYTHQTTHHLVSLLPNRVIMEDLNIQGMIKNKHLSKHVCEQRLSSFITQMRYKCAWYGIDFVQVDRFYPSSKTCSNCGHVKKNLKLSDRIYKCPECGLEIDRDFNAALNLEKYVANQQ

SEQ ID NO: 19114 - protein, 226 aa, Crocosphaera sp.
MPETQPITVACKLEVSNTLAKEIEDTLLVFATSCDWVNQNTPNKMTNKTAMQSLVYKNVRTNFGLSANLAIQAVRRVCANRKTAKQKGRKVKEFSPTSISYDARIFSFREKDWTVSVKLLNSRQRIKLLIGNYQVGLLKGKDPKGATLVKRKNGDYYIHITLDEPTQPETKTDKVLGCDLGRTDICTTSEGESWSGKQVADKRNNYAKLRAVIQKKASKGTLMLTA

SEQ ID NO: 19115 - protein, 286 aa, Psychrobacter sp.
MKTLKLRIKDKHANQLNKLAGAVNFVWNFVNDLSFKHLQRTNHFFSAYDIAAYVKGSGEFLNLHSQTLQAITETHVKSRKQFKKAKLNWRTNNPNAKRKSLGWIPFKKAAIKYLGVKKAGKKALKSTIQFSLAKGKKLTIDVWDSYNLALYTINTCELVQDSRGHWYACLTIKEFPKITGGTEQVGIDLGCRDSATTSNGEVLKTKVTQQYAKKLGIAQRAKNKQRVKAIHAKIKHTRQDLIHKFTTNLAKTNKIIIIGKLQSTSFTRGKLASPSMMQVGLRLSGN

SEQ ID NO: 19116 - protein, 435 aa, Psychrobacter sp.
MKINKAYKFRLEPNVEQEIILNNLVGSARFVWNQMLAMSFEMFAKNEFISATNLVNKIMDIKANPAFDFLKTHANAVSLQQKVRDLASAWSRFFDPKTHARLKENKRKPKKPKFFTLADGTEIQLRPIMPRFKRKSDGRDSIRLVQFDKYCRVEGKRVKLPNGVGFVKFRKSQDIIGTIKNITISKKSGRWYVSFGCESILSQKPIHPSKSAIGLDMGITKLLTLSNGEYIQPKNSFKTNQIKLAKLQRRLSKKLLFSQNWKKQNRKIQKLHQHIADIRHDYLHKITTSISKNHAMIVCEDLKVANMSKSASGSMKKKGSHVKAKSGLNKSILDQGWGMMVNMLEYKQQWQSGLLIKVNPRHTSQTCFECKHVAKENRQTQARFECVKCTYIASADVNAARNILAAGHAVLSAEGGRGKGRPLKQKTCDGREKVA

SEQ ID NO: 19117 - protein, 418 aa, Lysinibacillus sp.
  misc_feature (418)..(418): Xaa can be any naturally occurring amino acid
MTKGKKDCFIIELKLLIDTWQKDILLKRFEIARTLYNTTLSYAVKQYTLMQESKHYRKRLRYYQKAKKSNDSKELKQTAKELNNIRQSFGLSEYQLHAYIKKHQHNYKKHIDSNTSQKIASTVWKAVQDVLFKGSKAHFKRYGMLHSVEGKSNKAGIRFKENIVYWNGLTLPVRIRKQDLFVEESLAFHTIKYCRLVKKVIRGIHTFYVQLVMDGIPPAKRIPSTGAFRHSYQKQKRVGIDIGPSTIAVVSEETVFMQQLAPEVPLLEKQKRRLLRKLDRSRRSTNPNNFKKDGPIKHGVKLHWAYSKNYQKIKKQVKELYRKKACYIKEKHGALANKILSLGDEVYIETMHFKGLAKRTKETKTTIQGKIQSKKRFGKSIGNHAPAMLVEIIHQKLGYTKQTIQKVNTITFRASQYX

SEQ ID NO: 19118 - protein, 407 aa, Halorubrum sp.
MELQRTAVVKLSVPNDRRDDLKETMDTFRNAAQRFADRGWEGNNDGYVITSRSQLQPYLYDDIRDETGLHSDLCVAAVNHAADALRGVVDRMKGGEKVSKPVFTSNTTVYNTSAISYFDGYCTLAAYGSGRVKAEYVYPDDSIQAEYMESDKWDKQGAKLRYDQQTDTYYLHVSVKQERDDTQEEAEGRTVLGVDRNVDGYLAVTSSGAFIGNADLLNHKRREYERRRGNLQQTGTRSAHLTIQSIGDRFANWSENYLHHVSKEVVTEAVANGCETIVLEDLENIRERMSDLSKLQQWAFRELSRKITYKAKAEGITVEVVNPAYTSQQCSHSECGFTHEDNRDGDEFVCQKCGKELHSDYNAARNIAARYLRNRRKSGSGGATNHLALKSGTVNGSGDFTPTVSRG

SEQ ID NO: 19119 - protein, 369 aa, unknown
  TnpB Polypeptide
MILTYRYRLLPSKRQHAALVAICEAQRQLYNAALEERIDCYRKTGKGRSYMDQCKSLTVCRQELSEMAVLPNRLQRWTLKRLDDAYAAFFRRLKLRNGKAGFPRFRGKDWWKSFGFAEFSGIYFDGKRLRFNGMPSGLKVHLHRPLPKSVDIRSCIFSRDHKGWCIYFQVYIEPPTKCAVSTMVGLDLGLKVFAYCSDNVVIPNPRIANKVQKEMRRRSRALARCKRGSKRRIKVKNQLICLHQKIVNQRTAWLHQQSAALVNRSDFIVVEDLNISGMVRNRILARSIADASWSTFLDFLEYKAEKAGAHFVRIDPRNTSKKCSGCGKLVPKSLAVRTHACPHCDLMIDRDWNAAKNILRAGLPAGWLT

SEQ ID NO: 19120 - protein, 426 aa, Halobellus sp.
MHYNYKYRLDPSEALTETLLHHVDTCRQLYNHVLYKLNETDEIPARYKVTLPDLKTWWDDLNDIHSKVLQMVVKRVYDNLSTLKAQKENGRVVGMLKWKPPREYRSLTYNQSGFKLKNTSGRPVLWLSKIGEIPINPHRDIPENATIKQVTVKQEPTGEWFATFGIDVDEDTLEKPENPERVVGIDVGILKYAHDTDGTAVESPDFSDEREQLERAQRSLSRKEHGSNNWEKQRKTVARRHADLKRKRRDFLHKLSAYYAREYDLVAVEDLDVKGLVELPGNSRNRARASWGTFLRMLEYKCEREGTHFVAVDPRGTTKECASCGTETDKPLWVREHSCPSCGFEADRDANAAWNILSRSLEDVGVGYSESTSPEIEDFWCANESRSDSLTPVETALPADTPVSAKRVVETGSPTLKERTASAVSE

SEQ ID NO: 19121 - protein, 425 aa, Actinomadura sp.
LLSVINSICRVTDVQLRYNFRLYPNGPQRAALARAFGCARVVFNDALRAREDARAASRPFMSSRELSRRLTAAKRTPERAWLGEVSAVVLQQSLRDLDAAYRNFFDGLKGKRPRTGPPRFKSRKDRRQAVRFTANARWKITPSGDLSLPKIGDVRVKWSRSLPSTPSTVTVIKDSAGRYFASFVVDTRPEILPKATTEVGIDLGLGYFAVLSDGTKIDSPRFLRRAEKKLRRAQRAFSRKTKDSKNREKARLRVARVHVQVGDARREFHHRLSTRLIRENQAVAVENLAVKAMARTRLAKSVNDAGWSTFVSMLEYKAAKFGREFHRIGRFEPTSRVCSACGMKDGPKPLRVRVWTCGACGATLDRDINAAVNIGRAAGLAVTACGARVRPECVPARRGEAGTHRDGQQTVVGIPTFMEGSGSQP

SEQ ID NO: 19122 - protein, 307 aa, Actinomadura sp.
VRLRYNFRVYPAPGQREALARAFGCARVVFNDGLRARQEARSAGLPYIKDTDLQKQVITAAKKTPERVWLAEVSSVVLVQALADLHTAYRNFFASAAGRRKGRRVAPPRYRSRIDLGLTHFAVLPDGRKITSPRFLRRVERRLRKAQRALSRKARGSANRIKARARVARLHARVADTRRDHHHKLSTRLIRENQAVYVEDLAVNGLARTRLAKSVHDAGWSQFVAMLEYNAARYGRAFARIGRFEPTSQVCSACGVKDGPKPLHVREWTCTACGTVHDRDVNAARNILAAGRADRVNACGGTVRPPV

SEQ ID NO: 19123 - protein, 396 aa, Actinomadura sp.
VSRYRLTPTPVQTPGLLEHCAHARLVWNLCVEQQSLYRPGRGRMPGFAERCRQLTQAREAFGWLRDGSVIVQQQAVKDHSQAMANFFAGTHCLPTWRKAGRDEGFRIVHAKPGDVRRVSRNVGQVRIPKIGWVRFRWSRAVPEEAKSYRVTRDRAGRWHVAFAVAPKPVPAPGTGEVVGVDRGVAVSAALSTGTLLRSPGLTETERQRLSRFERRLARAARGSRRRGRIRLAMARLKARETDRRRDFVEKASTDLARGFDVIAVENLDIRAMTRSAAGTVERPGRGVRRKARLNRVVLAQGWGRLVARLEHKAPGRVVKVKAAYTSRTCNVCKHVAAESRESQARFVCVACGHRANADVNAARNIRDGTAAGHAVAARGRPGMPGRTNREPQLTAP

SEQ ID NO: 19124 - protein, 450 aa, Bacteroidales sp.
MVSIAHRIELKPNNKQKTYFRKAFGCARLAYNWGLAEWKRMYEAGEKPNGRKLRMQFNAIKKEQFPFCYEVTKCATMQPFDNLQRAFDNFFRDLKQGKVAYPQFKKKRDNEGSFYIEADKIVLSETNKGSKAFSKIVHNESGKHQYIHLPNMKRGGWVKMVEHIRFNYTKINNVCISQSGGKFYASFSLEITEEEYKRTHPNVDLVDGNRKVGIDVGIKSALILSDGIAIENPKPLKNNLRKIKRLSRQLSKRVHPKTKEERLKGVGKSNNYMKLSVRLAHAQGRVANIRRDFLHKVTTILTTHYGEIAIEDLNVKGMTRNHRLAQAVSDVSFGELRRQIEYKAATNGVKVLKADRYFASSKLCSVCGEKKDDLKLSDRVYRCKKCGSVLDRDFNASMNLLGLLVKHKIGTDYPESTPADLTALLSRFSANGIATSKVETGKQRKSIVYA

SEQ ID NO: 19125 - protein, 401 aa, Fischerella sp.
VLKAYKYRIYPTGEQAILLAKSFGCVRWFYNHALNLTSETYKATGKGLSRNDIINLLPSLKKEHEWLTEPPSQCLQQVALDLSSAFLNFFEKRAKYPNFKKKGQKQSIRFPQGIKLDGENLTLPKLGKVYCKVSRLPEGKLKSVTVSLTHRSEYYAACLYDDGKDKPTSTSEGKAIGIDMGINHYAITSDGTKHGNPKYYRKYEIKLAKKQKQLSRKQKGANNRNKARIKVAKVHSKITRCREDFLHKLSRKLVDENQVVVVENLAVKNMVKNHNLAKSISDAGWGQFCTMLKYKAEWQGKTYIEVDRFFPSSKTCHVCLNQVRSLPLDVRFWTCENCHTKHDRDINAACSIRDEGLRILSQSGLDGLRRRATGVAGGHLATASGQRVRPSKGTAFRGNVG

SEQ ID NO: 19126 - protein, 364 aa, unknown
  TnpB Polypeptide
MIVLSHKIQIKNPTIKQDQYFRQACGISRFAYNWGLAEWQRQYDAGLKPTALAVKKAFNAIKPIEFPWVFNVTKCAAEQAFIDLGSAFKRFFKHLSKYPRFKKKGIHDSFYLSNDQFKIEANKIRIPKLGWVSVTESLRFEGKVLSATVSRIANRWFVSLNIQMNFAPHKISENQADAVGVDLGVKNLATLSNGSTIEGSKPLKKLSHKLARIQRHLAKCTKGSKRYNRQKIKLAQLHYRIRCIRQDSLHKLTHHICQDFKIICIEDLNVKGMMKNHKLAKAISDMGFYEFKRQLEYKATLFGNWISTVSKWFPSSKTCSNCGNKKDELKLSERIYLCDKCSFEIDRDLNAAINIEREGICLLS

SEQ ID NO: 19127 - protein, 378 aa, unknown
  TnpB Polypeptide
MLSYRFRIYPSKKIEQKLKEHLELCRWLYNRLLEELNKAKSEDRKITKKETQALIVKLKDEKPELKEVYSKVLQMVNHQLWNNIFALAKLKKNGKKVGKLRFKGKNWFKTINYNQLGFRLEGKKLIVSKIGEIPIKIHRQIEGKIKGVFIKREKSEKWFAIFQVEQPLKPLPKTHKSIGIDLGIKHFLTDTDGRQIENPKFYEKSLKRIKIEQRKLSKKKSGSKNREKQRVKLVKAYERLVDQRDDFLHKLSRFYVNSYDLIAVENLNIRNMIKNHHLASKILDASWSKFLYMLSYKAEKADKIVVKVNPKGTSKIYKHGDLDRDYNASLNILERALSGLGQSFEPVEIKPLLSIPASAVITGQVSSLKQEAPSVKVG

SEQ ID NO: 19128 - protein, 487 aa, Catellatospora sp.
VARFTTFRFTVNPTAEQETVLRRHAGAARFGYNQCLRLVKQALDGKQCGVGGKVPWSGFDLINAFNAWKHSADAGRLMVASADGTITVAVTGLAWRSQVHQQVFEEAAVDLGRGLAAYTASRSGARKGQRAGFPRFKSKKRAPLSFRIRCKTSATGRANIRVGEHTPRTVTMPALGTLAVREDTRRLRRMLAKGRAKIVSATVGHHAGRWAVSLTCEAAELNDAARHQPATSGTGWVGIDRGLTAFIVAARADGTEAGRVDDWPRPSRAGMARQRRLARDVTRKQRGSNNRAKAAARLGRHHARVAATRRRFLHKVSNELVKTHDRLAIETLTITGMMRNRRLAAAVADAAWGELGRLLTYKQQWRGGHLTPVDRWYPSTKTCARCRTVAPAMPLDQRTFVCGACGYQADRDHNAAVNLAIWAEQHHAQIRDLHAGGPVINARRGEGSGPRTRAGETSPDDAGTAPNPPGARRGRPRRALSHNSTEL

SEQ ID NO: 19129 - protein, 572 aa, Catellatospora sp.
MGGSMWSEQVLRAAAACRGPGADARWWWSVTAGFPRVLRPVAAPFVATGPSGVAVRDRLKHLTPADAHVLALIGQHLGGLASADLQARCRDGHEHDADRWAARKRSLTGVSSSRWAGAITRASHDQWALARRNLDAHIRALEAGMAILGHRLAQPLGQPGAKHAPGGYRSRQEWFGKSRRLAMLRDRHTAAVKDWRDGRVRVVRGGRRLANTRHHLDQAGLTEAQWRQRWQAARRFLSADGETGKRYGNETIRVTPDGQVSIKLPVPLAHLANTAHGRYTLPGRVVFAHRGAGWRDRVEANLAVAYRIHYDPQRGRWYLTASWQQPQVQTIPLAAARAAGMVGVDMNADHLAAWLLDVHGNPVGDPRRFGYDLSGGADRRDAQIRHAITGLLHYAKRAGVTAIAVEDLDFTGEKSREKHGRRRRFRQLISGMPTGRLKARLVSMAAAVGLAVVAVDPAYTSKWGAEHWQQPMATPRRKPTRHDGAAIAIARRALGHRIRRRTPPPRDDQSDRCGHRSVQARPGVPGREGPRPGAPGSRTRCAPPDTAVKAGDQRAQHRSGHTAAHTQLMHSH

SEQ ID NO: 19130 - protein, 335 aa, Microcoleus sp.
MASSLSLLFQPSNSNAAKKAIKQAELRNSVMRSDLPEWVKETPCHIRQNAIFDAYRAFKASSDAKFRSVRDYSQTIKFNDSNFRSGTWYPSLTKGLTYHTSEVIPDCDRGTQLVYCKGRWFGVFPVPVTLPPTVATGIIALDPGVRTFMTGFDGNKFLEFGGVDMGRIARLCQHLDNLMSRISQATKRRRKRMRQAAHRMRIRIRNLVDECQKQTACYLTSNYRVIFLPTFESSQMVARSRRKIRSKTARAMLTWAHYRFKQTIKHQANIRNVSVIDVTEEYTSKTCTHCGHLHQKLGGSKVFTCPECGYSIPRDYNGDERYITESFAGYRLYLL

SEQ ID NO: 19131 - protein, 391 aa, Microcoleus sp.
MLKAFKYRIYPTSEQSILLAKSFGCARWFYNYTLNLTSETYKQTGKGLSRNEIINLLPSLKKEYEWLTEAPSQALQQAALNLSSAFLNFFEGRAKYPNFKKKRNRQSIRFPQGCKLKDDILRLPKIGDVHCKVSRQPEGTLKSVTVSVNPSGEYFAACLYDDGKNLPEKSSEGKAIGIDVGLTHYAITSDGTKHGNPKYYRKYEKKLARRQKQLSHKLKGSNNRHKARIKVAKVHAKIVRCREDFIHKLSRKLVDENQVIVVENLAVRNMVKNHKLAKSISDAGWGEFCTMLKYKSEWEGKTYIEVDRFYPSSKTCNNCLNRVDSLSLDIRSWQCPKCGENHDRDINAAKNIRDEGLRILAVGHTVTASGGRVRPSKGTAFTRHLPVNEES

SEQ ID NO: 19132 - protein, 414 aa, unknown
  TnpB Polypeptide
MKLSFKFKPAINHKNLNIIRTLSYHTSKLYNIVNYSVNKGKNKPVYTKLDEQFRGNWHCDFLHSHNRQHCLKLLAQNWKSYFRSLNDYKNNPSKYNGMPKPPKYKYLDSNPNEIIFTNYAIRIKNGNLLLSLSKKMKSMYKVDNLKFELSDKVQSFINMDSIQQVKIKRESVSNRWYLIVVYNKECKNNDGDNVMSIDPGLDNLAAITFKDSNKNYLINGKPLKSKNAYYNKEIARLSSIRMKQVGSKKFKNTNKIKSLRINRKNYVLDYLHKASRQVINIALDNHVGTIVIGDIKNIKQNSTIKSFVQIPVQRFVNMIEYKAKLEGIKVVKINEAYTSGCSAVDLEKINKSNYNKSRRVYRGLFKNKKTTINSDINGSLNILRKHLKDKCIPELIHGARDNGVVYPPKRISVA

SEQ ID NO: 19133 - protein, 384 aa, unknown
  TnpB Polypeptide
MRIHKAIKLKLYPNKEQEKHLIETINACRFVWNYYLAKRKEEYLNGNKSFNYYKCAKDLTILKKSDDFKWISNSQIHPLQQSLRNLDIAYTRFFKKKSKYPIFKSKNDPIKSFQKPRDWKIIGNKIQIEKWVAIRFRGTLPSSECKLGAITVVSQNGKWYASIKYTEDVTVKKKAGNPIGIDMGLTHLAITSEGDKYVNIRSFRKSEKKLAEAQRVLSRKTKGSSRRNKQKVVVATIHEKIKNRRINHLHQTSHRITSENQAVIVCEDLAVKNMLKNRKLSKAISDAGWGEFLRQLEYKQIWRGGEFVKVDRFFPSSKTCSNCNHIVEKLPLNIREWTCPKCEAIHDRDVNAAKMILKQGLRNSRYAEDSKTKRKRGKSVEARR

SEQ ID NO: 19134 - protein, 301 aa, Microcystis sp.
  misc_feature (253)..(286): Xaa can be any naturally occurring amino acid
MEKAYSYRFYPTPEQESLLRRTLGCVRLVYNKALHERTQAWYEKQERVGYAQTSSMLTDWKKQEELDFLNEVSCVPLQQGLRHLQTAFTNFLAGRTKYPNFKKKHQGGSAEFTKSAFKFKDRQIYLAKCTEPLPIRWSRQIPESCEPSTVTVRLHPSGRWHISIRFDDPTIKPLPVIDKAIGIDLGISSLVITSNGDKVSNPKHFKKHYRRLQKAQKNLSRKQKGSKNREKARIKVARIHARITDSRKDHLHXXXXXXXXXXXXXXXXXXXXXXXXXXXXXXXXXXLKGVVIAGILPRKCR

SEQ ID NO: 19135 - protein, 439 aa, Halorientalis sp.
MLEVHRTHRARIRNHSQVAESLDRHGWSASKLWNVANYYSREVWEETGEIPDHEELKDELKEHDKYRGLHSQSSQRILEELAEAFNSWYSSDDNRDNPPGYRKENYYDDQGRRVHEEHPRSTVTWKQNGIRHDAKNNRVRLSKGANHKEHPRAREFILVEYETRPGVTVENLQQVRAVYDQAKERWELHLVCKDEIETPNAPGTETAGIDLGISNFAAVAYSTEDADLYPGNRLKQDGYYFPKEIANCDDSGSERATRLHAKWSERRTHFFHALAKHIVERCVEKGVGRINVGDLAGVREDENGESKNWGKHGNLDLHGWAFDRFTNILEYKAKVEGIEVVDVFERDTSKTCCICGTEDESQRVERGLYVCEWCDAAFNADVNGAENIRLDINDSTSNSESASSLDGDRSTGWLAQPAVHLYDLSCGFQPQREVVDCEP

SEQ ID NO: 19136 - protein, 350 aa, unknown
  TnpB Polypeptide
VSASLLKLRRTIHAKLVLDRRGKREAVAREYNAWQRELQGSEERLYSATKQQAERFKRRVKKQNHHVLKRHREYPVILRHDCVKLQKQKGSIFHWWIRIPLHPESVWVPIQLPYEQEPLLKHELRECKLLHGENDEWFVNITVQKDARLKRKYASILPVDMGVRKLATTIENGKPRFYGKEVRTIRGRYFRLRRSAGKPRIIKKWRCKERETVRHQVHAITRRIVEKAKQSNAIIAIGDLKGIRNGNRGRSFNRRLSSQPFYLFKQLLTYKANWEGIRVLVVPEAYTSQTCHRCSMRGYRVGGRFSCQNCDLTVDADVNGAWNIAKRAHGLLHETGAVLTPPITLGEWEP

SEQ ID NO: 19137 - protein, 361 aa, Nonomuraea sp.
VGVRRSYKFLLRPSDQSAEMKGIRADDPGGQGRWSFSSQQATLRRLDKAFTAFFRRIGRGRTPGFPRFKGRGWFDTVEWPKDGDGCRWDSQPAHPTTTFVRLQDVGHGRVHQHRPIKGRVKTISVKREGVRWYVVLSCDEVPADTLPATGAMAGIDMGVASLVTTSDGNHLVNPRHLAKTADRLATAQRDLARKTRGSKRRVKAVARVARLHAKVRRQRLDGTHKATLSLVRAYDVIVHEALHVANMTRRAAPQPDGQSGFLPNRASAKSGLNRSILDAGWGVFLTVLAHKAESAGRELIAVNPANTSRICARCGHSAKENRISQAAFRCTACGHATHADVNAAINVLRAGLALRDAAGAA

SEQ ID NO: 19138 - protein, 427 aa, unknown
  TnpB Polypeptide
MKDRDNKFYVYRFRLYPNAEQVAYLDEQMSYNRFVYNFFLERATHLYKTHNIKFNYYEFKKILPLLKKGFSFLKEANSQSLQASLKDLDDAFQKFFKKQAGYPNFKKKGVYSSIVIPQSFEIKDSFINIPKLKTAIKVKFHRKVYEAVKSISISKTTSGKYYVNMLVEKFAFTPYIPKKVVGISTGIDLGLKDFAIITTGTSFDNKESFKIPNPKYLLKSQKRLIKLSRQLDRKVHKRSKQDKTTPSKNYIKFKNKLSKLHEHIFNQRNDFLHKLSSRTVNDSQVIVLEDLNIKGMVKNGNLSKPISDVSWSKFNDMLEYKASWYGRQVFKVNRFYPSSKTCSTPDCGYIHKDLKLSERFWICPQCGAVHDRDVNASINLFLEGLTILKNTPGTAELTPLEYALTGIQSIGYSNHTMRQEAYQFIDR

SEQ ID NO: 19139 - protein, 392 aa, unknown
  TnpB Polypeptide
MEGAAVPRKTNVCRDGYTVQYTTLKVRLYPTPAQAELFEKTFGCCRYIWNQMLSDQQRFYLETDAHFIPTPAKYKNEAPFLKEVDNQALTQEYNKLSQAFRVFFKHPETFGHPNFKKKKTDRDSSTACNHEFESGPTIYTTKDGIRMTKAGIVKARFSRRPQAWWKLRRITVSKTRAGNYYCSILYEYQAKKPEPAAPTPDTTLGLKYSMQHFYVADNGTYADPPKWLKQSQEKLAKLQQKLSRMVPGSKNYQDTAQKYRLLHEHIANQRRDFLHKESSRIANDWNAVCIRSDDMRELSRLTTRGNAMEAGFGKFREMLRYKLERQEKRLLVIDRYFTSSRLCHKCGYTMLEELSTKRRTWVCPKCGAALDREVNAAKNIKAQGLVQLGKSA

SEQ ID NO: 19140 - protein, 392 aa, unknown
  TnpB Polypeptide
MIRAHKIRLNPTAEQVNYFARAAGTSRFVWNWALAEWNRQHEAGEKPTALKLKKQFNEIRREQFPWTWEVTKNASDQPFLDLGKAFTAFFEGLKSGKRRDRPRFKSKKRSRVSFYFANDQFELGDHRIWVPKLGWVNMAENLRFKGKVTGARITKTAEWWFVSIQVEISDANPEKRPAAIGIDVGLNRLATVSTGEGYENQAFLRTALKKLRQANKRLHRRVKGSKNREKARCQVARLHYRITCLRDDALHKLTTRMADCYGIVGIEDLNLKGLFKNRRLARSFSDAALGKLLGLLTSKVMQRGGRVVKVGRFFPSSKTCHACGWKWEAMELSDRVFVCQNTRCAYWQFAQDRDHNAALNLLFEALRLIGLSDQAVDGIGSDEDVNMAVDAG

SEQ ID NO: 19141 - protein, 413 aa, Haloarcula sp.
MEHSYRYRAYPTEGVADELEHQVDIHRQLYNHVRWDYTNSPVDAKPSEFDQNNKLPEWKQKWPVFAETYSKAAQATVARFHRNLSNLRKQKENGHTVGRLKRQAPTDYRSVTYNQSGFDLDEKRGQDGFAYVRFSKVGWVKIRYSRPIPADSSIKEATFKKETTGEWFVSFGLEIDDANLPEKPDVDSLNPSNSVGIDLGILNYIHTSDGKTVDWLDLEGEYERLRRAHRKLSRKEHGSNNYENQRVEVAKAKRDIHRKVLDYQHKITTWLVKEYDAVFVEDLNVQSMLRADGNGRNKQDAAWRQFITLLEYKGDVYGTHVVQVEAAGTTKECAVCGVESSKSIWVREHSCPSCGFETDRDANAAMNVLQRGFSELGLGWPESTPVETVTATDTADIQRMSASHVIETGSLST

SEQ ID NO: 19142 - protein, 313 aa, unknown
  TnpB Polypeptide
MRIRYAGRIRWEGEQGRLEIIYVNGRWFALVPIEVGVDPPKSNKRGYVKPNYRDKKGRIINPRTIKQRDPIGDEEAFIDMGLNNLFAITISDGSAMLIKGGKIKSEYYWWKREIATCQAVRDMLKNAGIPTWKEYHERYLKAMYKRDERLRHLYITAIRFLADELYRRGVRKLYIRYPIMLSQDNGNEYNTNIWWYRKIVLWIVDVFREYGIEVELVPEYYTSRECSICGNKHKNGRIYRGLYICRKTGKKINADINAALNIARRLGYRIEISRKIESYSITHNGVRPLNPLQRANTRDPEIRNPALQGGEGS

SEQ ID NO: 19143 - protein, 367 aa, unknown
  TnpB Polypeptide
MKLVAKVKLLHDPNQAAILRETMITANRVCNYISDQAWEHKTFRQFPLHKLTYHDVRKKFPLTAQVVVRCISKVADAYKRDTRTRRVFRLLGAITYDNRILSYHLETSEVSIWTVAGRLRIPFACGERQRELLKGQRGESDLVCINDQFYLFATCDVEEPEPANVEDVLGVDLGIVNLASDSDGENFSGDMVERNRRKYEHRRRNLQRKGTKSAKRKLKKLSGRQARFQTYVNHVISKRLVQKAQGTGRAIALEDLKGIRDRVTVRRKQRSKHSNWSFFQLRNFIEYKAKRAGVPVILVDPKNTSRTCPVCGCIDKNNRKTQAFFSCVSCGYSAAADTVAARNIRARAVVNLPMVSNLTGSGTSCRL

SEQ ID NO: 19144 - protein, 380 aa, unknown
  TnpB Polypeptide
MHKQTFQYRLYPTPAQTTAMQHALDECRWLYNRLLEERKLAWEEAETSVRLYDQVNRIPTLRGERPMLGDVHSQVLQNVAARIDLAFAAFFRRVKAGEKPGFPRFRGYGRYDSFCYPGSGHKVEARGDSATTGRVFLSKIGHVKAVIHRPLEGTVKTCCVKRTATGKWYATFSCEAEDAPLPATDSAIGIDVGLASFATMSDGSEVANPRFFRKDEQALAQAQRRLAKEPRTPKGQRPTPARRKRRKVVARVHERIAHRRKDFAHQQSRRVVNRHDTIVVEDLSVNRMAHNHCLAKSISDAAWSMFSAFLSYKAASAGRQFIAVNPAYTSQDCSRCGHRQKLTLADRVYRCPCCGLEIGRDRNAAINIMTLGLQSLGARP

SEQ ID NO: 19145 - protein, 443 aa, unknown
  TnpB Polypeptide
MTTICKVNTTLRAIIKNNKKYMEQIKVAKISLKVNTKKSTIEKKEIYNYFKELNNDLVVASNKLVSYYWMRYLQADALPIEEKEKLGLINQKTNLPFTGKPLFKKYNKETKLQPYQVTINFFNRPGLSFIATSLSNCIENKFSNDINDVVKGKKSLPNFKIGMPIPINFNVNSPKLKKDYMFSFTKDIWFDLHFGKDRSNVKSIVDKIYAGTYKLCDSSIQFKDNEFFFLMVYKFNTEDNIELDKNVCVGVDLGIVNSAVVTLNEGYPREYITMQGQIDSLRNNVQKRKRLLGRELNNITGGRGRKHKLKALYDIRNYESNYVKNVNHIISKSIVNFSVKNKAGIIKMEDLSGMGDKNKKNKFLKDWSYFQLQTMVEYKAKEKGIEVVYINPKYTSQTCSKCGNLEEDQRVTQSEFICNYCGHKENADLNAARNIAKSNEVIK

SEQ ID NO: 19146 - protein, 402 aa, Escherichia sp.
VKRLQAFKFQLRPGDQQECEMRRFAGACRFVFNRALALQNENHEAGNKYIPYGKMASWLVEWKNATETQWLKDSPSQPLQQSLKDLERAYKNFFRKRAAFPRFKKRGQNDAFRYPQGVKLDQENSRIFLPKLGWMRYRNSRQVTGVVKNVTVSQSCGKWYISIQTESEVSTPVHPSASMVGLDAGVAKLATLSDGTVFEPVNSFQKNQKTLARLQRQLSRKVKFSNNWQKQKRKIQRLHSCIANIRRDYLHKVTTAVSKNHAMIVIEDLKVSNMSKSAAGTVSQPGRNVRAKSGLNRSILDQGWYEMHRQLEYKQLWRGGQVLAVPPAYTSQRCACCGHTAKENRLSQSKFRCQVCGYTANADVNGARNILAAGHAVLACGEMVQSGRPLKQEPTEMIQATA

SEQ ID NO: 19147 - protein, 339 aa, unknown
  TnpB Polypeptide
MIVQRTEIHIIKESNPVYNWILEECLRSRNLYNRVLYVYRQAFTGKHDNIPEFKDIINHDKFIASFALVNRLNEIKDIDFCSMMKKNGAQQIVFQVDRTMKSWFAALKSYKRDSSKFRGRPRIPSYKKKDELNCLTYTTADAKLQKDGTINLRRDIKLPIHTNLSSFQQVRLIPKTGYIQVEIIYNKDINENHLDQARAIGIDLGLNNLMAITSNIGNISNLVNGRPLKSINQYYNKHKAHLMSLLLKGKLKSSRRLRRLEMKRMMKIKDYLHKTSRRIVELMEQNNIGTCFIGYNKGWKQAINIVLEAKHDNTGAIQTFPGIVLSEPSYVNLFKSLTE

SEQ ID NO: 19148 - protein, 434 aa, unknown
  TnpB Polypeptide
VTNTKWTCIRKTQCLPRRISVSFFIDQSIIIRMKRLQAFKFQLRPNGQQERDMRGFAGACRFVFNRALALQNENHEAGNKYIPYTKMTSWLIDWKSSTDTDWLKGSPSQPLQQSLKDLERAYKNFFQKRAAFPRFKKRGQNDSFRYPQGIKLDSENNRLYLPKLGWMRFRCSRKIIGTVKNVTVNQSFGKWYASIQTEYEVAESAHSSTSIVGIDAGVTKLATLSDGTVYSPVNSFKANQRKLATLQRQLSRKVKFSSNWQKQKRKIQHLHSRIANIRKDYLHKVTTTISKNHAMVVIEDLKVKNMSKSAAGTVSQPGRNVRAKSGLNRSILDQGWYEMRRQLEYKQQWLGGQVIAIPPAYTSQKCACCGHTAKENRRTQSEFECLECSYTANADINGARNILAAGHAVLACGGMVQSGHPFKQEPTEVIQVSV

SEQ ID NO: 19149 - protein, 475 aa, unknown
  TnpB Polypeptide
MLRPNDFWRIVRSVEIGRKFAIKPNPAQEKILRQWIGSQRYLFNAKVEGLRYQLALRRLAKAQFPDEAIPFIEFGQEYARFKDGVDFLHQVPPQILRNGGYRFTQAVMRWQKKINERPTKKTRQGRQSVLITSELFSVQGTTLILGSRKFPVGSIPITAHLKFQPPKMISVSVDGNKWFVSFCNDDGTECPSYEELLDLFYSKDKAELDADSVGIDRGVKINAACSDGTNFVFSAAEQKNLLAAQARKKRYQRQMSRRFRPGQKQSANYYKARASKQKAERKIANIRRDFNHKASRKIADGSAHVIVFESLKIKNMTAAPSPKQDESGHYLPNGAAAKAGLNKAILNSAIGQLADFTDYKARQNHKLVLRVPAHHTSQTCRKCLAVDGRSRVSQALFICTSCGHEENADSNASGVVRHRGVDLLLSGHFHEQIKKKPRRTVNLRRAAVCHVTDEADPRGLGATVWQETSPLAQPG

SEQ ID NO: 19150 - protein, 404 aa, unknown
  TnpB Polypeptide
VAKHRKVYRFRMRPTKEQAHALGRMAGARRWVWNWALRRWKEHYAATGKSIPMAQLSAELTALKQQPETAWLRGADSQALQQAIADLHRAFTNFFEKRARYPKFKSRKRDKARFRIPQRVKIRDGRVYVPGVSNAKIGDTKLGDIRIFQSQEVTEATKGATFKRAADGKWYVSLVVEFEMPDIPIPAPDPAATVGIDVGLIDYATFSAPTVQPIPAPKFFRKGQRRLRRAQRTVSRRKRGSKRRAKAAIKAAAVHRRFADQRRDFQHKLSTKIVGQYAAVCVETLSLKGLARTKLAKSFNDAAFGEFFRQLKYKCLWNCKHFIAIDRFFPSSTMCNACGALNDRLTLSDREWDCDCGTRHRRDFLAACNIKDEGLRMLAAGQVGEPKRSGRQCKTRHAGQLSSN

SEQ ID NO: 19151 - protein, 427 aa, Coleofasciculus sp.
MITSYQYRLKPTYEQRCRLTRWLDMLRYQYNWLLAERFDWWEMNRSPINACFLTCSIAQPKEQPEYYGQKRSLVQLKQERPWYKDIHAHVLQDVVKRVDLAFKRFIEGDSKGKRSGKPRFKGKNRYRTMAFPSIKSECIQGNRIVLPKMGAIKFIQHRPTPDGFVVKRALITQKADGWYVTLILSDKSVPNTPTRYIQPTEENSIGVDAGLDYFAACSDGTLVEPPKFYRQAEDKLAQLQVKRELRAKGTRARRKLNQRLARLHQRIARQRRQWHYELAGELLDKADVVFVEDLKISNMNRRNKPKQDEQGNFLPNRQSQKSGLNKSLADAGIAGFLNDILPYKAEKAGKQIVKVNPAGTSQHCAICLNRVSKSLSERWHECPDCGASMPRDLCSGILIKKVGLGIASLKNAKSRKRDGEARALSVG

SEQ ID NO: 19152 - protein, 229 aa, unknown
  TnpB Polypeptide
VDLGINTDAVCTIMRADGTVLGRRFINHPSEKDWMYRTLGRIRKFQREHGSAQSRGRWAYTKRLNIELGRKIAGAIVKNAEENHADVIVFEYLEMQGKISGKKKQKLHLWRKRDIQKRCEHQAHRKGMRVSRVCAWNTSRLAYDGSGSVSRDPKNHSLCVFQTGKRYNCDLSASYNIGARYFIRELLKPLPVTERSLLEAKVPSVKRRTSCVYADLKELHLQMEILKAA

SEQ ID NO: 19153 - protein, 392 aa, unknown
  TnpB Polypeptide
MLVLEYKLVARKQQEAAITEAIRTVQFIRNKALRLWMDTGARQYDLNKYCAVLAKQYPFANALNSQARQAAAERAAYGIGRHLKADKTGKRLAKPTFQKGNRSVEYKATGWKLSENRKRITFTDGIGIGEMKILGSQDLCAYGIQLIKRVRIVRKADMFFVQFSVDVDRSEPTELTGKMVGLDMGLSSFYTDSDGQKVDCPKFLRKAEKRLKREQRRLSRKKKGSSNRRKARVKVSRRHLKVQRQRKDFAVKLARCVVKSSDFVALEDLQVRNLVRNRHLAKSIHDAAWSQFGNWLLYFGKVFGKPVVKVPPAYTSQDCSQCGNRVKKSLSERTHACSCGCVLDRDGNAAKNILRLGLSSLEEMYRGTLGNREGFPSETLAEMVPLLPVYAG

SEQ ID NO: 19154 - protein, 207 aa, unknown
  TnpB Polypeptide
MQSVPSCGQTELSWGESLLTSPVKKTVCTAHWTNPQIPEEHGSAQAGDRWAYTRRLNIELSRKIAGAVAEYAWENHADVIVFEYLEMNGKISGSKRQKLQLWRKRDIQKRCEHQAHRKGMRISRICAWNTSRLAYDGSGIVLRDWRKHSLCAFQTGKRYNCDLSASYNIGARYFIRELLKPLPATERSLLEAKVPAVKRRTHVFMQI

SEQ ID NO: 19155 - protein, 414 aa, Salipaludibacillus sp.
VGDKWLFFIFFPENKKEKTKTNRQWFGKINLRTNVWRWLDMTKKNKAFKFRLYPSIAQLHLVKKTFGCVRFTYNKMLKDRMDTYERFKDNKEMLLKQKHPTPAKYKTDYPFLKEVDSLSLANAQMNLDKAYKSFFKKNTKFPTFKSKKHKQSYTTNLVNGNIEILDGHIKLPKLKWVKLTQHRDIPETHRLKSVTISMTGSGKIYASILTEFEEATKPVEPNNVVGLDFSMSELYVTSDGEKGNYPRFYRQSLEKLAKEQRVLSRRKKGSNRWYKQKRKVAKLQEKTTHQRRDFLHKKSYALANKYDAVAIEDLDMKGMSKSLTFGKSVSDNGWGRFTTFLQYKFEDHGKSFVKIDKWFPSSKMCSECGEVKETLFLSERTYTCSCGNESDRDENAAKNIKNEGKRLLSETKIA

SEQ ID NO: 19156 - protein, 435 aa, Moorea sp.
VILTYCYRIKPSDEQIATMDRWLELLRRHWNYALGQRLDWLNRTRSPVDRCSLLYEPIGEIPHPVNYYTQQSALKETKRLFPEYKQIYAETQQVNLQRLNKAWEKWRKPDASGKRGGRPRFKKPGDLRSFVFPRVNNTKAGAHLVDGVLKLSRIGSIPVVMHRPLPVSEACPKGVGFVLKQCTIVKKADGWYCCISMKDDTVPELLPVDSVNSAVGIDVGLEKFLTTSDGEAVPIPQFYRKAQDKLAQAQKVMSRRIKGSKNWKKAKHKVALMHLHLSRCRKEFHYQVAHWLCSKYDLIAHENLNIKGLARTNLAKSIHDAAWGAFLEILQAVAVKRGLLVQEVNPRGTSIECFSCGSRVEKTLSERIHYCSSCKVKIDRDWNSGINILNRGLLAVGLPLNGCGKSVQDIVRVAEASAEEQQVSFVRLRSPHHNL

SEQ ID NO: 19157 - protein, 390 aa, unknown
  TnpB Polypeptide
MNGFYFAAPKCRTILLYFRKVSTIVNLMITYEYILNPTKAQKSLLVKNLRLTRDIYNQGLQELIDHYRSTGKHLNYFSHDKQHGKTQHPDMPSWFVDTTLRRLHRSFANFFAGIKEGRKVGFPRFKSANRWHTLQFRDAVANNIDSCYFKAGKMLGGRIRFVKHREIEGKLKFCRIVKRPSGWYLQAVCEDEPQPLPANDNAIGLDFGITHLIADSEGNKVANPQHLKRSLRRLAKAQRRLSRRKKGSNRRRKAAKMVARIHEKIANQRKDYLHKAARHYVNAYGTIVIEDLRPSNMVKNSHLARAISDSSWGMLRQFMEDKAEKAGRLVIAVPPQYTSQKCSSCGEIVQKALSVRTHVCPHCGYVDCRDTNAAKNIKRAGIRPSWRDVA

SEQ ID NO: 19158 - protein, 376 aa, unknown
  TnpB Polypeptide
LKTKEKEMMIRQKSYKFRLYPNEAQKQLFAKAFGCSRAIWNMMLADKIKHYEETKETLYNTPAQYKKEFPWLREVDSLALSNVQLNLETAYKNFFRSGFGFPKFKKKSRRQSYKTNNQRGSVALENGHIKLPKIGWVKLKMHRQIEGVIKSATISMTTTGKYYISILCETEITPLLKTNSSVGIDLGISDFAILSTGEKISNRQFLKQLSKKLAKEQKILSRRALVAKKAGRKLSDSKNYQKQRMKVAKIHEKIANQRKDFLHKLSTNLVKNHDIICIEDLSSKNLMKNHKLAKVIVDVSWSEFVRMLEYKANWYEKRVSKISRWYPSSQICSDCGFSSGKKPLSIREWTCTNCGSRHDRDINASINILREGLRLL

SEQ ID NO: 19159 - protein, 365 aa, unknown
  TnpB Polypeptide
MYFAKHSDNLLEDLKLLDKVMKSFPDEHDNYRSFGYAVCAQQVLRLFQQNLRSYFAAINDYKKNPSKYTGRPRFPKFRKSGERFQVIFTNQSVKLVNQTIRVASKTFENKLFIKLRTRSAKKICQVVFSPRNNYFLVYVIYEVDDPIISQATNKLAAIDVGLSNLATVTFSEKDTPILYRSDLMKINHDFNRITSSYVSILKKTQNKDTSKRRKRLSNNYSGLIEDRLHKLSRAIINDLSHRGVSTVIVGKNTGQKIGNKLKNFVQVPLFRLISMIKYKAELAGITFIHVNESYTSGTSFLDNELPTNEYYNKSRRQSRGLFLSNDSKRINADVNASFQIMKKIYKEFAYNDSIKYANPIVKTIC

SEQ ID NO: 19160 - protein, 386 aa, Bacteroidetes sp.
MITYNTKLKFEKQEDFNNLLESLKLNQSAWNIISQERFSMTGGILKILHDKCYYKVKKALPTIPSQFIIKAEQDVIATYKTIKSNKHKLDSPATKKNLSIQLDKRIYKWIDKTHLKITTLNKQAIVSFDVYQKLNELDFSKLKDPKLFFKNGNFYLSLIFDIKLPFIDNNKIVGIDVGLKRLISTSEGNIVKGNEFNGHKRKIRWNKRKFQSKKHSHSARTNRKKLRKKEANFSRNYIHNVTKNVILNTNANVLVIEDLSKIKSKNKGKRFNNRLSQLPFFAFRTILTYKAQLYGKKVATVNPAFTSQIDHRGLVGGKRKGCRYYGSDNVVLDADVNAAINIANRYVDNLSLHKHSVLCCKALDGQAAVNQPIVGSSFRQAPIPLG

SEQ ID NO: 19161 - protein, 358 aa, unknown
  TnpB Polypeptide
MSQTITVKIKLLPTKEQTSILKDMSKEYISTINSLVSEMVDEKKSTKKSSKDLPASLPSAVKNQAIKDAKSVFQKAKKSKYKTIPVLKKPVCVWNNQNYSFDFTHISMPIMIDRKATKTPIRALLVDKHNRNFDLLKHKLGTLRITQKSGKWIAQISVTIPTSEKTGTKVMGVDLGLKVPAVAVTDDGKTRFFGNGRQNKYIKRMFKSKRKKLGKLKKLNAIRNLDDKEQRYMKDQDHKVSRAIVNFAKENKISVIRLEQLTNIRQTARTSRKNEKNLHNWSFFRLSQFIEYKANLEGIKVEYVNPAYTSQTCPKCHEKNKAQDRKYKCKCGFEKHRDLVGAMNIRYAPVVDGNSQPA

SEQ ID NO: 19162 - protein, 409 aa, Halorubrum sp.
MNYNYRYRIRPSNALEERLAWTVDTCRQVYNHFLHRLNRVDDTSSYSEQKRLPDLKDWWTGLKQVHSKVLQKVVQRLYDNLSTLRGRKEKGYRVGTLNWKGPGEYHSFTYSQSGFELKNTNGRTRLWLSKVGEIPLTFHRDLPDDAEIKTVTVKQEPTGEWFATLGVETPNNPPAKPDELADVVGIDVGILKYTHDTDGTAVESPDLRDERERLERAQRNLSRKEHGSNNWEEQRKTVARRHADLRRKRRDLLHKLSNYYAREYDLVAVEDLDAKGLVELPGNSRNRAGAAWGTFLRMLEYKCEREGTHFVAVEPVGTTKECAACGVSTDKPLWVREHSCPSCGFTADRDWNAAYNILVRGLKQVGTGCPESTPAETALPTGTHSVPAKRVVETGSPTLKERAANAASE

SEQ ID NO: 19163 - protein, 486 aa, unknown
  TnpB Polypeptide
MPSLTYVKGLPTPASELNSLGFTEMEMFLKALAPIFRLAAIETVNHLMSGEEFNSSKWNTHLQNAHKISKRHANGVISYAIGKVDGAKEHRALHVKALLGKVKSIENWLKKAQRKLKLGRKFYAKKNWQQSKTGCNFPLSCSLSFKDTNWRNLKFRIQHKKRKLALIRHKIEHLKTKPIRVSVPHGQVFLVGSKDEKWGNSIAQWNGNVLKIRVPCCLEARFRKYIASEIGKYERNINRLPIAGSKTWHLFRKDGKWNVAVQFTPSDVKRQSKDRAYGCVGIDMNPGSIGWAYVDTEGNLKAKGQIPLEMGLPSGKQQATIVNACLSLVNLAICFQCPIVCEQLDFSDKKERLGERGRKYARMLSSWAYSEFYKQLSAIFANRGIELITVNPAYSSVIGLVKYMKMYGLASDEAAALVIARRAIRLSERLPSAITAYFEVNSEKHVWYWYNQLNKQLKRSGVINRRHDYFTVSNWSFLGIPQKEEA

SEQ ID NO: 19164 - protein, 175 aa, unknown
  TnpB Polypeptide
MQKNSNNAQKQKNRVARIHQRIKRQRKEFHYKVAHKLVKAYDLIGVEDLNIKGLARTNLASSILDAAWGEFIPILEAVARSVGGGSFPRRTSLVKRGVRVVKVQPHGTTIDCSTCGWKVPKTLEIRIHDCPKCLTVLDRDLNAAKNILVRAINAVGLTVSACGGLLSWVNRHAGH

SEQ ID NO: 19165 - protein, 710 aa, Streptomyces sp.
MLCGLGTAVARLTATATCTAFRAVVEDGGHRVGQRVLYERVGFLAVLCRDLTARLVAARWDETSLEVLAPGVDERGEVLPSKGWMALRRLGWNTPGPASASASASAECAGAGGTVTVYVPDRVRRAGEEQAARTLRLALHRRAVAGALLATWPADPSRRTQAEWTALRKVLPAGTSAAEIRNRTRQIRDFARAHDGRLPAGLCELEEPPAVAALVLLAAMDRQQTTLERVDPGRARLRVKLPLCAAPVSRRDWAWHVIDLRLPATVEADALLHAPTLRPTPGGRIAVDLPHSRPVATSKATGHTVAVGFDWGVNTLLTGAVGRLTGRGTTARVLTDGRPLVYDATAISAKLHRLRTHREHLAVKRDHYRALAAGLGAPHRAWGELLDRAAVLEREHERVCARIRHLNDALAWSAARWAVDQAAALGASVIYLEDLATLETRGRRRGNARLSGQVRGTLTEAIRHLAAKRDLTVVTVPARGTSALCPRCLAALGHHPAPDRLGERGWKWAHCTGCGLSLNRDHAAARRIVSRGLLAQAHTTTDHATGTRTVRTTVDGPVTVVRRPKKTTRRMRRACHAQARPTRPAGPKATPGKARPTPARRSKTSRRMPAVPTVPATTPAGAVKRPAGHDTQTPTPSPGQGPGHGVPAPRRPEELLPGDGRRLSRETCRQRTRAAERTGFHHVHATEVHSLTPRFGPHRDGTRPRRARKA

SEQ ID NO: 19166 - protein, 400 aa, unknown
  TnpB Polypeptide
MFRLVLVSKAFRYRVYPTQEQVARLNAWESALRFLWNLALEQRKLGLARPRDERRYPTAFDQINELTELRAALPWLADVPRNVCSQLLVELDRAWQRCFARLARAPRWKRKGRDVLGFTEPHPKTWRVDGSNVRFPKLGTLRTVMHRPLEGKPKTCTLKRDGEQWFAAIVCEVEVSEPAVRDGPIVAIDRGIANFGATSDGDMIANPRNLEASLERLAHAQRAVSRRKKGSKNREKAKLRVARIHRKVRRQRDHFLHAQSARLAKSHGVVVLENLNVAGMIRGHCSRSIADAGWSRFAEMLRYKLAWSGGSLVEVPAAYSSQTCSACGCVDAMSRRSQSAFRCTSCGYQDHADLNAAKVLLARANRSGKPADGTALEAAGRSRKRVGLRVPRRPLESSAL

SEQ ID NO: 19167 - protein, 229 aa, unknown
  TnpB Polypeptide
VKGRSEKSPVNRYGDDTAQPKGLCRVLQMVNYTLWSNIAALSQTKKRGRKIGRLRFKSAFRYRTLNYNQSGFKIDREHSTITFSKIGAIPFTMYRLYTGNVKGVLITCSNDKWYVIVQAEQEISEPKREGRSVGIDVGLNSFAVDSDGAVIENPRFYEHSLKKIKKIQQSIARKKRFSQNWKKAKSGLEKVYDHITNQKRDFLHKLSRQYVDIYATICVEARKTPTGSS

SEQ ID NO: 19168 - protein, 419 aa, Brasilonema sp.
MITLTHRYRIYPDATQEQTLIEWMEICRGAYNFALREIKDWCDSRKCFIDRCSIEKEYILSCELKFPNEVYQLNNLPKAKIEFPKLGEVPSQVLQQAVKQLHRSWEYFQDRGFGFPRFKKHGQFKSLLFPQFKESPVTNLHIKLPKIGAIPINLHRPIPTGFVVKQVRILRKADKWYASIALQSDVTVPDPVPHGHPVGVDIGLEKFLATSDGVLIKPPKFFKQLQGKLKLLQRRLARLQKRSKNYEKQRLLVQGLHHKIDNTRKDFHFKQAHALCDSGDMIFMEDLDYRTSARGMFGKHMLDAGFGQFRTIVKYVCWKRGKFFAEVDAKGTSQECPECGGLVKKDSSVRVHSCSHCGYQTDRDVAAGQNIRNRGIVLISTVGQTGMETACAVDLPGTDESQSRQVAKSRNRVTRKSKV

SEQ ID NO: 19169 - protein, 363 aa, unknown
  TnpB Polypeptide
MPSYLRRAAIQHALGAVSSYQTRLSLWEKGELRGKPKLVCENHAMPVFYRDVMYREAEPGEDTAYLKLFDGREWKWFQVKLLHTDMEYLRKKWSGKEASAPTLERKHHKYFLRFSYTEEVSLSKTDVKEQVICSVDLGINTDAVCSIMRADGTILGRKFINFPSDKDHLYHVLGRIRRFQREHSSRQVQSRWDYAKRLNMELSRKIAAEITKYAAEYQADVIVLEYLEMQGKISGKKKQKLHLWRKRDIQKLCEHQAYRNGIRVSMVSARNTSRLACDGSGAVVRNQENHSLCIFRTGKQYNCDLSASYNIGARYFIRELLKPFPETERSSLEAKVPAVKRRTSCVYADLRKLYVEVNNLKAV

SEQ ID NO: 19170 - protein, 358 aa, unknown
  TnpB Polypeptide
MKVMTKTLKVRIKDRHAKRLSRMARSVNFTWNYINELSERSIKERSKFMSGYDLQAYTKGAGKELGLNSATLQMIGHEYVTRRKQFKKRKLNWRKSHGVKRSLGWIPVRSDCVSYKQGQIYHHGAYYGVWDSYGLSDYTFKSGSFNEDTRGRWYFNVVVEVEVKPLAGKSSVGIDLGCKEAATDSNGGGVIGREYRKLEEKLGLAQRAKNKTQVKTIHAKIKNRRQDSLHKYSRKLVNANAAIFVGNVNSKAVVKTKMAKSTLDAGWGILKTMLEYKCANADIVFEEINEAYTTQTCSCCGIIPDSSPKGRIGLGIREWTCTGCGTKHDRDINAAKNILRLGHEALAVGIPHYSRSAA

SEQ ID NO: 19171 - protein, 415 aa, unknown
  TnpB Polypeptide
MSRALVVRSLSFPVVELPASVLGLLAEFRLIVNQSIRIALREDIRSRFRLTRAAYTRLSAEHDVHKQYIPSAFEVALGVLKVYRRRMRKGKKTTVPYLRRLLLKAENQSYTLDRETGRLRIPIRGTEGVQMALPLSEWHRSFLSDPSWGLGSLTVTPERIIVTIRKEPPGPYEPVAAIALDTNEDSLDGIEAGGTAARLLTIPFGGVRQVQTIHFRRRRRLGKKEAHDRRVARRLLGREGRRERHRIVQRLHRISKSLVAYSKEHKAAIVLEDLTLHGAGGRSRRTNRRLSSWPCGELHRQIVYKAALEGVPVFKVRPAWTSKTCPVCCARRRDRVGKDFVCEMCDWEMDRQHNAGLNILKSALASNEALARAVRFQPGALRDDVVIPLCDLPARLAGAREEPSGVESPTGFTTR

SEQ ID NO: 19172 - protein, 272 aa, Okeania sp.
LISKYDLRKVILNSESLPDWIKKSPYHLKVNAIYDANAAFKTSRKSGTKQPSCGKFRSIRDRIQSIKFRVEDFKKGTWLPSLTKGLNLLASEPIPTINVEYQQKQKDGTYKSCVREQSWNAETQLVYDKKRWFAVFPKEFKPESSKSQSIIALDPGVRSFLTGFDGEKFVDIGQGDITRIFRLGQHIDRLISHKTALKGRQHKHKRQRVQKKINSLLIRIRNLIDEVHKKVAKWLTTEYRVIFIPTFESSQMVAKSGKKKRKLNSKTYPNVA

SEQ ID NO: 19173 - protein, 193 aa, Okeania sp.
LGRAHLKVSRRRNDGACKEAIRVIQSNDLVAIENLKVRNMVKNHHLAKSINDAAWYKFREWLEYFGSIYGVPVIAVEPFNTSQNCSNCGKKVSKTLSTRTHKCPYCGYEADRDENAAINILQSALKQLSTTPGRGESNISGETGLCLDGETQTDKPTRRKRKSSIVIFRILLPLGRGERQSDLTNFSAAEFKQ

SEQ ID NO: 19174 - protein, 431 aa, Okeania sp.
MKQVITAKLKLHLSKEQKELLREVSLVYRNALNYASKVAFEKGKVSSANKLQKLIYQDIRSKFDLPSQMSCNVPRQVAATYKGLWTKLKQNAEHLQLGQTKKRYKGLDKPPKYLSRTCNLNYKRDYSFVKQEVSLITLQGRIKVPYSGYNKHIKLIKSGKNTVKFGGAKIYYARSTRTYYLLVSLELEIPNIEPDAINRVVSVDVGQRYHAVTTDTRNQTHFYSGKQCNRKATCYEKARKSLQQKGTRSAKRRLVSLSGRERRFVADQNHCLSKQIATPNTLIGLENLTNIRERTKPRKTGKKASIKQRKANHKQAKWSFAKLHSFIDYKAVLNNSLAIKVDADYTSQACPHCGYTSRGNRPNKGLVFHCESCGFKLHADLVAARNIAMRTLLTRQDWESTGSLSATPDGSSVEAKAARLSRFAELRWTAE

SEQ ID NO: 19175 - protein, 177 aa, Okeania sp.
MKFINTKPSKFNARPRLPRYKNKITGRNIVVYTTQAISKRQLKQGIINPSKTGIYLKTLVPTAQIKQVRIVPRLNHYVIEVIYEKCEKQYELEKNRCASIDIGLNNLATLSFNQAEIKPLLINGRPLKSINQYYNKVKSFLQSQLQENRSSKRLKKLCNKREFKINDYLAYCISFNY

SEQ ID NO: 19176 - protein, 225 aa, Escherichia sp.
LQQSLKDLERAYKNFFQKRAAFPRFKKRGQNDAFRYPQGVKLDQENSRIFLPKLVWMRYRNSRQVTGVVKNVTVSQSCGKWYISIQTENEVSTPVHPSALMVGLDAGVAKLATLSDGTVFGPVNSFQKNQKTLARLQRQLSRKVKFSNNWQKQKRKIQRLHSCIANIRRDYLHKVTTTVSKNHAMIVIEDLKVSNMSKSAAGTVSQPGRNVRAKSGLNRSILDQG

SEQ ID NO: 19177 - protein, 367 aa, unknown
  TnpB Polypeptide
MKQVIVIKLEPSQEQYKALIATVEAFNRGCQYAADVAYEKRLANKIALQPFVYGTLRSEFGLSSQMAIRAISKAVEAYKRDRRVHVKFDLHGAMVYDPRIMSFKGLTQVSLMCLGGRELVPMRYGAYQAARIDRARGQADLILKDGTFYLYITVDLPSAPPVEAQDVLGIDLGIAVLAMDSDGEAHTGAGVKQCRRKFSRLRAGLQKAGTKSAKKHLRRSRRRESRYQRDVNHCISKHLVQKALVGQKALAIEELSGIRERTQATVRKTHRYERLSWAFAQLRSFLGYKCEAAGVSLLVIDPRNTSRTCVACGYCAKENRRSQSEFLCKQCGFQANADWIGASNIRRKGLEARAAVIPPMVSANVLA

SEQ ID NO: 19178 - protein, 405 aa, unknown
  TnpB Polypeptide
MVRSLLGNSSIVDELFLTTCYRINKAHLWHHSSVDLKWHQTSDGQLLVPSKLHKANVTVPVSSDILFFMRKLIKRARKCIRFPQLKRIKTLKLDEKVAVLEVSKTASHFDYFLKLSTLQKGKPIYLPLKRNPYLDECLKKGERLPFVQVRITDKTCTISAIVGYDKAPLRPSTESIGLDFGMVSMFTTSDGERHGLSSFTKLKIWDKELLDLSQNLQKQSIKFSTNERYIQLQQRIKSYFKNEICRILNKLAKKNVGVFAVEHLDFRAAGMSKQMNRLIGRTYRSVVKAKLTRLEEQYGIQIIAVNPAYTSQECSRCHYVSKENRKTQKDFVCQHCHFSCNADVNAGRIINQRRSLMLEFPVYAKRSASRTVRCQVQEASKECHKRYCHDNGLMTYEESLAKGSL

SEQ ID NO: 19179 - protein, 485 aa, unknown
  TnpB Polypeptide
MSKDTLYRSYEIEFPKKLIPTYDFLQMKLLEILNNRHYYDQFNNFPIHNDDGSLILNGTFWQIGRSLFPENYFDTWNLGGNAWYFRMLLDTIWRSLISLDEKRQIYTILKRYDFKPTKALRKELSDNKLFPTNKELKNLIASKKYPNLSKDLTFIMDFSVSSSSTLKTVAENHYQLRVDKDTWCDYKILTPLSLRLELTGKLTKPSFRRKASGRYHGMCSYEVKPIDMGLEDNILGVDLGFVKLFSAVVLKPDNSLSREFNNSERLQALYDKLTRVYEAERRLYNRIRKSRATTQHIYTKNIRRCVELENLKTKIQNTKKTLMEELAAETISLALREKCNIIKVNPAFTSQRHPITKEKGVLRGRNLVFSDGKTYDRDYLASINIALSPCGKKHSERVIETLGPKKKRKRFTPKTSNKKMKQQRLLKSKIKQSFNQSGVREIVTYFHKANELSLNYAIVLGYDSVMSNYRYRLPILTHKYYLDPQ

SEQ ID NO: 19180 - protein, 381 aa, unknown
  TnpB Polypeptide
MHRAFKFRLYPNKRQREYFENNFGACRFMWNKLLEDSMSDYQKTGNHCVNTPAMYKSKYIWLKDVDSLSLANVQQHLNRAYQRFFSNQKKYKKNSGYPKFKRKGRCKKSYTTNLVNGNIVVYDNAIKLPKIGKVKAVVHREIPNDYKLKRATVSQDPDGIYYCSLVYEFDKDIKTNVDTNKSIGLDYSSHDFYVGSDNTRKECHKYYRNSQKKLRRAQKCLARKQGFRKGEVKSANYKKQLMRLNKIYAKISHQRNDALQKLSTEIANQYDIVCVETLDLTGIANRKRHLGKATLDNGWGNFLFMLGYKQEFRGHLLVKINRWFPSSQLCHCCHAKNPLVKNLKIRTWTCPNCSAVHDRDVNAAINILDEGLRLVNVGLLA

SEQ ID NO: 19181 - protein, 349 aa, unknown
  TnpB Polypeptide
MSVSLLKLRRTIHAKLVLDRRGKREAIKREYENWQRQLRGDDARLYSATEQQANRFKQRIRKQNEHGIKTKEYPLILRRDCVKIQYQKRSILAWWIRIPVNPRSIWVPIQLPHEQEPLLRYDIRECKLIQDNGKWFVNITVQKEAHLKRRYAAILPIDMGIRKLATTIEDGKPCFYGKEVRQTRGNYFRLRRSVGRGRIIKKWRHKEQENIKHQVHTITRHIVKKAKQANAIIAIGNLKGIRNGNRSRSFNRRLSMQPFYLFKQYLTYKANWEGIRVITVPEAYTSQTCHRCGVRGQRVAGRFSCQNCGLAVDADVNGAWNIAKRAHGMLSHEAGAVLIPPRTLAVCEP

SEQ ID NO: 19182 - protein, 408 aa, unknown
  TnpB Polypeptide
MFNLTKTIKLHLNVTQEQEILFRQMTEQYRQACNFVSQHVFNNNFDLGYHNLNKRLYSDLRNLFNLKSQLAQSAIRTTITNYKIVKTQLLQKPYRYKDEDNNWHYVHKTLEWLYKPIFFSRPQVDLVRNRDYSFINNGQIISINTLNKRIKCNFYKKHFTKYFDGSYEFGTAKLIELKGLWYLHISITKAIDSFEKENVRHVVGIDRGLRFLTVSYDEQGKTNFISGKKIATRRHKFQEVRRQLQSKGTKSAKRKLKAISGRENRWMTDVNHQISKTLVKAYGKDTLFVLEDLTGVSFEKNNLFYTKKQNYNLRSWAFYQLEQFLTYKAYENRSKVLKVSARYTSQRCPKCGTIHKENRDHYKHLYSCQCGYKSNDDRIGAMNIQLLGTMWISGNNNPRFEKILITSE

SEQ ID NO: 19183 - protein, 318 aa, unknown
  TnpB Polypeptide
LFAVIPQYCFYSKYNGKSTIEQLRGVTFLFSSSSFHIVYKKTHKAIEIKIPPILADKKIKEIRIIPKANARFFEIQYTYEAECIQRNLNTSNALAIDLGINNLVTAVLSMGESFIIDGRKLKSINQWFNKENARLQGIKDKQNFGKCPTNKQKAIARDRNNKVNDSMSKAARKIIDYCIQNDIGTLVVGYNETFQQSARMDKVNNQSFVNIPYWKLREKLEYLCKLNGIVYVKQEESYTSKASFWDKDDIPVYNEDNPKSYVFSGKRVHRGLYKCSNGKTLNADVNGALNILRKSSVVDLKVLYSRGDVDTPVRIRVA

SEQ ID NO: 19184 - protein, 296 aa, Kibdelosporangium sp.
MRIPLNTTVAPSGTLRLVLRDQRVEVHYQIDARSMTSSARPAGDREIGVDKGYTEVLTDSDGQRHGTELSELLTSESDHRKIKNARRVKIRSVAEKARDAGQHAKADRITRNNLGTRKRDRRSSRWQQTVRTTTFRAVHAVVDKAALIAAEDLTKTFTGLARRGRNVNRRLAAWTKGITAEALASVSERRGSVLTLVNAAYTSQVFPCCQALGQRSGDRLHRTRCRVVWQADHAAAINALHRVGDPDITPHTPYQRVKRIVRERADRQPDQTADPGLQPTLWAESETSERSTLINK

SEQ ID NO: 19185 - protein, 298 aa, Kibdelosporangium sp.
VFVSDEDRERQRSAALTPGERQRLRGLEQRKARQMAFAKKTQRRQVQHPAAHDHRSDRGPEVSADPQARGLEPQAHHRPGQKPRLDRGRGLKVRNMLRSAKGTVDQPGRRVRQKAGLNKSIANQGWFEIRRQLGYKTQRYGGVLVAVPAHGSSQTCSKCHVRDPESREGCGRLFACVACGHTEHADRNASRAILDRAFSTAGRKPTTKWEAGARTSGRVGSQSTRSPHGQGRRTASRLREPSPRSPHHDQEESPAFRRERTSRAWMIPGHDRRVVGVQSDLAPGTRCPGRQGFARDRA

SEQ ID NO: 19186 - protein, 406 aa, Kibdelosporangium sp.
VKRAYKYRFYPTEQQQQELLRTFGCVRLVYNKALQARTEAWYSEQRRVNYVETSALLTEWKKTDELAFLSEVSSVPLQQCLRHLQAAFVNFFDKRARYPRFKSRKKSRASAEYTRSAFRWRDGHLMLAKMTEPLAIVWSRPLPEGAEPSTVTVSRDTAGRWFVSILVQTGVDHHATTDTAVGVDTGITSLLTLSRPIDGLTDSQGKITNPKHEQRERARLARAQRRLAKKTAGSANRGKARRKVARIHARITDRRRDHLHKLTTRLVRENQTIVIEDLNVSGMLRKHSLARAISDASWSELRSMLEYKAEWYGRTVIAIDQWFPSSKTCSDCGLLLDSLPLGVREWTCPGCGAVHDRDVNATRTILAAGLAVAACGGGVRPTRQQSVRRSPVKQETQPARVGIPRF

SEQ ID NO: 19187 - protein, 138 aa, unknown
  TnpB Polypeptide
VHARIADRRRDVLHKLSTRIIRENQTVIIEDLSVRNMLRNHSLSRAISDASWSELRRQLEYKADWYGRTVVAIDRSYPSSKTCSACGAVAGKLPLNIREWTCAGCGAVHDRDVNAAKSVKAAGLAVLACGDGVRPSRA

SEQ ID NO: 19188 - protein, 658 aa, unknown
  TnpB Polypeptide
MEMEENPTDTGEQVFRIVKCPLKCVLKNYDVIHPIIEQAVIDINEIVVLSYQFIRLYLLHKFTNKQELPTINKQFVLDVIKTISSPKSKRGQKTKEENIKNASCKMDMKQFYNQTFSKLVSDNKPSYTNKTFILEQTAKEMITCIETNISTHFIKHLFKYINCLFKEPKTTEIKKEKDKEKRKELYKELNQEIRDLKSDLLNNKIECSKEEYHNWIKENKTFLYPPKITKSVAYDVKIHPEKYIKYSLYINQKIEELGRKPYQVIPQRNNIVPKHITLNSPAIVDIIDDKEMSIFSYNKTELLHHAKTHHPHIWSRILKLEKKQIFTDEKYVFYNQIITDGFSCSLLFILKKYKDKVFGDRLPRVNDEMVFTKLEDLPKEKCDEYLSNKYKLVSLDPGKIRPITMIDENNKFFKYTACRRRYETYTKQSNYVINQEKIKHNIITKETILSNFKSRTLNQEEYKKFITNKTKINNEIKEFYQRPLFRKLAFRRFVRTKQCEAKLLNEIENKYLTKDEIKQGKKIVILHGDYSRTTQMKGTIPTPNIGIKKLLLSRFEIIDVNEYNTSKLYNKTLKEMENVKVKRNKHTKQLHEILTPKEETKCRIFVNRDVNACKNILLLGKCFLTNQTRPEEFKMKKKVIKTEAIKKPRKRVSTEIVV

SEQ ID NO: 19189 - protein, 380 aa, unknown
  TnpB Polypeptide
VITYNTKLLGDTDELKKLLQMEQMVYNIASKEQFPEKTKSLVILHSKVYKNVRKSNPEIPSQVVIKAEQEVLSAYCSIKSNRHKITKPIVKKNLSMRLDKRLYSIPDKFSIRITTTGKRQTYKFVVYPRLKELMKKYPYQDPLIYEHNGKVYICLSFENKQPQLKQRLALGVDLGIRRSAATSDGRLIIDKSFNERKRKLRHQKDQLKSKGTKSARHKLRFSLKRKERNQNKNQTHLIANEVLKTEADTICLENLKSIKRKKNPYQNKHSISQVPLYELRRVITYKAQNQGKSVLLVCPYNTSKTDAITSKVEGERRGCRFYSKNGLIYDADINASINIAKVSKLPISQTTNLTYGQASVNTPNVCKSLTSVRVLQAPTL

SEQ ID NO: 19190 - protein, 419 aa, Nostoc sp.
MLTINYRYRIYPNLTQEQSLKEWMDICRTAYNYGLREIKDWCNSRKCMIERCSISHEYIMPADLSFPSEVRQLNALPNAKKVFPRLGEVPSQVLQQALKQLHRAWEGFQKIGHGFPRFKKFGQFKSLLFPQFKQNPVQGVHIALPKLGSIPINLHRPIPSGFVVKQVRIINKADFWYASINLQCDISVPNPMPHGHPIGVDVGVEKFLATSDGVIVKPPKFFKVMQSKLKLLQRRLSRKKKRSLNYEKQRIKVARLHHTIDNTRKDFHFKQAHALCDTGDMVFMEDLDYRTLALGMLGKQMLDTGFGQFRTITKYVCWKRGKFFGEVSARGTSQECPECGVQVKKDLSVRVHHCSSCGYTTDRDVASGQVIRNRGIALISTDGQSGIQNAYADGLPGVEISQSRSKSKSRKGTTRKSKK

SEQ ID NO: 19191 - protein, 380 aa, unknown
  TnpB Polypeptide
MIQKSIRVRLYPTEEQEVLINKTIGCVRFIYNYTLEVCKTYYEQTNHFTPRNKRFTDLVPLKDEYEFLKEADACALQQSVRDFCSALDNFFKNRSHFGFPKFKSKHDLKQSYRTPYNRGNASVVDNKHLKLPKLGKIKTKRFSMPEVYKIFNITVERTNTGKYYASICIETEVQPLPKTGGQIGFDLGLKDLLIGSDGTRYERPRFSYAFKDKLAQEQRKLSKMRTKLERVNANLDECRNYQKQEHKVAKLHEHIANCAKDFNHKLSIELVRNYDFIAMEDLNVSGLIKNRKLAYSIADVRWLQLLGFIQYKCRWYGKKLVQVDRFYASSKICSECGAYHKDIVNSLSVREWTCPDCGTHHDRDVNAAKNILIQALSVGV

SEQ ID NO: 19192 - protein, 421 aa, unknown
  TnpB Polypeptide
MYEEKNRKIRENGKATRERHSSMDCCVVSVKVQENRLSKTKLEKIQRCFLEAKWLSNAVIASETLTLEDTSTVQVKIKNTFEERKIECLSVQMKQSVVDGVKQNIFNLSKAKKKGLKVGRLRFKKECNEINLKQFGQTYAIKGKNKIYIQRIGILVVNRLEQINLDEVEFANAKLIQKPPGFYIHLTVYSKKQPEVQEEKEILGLDMGIKDQLTFSNGVKVNFYLEESEQLKGLTRKLNRQVKGSNQYKQTLNRIKRVYEHYNNKKNDVVNKLNSVLEKNYIICFQDELLNQWKRKKPKRRFSFGRKVQHGILGRVKDKLKKNNSNVMLESSIPTTQTCPVCGCLTKYSLDKRVYHCNHCGFECLDRDVHSANMMVLLGGYGTYRSLNADAVSTERMVVFLNNLSELGVVVTTDSMQADCL

SEQ ID NO: 19193 - protein, 416 aa, unknown
  TnpB Polypeptide
MYEERNRKIRETGKATRERRANMDCRVISVKIQENRLSKAKLEKLKRCFLEAKWLYNAVVASGNLTLEDTSSVQIKVKDTFEVRPINTLSVQMKQSIVDSVKTNIFSISKAKKAGLKVGRLQFKKECNEINLKQFSHTYDIKSKNKIRVQNIGIVVVNGLEQVNIDEVEFANAKLIKKPSGFYINLTVYTKKQPEVQIEKEILGLDMGIKDQLTFSNGVKVNFYLEESEQLKGLMRKLSRQTKGSNQYRQTLNRIKRIFEHQNNKKNDIVNKLNSVLKTNYIICFQDELLNQWKQKKSKRRFSFGRKVQHGILGKVKDKLKENSSNHMLESSVPTTQTCPECGCLTKHSLDKRKYHCSHCGFENQDRDIHSANMMVLLSGYGTYRSLNTDAVSTERMVGFLNNLSHLGVVVTTSSM

SEQ ID NO: 19194 - protein, 197 aa, Lentibacillus sp.
MAKQNKAYKFRLYPTDEQALIIRKTFGCVRFVYNKMLAERKGTYENLKNDKEALKKVKHPTPAKYKKEFAWLKEVDSLALANAQLNLDKAYKTFFKGNTKFPKFKSKRHKQSYTTNVVNGNIQLLDGHIKLPKLKMVKIKQHRQIPSEYKIKSCTLSMTSSGKYYISILVEYEKKIESKEIEKSCWTRFCNGWAVCR

SEQ ID NO: 19195 - protein, 116 aa, Lentibacillus sp.
MRKRLKARKLKKVVGLDFAMDGLFVDSETGKKANYPRFYRQMLEKLAKEQRKLSRKKKGSSNWNKQRIRVAKIQEKVANQRKNFLHHKSKELVSTFDAVVVEDLDMKGMSRALSSV

SEQ ID NO: 19196 - protein, 409 aa, unknown
  TnpB Polypeptide
MKARRVEKHAICRTSHYFSDLCDLTHKSKNLYNASLYAIRQHFFSTKTYIGYSKLAGDFAKTNIDYQQLPRKVSQQTLKLVDQNFRSFFALLKAKKNDKVRIPNYLDKSGKYVTIFTNQALSFVKPGYVKLSGYDIFIKTEKTDIQQVRVVPRSNHFDIEVIYLTDIEDKRSDNSRYLSVDIGLSNLVATASNVMKPFLINGKPLKAINQYYNKRKAELQSKLGDKRKTSNRINAISRKRNDKIRDYLHKASTWLINQLDFNQINTLIIGENKGWKQEINIGKKNNQNFVSVPFNKLKQMLTYKAESRGINVICQEESYTSKASCLSNDMIPTYGEKTDDMKFSGYRKTRGIYKDKCLDLEINADVNGAYNIMRKAVGDVKIDPIEACSWPLSVKISLDTKPKLCHYWH

SEQ ID NO: 19197 - protein, 334 aa, unknown
  TnpB Polypeptide
MLRAYKYRIYPTEEQKVLLAKTFGCCRFVYNWALNLKIEAYKQEKKSIGNVELTNRMKRELKTEHEWLGEVNSQALQSALRNLDTAYKNFFRDTHAVGFPRFKSRKNRQSFQCPQHCSVDFKKGTLSIPKAKGIPAVLHRKFKGMVKTVTISMTPSGRYFASVLVDTAIQELSASTIQGNTTLGIDLGIKSLAVCSDGRTFDNPKNLQRSLDRLKLLQKRLSRKQKGSANRNKARILVARLQERIANSRKDNLHKITYALTHESQVRTICMEDLNVKGMQRNHHLAQAVGDASFGMFLTMLEYKCSWYGVNLIKIDRFAPVRRPAANAAMCIKD

SEQ ID NO: 19198 - protein, 382 aa, unknown
  TnpB Polypeptide
MLVYEYKLDGNKKQEARIEEAIRVVQFIRNKCIRLWMDGDRVNKNDLQTYCAVLALEFPFARRLNSQARQASADRAWFAIDRFYTNCREHKPGKKGYPQFQHDNRSVEYKQTGWKLDDDGKYITFTDGCGIGRLRLVGNKKQHIETFPVKDIKRVRIVRRADGFYCQFCVKIERNINHVASGKQIGIDVGLKSFLTDSQGKTVDNPRHYRKAEKKLKRLGRRLSRKQKKSANRKKARKALAKQHLFVSRQREDFARKEANALVSSHDLIAYENLQIRNMVRNRRLSKSIHDAGWGIFLQWLARYAFLHDIEVIAVAPHYTSQKCSDCDTIVKKSLSIRTHICHGCGVVLDRDHNAARNILEKALSSIRGCTVGHTGTDGLAP

SEQ ID NO: 19199 - protein, 231 aa, Erysipelotrichaceae sp.
SLALANAQLHLEAAFKKFFKETDIGFPKWKSKHQAKQSYTTNMVNGNIRLFSTIQNQTTYLRLPKAGDVRIHMHRIPQGILKAVTISKQQDRYIATCLFEYENKVESKEVVHVLGLDYSQKHLYVDSEGQVCDYPHFYRASEKRLAREQRKLSKMVKGSNNYKKQRNKVAKLHAHVAQQRKDFLHKESRKIANSWDMVVVEDIDMKAMSQGLQLGKNLMDNGFGTLRNYLR

SEQ ID NO: 19200 - protein, 387 aa, unknown
  TnpB Polypeptide
LADHSVPTQILTFKVRLLPTKAQHDQLRAALSHTRDLYNASLAERIDCYRRTGKGRSWQDQYRSLTELRADSAWAVYPVTLQRWPLKQVDLAFAAFFRRVKVSKLKAGFPRFKGRDWFKTFGFSDRSGWAVAGKRLRMKGIGRIRLHLHRALPSEPIACKVKREGRHWYALLTVEVPCATEHNGPAIGIDVGISTLAALSTGELIENVRPSRRAESQLRHRSRALARCKHNSRRRRKAKARVAALHSHIARTRDTHLHQITADLTRRFGVIAVEKLNIKGLAGGMLAKEVNDAAWGRLIAMLRYKAERAGGKLIEVDPRYTSQTCPDCGVIEKKTLSERVHRCPCGCVLDRDVAAAKVILHRAGIGPGSLNVEQWPERATGKICEAA

SEQ ID NO: 19201 - protein, 439 aa, unknown
  TnpB Polypeptide
MPVTQARKGKVLGAGVKACARFGGQTRYLWNLFTAMNNARMKAEGKFVFYAELSAMLPKLLKEDDKLRGLPHRAAQMTAQNFDRTLKNYIRNKVEFQRIDAKRKARSAARVASGLPPLKPKKSGIPQFKRRDDHADAFSFVGRECRIEPRRVRLPKIGWVRVRGLEVPRGAALKQVALTQEPDGWHVSIQFDANPKEYKTPTRPTIGIDHGLTALAAWSDAEKIAPPRYARKAEKRVRRLNRERDRRRKGGVNRRRTVMRLAKTHRRVRDLRQNFLHRLTCRMVDTFEGFAVEDLNLKGLMKTRLAKSFADASLGELLRMLRYKSEWACREWRVIGRFQRSTGVCPEEGCGWIGPRLRPGIATWTCGGCGVIHDRDHAASRVILRDATVVRAAGVAPARREPARAFGRKRGALPRADGIEAGALVSHDGPPSNVVDAPL

SEQ ID NO: 19202 - protein, 241 aa, Exiguobacterium sp.
MLKGYKYRLHPTTAQAEFLVKTIGCARFIYNKLLEDRITLHEEAKANGGPKRKPPTPASYKPLFPFFAGTAGFPVFKSKRKARASYTTNNQHGTIRIEGNRVRLPKVGFIRFTQHRIFDGAIRSATVSMTKTGKFFVSLLVEQDDEPWVPAEHKIGIDLGLGHFAVMTNDAMVTEKVPNPRNLREAEARLKQAQRALSRKKPGSRNREKARQQEPREGPARPREETRAGQEPTARLPPQAV

SEQ ID NO: 19203 - protein, 423 aa, Natronomonas sp.
METTTKTLEATLAPPTAHKERKLCDLLETYREGLHEAFDAGCDTMSATSDVVTPYDLPYQAKAALCNYVPQLHDTYNAQELDDDHPVRLTNQAAELDHSPAREYEFTWWAPQPGRGTNFWIPLRINPEQEGLWHDLVDGDASAGQLRLQQNRTSWTLHVTVEFPVEAPDYATAGDDVTHIGLDIGETALITGCALKDGSPTGPFVCDGSRAKHLRKEMHTTLKRLQERDAAEWRMDERFDHYQNALTDIVEKASRQAVEYARQFEKPVLVMENLTYIREELDYGSYMNRRLHAWAFARLQNRVEDKAREAGIPVEYVRPEYTSQTCHACGHIGNRAAQATFRCTNDECHITEFQGDINGAINVAQRADPWGESVPLKPAGNDSPRDGSACDSTTTHRETSEKHSQMTLSAFHGSEPSTSDSRT

SEQ ID NO: 19204 - protein, 416 aa, Acaryochloris sp.
MITLTYKYKLKPTKQQAEQIDHDLEVCRRVWNYALRERKDWMASRKCPVNACFLRGEYIIPADAPYPSFKVQCQRLTDAKRVNPDLASVNAQALQQVLRRLDQAFERRQKLGAGFPRFKQAGRMRSFSFPQLGKAPLRNEAVKLPGLGWTSIRQSRPYPEGFMAKQARVVKRASGYYLMISFQADITIPEPPLVGHIVGVDVGLEYFLSTSDGLQLGRPKFFVDLQRKLKLLQRRLKRKQIGSANWKKTQGKVARLHEQIANTRKDFHFKAAHQLCDGADVIVVENLNLIGLSRGMLGKHMLDASHGQFLNSVLPWVGFKRGKAVVKESARGTSQECPACGEAVNKTLATRWHECPCGCSMPRDIASGLVLRNRFIGRGAHGLENAPGEVLAGGVLHSSQDSVNGESLAIREALAG

SEQ ID NO: 19205 - protein, 491 aa, unknown
  TnpB Polypeptide
MKNISHKISHIYNVGTKRKFINTMFPRHQKGYNHMAFTVTQRVISSENTIYSYCDNLCRKAKLLYNAALFRVRNVFTGYEKEHRTENEIGVFEEIAMLQKAYPTIHVRKVISYYHLEKLMRVTDNPDFFAGLPKQTAQQMTKQAVTDFKNWLTALRDFKKHPEKYLGKPRMPHYKKRDLATVIITNQDAVLYPEQDGVSLKLPITKERLYFSNISEDAFLKDVKIKPYHGRFLLCLTFEDPEPVIKTSMPNTCAIDFGTDNFAAIVCDDESSAIYKGGAVLSDTQWFHKQKAKYVSILTRGHKNRYIPSKRLSDLSYHHANFVKDQCHKISRSIIDFCVKHQAGTLILGVNPLWKQNSRIGRVNNQKFVSMPIAFLRTMITYKALNAGVKIVEQEESYTSKADIMTKDYIPTYGVDDENAQFSGTRIKRGLYRCADGTILNADCHAAANIMRKAVPDIWDRTTDFSFLANPKVYGFHELNPKSIPVKGIAA

SEQ ID NO: 19206 - protein, 353 aa, Duganella sp.
MNLVFRYRVKSLTGLLNQQARKVNLVWNFCNDRQKDALRFNRRWHTGFDLINLTTGCSKELGLHSGTINDVCQQYAKSRKQSNKPYLRYRGRKSLGWVPLKGRELKREGNAFRFAGNTFRVFYSRPLPEGKIVDGTNFSRDRRGNWFLNIVLELAAPPTRLLVRQVGIDLGLHDLAKLTTGKPIAAPNFYREAEPALAIAQRANKKRRVQAIHARTANRRHDFLHKLSTRLVREFDHIVVGNVNAAGLAKTSMAKSVLDAGWSTLRTQLAYKAVKHGAIFEEVDERFTTQICSNCENPIQIRSPRGEPRGIADLGIREWQCSDCGAIHDRDLNAAINILRRGRATLVAGISVL

SEQ ID NO: 19207 - protein, 441 aa, unknown
  TnpB Polypeptide
LKYTTETRLYTKNNKDILEYFDEVKEQYNYVLRKVYYIIRSNPKLNTDLLNTELQNKYNISKRTANSIIKTVQGRANAIRELKKTEVKQTQYKLERISKKLEKLIPTLLDLKLKAKENDIKDLTKYKNLKMKVAFLKIRKDKLVNQIKSLNHQLETNKFKITFGTKKLFKQNLEEFLNKRDNQMVFLGSKDETSCNNTFQLKYVPKINQFIMKVRKDFKYKNTKGEERYVYGKCFFNNHKKLLKEILRLKNSPLTYQIIKRNNKYYLQCTFEINSCDLNLTDNTQGTIGIDFNKGFVAISQTNKYGHLVSIDKMTYRFGSGNKTKNDLLLIINKLMELAINTGKDIVVENLNFLKTKSKAIKGESKEGRKYNKMIHSLAYKTFLDRAEQICNKRNVGLIKVNPAWTSWIAKNKFCDKMKLNVHTGAAFVIARRGMNIKDVV

SEQ ID NO: 19208 - protein, 446 aa, Anabaena sp.
MALRRATFRLYPNKQVSEMLHYHRQLHKDLYNAAVSNRITSYKKFGKTVSYFEQQNCLPDFKEVWIEYKEINSQALQATLKRVDFAFQRFFKGLGKYPRFKPIRHYSGWTYPSFTGWKVHSTGDNGYLELSKIGQIQMRGKARLWGHPKALDIVYRNGKWYASLVLEIDDILLKNSRKTDNGVIAIDLGCNDAIAWTNGEENGLVAAPRFFRKAEQRNKQLGKAKRRKRAPNFKKKVKASRRWKKTQKLVSKLNRKVANQRQNFVHQETTRIISCNSTVVTEKLEVKKMSAKAKKGKRKKQKAGLNKSILDVGMGMIKSALKAKLSDIGGLFVEVPTRQVKPSQTCPKCGNQEKKSLAERTHVCHNCGYTQQRDIAAAEVMLLWYSNNLQGLGTSLSDVDDSSSTSNTSKRKNAGSMKQLGRAKRQKSQAPLGDVETPGSNEVSQG

SEQ ID NO: 19209 - protein, 417 aa, Lactobacillus sp.
MKSMSKLAYHFGLKMRIYPSTKQKQIIQVNSDISRTVYNKMVAIDQELYHLKQVKLPIDTIQARIVDLESRKNARNMSNHYQYMQDKRIDSLTKANAIQNYQKAWKLYRKVHKAGTPNYHKKSYRQSYQTNCQYGKNKSMDMFSGSVRFIDKKHIQMPKLGKLRVSGSYRRILDKKSDIRIGTVTISKDSADRYFVSMQLGSDTPFVKILPKTNSQIGIDLNTENFLTTSDGVIVDNPRYYRTIKHKLAKAQRTLSRRELRAKKENRSLRDSKNYQKQRHLVAKLHDKIRNQRKNFLNYLSMVLINNHDLIVAENLGSSNLLKNHALAMSISDVGWRSFLQKLEYKANLYGRIFITVNPKNTTQMCHTCKFVMGTDDTQKLTLGDRQWICPQCGAFHIRDHNASLNILDKGLAKLAK

SEQ ID NO: 19210 - protein, 370 aa, Lactobacillus sp.
MKKVLDDLCDYRRYCWNQGLALWNDMYDSSLILGDKKLKPSERRVRDELVANKADWQYQLSARCLQLAISDLGKAWKNFFDKAQPDWGKPKFKSKKAPRQGFKTDRAKIVNGKLRLDKPLGIKTWYDIKFKGAKSLEGDLKVVSIYRENDKYWASLPFEVEITKKGKTGNKTAVDINVGHFNYTKGKVNTLPDHLKKLYKRIKHYQRQLARKRVVNGNKATKTNNYVKTRAKLQRDYRKVANIQHNIIHKFTTKLVSDYDKIVIEDLDVKKMQMTHVASKGLQRSLFGYFRQVLTYKAGWYDKEVVLADKYYPSTQRCSDCGHIKTGDEKISLDGNQKHKTKHNEYICYECGAIMDRDENAVANLLALLN

SEQ ID NO: 19211 - protein, 258 aa, Shigella sp.
  misc_feature (256)..(256): Xaa can be any naturally occurring amino acid
VKRLQAFKFQLRPGGQQEREMRRFAGACRFVFNRALARQNENHEAGNKYIPYGKMASWLVEWKNATETQWLKDSPSQPLQQSLKDLERAYKNFFRKRAAFPRFKKRGQNDVFRYPQGVKLDQENSRIFLPKLGWMRYRNSRQVTGVVKNVTVSQSCGTWYISIQTESEVSTPAHPSASMVGLDAGVAKLATLSDGTVFEPVNSFQKNQKTLARLQRQLSRKVKFSNNWQKQKRKIQRLHSCIANIRRDYLHKVTTXAK

SEQ ID NO: 19212 - protein, 443 aa, unknown
  TnpB Polypeptide
MAFASYSAKIIKLNYQTKRAINDTRKIYSDAVSYCAEIVLDNWDIVSKLDSTERNNYVEKLVHSTKHNSAVYPFDLYFPKMPSYLRRAAVAEAIGIIASYTTKLAIYEEQHYQAISNGKKFKKTPPRLNIYPQTFPTFYKGNTYKDNHDGTISIKLYVNHDWKYVTIQLRNQDLKYIQKQLGTKKNPSLSYSYGAYRIVFPFSVSGLELKSNEVKNQVALSVDLGINNDAVCSLVKGDGTVLGRFFIDMTSNKTNMYRLLNRLKILQEMSGYKAKQRKIWTKINCYRKNITNQVVHKIIQLAIEYDVDIIVMENLSNMKTKGKKQKIALWNKKKIINKIKDKAHINGIRYATINPRNTSALAFDGSGFVKRDKDNYSMCTFTTGKRYHSDLNASYNIAARYFIREYKKSMTEMEWSSLEAKVPTLSKRTHCTFDTMLRVVENL

SEQ ID NO: 19213 - protein, 400 aa, unknown
  TnpB Polypeptide
MHLTETHQIRPNHKLYSICDELCFKSKNLYNAALFKFRQSYFDKETNALSWQDIRKIFHQSDQFDYRELPAKVSNDVLKKLGDNISSFWSLVKKSDYNKKVRLPKYLHKTDGRFIVEFNKQTFSNKRDDDNNLIICKTSLDLRIPTKIEKPQQVRIVPKIGCYIIEVIYETKEKQPKQNPRVASIDLGLNNLAAIVTNDGDNPILISGKKIKSINQYYNKMTSKQKSLLPNNVFTSKSLDRLWLKRNNKISYEIHKITKFLANYFDERDISKVIIGNNSDWKNGINIGKRNNQNFVNIPYAKFINQLTYKCQVLGITVITREESYTSKASFLDYDEIPNYKDEAIHKFSGKRIKRGLYKSTTRKINADINGAYNIMVKENPKYITGNRNQFGFNPTLVKL

SEQ ID NO: 19214 - protein, 402 aa, unknown
  TnpB Polypeptide
MLLGNKVRLQPNKEQESLFFQFAGTSRFAWNQSKNFYDTLFKDKGEYATIQQITKHLQDLKHNNPDYAWLNNTPESITKQAIRDLYKAYQKGYSGRKKAQKKSKHSKKSNYDYCMPNFKKKGKCKESFYQRIDRIHKTDDTHVKITGIVKPVKCTALRGIDLPEHIQNPRITFDCKYWYLSYSFEVTDEDVVTDFSRESLGIDLGVKDFVITSDGRHYPNINKSPEIRRLRKRLKHIQRQISRKYEINVSYDNKGNKVYHKTNNIKALEQQARIIYRRIHNIQQNYMYETVNSILKTKARNITVEDLNIRGMLQNPKLAKAIQEERLYEFRRILTYKCERLGINLTIADRFFPSSKLCSCCGHKKIDLKLTDRKWTCPDCGKHHNRDENAAVNLENYLSLTW

SEQ ID NO: 19215 - protein, 387 aa, Ruminococcus sp.
MRRLLKSFKTEIDPTEEQKIKIHKTIGTCRYIYNFYLFHNKERYDAGERFMSGKSFSVWLNNEYLPRHPEYFWIREVSSKSVKNAIENACTAFSRFFHHQSSFPRYKKKGRSDVKMYFVKNNPKDCLCERHRIKIPTLGWVRLKEKGYIPTSKDGYVIRSGAVSVKAGRYYVSALVDIPAPEAAGNFTDGIGIDLGLKDFAVVSNGTVYRNINKTARIRKLEKQLRRAQRKLSRKYENLKKGESTQRANICKQKLKVQKLHHRIENIRTDHINKVISEIVKTKPSHITIEDLNISGMMKNRHLSKAVASQKFYEFRTKLKTKCAEYGIELRVVDRWYPSSRICHCCSCIKKDLKLSDRIYRCTCGYIEDRDLNAALNLRDAETYEVA

SEQ ID NO: 19216 - protein, 424 aa, unknown
  TnpB Polypeptide
MYRAIKVRIYPTAEQESYLAQCFGNTRWLWNYMLNATTTTYKETGKGLSKAAMDKLLPGLKKEYEWLGLAYSQVLQRVTFNLSKAFVNFFEFRAKYPTFKSKYGKQSIQYPQNVKLMVENSTIKFPGSLGIVKAVFHRDLPFVQFTTVSVSKNADGKYYASILFNQEDKPVTAIREAIGVDLGLKNFAITSEGSKYDLPKKQLAQLEKNRKRKQQKLAKKKNKASIKRQKAKRLVAKVSSKIARVREDFLHKLSRKIAYENQVICVEDLAVKNLVKNHKLAKVISDQGWGMFLTMLKYKTEQLGHTYQEIGRFFPSSQLCSETLLPIPALQKGCDSLGVRFVDCPHCLKQHDRDINAAINIRNEGLRLLALGTSATALGGDVRPKLSGRKKSMIVEAIPDELGSLHCSVSGRVGSSLSKVTATR

SEQ ID NO: 19217 - protein, 417 aa, unknown
  TnpB Polypeptide
MTLKSYKFKIIPNTAQAELLFKHFGHNRFVWNWALGLKTRYYRRFGQGLSKRRIQDQLVKKKKREKYAWLTQVNSQSLLATLDNLDKAYSTFFKGCAKFPRFKSKKSNWHSYQNPQHTDINFETNQVKLPKLGLVKAKLHREFSGKIKTSTVKCSPSGKYTISILVDDGLNLPDKTTIEPAFSLGIDLGIKNFAICSDGEVFENKRHLNQWLKKLNQQQRVFSRKKKNSISRAKQRIRVAKLHKKVSNVREDYCHFVSNKVVSENQATTLFIEDLHIKGLIRNRKLSRHISDVAWGKFLQQLEYKCDWNGKNLIKIGRFMPSSKTCSCCSEIKHNLTLSDRVFECSYCGTVIDRDLNAAINIRDFGLKQELESVGTTGAVKCSPVSILVQASGIAKGHSLIDFDESAEAPPRAALAV

SEQ ID NO: 19218 - protein, 360 aa, unknown
  TnpB Polypeptide
MAYKFRLYPNEEQRIYLAKTFGCTRFVYNRMLAERIESYEENKELDIKTMKYPTPAQYKSEFEWLKEVDSLALANAQMNLDKAYKNFFRDKSVGFPKFKSKKSNYSSYTTNNQNGTVYIEGNHIKIPKLKSMIKIEQHRQFTGLIKSCTISQVPSGKYFISILVDSEIIKLPETGNKIGVDLGIKEFAITSDGDFFSNPKQLKKSEKRLAKLQKDLSRKQNGSNNRKKAKIKVAKLHEKISNQRKDMLHKISTQLINENQVIVIEDLKVSNMIKNHKLAKSIADASWSEFRRMLEYKSKWYGREIIIAPSNYASSQLCSNCGNKSSQTKDLSCRTYICPVCGMIIDRDINASKNLLKLAM

SEQ ID NO: 19219 - protein, 395 aa, Moorea sp.
LFKAGKYLTNADLDKIMKTNVHFKAMRSACAQQTLHGVIESFKSYKALSKLYKKGQLANKPRVPSYRKKGGLAVVSYPARWVKLVKGQLKFTLGKQVKAWFGIDHFLLPMPSNIDHKAIKEYRFVPRNGCLYLEFVYERPAPEQVQPTDEALGIDPGLNNWLTCVSTTGKSFILNGRKVKSQNQRYNKRVAELKKGKAQDYWDDQLASLTEKRNRQMRDNVNKAARFVINWCLRNQVSTIAFGWNKRNKDSINIGKNNNQNFVQIPTAKLKSRIEQLCAEHGIKFVETEESYTSKASFLDRDILPTLGAKPQGWKETGRRVRRGLYKSGKGELINADCNGACNILRKVATQLGINLVEVGRAALNLPQRYNFDSLSRSYREASLRVVSTREVISA

SEQ ID NO: 19220 - protein, 366 aa, Paraliobacillus sp.
MATKTMIVRLQDVTKKKHKLFVQEQTEFAACVNDCVERLHNGEKLSSKNVNFNLKSAIKNEAIRRARKAISDFKKGKAKTLPIFRNSLGVKINNQNWNSIEKNGKWYIAFTSNLGKKSIPVVESEDVKMYFPFLLKENKENRGTMELFRKGRDWYIAIPIQVSSELEFKETMKDFVYYTPIGVDLGLRHLAVLSEPTSGKRQFFSGKEVGYKRRHFRSQRRSLGKKKAQRAIERVGKKESRWMKDYNRKLAKDIVDFALQFDSPLIKLEQLDDIRSTCRSLKRVDRTIHSWSFYQLKQFIKERAFKFNIPVVDINPYKTSQTCFYCKHADKGNRRKEIFKCKKCGYKNHADLNASNNIATSTSLAV

SEQ ID NO: 19221 - protein, 394 aa, unknown
  TnpB Polypeptide
MRKAYQFRIYPNKNQEVKLNSTLSTCRHLYNDALAQRKRQAELNNLCRSFDVCLWGKPEWITYRDQQNTLPGNKTNFQKEVFSQVLQNTLKRVDTSFKNFFNGFGYPRFQGRGRYNSFTYPQAGFRIEDGRIKLSKIGAIKIIQHREIEGKIKTCTIKKDIDQWYVMLSTEIEKPILPVETKQSIGIDVGLSSLLTMSNGSQIEPPEFLRSSEKKMAKEQIRLSRKKKGSHNRKKQGKIVARTHRTIRNQRKDFAHKTSRKLVDTYDKIVFEDLQVKNMMQNHHLAKSISDAGWYQLIQLTNYKAEYAGKIVEQVNARNTSQNCSQCGNPVPKKLSVRMHSCPFCGLVMDRDHNAAINILSRSKNTAGTAEIKACPSNLSIDTMKQEAPSLRAG

SEQ ID NO: 19222 - protein, 391 aa, unknown
  TnpB Polypeptide
MRSARRVPENGGAVRTRRLKVRAEAHAWLNAAAIEVNHVWNYCNEMSARAARPFAGRRKYLTGFDLCNLTSGATEHFERIGADTIQRVCIEYAAKRSQARKAKLRWRVSRGSRRSLGWIPFKAASLRWSGQYLRFCGKAIRVFERERLAGARWRDGCFAQDAVGDWWLCLPVVVQVEPTVAPDEGVGIDLGLRDTAVTSDGDRLEAGRFYGRLEEAIANAQRRGHRRKAKRLHRQAARRRADALHKFSRSIVDRYQTIVIGDVSSPKLAKTRMAKSVLDAGWGILKTQLQYKGQQAGRCVHIVNESYTSRACSACGALTGPAGVNGLRVRRWLCRACGDTHDRDVNAARNILVAGRCPPSVRGNEPSHRSAPPSRASRPREAGTARTGAAT

SEQ ID NO: 19223 - protein, 381 aa, unknown
  TnpB Polypeptide
MYKTYKFRLYPTEEQKTLLNKTFGCCRFIYNYYLNDIKENGYRNAYACINDYTSNLKYKKTFLQEVDSISIKKELFFLEDSFKRFYNNGYGYPKFKSKFDKNSYTTTAIYSSYNKKQYCNIELNLETKEVKLPKLKQIKIRGYRNKNNIEGKIIFATITKEPNGKYYVSLVYKQENIQNHLTKQDTIVGIDLGVKKLLTLSDGTIYNNNKYIEKYEKRIKRCHKELSRKEKGSKNYYKCKKKLATLYSKLKNARNYYIHKITKQITDDYDIIVNEKLKTKEMIIKKQMSKQLTDASFYEIIRQLEYKAKFKGKTFYQIDTYFPSSQKCSICGKRDKKYKNLKERKYICTNCHCELDRDYNASVNIMFEGLKLFMKNSYKQL

SEQ ID NO: 19224 - protein, 413 aa, unknown
  TnpB Polypeptide
MEYSHRYQAYPTDEVAERLEHHLDIHRQLYNHVRWEYENSPADDKPSEYDQNNNLPEWKQRWPIFVELHSKAAQATVSRFYHNLTILRKLKEKGYNVGRLTRQAPSDYRSVTYNQSGFDLDEKRGHDTDAYVRFSKIGWVKIRYSRPIPDHATINEVTFKKETTGEWFVSFGLETDDAALPEKPDVDSLDASNSVGIDLGIHNYIHTSDGTTVEWLDLEDEYERLRREQRNLSRKAHGSNNWEDQRKQVAKVRRHIRRKVLDYQHKITTWLVREYDAVFVEDLNVQSMLQGDGNARNKQDAAWRQFIQLLEYKADLYGTHVVQVEPAGTTKECARCGVETAKPIWVRDHSCPSCGFETDRDANAAMNVLQRGFEELGLGWPESTPVETVTTTDTTQFESVSASHVVETGSLSS

SEQ ID NO: 19225 - protein, 391 aa, unknown
  TnpB Polypeptide
MKKTFKYRIYPNKAQQALLQATFGCCRFVYNKTLDIRKTAYETDKTRLSKFDCINRMTALKDEYMWLRDVPAVCLVQAVGNMDTAYLNFFKFGKGYPKFKTKHHSRKSCRFPSSHCAVLQDISRLKLSKIGLVKYNKDREFVGILRHIVVTQESDGKYYASCLVETGVEAPKPQPVEASTTVGIDLGLKDFIVTSDGRKIPNPRFYATIDRRIARLQKHEARKTKGSKRRARIRLKINKLYVKKRNLIKNYIFHVAKTLLRESQTLVMEDLNIVGMVKNHKLAKSIQNICWGELRRVLEYKSQWLGHNLIFLDRWAPSTKTCSCCGFHNSMLTLLDRSWVCPGCGTYHDRDINAALNIKRMGLETLLPAVSGFDGRREVGYDFDEASICAV

SEQ ID NO: 19226 - protein, 358 aa, unknown
  TnpB Polypeptide
MQTAQAMVKQAVTDFKNWLASLREYKKHPEKFLGRPKMPHYKKQDLATVIITNQDAVLYPSETGVSLKLPIIKKRLSFSNISEHAFLKEVRIKPYYGRFLFCLTFEEPEPVIETSMPYTCAIDFGIDNFAAIVCDDGSSAIYKGGAVLSDTQWFHKQKAKYVSILTKGHKNRYATSKRLADLSYHHANFVKDQCHKISRSIIDFCVDHYAGTLIFGVNPLWKQNSRIGKINNQKFVSMPIAFLRAMITYKALNAGIKIIEQEESYTSKADITTKDHIPTYRVDDENAQFSGIRIKRGLYRCADGTILNADCHAAANIMRKAVPDIWDRTTDFSFLTSPKVYGFHELNPKSIPVKGIAA

SEQ ID NO: 19227 - protein, 432 aa, unknown
  TnpB Polypeptide
MYEAVKVSLDPTPAQERRLLSHAGAARFAFNAALAHVKKAIEAGEKPEWSFYSLRKWWNANKDGLAVDDDGVIWWADNSKEAYSYGIESLAKGLSNWSKSRKGTRKGRKVGFPKFKTKGKSTPRFAYTTDFRLISGDPKALRLPRIGRVHCMENVAARVGDDRVLRMTISQRAGRWYASLTIEREDEPVKPAPKGGAVGVDLGIKTLATLSDVTVFENPRYLKKSEQRLGSAQRSLSRKTPGSNRRAKVKAKVARINAHIANQRRDTLHKLTTYLANNYSEISIEDLNVVGMAKNHSLAKSVMDASFGEFRRQLEYKTARTGARLHVIDRWYPSSKTCSRCGRVKAKLSLSERTYSCEHCGLTIDRDLNAAINIKVAGSAPETVNAHGGTGSRNDLLGHATQDPLKCEPSCGDSRVRLGADGCKAALRATVK

SEQ ID NO: 19228 - protein, 361 aa, unknown
  TnpB Polypeptide
MLVNKAYRYELKPNKMQLVLLKKHAGCARFAWNWGLAERKRLWEEERRTTNAIEQHRKLNELKKTDFFWMYEVSKCAPQEALRDLDRAFKNFFQGRASYPHFKKKGIHDSFRLTGTIKVFLRHVQLPRLGKIKVKEETRKFKGRILSATVSREADRWYVSLAVEVEIPDPAPVEGEPIGIDVGLNHFAVLSTGEKIEAPKSLKKNLKRLKKLSRRHSRKQKGSNNRKKSALKLARLYRKIRNQRKDFLHKLSTWLAKTKPAIVIEDLAVKNMIKNRRLSRHIADAGWGEFKRMLEYKTIWYGSKLVVAPRFYPSSRRCSNCGYVLPELKLSTRRWTCPKCGVCQDRDVNAAINLLQYLNTA

SEQ ID NO: 19229 - protein, 282 aa, Thermoplasmatales sp.
MINLEVKTRVDDNVNLREVRIIPHGNGYNIEIVYKKEINGPLIRNNNIMGIDVGVDNIVSISNNTGLNPVIVKGGVVKSINQFYNKQISKLRSINDIQNKHNKKYSRYTKMMKLITDKRNREINDLFHKLSIGVVNYALLNNIDTIVIGHNELWKQNVNIGKKNNQNFVQIPFNRLISMIKYKAEEYGIDVILQEESYTSKCSFLDNESIEKHDKYPGKRIKRGLFKSAKGILINADINGSYNIIKKAFPNAFADGIEGIRVAPESLSIFELLKMTTFKEVC

SEQ ID NO: 19230 - protein, 371 aa, unknown
  TnpB Polypeptide
VWNLAVEQHAWWHPGRTSAPGYLEQCRQLTAARAANPWLAAGSQTVQQQALRDFAQAMTGFYAGTHGRPSWRKAGRDEGFRITGQRGRQWDVRRVGRHWGQVRIPKVGWVRFRWSRPVPGGVKSFRITRDRAGRWHLAFAYIPDPVPAPGNGQVVGIDRGVAISAALSTGEPLTVPGLSTGEQRRLGHLQRTLARAQKGSRRRGKVKTAIARLKATETDRRKDWCEQLSTDLARRFDIIRIEDLNIKGMTRSAKGTIEVPGRNVAAKAGLNRGIHRSGWGLLARRLEDKAPGRVEKVDPAYTSQRCSACGRVDRKSRESQAVFQCTACGFACNADVNAARNIAAGRAVTARGGHQAAGPVNREPQLLLPSV

SEQ ID NO: 19231 - protein, 238 aa, unknown
  TnpB Polypeptide
LDTKNGFRLEVQGDPNWKEYDKQGRLELYYDDVSETFRAFQPVIIDNSRLAHPLADETAALDIGANNIVACTVSTGDQYLYEGRDLFKRFRETTQRIAELQSKLREGRYSSKQIDSLYRRRTRRRNHAMDAIARDVIERLYDEGVSTVYVGDLTDVLERHTGRFGRTPSCTTSGRSDGSSDGSPTPPRNSALPSKSEQKRGPRRRVQTAGQPRTQLDTKTHSPAPAPEGRISPRRERS

SEQ ID NO: 19232 - protein, 266 aa, unknown
  TnpB Polypeptide
MAPRPLHSISVQTCSLPVRQQPVSSISTVATTHSSSFETTNAIASAQAKLPDGQHTSQRIKRLYRKRSRRRDHAVNALLRDLVERLEAAGVSTLYHGDLTGVLGEYWSVEANLKAQTFWAHRQCIDRLESVCEEYGINVETLSEAWTSQTCPDCGDRERTRRHRETLTCPCGFDGHADLVASRTLLEWATDTSQADGTARAVPVGRSPVVSCRGSRSDAQRIAHRPARCRRSVLDAARIGRSHEWSGCRPAGRLLFEQIRRTLLQL

SEQ ID NO: 19233 - protein, 243 aa, unknown
  TnpB Polypeptide
VRSRTLSRVVRTRRTRSTISSRRTRSRPTPDALKNYVPQLRDTYNASELEDDHPVRFTNRGFRIDHSDDRTHEFCWRVPQAGRGNAFWIPLRINPEQESLWFDLFDEDATVGEFRLQQHRTNWVLHVTVEYEVAEPETSDDPTRIGFDIGESKLLTGCACQNDTPTQPYIYDGGRARALRKEMYTTLKRLQERDAADWRVEERFDHYQNALTDIVEKASRESRRVRRVLRRPGDRTRGPVQHP

SEQ ID NO: 19234 - protein, 390 aa, unknown
  TnpB Polypeptide
MAQSQNGIIIRNTTIKVQLYPTPAQATLFDKTFDCCRYLWNRMLTDQARFYAETDVHFIPTPAKYKKSAPFLKEVDCGALISVHQNLRRAFQQFFDHPDRFRHPAYKKKKHCKSSYTIYCQYYPSGKGASIYLTDNGIRLPKAGIVKARLYRKPLHWWKLKTATVSKSPSGKYFCSLTFEYAVNPPKTVQPTQETTLGLNYSLSHFYIDSNGRAADAPHWIHRSQDKLGRMQKRLAQMQRGSKNYEQQLHRLQCLYEHIANQRKDFIHKESRRIANAWDAVCVKDTDLVEMSQTLQLGNVMDAGYGQFRTYLQYKLERMGKPYIVVEKYFPSAKTCHRCGAVNDALAADARRWQCPSCGAVLMRASNAAENLRNQGLAQYYENQGRRISA

SEQ ID NO: 19235 - protein, 384 aa, unknown
  TnpB Polypeptide
MLNFKYRITERDTKQLDEILITANCIWNYALMLQRKYYEWTGKYLSSNKLQKYIAKKRKQNPYWGKLNSHWVQEIVRRLDESYQRFFNKVQKRPPKFKRWCQDGSIVAFWNVSYLDGMKINNDEITLKQFGTYKFIKHRACGKNIRCVRIKRYNNHFYVVITCDCVPKQLARNCNGEAGIDFGLKTFITLDNGEKIESPRFLFKNAKKLRKLSKVVSRRKKGSNRRKKAVKKLANFHAHVAWQRDDWQWKLAHQLCKQYSVIKIEDLCLLGWVRLWGRKASDLALGVFIKKLEFVAGKYGTQIVKVDRFYASSHICSSCGQKLDRKLRLNEREWQCPNCNVRLDRDVNAAINIKQWDATVRGDRVRPSFNGGTINEARTRSPVL

SEQ ID NO: 19236 - protein, 335 aa, unknown
  TnpB Polypeptide
MIITYNFRIKDSTTRKRLNLLASAVNFTWNYCNDTSFNAIRNFSKFLSEFDLNNLMAGSSKELPLHSQTFQSISKEYVARRKQSKKRKLRWRSYKKSLGWIPFKVSGIKLQGSEVVYGKTRFKFWKHREIEGRIKTGSFNQDSLGRWYLNLQCEVAIAEPKTEGETFGIDLGLTENLTLSNGVKYIRENLTRSFEVKLATVQRARKFRVAKRVHLKIKNKRKDWNHKVTREIVKASKLVIMGDLNLPKTKSVYDASFSQIKGIFQYKAIRHGVAFKLVNESYSTCTCSKCLERSGPRGLRGLSVREWVCSNCKTLHDRNVNAANIILRFGTESPT

SEQ ID NO: 19237 - protein, 459 aa, Streptomyces sp.
  misc_feature (459)..(459): Xaa can be any naturally occurring amino acid
VAVRTRLRDLTPGDEKVLRLVGAHLGSLASKDLKARCRDGLSHSGEAWAVRKRELTPVSSSRWAGSITKASHDQWALARRCQLAYIQNLEAGIRTVEGRLSLPVEQKGTKKAPGGYRSQREWHAKSRRLRVLQDRLAAARADREAGVVHVVRGGKRLARTRHHLDAAQLTESAWRGRWEAERWFCQADGESGKRYGNETIRISPDGEVSIKLPAPLSHLANAPHGRYVLACRVAFAHRGGEWADRVVADRAIAYRIHYDAGRDRWYVTASWQLPATPTLPIEAALAHGVIGVDMNADHLAAWRLDTHGNPTGSPRHFPYALSGTAEHRDAQVRHALTRLLHWARTCGVRAIAVEDLDFAAEKTREKYGRRKRFRQLISGMPTGKLRARLSSMADQTGIAVIAVDPAYTSRWGAQHWQKPLTTTTRTTTRHDAAAVAIGRRAQGHPIRRRTTPPPHDRSX

SEQ ID NO: 19238 - protein, 329 aa, unknown
  TnpB Polypeptide
MYGCFAVHSRAGFNFEDFRELPLMDIYTVFQAFVDSWDGISADLSRLSTEGWRGKIMPFDLIKKELFSADLEEMARLNNNADAGLKNLSERGNSIQTSERKERLYYRAMDRSRRATNPQNYNPDGTIKKGKKTWKYSNHYKKLKAKHAELCRINAVNRQLAINEDANYLRSLGDTFVTEPKNASKLMKRAKKTTVNSKGKFNKKKRFGKSIKNRCPSGFQTTVEKKFKVTGGAYIEVSNNYRASQYDHTADDYIKKKLSDRLYRLRDGTLVQRDWYSSFLLYCYDYRTQDIDKDKCITDFGRCYDKEKALIAWIKANHIKILNSGIKVA

SEQ ID NO: 19239 - protein, 444 aa, unknown
  TnpB Polypeptide
MLKSQSYILNKKRNPELFEAFDTWTRASKEVFNFALFVERQLLSSASKDRDKWSENEKAIREEMNSSSFTEIPDSQKSIGYKKLDRFIRDHHYDIFEKELSNQSVQYVLKAAVHDIDAFFKAVKSYNANPSAFTGKPKLPHYRKNERKSIKISNQDCVLREFSNRWEMKFPYIKARYIISELPENFKRLKEVRIIPFYGTYKIEMVYEAVTKEKPRLSIEQIAAIDPGIDNLVTLVTNDESLVINGKIVKSKNQWFNKRSSELKSLLDKMYGSSDHEQSKQLTLLWKKRANWMNDYMHKVSRFIANYCIEKQISVLILGKNEQWKTNSNIGKTNNQNFVQIPHSVLYKLIQYKAEEIGIKVIYRKESYTSKASYLDGDSIPVYKEGQKYTFSGKRIKRGLYRTKDGILLNADVNGAANIYRKQSGTSPFTKGALQKVKAVTIRP

SEQ ID NO: 19240 - protein, 404 aa, unknown
  TnpB Polypeptide
MEAVMRKMTYRLYPNATQAALLETSLALPCRVYNTLLEKHKRRFDAQESAFGFSAMCKALTPWRGLTDALQGLNAPSLQVTAKRVSLAVDAFLRRVKSGETAGYPRFKPLQRFAGWGYKPHGDGWTLIQPEGPHGKRRLSGVGEIRMRGKGRFAGPPKTGEVIHKSGTWDLSVTYDVAPEDLARPQGTEAAAFDWGMSTLVTRAKADGRMEEIDPPRGLKTKLAAIKALRRTISLEEIEAKAILGLAADQPIPKGTRRPVSAKLKRRYAQVRAIHGKISRQRKDYYHHLTAEWVSRFAFLGTEELAVAKLSKAPKAKPDPDHPGGFLPNGAAAKAGLNRGILDAAPSMLLGMLVTKAVEAGSRFALANTRKVKPTQRCHGCGALVKKELYAAYAPMRLRLPLWS

SEQ ID NO: 19241 - protein, 149 aa, Enterococcus sp.
LSRRILLAKQKGINLFEAKNYQKQKRKVARLHEKVMNQRTDFLNKLSTEIINNHDVICIEGLNSKGMLRNHKLAKSISDVSWSSFVAKLQYKADWYGRKIVKVNKWFPSSQICSECGHKDGKKSLKIREWACLIVILIMTVISMLVSIF

SEQ ID NO: 19242 - protein, 248 aa, Scytonema sp.
VYKAYLPQLKLEYAWLREDCYSAVLQCVAINLNKAYSNFFEGRAKFPRFKSKHHKQSIQYPQNVNVVGDCLEIPKIGNVKAVFHRLIEGKVKTVTISKTTTDKYFASILCEIEDSINQSTDGKTLGIDLGLKDFAIVHDGSEATKYSNPKHLKRHEKNLARKQKKFARVETRHGASVQETNSRNKYRKLVAKVHERVSNSRQDFLHKLSRKLVDDSQVIVVENLNVKGMVRNRKLSRVNIRCGLGNVR

SEQ ID NO: 19243 - protein, 315 aa, Scytonema sp.
MSLHLCYYGNSKEVIKVLKAVKVRLYPTTEQEIALTKSFCCARWYWNYALNACIHHYEETGKTLKLSVYKAYLPQLKLEYAWLREDCYSAVLQCVAINLNKAYSNFFEGRAKFPRFKSKHHKQSIQYPQNVNVVGDCLEIPKIGNVKAVFHRLIEGKVKTVTISKTTTDKYFASILCEIEDSINQSTDGKTLGIDLGLKDFAIVHDGSEATKYSNPKHLKRHEKNLARKQKKFARVETRHGASVQETNSRNKYRKLVAKVHERVSNSRQDFLHKLSRKLVDDSQVIVVENLNVKGMVRNRKLSRVNIRCGLGNVR

SEQ ID NO: 19244 - protein, 336 aa, Planktothrix sp.
VSESFKSYIGLLKGVAKGTVTQKPRLPGYRKGGLSLVTFTGRSVKLKDNQLRFPLGGKVKAWFGIDSFYLPMPSNLDFKDIREYRILPRNGCFYLELVYKSQNIQSNVNPLNALMIDHGMDNWLTCVSNVRTSFIVDGRHLKSINQWYNKQVALLTKDTPNGYWTKRLQSLTENRNRTMRDAINKAARKVINHCLDNQIGTIVFGWNKGMKDGANMGAKTNQKFVQIPTSRLKDRIAQLCEQHGIRFVETEESYTSKASFLDLDLLPKFGEKPEGWQPSGKRVKRGLYRTADNWLINADCNGAANIGRKVATILGLDLSGVSRGELTAPLRVPLWA

SEQ ID NO: 19245 - protein, 457 aa, Cyanobacteria sp.
MRLNYQYRIYPYTQQVQKMNEWLRICRYLYNRWLGQCLDWWDSNRCPVNACPLICHLGELADNPYYTDLKAQLPGLKTDLVTVQWSGELLDLKSVYSTVLQDVYTSRLKKAMDRYIQGDSNGKRSGRPRFKTEADYRSFKFPQVKQDWPRPKNAVLYLPFIGGVQIRLHRPLPEGFKLKTVQAIKKADGWYVNLCIEDPTVPEFTPDEIFPTWDNSIGMDAVLHEDDFLALSDGQKLPSLKSFRKTQFLLAGVSKRKAARKQGDNRRRKLAKREARIHQRIARSRKDHAFKTAHKVVKSGHQVYFHEDLDLKNLTKRNKAKQDEDGKFLPNGQAASSGLNKSWNDAAFGAFFKTLEYIAEKAGAKVVGVRPNHTSQFLSYRDEKIFTDCEIREYWDEIEQLLVDRDINAAINIKRVGLGLFLTLNSRSGKIKVSHTHSTAMEVLRFFRGLQKRTLTR

SEQ ID NO: 19246 - protein, 439 aa, Clostridiales sp.
MKQITTYGVRIHAASMKPVQDMVRIYRKVVSFLIKVCDEQWSSVSGIPTLVRKQSFVEGLIHHTKHRAMVQYDQFDVLFYKLPSYIRRSAISEAIGAVESYRSRLKAWNENPVGKAPGVPQAGYTYPVLYEGNVFEQTGDYSARIKVWIRNTWDWMEVTFRKSDADYILRHCGERRKLSPTIVKKGKKWELMFPFEEDVSLRNVNVREQTILSVDLGIHNACACSVMKSDGTIVGRRMLRLPVQEDCLNHLLNKVKKAYKQGYRHIPTLWSRINNVNREISIETARFISAVAEEFHVDVVVFEKLDLSGRKRGISRRQRLHLWKSRDVQGMVTCKVHRMGIRVSHVNARNTSCLAYDGTGKVERGVNHNYSICRFSTGKVYHCDLNASYNIGARYFVREIMKTLPVTTGLGISAKVPECTRRSTCTFSTLISLNAALAV

SEQ ID NO: 19247 - protein, 374 aa, unknown
  TnpB Polypeptide
MEIFKDMVNHCIRIGLEHNCSTMKKLSMLSYQRLKDYQIQSKYKLTAISQAAGRLAQMKKDLKKGKMVKSPFIRKPYLVSCYGFKINGCLLSFPVSNRQFANILLNSHTAKILSNDSLEPRSFTITPTSLSISVRKQIETIKPEAVIGIDRNLRNVTISTPNGSIMYKTNKILTIKENSQFVKASFRRNDRRVKNRFYTKIRGRQTRRVNQFLHKISKDIVQRAKDSKSAIIFEDLKGIRKLYRKGNGQGNRYRRKLNSWSFYEFQRQIQYKADWEGVPVVFVDPKRTSKLCPICGGSLQEDRQNRRKLWCNNCSKSMDRDVVASMNIAYKGWARFTHPRGLPVEAMKGNVEFVSNPLILRVDGSKLVSEVSPC

SEQ ID NO: 19248 - protein, 313 aa, Planktothrix sp.
MLDSLKVRLYPNKEQQTALAKSFGCCRFVWNYYLEKTNNQYKETGKGLSYCDMAKDLTQLKKQPDYLFLKEVTAAALQQSLKNLESAFKNFFQKRARFPKFKSKHKKQSIRYPESCSIKGNGVKLPKLGVVKARIPKAISGKIKSVTVSKTSTDKYFAAILFETDDLILDKTGKISGIDLGLTNLVTVFDGETYTKVDPIKPTRKYAKRLKRRQQALSRKVKGSNNRKEQVKRVAKVHEKIANTRQDFLHKLSRKLVDENVETRHGASVLVVENLCVKGLARTKLAKSVLDAGFGMLINFLNYKLAHRRRKVN

SEQ ID NO: 19249 - protein, 475 aa, Clostridiaceae sp.
MKAILINETDEQKQIIDNLMLVFCTAIRYSFKRLLESVKVSDLEKAVAKKYNLNIRQAKDAVESARQTILSQKELAKMIYENYCNKIKAIEKILNGKKKISDKKRNALISKLDKRQRKANYFKNFIDTNTIPSVTFGTKEMFIKKCKGLISKEEWKSCRNNRIYSRGDKTKSGNPNLRVIIKNGMSYLEISTLEKTSTNRAIKIQVPIYLPQKLSRKTGKVNGINYRELFLKYLTTGEAYQVEVLKRNGKYYCHITFELPKTEVVYTGHNGIMGIDTNPNGFALTMIDNKGNYKWHSYLKQHELLYARTNRRENLCGELAKQVISIAKTYNCGIAIEDLKFKNDKDVHSKFARVKHQFIYSKLLIMLENACIREGVEIIKIKPQFTSKIGLYKYCHQYGMVVHNGAAMVIARRSYKFKEKIPKILKDKLVIDLDKFNKKNEWSKWNEINKNIKGKVGENPDLWLVNRKKILGLVS

SEQ ID NO: 19250 - protein, 540 aa, unknown
  TnpB Polypeptide
MSRKKGHRVEKGGTVFLGAHARLVFLKEEDEQAVLDLMRRFSSATRFAYQRLLEGKTREELKRESGPLCTLFALNTRYADGAIEKAQATLDSARELGQDPLKVVFGGRKLFEQLKRKHLSGKALLVLKREWQEKRQGLLYSRGDAAKKGNANLRLEPQGDALWLRVNLGNGAHVRALVQTSHPQLKTLLQRAYASLPYNVALQLKEGKVYAHFTWSEGLPLPVHTKANGVLGIDVNADPYHLALAVVSPDGNLTRYLVLSLAEVDSAPNKGAKELALWKVAHQVVAVAEEHGVAIATERLKYLRKSRRGDGSGRSFRRKQHRFAYRALLEKIHSLARKRGVEVLEVSPQDTSTIGMLKYAPQLHLSKDVAAAYVIGRRALGYEEKLPKGYQVLLRDDAFFAHVQGFYGSRLQELQKLKEAEKNPYPKRRLSREMGKARRALSLLLSFPGPQKGRKASPQGSSGSQRKSTDGRNFPGINPWRVLKVSLFLPLLGLEAPRDLSLLRPILHFTSLTQGSWKGRKVGSGPHPGGGPGCTNVHFC

SEQ ID NO: 19251 - protein, 424 aa, unknown
  TnpB Polypeptide
MLRAYKYRIYPTEEQKALFAKTFGCCRFVYNWALNLRIEAYKQDKKSATHKEVQDRMVNELKKENQWLTEVNSQALLNSLRNLDTAYKNFFRNTHAVGFPKFKSRKSKQSFQCPQHCNVDFVKGTITIPKVKGIPAVLHRRFKGAVKTVTISKTLSGKYFASVLVDTVIQELPVTPIQNDTVLGIDLGIKSLVVCSDGRTFDNPKNLQRSLDRLKLLQKRLSRKQKGSANRNKARIRVARLHEHISNCRKDTLHKIIHALTHDSQVRTICMEDLNVKGMTRNHHLAQALTDASFGMLRTMLEYKCRWYGLNLLFIDRFAPSSKTCSKCGRVYKGLKLSERSWACPECGTYHDRDFNAACNIKEFGLKALPMERGKVKPVDCPLVDDRPRVLKAMAGRSRKSEEVLVPPKLMPLGVSSSQDLKGF

SEQ ID NO: 19252 - protein, 428 aa, unknown
  TnpB Polypeptide
VIIIFFHATNIHKFLAVYEIITIFVSGMRKINRAYKFRLYPNKAQTDLLARHFGCARFVYNYFLNQRKEQYRLTGKSDNYYAQAKALTALKKQEATAWLKEVNSQTLQFAIRSLEVAYTNFFQKRAKFPNFKSKRSKNSFTVPQFASVAGCRLFIPKFKEGIKCRVHREIKGEIGKVTISKTPSGKYFVSVFTEEEYVTPLEKTNKSVGVDMGLKDLLITSEGETFKNNRYTRRYERKLAKAQRHLSRKKKGSRGFENQRLKVARLHEKIANCRVDYLHKSSISLVRRYDIICIEDLNVKGMDRNHHLAKSVTDASWGSFVSMLTYKAEWNDKKVVKIDRYFPSSQTCNVCGYINKQTKDLSVREWECPVCQTHHNRDVNAAINILRFGLNHISAGTVDYTGGEEVRANLLKGRSSAKPEAHESLAHG

SEQ ID NO: 19253 - protein, 378 aa, unknown
  TnpB Polypeptide
MNKHLQNINTYNKAYKFRLLPTKSQEIFFAKTFGCVRFMWNQLLAYADSHYKEHGKTGYTTPAKLKAEYVWLKEIDSLALANVQLNLEKAYKSFFKQISKFPKFKSKKDTRQSYTTNNQEASNSIRIEQKTIRLPKVGIVKFIQHRQLKKTEKIKSCTISKSPSGKYYVSITVEGISEIKKVVPNKDKVLGLDFVMNGLYVSSEAEIANYPRYYRKAEEKLHKLSQAVSRKVKGSNNRHKARLKLAKWHETIRNLRDDFLHKLSHELANKYDVIVTEDLNMRDMSQALNFGKSVADNGWGRFLRFLEYKLLDLGKQFIKIDKWFASSKTCSNCGTKKAELPLSVREYVCDNKQCNLTINRDYNAALNIRTAGMAGIAW

SEQ ID NO: 19254 - protein, 397 aa, Herbidospora sp.
VRRSFKFRLRPTRHQEIALTACLEDHRQLYNAALEHRRTVYAKAGVTVRYGDQSAELKHIRADDPEGQGRWSFSSQQATLRRLDRAFAAFFRRVHLGRAPGFPRFKGRSRFDTVEWPKDGDGCRWNSQPCHPTATYARFQGVGHIRVHQHRRVSGTVKTMSVKREGDRWFVIVSCDDVPAAPLPATGDAVGIDLGVAWLLTTSDGKHIPNPRHLAASAGRLAAAQQELTRKQRGSGRRRKTVTRIAALHAKVGRQRLDYAHKAANLLLRDHDLIVHEALQITKMTRRARPKPDDEGGFLPNGAAAKAGLNRSVLDAGWGVFLTILSYKAESAGRELIAVNPSGTSRTCAQCGHSAADNRVSQAEFRCIACGQAAHADVNAAINILRAGLALRQAEAA

SEQ ID NO: 19255 - protein, 402 aa, Escherichia sp.
VKRLQAFKFQLRPGGQQECEMRRFAGACRFVFNRALARQNENHEAGNKYIPYGKMASWLVEWKNATETQWLKDSPSQPLQQSLKDLERAYKNFFRKRAAFPRFKKRGQNDAFRYPQGVKLDQENSRIFLPKLGWMRYRNSRQVTGVVKNVTVSQSCGKWYISIQTESEVSTPVHPSASMVGLDAGVAKLATLSDGTVFEPVNSFQKNQKTLARLQRQLSRKVKFSNNWQKQKRKIQRLHSRIANIRRDYLHKVTTTVSKNHAMIVIEDLKVSNMSKSAAGTVSQPGRNVRAKSGLNRSILDQGWYEMRRQLEYKQLWRGGQVLAVPPAYTSQRCACCGHTAKENRLSQSKFRCQVCGYTANADVNGARNILAAGHAVLACGEMVQSGRSLKQEPTEMIQATA

SEQ ID NO: 19256 - protein, 380 aa, Methanomicrobiales sp.
MLRGYRYRLYPTTEQKVLIAKHLGCCRFVYNWALVRKNMAYQIDGVSLSAYDLHKRLPALKEEHPWLKEVNSQSLQQSINHLARAFMNFVEGRAEEPTLKRKHSPEQSFTVPQHYVVDSERGAIQLPKIGAVKTVFHRPFAGKLKSTTVTRTSAGRYFISILVDDGKKPPVPVAPIPEQTVGIDLGLTHYAVLSTGEKVANPKHLKNSQQRLAVLQRRLACKKKGSKNRNKARLKVARCHQKIADQRRDFQHQLSSRLVRENQALAVESLNVNGMVKNHSLAQAISDAGWGTFCSMLAYKCREAGKTLLQIGMYEPSSKTCSVCGYRKADLTLKDREWTCPDCRPPHDRDINAAINIKQFALSGAERAVEPVDSLPMGGG

SEQ ID NO: 19257 - protein, 533 aa, unknown
  TnpB Polypeptide
MNPRMPKGKAPKLFLGVHARLVFLKKEDEQALLDLMRRFSSAARFAYNRLLEGKTREELKRESGPLCALFGLNTRYADGAIEKAQATLDSAKELGQDPRKVVFGGRKLFEQLKRKHLSGKALLALKRAWKERRQGLLYSRGDVAKKGNANLRLEPQGDALWLRVNLGNGAYVRALVQTSHPHLKALLQRAYASLPYNVTLRLEDGKVYAHFTWSEALPPPVHTKANGVLGIDANGDPYHLALAVVSPDGNLKRHLTLSLEEVDRAPNKGAKELLLWKVAHQVVALAEEHGAAVATEKLKRLRKSRRGDGSGRHFRRREHRFAYRSLLEKIHSLARKRGVEVLEVNPQDTSTIGMLKYAPQLHLSKDVAAALVIGRRALGYEEKLPKGYRALLRNKSFFAYTEGFHQSRLQELQKLKEAEKNPYLRRKLSREIGKARRALSLLLSFPGPQRGRKASFQGSLGSQKGSTNGRNPSGANPWRVLRVGLFLPLLGLEAPRDLSPLKPVLNLAPLTQGPWKGWKVGLGPPPGGRAGVH

SEQ ID NO: 19258 - protein, 367 aa, unknown
  TnpB Polypeptide
MEYSYKFRIYPNAEQENLICRTFGCVRFVYNHFLAERITQYRETGKSPTRFQQDKELTALKQKLEWLQEPDKCALQNALKYLDAAYKNFFRRVKNGEKHGFPRFKSKHEHRQSYRTNGSIRIFENAIQLPKLGRVKCRVSKEVKGRILSATISQNPSGKYFVALCCTDVEIEPLPKTGVVIGVDMGLKAFAITSDGMEYPNPRYLAKNQKKLARLQRQLSRKSKGSNRREKARVQVARLHEHITNQRGDMMHKLSTQLIRENDVVCIEDLAPKNMVKNHRLAKSISDASWGEFRRRLEYKAAWYGKKVIAIDRFFPSSQLCSCCGYRNTGTKNLEVREWTCPKCETHHDRDINAAKNILSEGLRLLA

SEQ ID NO: 19259 - protein, 520 aa, unknown
  TnpB Polypeptide
LRRAVAVELEVTKELNKLLYSVESAYLNIVREVVEYAVKNNVLNAIQLHKLFYHKYRSEYPSLNSQLIIQAIRQASEIAKSFIERRKKGLVSKPYPEVRSVSIRFTGSAWDYEQFISSVAPVRIAISPISTGKRGRGGRRFEVWLRPHKRFWQYWWKVLTGEAELASTLIVKRKANKWYAVFIFEIKPKEEEPRSIIAFDINENIVAVGRIDLPSTVDKVVNWNRQYIMPELYTIRTDFGRLARRYGRIRNAIIDRLKPHFALPNGKYLNVTDTREFRKHMKRLREGDRKLGRVRQVASELTKTPAIIITEDLGENPQESMISDVGKGELRHRIKQTPFKSIEEAVGDKALERGSRLVRVSSYRNSRVCPIHFTRLERTDDWHVLKCPLGHYVDRDYASILNMMWKVTPEAWTKGVWWDLRKNMNWREYEGKSNPLIPHSLVQYLHAILRTFKASEQCPAVLARGKPMNPAGGADEGWARSPPRPKGTYALLGQGGGRPVVPYHRIHTTRPSRMPPPGSS

SEQ ID NO: 19260 - protein, 375 aa, Lachnospiraceae sp.
MEQTVTAKLQILVNPSDKQILCDTMKAYSDACNYVSEYIYKAHNLSRYSVQEDTYYQVRETYGLRSQMAVSCVRTVIAKYKTILENQKEWIKPVFRLPQLDLVWNRDYSLNTKNDIFSVNTLNGRIKVAFYKNGFEQYFSDNCKFGTAKLVNKHGKFFLHIPVTYEITELKKSEVSNVVGIDRGIRFLAATYDSNGESVFYDGNVVKQKRAHYKALRKQLQQVGTPSSRRRIKAIGQRENRWMQDVNHCISKALVESNPDGSLFVIEDLSGIRSATERVLVKDRYVSVSWSYYDLEQKLSYKALKHHQLVEKVNPAYTSQTCPKCGHTERSNRNKKMHIFCCKNCGYKSNDDRIGAMNLHRMGIELLVPDAVAAE

SEQ ID NO: 19261 - protein, 387 aa, unknown
  TnpB Polypeptide
MRRLLKSFKTEINPTEEQKIKIHKTIGTCRYIYNFYLFHNKERYDIGEKFMSGRAFSVWLNNEYLPKHPEYSWIREVSSKSVKNAIENACTAFSRFFHHQSGFPRYKKKGRSDVKMYFVRNNPKDCFCERHRIKIPTLGWVRLKEKGYIPTSRDGYVVRSGAVSMKAGRYYVSALIEVPTPKVDGNFSDGIGIDLGLKNFAVVSNGTVYRNINKTVQIRKLEKQLTRAQRKLSRKYENLRKGEFTQKANIQKQKLKVQKLYDRIENIRTDHINKTISEIVKTKPSHITIEDLNVSGMMKNRHLSKAVSSQKFYEFRTKLKAKCAEYGIELRVVDRWYPSSKTCHCCGCIKKDLKLSDRVYRCVCGYIEDRDFNAALNLRDAETYEVA

SEQ ID NO: 19262 - protein, 558 aa, unknown
  TnpB Polypeptide
MLNIINENTIKDLNLDVSLASANLQLVKQIPITDVNDVFCCLLLSNTAKKLYNSALYLFKKQYRENQTTLNYETLDKLMKNEELHPNFAKLYKDLTAKVSQQVLKLFSQNIKSFFALKQSEKLTDEQKKKVNLPRYYAKNGLVPIYYTSQALSQKSFNEEGVIHFAGTDLKIKLDFASHPEITQFSQINQVRIIPSTRNDKNKSLSDLLEEYCSGNAEIDQASLASLFKVEIVYTAPLTVQRCNNQSLDLRYETKIIQKVRKKDNTVYEIEKVELVEVNYTEEFLQSVAGIDQNLDQLAVGLVTKEKTTAFTYDIKYLKSVNQYWNKEKAKLQEEISKQEKLLEELKDEKIIESDSHKSDNINVKNIEEEIKEKKVLIKQLKNKVKRITTKRNHKIDNYVHQLSRKLINHLSQLGVKNIIYGKNVNFKQEINLGKVTNQNFVNIPFNLIIERLRYKACLAGINFMTVEESYTSKTSFLDREKLYSYKGQDNKAPKDYTFLGKRFTRSLFRSKNGHVIHADINASFNIIRKVSGDDIYEFARVGSIKVSSPKRWKINLQ

SEQ ID NO: 19263 - protein, 462 aa, Glycomyces sp.
MKAGTGISWRERGVWAVTAVRAFRFHGSGRCTGVLLRYRFRLYPTMPQRVSLARAFGSARVVFNDAVAARKHAHAEGLPYPTMAVLSKQLITEAKRTPGRSWLGEVSAVVLQQALSDCDRAWKNFFASVKGERAGTRVGPPRFKRRNGTQSIRFTRNARFAVLGNGRLRLPKIGEVKVAWSRALPSEPSSVAVIKCPTGKYYASFVVAVDEGADFLEPLGDPEAETGIDLGLKDFAVLRGGRVIESPRFFRRLERRLGKAQRVLARKAQGSVNRAKARLRVAKIHEKIRDTRSDWVDKQVKAIVRENQAVYVEDLNVKGLSRGRAAKSVHDAAFGMFLARLESKAARSGRTFVKIDRFFPSTRLCSVCGVLAGPSGLEGLKVRSWACGCGAVHDRDVNAEVNTRREGSRIVAGGHPDTRNASGGDVRPGTPGRLRNPREGKNEEPARGGAVSTVPKPGVSVL

SEQ ID NO: 19264 - protein, 286 aa, unknown
  TnpB Polypeptide
VDFGKGTITIPKVKDIPAVFHRKFKGMVKTVTISMTPSRKYFASVLVDTDIEELPTTPTHGDTCLGIDLGIKSLAVCSDGRTFDNPKNLQRSLNRLKLLQKRLSRKQKGSANRNKARIRVARLHEHIANCRKDNLHKITYALTHDSQVRTICMEDLNVKGMMQNHHLAQAVGDASFGMFLTLLKYKCSWYGVNLIQINRFAPSSKTCGKCGYIYKGLKLSDRSWICPECGTHHDRDFNAACNIKEFGLKSLPTERGKVKPVDCPLVDDRPSVLKSNDRKKQEEAHA

SEQ ID NO: 19265 - protein, 418 aa, unknown
  TnpB Polypeptide
MERLQAHTFQLRPKAGQENLMRRFAGCCRFLWNKAFALEKETCENEGKRLGFSLFCKFLRDWKKENDTSFLVEAHSQILQQVLKDLDRAYKNFFAKRADFPRFKRKGVHDAFRSPQGFKLDEGNSRIFLPKIGRVRYRNSRRTEGMPKQVTVSFAAGKWYVSIQTEREVPEPVHPSQVAVGMDMGVARFVTLSDGSSIRPLHSFRKHEKKLAALQRKLAKRTKFSANWQKLKARIQRLHRKIANVRNDFLHKATTAISKNHAVVVIEDLTVRNMSRSASGTLEAPGKNVRAKAGLNKSILDQGWFEFRRQLAYKLAWPGGNLLVIPPQYTSQTCSRYHALRAHFAIENICRSDTLACRLPLEASAFRGGRQMTHRKGITQRRIWGAVKHASPVSVNIFRMECSGCPACSVPLPPLLPA

SEQ ID NO: 19266 - protein, 382 aa, unknown
  TnpB Polypeptide
MFKSFKYRLYPTEVQKELIAKHIGCCRFIYNLALETKTMVYAGSKINLSSFDLMSQLPELKKECIWLKEVNSQSLQQSITNMDMAFKKFFKGQNDFPKFKRKDSRGSFTVPQNVRIEYGLLKIRKFKEGIKMIFNRRFRGIIKKATISRTPTGKYFVSILVDTRKKLPDKVPIKEETTIGVDLGIKTYLVGSDGTKYENPKNLKKAQSKLKYVSRKFSKYKGKRTKHRLALIHEKVVNKRKDFLHKTSTELIKNHDTVCIEDLCINGMLKNHNLAQSISDVSWSMFVDMLKYKADWYGKNILQIGRFEPSSKLCNVCGTIKHDLTLEDRIWTCKSCNTKLDRDVNASINIKFFALKKYLSTGLTLKNQNELPTLVGVLTSEA

SEQ ID NO: 19267 - protein, 461 aa, Thermococcus sp.
MKRTVTLKLHPSKTQEKALFELAYASAVIWNKLNYQRLKQFREFGKIDFSTTEKEAYYEFKNWIGGSTVQQLARKNAESWRSFFTLNRKKKSGKLPEWFKPKPPKSIMKNNGRKLFVIPLRNDQYLIKGNVIELRRLGKFRRLEVQFKGRIHLKGKQGRLEITYDNVKRKWYAHVNFTVGEKLEGREWVSIPRTPKGNLSAGIDLGVNNLLAVYVENGESFLVNGRPMKSVDFYWRKKIAECQSKLNKSGAKTSRKLQGMHEKAKLQAKHYINTAVRQTVRKLYDLGVSKIVVGYPKGIARNSDKGRKQNFILSHVWRFNYIIKRLKEVAEEYGIVVVLVGEAFTSQTCPLCGQHHPNGIIFRGLFKCHREGVVMNADLVGAFNILKKAVKTITPNLGGLLAQGRGNGGKVLPEGFEEPPQGFFNENPPNLPVFELGNSLLELQPKREGDQAKVFYSCPRR

SEQ ID NO: 19268 - protein, 469 aa, unknown
  TnpB Polypeptide
MKKRKKLFNKINNEKSIKLHNNIINYGSLINLPTKNEIIFNDYNNYCFNYNTNRIQPFLINGINTNLYNSSIIKSKLKLQSDDLINKNPLKDILVKTQRILLKPTTEQKNILLLWMDSWIVMYNKVLSVIKNERKEQSIKLNKPLKYNEINLDNLKLGILKKDLQSFKDNLNNKTGIDKHVLDNCIDTVLSMLRSSITNLNQGNCKKSKLRYIKKTKKNKMFKIEYHSLREHSFCTSKFGNLIKTVPKVNFKHVNDRITTIQYKNNKFYMLARKEVKINKNKIKKQKIISLDAGHKTFLTGLSNNHIIEIGNKIDKKIKKKLLKIDNIKKNKIENKKKYLLKHEKDLSNYINNLHWQTANYLTKNYNHILLGNYSTKGMVESKNSQRMNKRIGSSIKFYQFRTKLKYKCLTRGCKFGLIDEYNTTKACSNCGILNNIGSSREYKCKNCLSLYNRDINSTKNILLRSIIE

SEQ ID NO: 19269 - protein, 486 aa, Thermoanaerobacter sp.
MVREVGKNMIVIQAKLIFLNQEDKQRALDLMRRWSSCMRFAYKRLLEGYDRKTLKRDLQGMFDLNSRYVDDAIMKARSTLESARELGNNPKKVIFGGRDLFKKLQKHHINGKAYERLKIRWQEKRKGNLYSRGDKSKKGNLNTRIEIKENGTFLRINVGERKYVYAKIEAGYKKNKRREELLQEITKSDIPYSVELKLKNGSIYAYFAVEEEYPEIKITKEKGVIGIDINAYPDNISWAEVDEEGNLTSYGSIPMPELASGSKEKREYYRWQYAHEIIKIAKEKGKAIVIEKLDIKDKGKKGDFSGRKSRRIRHSFSYKSLLSKIKTLAKREGIEVIEVDPSYTSIIGMLKYAPQYMITKDTAAAYVIARRGLGKEEKIPDNYMKFLNALTVEELEELKEHVKKTVRNKKLKKKHLKEIKKAIEFLQSLESEPGRVLKPLGGTSFSTHDFWRVLKAAVVIPLSPEKVPRDFSVLKELLIQGKWGDP

SEQ ID NO: 19270 - protein, 482 aa, Thermoanaerobacter sp.
VAKNMIVIQAKLIFPNQEDKQIVLDLMRRWSSCMRFAYNRLLEGEKRADLKRKLPQVFNLNSRYVDDAIMKARSTLESAKELGKSPRKVIFGGKKLFRKLQKHHLNGKAYEKLKVKWQEKRKGNLYSRGDKSKKGNLNTRIEVRKNGTFLRINVGERKYVYAKIEAGYKKNKKRGELLQEIAESNIPYSVELKLKNGSIYAYIAIEEQYPEIKITKEKGIIGIDVNAYPDNISWAEVDEKGNLISYGSIPMPELASGNSDKREYFRWQYAHEIVKIAKEKRKAIVIEKLDIKNKGEKGDFSGKKSRRIRHNFSYKSLLKKIKILAKKEGIEVIEVNPSYTSIIGMLKYAPQYMITKDIAAAYVIARRGLGREEKIPDNYIKFLNALTIDELEELKEHVEKTVRNKQLKKKHLKEINKAIEILQSLESEPGRVLKPLDGTSFSAYDFWRVLKVAVVTPLSPEKVKRDFSVLKELLIQGKWGDP

SEQ ID NO: 19271 - protein, 478 aa, Thermoanaerobacter sp.
MIVIQAKLIFLNQEDKQIVLDLMRRWSSCMRFAYKRLLEGYDRKTLKRDLQGMFDLNSRYVDDAIMKARSTLESARQLDNNPKKVIFGGRDLFGKLQKRHINGKEYQKLKTKWQERRKGNLYSRGDKSKKGNLNTRIEVKENGTFLRINVGERKYVYARIEAGYKKNKRREELLQEIAESNIPYSVELKLKNGNIYAYFAIEEEYPEIKITKEKGVIGIDINAYPENISWTEVDEKGNLISYGSIPMPELASGSKDKREYFRWQYAHEIVKIAKEKGKAIVIEKLDIKEKGKRGDFSGRKSRRIRHSFSYKSLLSKIKTLAKREGIEVIEVNPSYTSIIGMLKYAPQYMITKDIAAAYVIARRGLGLQEKIPDNYMKFLNALTVEELEELKEYVKKTVRNKHLREKHIKEIKKAIKFLQSLESKPGRVLEPLDGTSFSAYDFWRVLKVAVVTPLSPEKVPRDFSALKELLIQGKWGDP

SEQ ID NO: 19272 - protein, 486 aa, Thermoanaerobacter sp.
MGKEVAKSVIVIQTKLIFLDQEDKQIVLDLMRRWSSCMRYAYKRLLEGYDRKTLKRDLQGMFDLNSRYVDDAIMKARSTLESARELGKSPKKVIFGGKKLFKKLQKRHINGKAYEKLKIRWQERRKGNLYSRGDKSKKGNLNTRIEVKENGTFLRINVGERKYVYTKVQAGWKKNKNREEIFQEISESNIPYSVELKLKNGSVYAYFTIEEEYPEIMIKKDKGVIGIDLNAYPDNISWAETDEKGNLISYGSIPMPELASGNKDKREYFRWQYAHEIVKIAKGKGKAIVIEALDIKNRGERGDFSGRKSRRIRHNFSYKSLLKKIKVLAKREGIEVIEVNPSYTSIIGMLKYAPQYMITKDIAAAYVIARRGLGLQEKIPDNYMKFLNTLTVEELEELKEHVKKIVRNKKLKKKHLKEIKKAIKTLQSLESEPGRVLKPLDGTSFSAHDFWQVLKVAVVTPLSPEKVPRDFSVLKELLIQGKWGDP

SEQ ID NO: 19273 - protein, 478 aa, Thermoanaerobacter sp.
MILIQAKLVFLSQEDKQTVLDLMRRWSSCMRFAYKRLLEGYDRNTLKRDLQGMFDLNSRYVDDAIMKARSTLESAKELGRSPKRVIFGGKKLFEKLQKRHINGKAYKKLKIKWQEKRKGNLYSRGDKSKKGNLNTRIEVKENGTFLRINVGERKYVYAKIEAGYKKNKSREELLQEIAESNIPYSAELKLKNGNIYAYFAIEEKYPETKITKEKGVIGIDVNAYPDNISWAETDEKGNLISYGKISMPELSSGNKNKKEYFRWHYAHEIVKIAKEKGKAIVIEKLDIKEKGKRGDFSGRKSRRIRHNFSYKSLLSKIKTLAKREGIEVIEVDPSYTSIIGMLKYAPQYMITKDISAAYVIARRGLGLQEKIPDNYVNFLNTLTEKELEELKEHVKYTVKNKNLKRKHLKEINKAIKLIQSLESESGRVLRPLDGTSFSTYDFWRVLKVAVVTPLSPEKVPRDFSVLKELLIQGKWGDP

SEQ ID NO: 19274 - protein, 426 aa, Lachnospiraceae sp.
VCREAVDWLYPVIDTEWDGLSGIRWEKQRFNAAEKLIHTTKRNKAKYAFDTAFPKMPSYLRRAVLQHVFGAVSSARTRSAESREAAASSGTAAGKEKHAKGSQGISNHYMPVFYRDNMYRKEEDRVFLKLYNGKDWVWQEIFLKKTDLDYIRKNWSGTKAKSPVLIKKHRKYFLQFAFEQEAALTERAAGEQRICAVDLGINTDAVCSIMEADGTVAARKFISFAAEKDHLHHVLNRVRKAQRLHGSRGIRGFWAYARRLNGELARKTAGAVIRFAKEYSADVIVFEHLDTRGQKIRGKNRQKLHMWKKQTVQEIAEHQAHRLGMRISRVCAWKTSALAFDGSGKVTRDPRNHSLAVFQNGKRYNCDLSASYNIGARYFIRELLKPVPETERSALEAKVPAVQRRTSCVYADLKKLSEAAAGEKAA

SEQ ID NO: 19275 - protein, 420 aa, Methanobrevibacter sp.
MLQLVIYFIMNVVNKNLEVRIYPSKVDKNDKGEKIASLDSILSNVGISRFIFNQELAFINNFRRLLVENGYEDKVIVNNSSCNCILKMLKNDYSFMEKAESSSRQQSQRDLITAFKRYHNLNLKSNYPRFKKKKDNKGSFRIMNNNNNVRIQKDKYGYDKIKLAKLGLVKFKTSKKYKELLHKATDKNDQTAKINHITIKKENDKYYAVFNIECIHTPHKIMGPKQQIGIDIGCGKLAVLSNKQEIPNLDLTKETEKIIHYQKIMSHTRKNSNRYQKAKKLYQKWMKKLVNKRNDYYNKITTYIVQNSSFIAVQNENIIAWKKNKHLSHNLQLNAPRTFMDKIEYKCKWNNIPFIKVPKKFPSTQICSNCKKQNTNIKGIQNIRIRTWKCQKCNTIHDRDINASINILNEGLKIAGTTMQ

SEQ ID NO: 19276 - protein, 314 aa, unknown
  TnpB Polypeptide
MPPCERQADAWQRFFKGQSGRPRFKRRGSDSVVIPGNVRIRDGRLWFPRLGWMTLRRRGANPYPDGVPKSVAIKRVCGTWHAVVCYEVAVPARSDDGEVVGVDMNVRQVTTSDREVFHAPDTRRLEARKKRYARRLARQRRGSRRRQRTRARLAGTQRRITMARRNWQHHVSRRIARSAGTVVIEDLKTRNMTASAKGTVQAPGTNVRQKAGLNREALGTGWGGLRQMLGYKALRGVAVNPAHTSQTCAACGSVDAANRPSQAIFSCVACGHADNADLNAARNIRRRGLAHLHEEGRSHPATPMSREMDRSRAA

SEQ ID NO: 19277 - protein, 410 aa, unknown
  TnpB Polypeptide
MSIKRYRYRAYPKLGQKQPIAALFGCVRVVYNDALVYAEKSYKDTKKKPSHQELSARLTGLKKTTEKRWLSEVSAVPLQQSLRDLDKAYTNFFQSITGKRKGAKVGAPRFKKRSSRQTARFTSQVFKVRQTTHGVGFVRLPKIGELRFTLSRELPSSPTSVSLIQESDGSYYVSFVVETKTTQSPTPNAYAVGVDMGLKDLAITVNSNGESSIYANPRPLRKAEEKLGKLQRQLARKNKGSNRYTKARTRLAKAHTKVRNTRTHYLHHVANQIVDENQVIALETLSITSLTKTRMGKSVLDASWGQLIRLIEEKAAERGREVIKIDRFAPTTQTCSICGTLGGRKPLNIRDWVCFGCGSYLDRDINAAVNIMLAAGLAESLNEQCGDNVRRQLAGAVVVDSVHPPRVATF

SEQ ID NO: 19278 - protein, 512 aa, unknown
  TnpB Polypeptide
LGLNGEVLEGAPVLAKLTSEIRGISGYATFVARNDLKLGPELAQAGAVQPTTAGRRAGVTMPRFFVEDEDGKPIAGKSGRSRKEFLVQHRVVTAYRSWQERVKAVNGESGKYVSQGWKRTVNASPPSYGEDYINLGAVNNQYAAIENDPFATGEIVLKMVIQGMRYRLFFRFDAARFPEGKVTLPLIKIENNQPVFIFTVVTNNPIVQFSGDYVVGVDVGINNYATVVVRNTETGKIVHETTLSQRVHSLWNSVRASQKQVYQLRKKADKLLYHRQARMSALDEAQLHREAASRKKRELAILAAQEIAYLSYFYDNAVIAVEDLGWIANTMQNGRWNRGELINWVTHYVSRNGGWVVAVNSANTSQQCHKCGSKVSHPTHEVSLCPKCGAMDRDMNAAANIAARAVPKVEKARKTRAKNRKLQSQAPLKTPAARVSLKYPGRDRTKNKPTPKRKKRRISKEVILPISPARVQATCLATRVLADWGAYGATGTSKAAIKQGNVAYERRLCSLN

SEQ ID NO: 19279 - protein, 517 aa, unknown
  TnpB Polypeptide
MSSVTRAVLLRPFACREKKTGTGLDLHDVLEELRDDAILCAAEASKHVTVENLGKLSEHDGLKPAVAGRRMGIRFSVPGRGTGRSRFEWMVREYAVSQLRSWRERCKVRAEQADRYSSAGFTRTVISSKPDFLKPRLALSATDKNYRTVRLNNSTVELDMVVNKRWVTFMFKTPERFTEPGVRVIAPTINIDNRNRVMFNWYFELQVERAPFSNKYVVGVDVGIVNHTTVVVRNIVTGEVVEASFMNQRVRSLENKIKRTKTQIAALYRKNRLDEIESHRKALSNRRKELAILIGQEVADLSYRYGNALVAIEDLSFITNTMKNGRWVRGMIVDRIKNMVESNGGRVMTVPAAYTSKKCHQCGENLGMTDYHTPTCSVCRVGWDRDENAAANIASKLKDKDRHKKSCQTRKKHASKKRRKNSKGSLRPLKHPLKKTGPTPKAPQNNPKPNNNHRVHHKHTVIKTHKGGVFPVMCAAGWTLRDSNVTVPAVAPSNGCSDNQPHDYFTSRRRSNNLCLP

SEQ ID NO: 19280 - protein, 348 aa, Chloroflexi sp.
  misc_feature (26)..(59): Xaa can be any naturally occurring amino acid
MQPSMNAKVPIAWQAFPSPTNTNAPXXXXXXXXXXXXXXXXXXXXXXXXXXXXXXXXXXYGNSFHVLSGSKKNKGTLVLSKLGHVKMVMHRAIKGRPKTAIVKRTPTGKWYVSISAELNEEELQEKRLPACPEEVGIDVGLKAFAYLSTGEAIAHPRFFRAEEAALARASRKLSKAPRGSKEREKKRTVVARVHERIVNRRKNFIEQEVCKLIKRFGLFAVEALVVRNMIRNPNLAKSIADASWSMFFTHLLDKAEEAGRVVVRVNPAYTSQTCSACGHRQPMPLSVRVYECPHCGLVIHRDHNGSLNILEEGLKAVGRHSRVIPEAPGLQPWGVVTPHELSSKHKTV

SEQ ID NO: 19281 - protein, 402 aa, Escherichia sp.
VKRLQAFKFQLRPGGQQEREMRRFAGACRFVFNRALALQNENHEAGNKYIPYGKMASWLVEWKNATETQWLKDAPSQPLQQSLKDLERAYKNFFQKRAAFPRFKKRGQNDAFRYPQGVKLDQENSRIFLPKLGWMRYRNSRQVTGVVKNVTVSQSCGKWYISIQTESEVSIPVHPSASMVGLDAGVAKLATLSDGTVFGPVNSFQKNQKTLARLQRQLSRKVKFSNNWQKQKRKIQRLHSCIANIRRDYLHKVTTTVSKNHAMIVIEDLKVSNMSKSAAGTVSQPGRNVRAKSGLNRSILDQGWYEMRRQLEYKQLWRGGQVLAVPPAYTSQRCACCGHTAKENRLSQSQFRCQACGYTANADVNGARNILAAGHAVLACGEMVQSGRSLKQEPTEMIQATA

SEQ ID NO: 19282 - protein, 220 aa, unknown
  TnpB Polypeptide
LCPLWQELLRKSTNKEVGLDFGIKDNIITSDGEKFNCSVQETEYLKFLQKKLMKKKKGSKRYYRCLNQLQKEHEHLTNKKNDDSNKLISYLLKNYDVIYFQDEQISKWRKFNPSFARNIQHSYLGRIKAKLVMLEKSGRSFEISKWSPSTKFCPNCGSLNRGITLSDRIFKCDCGYEFDRDVHAARNVKLFGSTKRAECLEQASVETLASTALDLSRTAS

SEQ ID NO: 19283 - protein, 436 aa, unknown
  TnpB Polypeptide
LSKQLKTLKRTVILEGWTNRYGRQALKEITEAYKEMLQEMVNYAVEHKASQATLHKVFYRKFRKKYPWLPTRIIKGCYRDAVRRAKSFRELKKKGMAKTNKPIVKRITITYSDSQDWKLKDGVIEVRTHREWIKIHYRNHKQLHRYLYNRWKLSSELRLKPNGKKVIIYLTFTKSFEVTYNPDNVIAVDVNENNVTVAVFKDRKLREVYRVESGLGRLVISYAERRKRITRGKLTKDRSVKRALKKLREKERKQDMIYKTARIIEELATRNNAVVVIGNVHRGKRRLIEKTRKNTLRHRIHQWSVSTLVEVLNNKPLHVVEVSEAYTSSTDPFTGKPIHKFIPSMIRFAVRGRKKVRIVKIQLRLAKLGADTKETVPSYLLDRDAIGAINIGLKYLSSDGSPMALGSTEPHAVWVKLMNPHQGLTPLMELKVLKNN

SEQ ID NO: 19284 - protein, 553 aa, unknown
  TnpB Polypeptide
MCLQKLQPNTIMCQSLPLEIGRMTLSLNILRLKAVIGAIRFLIKLKLVKKKPAYMQEYPPENKKQISIDKLSNSLNLDLKSDSTKILEAPSISKGQGLRPWWNELYEERSKKLWLPKEIDLQDVDSSSLNGSFLFTGHKLQLYQTPTLDLEKTLKKNSLTTSCQLLQPLPQDTMVRDMELNIMRMLKIRIYPTTNQKQIFSKCFGASRYLYNKCIDEFRNGKRANFYDMRSVVLTSNSKLDKNHKWLSDIPYDTRQLSVKEFVANAKSAFANLKAKNIKHFSLGYRSKRDKSQTFHLDDKAINKKLILFPKLQSEMLKSDSRKTLKSYFCSSGNKSSDFRIQCDDGKYFILLPKIIDSKSYKNLQQTGKTVALDPGVRTFQTFYSPEGICGKVNPTDKMYKIKCQIDNLNKLTDLKNKLKNKIQKLRTKVKNQVTDLHWKFIKYLCMNFDTILLPKFQVKNMIKRKGRKINKTTVKNMVGLNHFTFQTRLLYKARVLGCIVKIVDESYTSKTCGVDGYINFLLGSKEVFICPKCGLVIDRDLHASRNIYLKNT

SEQ ID NO: 19285 - protein, 394 aa, Microbispora sp.
VRRSFKFLPRPTRRHAAALTQCLHDHRELYNAALEHRRTAYRRAGVRVRYGDQSGELKHIRADDPAGQSRWSFSSQQATLRRLDKAFAAFFARVKAGRTPGFPRFKGRGRFDTVEWPKDGDGCRWDRQPEHPAAIYVRLQGIGHVRVHRHRRVLGTVKTISVKREGARWFVVLSCDEVPAESLPVTGAVVGIDMDVASRATTSEGDRIENQRHPAASADRLAAAQRDLARKRRGSTRRRKAVARVAALHAKVRRRRLDYAHKQALSLVRAYDVIVHEDLRIANMTRSASGTIVQPGRNVAAKTGLNRSILDAGWGVFLRVLAHKAESAGREPIAVNPAGTSRTCARCGHRAKDNRLTKARFRCQACGHEAHADVNAATNILRAGLALRDAAEAA

SEQ ID NO: 19286 - protein, 445 aa, unknown
  TnpB Polypeptide
MKLNGDLKALDNSIAIYRDALNFVIPIVDKHWDEIKDFKSTKFRMSYIDTLVHTTKSNEALYDFDIKFPKLPSYLRRATLNKAIGIVSSYRSHLANWEEKKVELEAKGEKVPQRPRLETRHFDYPAYYKQNLFRNFNPITQTIELKVFKNGDWVYETYTLKTSDCNYYQKYLANKKQNVPVIKKKGRSFYATFSYEENVPLIAEDKIEKICAIDLGLNTDATCCIMGADGTVYARKFISFSKEHDQLDTQLGRIKRNQKQGSRHNKTLWRKVSGLSQDIADKTVKAIFDFGNEHGVDVFVLEYLDFKGKNTIKRARFWRYKRIYKVLSNKAHQYGLRVTRVNAQNTSRLAFDGTGWSKRGREITSETPYAIIQFMTGKLYNADLNAAYNIGARYFIRHLLKTVTVTQRLALEAKVPQVTKRSTCTLSHLINLRSELAILIARTQA

SEQ ID NO: 19287 - protein, 419 aa, unknown
  TnpB Polypeptide
MKQQIFRKAGEKVSDLTKTIKLRISVTPEQIELFRQTTEQYRQACNFVSQYIFDNAFDLAYLSLNRALYADIRSRFGLKSQMAQSCIKTTIARYKTVKEQLFQNPYRYRDENGEWKRINRTLEWLWKPIFFGRPQVDLVRDRDYSFVDGGKTLSINTLGGRVKCSFFGEHFATFLDGSYDLGTAKLIELNGLWYLHIPVTKEVEDFEKENVRHVVGIDQGLRFLTVSYDERGKTEFISGKKIATKRRKFQEVRRQLQSKGTKSAKRKLKAISGRENRWMSDVNHQISKTLVQKYGENTLFVLEDLTGVSFEESNLSRGKKQNNALRSWSFYQLEQFLSYKAHENKSEVLKVSAKYTSQRCPKCGTIHKENRDHRKYFYACQCGYKSNDDRVGAMNIQLLGTMWISGDNHPRYERITASE

SEQ ID NO: 19288 - protein, 328 aa, unknown
  TnpB Polypeptide
MRTTGTCVSTATRSVPDRRDHRAAGRVPQARAQGPGWGPSGPLPPQHGAIRVEPNRRHVTLPRIGRGRIHESTRRLERLIRLGRARILAATLRRVGDRASVVGVEVGVRRLATAEGAIERVPNPVPRQRDLTALRRRSRAISRSRRGSTRRRQKGRRRARLQAHPAAIRRHEIHRLTTRLATTHGRIVGEGLDAAGRLRQKRSPGACRRRPGRGPAAAARQDRLGSPSGRAPMGSPWEGSELVGAERCLPSSKRGHRCGGIRAIGRAERWACDGGGRRRQRDGHAAIDLARPSPGAPREGCRLSAIALSAATARCHRTFSSHSSASRG

SEQ ID NO: 19289 - protein, 371 aa, Oceanobacillus sp.
MAKQNKAYKFRLYPTNEQTLMIHKTFGCVRFVYNKMLAERKETYENLKADKEALKKVKHPTPAKYKKEFTWLKEVDSLALANAQLNLDKAYKAFFKGNAKFPKFKNKRHKQSYTTNVVNGNIELIDGHIKLPKLKLVKIKQHRDIPSDHTIKSCTVSMTSSGKYYISILTAYEKEIERKEIQDVVGLDFSMDGLYVDSETGKKANYPKFYRQMLEKLASEQRKLSRKKKGSSNWNKQRIRVAKIGEKVANQRKNFLHHKSKELVSNFDAVVMEDLDIKSMSQALKFGKSVSDNGWGMFTSFLSYKLKEQGKQLMKIDKWFPSTKKCSCCDAKRPMKLSERTYRCSCGYVADRDYNAAINIKKEGIRLLALA

SEQ ID NO: 19290 - protein, 354 aa, Natrialba sp.
  misc_feature (319)..(319): Xaa can be any naturally occurring amino acid
MAHTEGYRLTVNDNTNRVQFRISPKPYKKVKGHLRGEPDAMDELRDALTSDEVDIGQAELLYRDGVYYLHVTVTREFDVPEPDTADTVVGVDINERNVALTALDRDTMRTKGTLVLDYGRVKQERQRYHTITKRCQEHGKTSIHQKLSDKEERFTEWVLHRLSRAVVEFAEQFPNPVIVFEDMSGIREEMQYGSYMNRRLHKLPFHKFERFVSYKATWREIPTDTVDAYYNSQTCSCCGERGYRQGRRFRCPNDECDVAQDHADRNASVNIAWREKAKLDGNESNYRTHKTQPQVRLVRLSGSGRVSRPTSSRSLAEQXKTQPQVRLVRLSGSGRVSRPTSSRSLAEQRVLAHS

SEQ ID NO: 19291 - protein, 362 aa, Clostridium sp.
MLKAYKYRIYPNVEQKIYLAKTFGCSRFIYNQMLADRIKSYEDNKDLDIKEMKYPTPAQYKKEFDWLKEVDSLALANEQLNLDKAYKNFFRDKSVGFPKFKSKKINRFSYTTNNQKGTIFIENGYIKVPKLKSMIKIKQHRNFGGLIKSCTISKTPSNRYYISILVDTENFALPKTDKKIGVDVGLKEFAICSDGYRVANPKHLRKSEKRLAKLQRELSRKQKGSNNRKKARLKVAKLHQKIADQRADFLNKLSIKLIRENQSIAIEDLKVKNMQKNHKLAKAIGEASWSEFRRMLEYKASWYGRNIIVAPSNYASSQLCSCCVYKNKKVKNLGLREWVCPNCGIKHDRDINASMNLEKLIV

SEQ ID NO: 19292 - protein, 465 aa, Acidimicrobiaceae sp.
VATRPTAAPISHTGQVLSRAVTFQFALDPNAQQRILLAKCAGARRFTVNHHLARVEANLDARSAEREGFGEVGELPEVSTPSLSWTAFSFINEFNAWKNGEADDSPVNEDGSCGLAWRHELPNDVFECASVDAARALENFSASRRGKRSGTPVGFPRFQAKGKVTPSFRLRNRATPGRAPSSQPIRFSDAAHLRLPKFGPVKLFGPTRKVRRMIEAGRFHVYSATLTQRAGRWTVSLTGVAAELHQAERNRTNRHAVPVGVDRGIISLCVAADANGNPFQSFEGVTTLKQAQFKLKAANQALARTTPGSNGRQRARARLARTHRKVVNSRRHLVHQASRTLVDRCQVLVIEDLNVAGMVKNRHLARSLSDAAMGELSRQLLYKARWHGVEVRVADRFFPSSKTCSSCGEVRNDLDLSTRTYLCETCGLVIDRDLNAAINLARWQSKETSAEAVPTAARALLLSTA

SEQ ID NO: 19293 - protein, 442 aa, Frankia sp.
MRTLRAYRFALDPNDSQLAGLRRHAGAARFVYNWGLAFVKAALAQRDAEKSYGLDGDALTPVPWTLPALRLRWNQVKNDATPWWAECSKEAFSAGLDQLARALKNFSASRKGTRKGRRVGFPRFKKRGKARDSSRYTTGTYGPAGALAVKLPRIGRVKAHEPMRALTSCLTDGSARLLGATVSRTAGRWFVAFTVEVDREVPQAPSRRQRAGGPVGVDLGVKHLAVLSTGETVPNPKHYQRAERKLRTASRAYARSRPGSAGRVRRAAALATIQARIANRRRDGLHKFTTRLALDHDVIVVEDLHVAGMVRGRRLAKAVAAAGFGEIRRQLDYKTVWYGSRLRVADRWYPSSKTCSGCGWRNPSLTLSDRVFHCQSCGLVADRDHNAAINLANLVAASTSETRNARGADRKTVLARQVAGKREPGTEQAGQARGAPPKGEAA

SEQ ID NO: 19294 - protein, 407 aa, Alkalihalobacillus sp.
MRFCVNKKLSGPFPTMKRLSEWYNGNTLVKGGKGGVELTITAKIKIHPTLAQVELLKETVSAYRESCNFVSAMVFESHQLSQATLHKATYHDLRSTYHLRSQMAQSVLKTVIAKYKTNQSNDVDWSLVVFKKPQYDLVFNRDYSLTKDLFSVNTLSGRIKVPFETKGMEPYFDGTWKFGTAKLVYKHGKWFLHIPITKDITQVKDDAINQVVGVDLGINFVATSYDSQGKTTFFKGRHIKHKRAKYKQTRKELQQKQTPSARRRLLQMGQRENRWMQDMNHCISKALVDQYGEETLFTLENLTGIRQATEKVRIKDRYQTVSWSFYDLRQKLEYKSLMNQSKVIAVDPKYTSQTCPTCGHTEKANRNKKKHIFCCRTCGYTSNDDRIGAINLQRKGIEYIAGGTPQA

SEQ ID NO: 19295 - protein, 381 aa, unknown
  TnpB Polypeptide
MFRAIKVKLYPNKQQEQAINKLLGCYRYVYNHMLALKQKEYTDNKIILSLCDLSKYFYGTLRKDKEYSWLKEQHTHVMQQSIRQMLTAYDNFFKHHKDFPKFKSKKDKQSALFPFTAISRRNTFKQRKITLTKSFKNIKFRCSDLYFKRLQTYKDNIRSATISKTKSGNYFLSILIDIPQDEIVKFKQTGGSVGIDLGVKDFVITSDGEVFENKHFYKKQENRIKKLQRQLSRKVKGSNNREKARIKLAKAHEHLVNQREQYIHSVVNELLKYYDTIYMEDLNVRGMLKNHNLAKAIQEVGFYKFKSVLLDKSVNNGKRVVFVDRFYPSSKTCSCCGYVYRKLTLKEREWKCPGCGETHDRDLNAAMNILTEGERILESGT

SEQ ID NO: 19296 - protein, 306 aa, unknown
  TnpB Polypeptide
MMFPAFPSSSRCATNKPPLLTSLPDELHIRLSKATAQTGAEFTASAFKHRDGELYIAKSKSPLDVRWSRELPSAPSTVTISRDSAGRYFVSCLCEFEPVSMPVTAKTVGIDVGLKDLFVTDTGFKTDNPRHTAKYAKRLTLLQRRLSRKQKGSRNRIKARLKVARLHAKIADCRMDNLHKLSRKLINENQVVCVESLKVKNMIRNPKLSKAIADAGWSELVRQLQYKGKWAGRSVVAIDQYLPSSKCCSCCGFTMQKMPLNVRKWHCPECGADHDRDINAARNIKAAGLAVLAHGEPVNPESQHAA

SEQ ID NO: 19297 - protein, 404 aa, unknown
  TnpB Polypeptide
MLSYNVKLEFPSKETEQAMLDCLKVEADCYGYVSALLETTGFREHPMSRYDVHYKFYYDIRKQYPTLSSQMVCKVMQEVVANWKTCLQRGEEFSTPKKTNLSILLDKRLYSKLTDHSVNLTVPGYKKVECTFRTYPLMQRMFDSYTAKNCNIFYRDGQFWLTVQFEVPGAELVNEDVLGIDRGIKRLITCSDGTAISDKEFNKRRRKIRYLKRCLNKKGTRNAKRHSKKLRKREACMSKDYTYSVANYILSKPQGIIVLEDLTKIKKSTSRKKIAAECGETKEIKRKRHNNRFGQVALRQLQTVLEYKAPLVGKQVATVEPAYTSQLDCRGLPNGKRLGTRYYAADGLVFDADWNAAINIANRHRPSTFKLPICGKLNLIGRPSSTGQSRELPGNRGSLKPTVL

SEQ ID NO: 19298 - protein, 433 aa, unknown
  TnpB Polypeptide
MRNVERNVYACSYSLPFRGNEVLLCAMHKAKSLYNAALWYYRQALNEHHRAKEEDRDPLTEYPDYYKMERKFRGERQINYFDLPQKVSQQVLRDVQSDWTSYVTHVVKNKSYTVGSPERHEQITPPKYKYKEGYARLRYTKQAISFAKYPGKVTPSGIDVGLTIPPFIDPKRIRQLIIEPDGADYIRVTFIYKVDLCDMLVDNGRVMGIDLGVNNLATCGTNFGRGIIVNGRPLKSINQFFNKRLAAMRSENDTLLKKELKRKVQTQRHWTTRNIERLFRKRKYKIRDYLHKAARRIFDFVAEGGITTIVVGKNVGWKQECDMRTKDTQNFVQIPHARFIDMLSYKARERGIAFLTVEESYTSKCSFVDGEEMCHHEKYLGRRLKRGLFRTLNGILVNADLNGALNIIRKAIPNAFAEGIEAVIVPPLRATVA

SEQ ID NO: 19299 - protein, 340 aa, unknown
  TnpB Polypeptide
MLLTFNLKHGRDFSDELTKAKKVAEFAIKTHSLTTKDVREIGLKSAIACQVLRKYSRNKVVKSINKVQLTVPGQAIRHDRENRELYIPCLKLHLDSRYLPSFEKVNQIELDHEYAHICVTINEAPLRQVEKWIGVDVNSTGHLAVIGNPSSGKVQKFGKEMSHLHIKYSKMRRHLYIHGHPKVAKHKLRDKESKKVKDINHKISRAIVDEAVQQCCGIKMEKLSGIRGIDHISKPSRKLLHSWSFYQLQTMIEYKAKLLGIPVSYVDPVYTSQQCSRCGRLGTRNGKDFSCPHCGHVDHADANASFNIALRPSFEESDGRLHADRDVCKGRIDTPQEAPS

SEQ ID NO: 19300 - protein, 326 aa, Solobacterium sp.
MQVVGSYGVRIRDDYDALKRTADLFSNAVSYLVHPALENWEALCEANSLQRRQRMLECMIHSSDGFSSSDSFDQRFPKFPSYYRRAAITQALGIVSAYQSALKNWKENGCKGEVPKLDACSHRMPALYRGNTYKPVIDKETGEVLPYAAKIKVFRNNDWVWDTVRLSKTDVDYLNKRGRNGEISAPVLEKKHGCWNLRLVVTETIELSAKPVSEQKICSVDLGVNTDAVCSVMDSEGTVLARKFIMRGREKDSVNNALHRVSVFQSLHGSHDSGRLWNIAKRRNANLAHQIAREIVNFAIAYECDVIVMEHLNTKVLRFFDFVTVC

SEQ ID NO: 19301 - protein, 460 aa, Bifidobacterium sp.
MCATGNGERLPLYSANPNIVMEWLCDGWRCRYNQLRSRRTRWDRNSQQNVPLGDNPDMRSDRQARLECSWLAAIPSMVLQSPNRIENTDWWSANKRRKTLKKQHRNPGGMPRFKKRSEDKYFACWHNKGANANYRQLNRHHGEVVITGQNPGAYRMPGQSCRYSIHIRIRVSQPIRDYTSVGVNWTKRTLVFVNNPLPIQREASRSMVGIDRGCKHTLATSGGRFIDLPKHRLKRIDGEIRRRQKSQANRINMSGKDVREYVKQPSRTYRKVQREINGLYAKAHRIIEDWQHKTTSMLVKRYDLIVLEDLNLQGMSRKAKAKNAPGRPSVFLPNGQAAKRGLNRSLRSAALDGIADKLEYKTRLADDSLLMLVNPAYTSQTCSECGHCERNNRESQAEFHCKKCGIRMNADLNAAKNILDRGWRQLSGSDGAGHATTTQDVHPAYRGSDAAVRACGTSAS

SEQ ID NO: 19302 - protein, 423 aa, unknown
  TnpB Polypeptide
MIVKKGIEIKLYPNKMQKVFFAKTFGCCRFVYNQCLKIKSYIYEETKMSFQPKLKSFKEEWPWLKEADTQGLANAYMDMNQAYQNFFYGKSKYPRYKSKKDKQSYRNAMCYKDIKKLIVGNTIILPKVGKVKCRFGKKFEHENIKKIYNVTIKKSKKGDYYCSICCDVDIPEMAHTGECIGIDLGVKSTIVLSNGKTIKNPHFNMKSERKIKHLQRKLAKAKKGGRRYEKVHIALAAAHEKLGNRRNNFLHQVSHSLIKDYDVICMENLNLKGMQKNHNLAGALSNQALGYLTRMLEYKARWHNRTIVKVGRFYPSSQLCNHCGYKYHTLKLNEREWICPKCGSLIDRDWNAAKNILDEGLRILDNKGTPRTGEAVVFRPLCLAENPTMDDRPCDLKSSGAMMREIQSVAPGVNETHRSLAGV

SEQ ID NO: 19303 - protein, 373 aa, Microbacteriaceae sp.
ILKAYRYRLYPNQEQETLLKKHFGCVRHVYNWALGLKIDHYEQTKKSLSLSDIARQLVAKKKNPEFLWLNEVNSQSLQSALRNLDSAFQGFFKHKRGYPKFKSKRNPQQSFQCPQHVTVDFEQEYLNLPKIKEIKTTFHRTFEGQIKTVTIKRTPCGHYYASVLVDETQHSVAPVVQEITPENTLGLDLGLNHFLIDSDGHKIDNPGFLKNSLDRLKAEQKIFARKQENSKARAQQKTKVARLHEKVKNQRKDFNHQRTAELVKKHHTAFVVEDLNIKGMVKNRKLARTINDVGWGQFILFLSYKCERVGKTVHKIGRYEPTSKVCSCCGYKRETMPLSVREWQCPSCQQLHDRDINAGRNIRKIGLADMLGL

SEQ ID NO: 19304 - protein, 447 aa, Microbacteriaceae sp.
MLIPDCSDNTVEELLDLEQEQPSGQRKSARKTKQILKAYRYRLYPNQEQETLLKKHFGCVRHVYNWALGLKIDHYEQTKKSLSLSDIARQLVAKKKNPEFLWLNEVNSQSLQSALRNLDSAFQGFFKHKRGYPKFKSKRNPQQSFQCPQHVTVDFEQEYLNLPKIKEIKTTFHRTFEGQIKTVTIKRTPCGHYYASVLVDETQHSVAPVVQEITPENTLGLDLGLNHFLIDSDGHKIDNPGFLKNSLDRLKAEQKIFARKQENSKARAQQKTKVARLHEKVKNQRKDFNHQRTAELVKKHHTAFVVEDLNIKGMVKNRKLARTINDVGWGQFILFLSYKCERVGKTVHKIGRYEPTSKVCSCCGYKRETMPLSVREWQCPSCQQLHDRDINAGRNIRKIGLADMLGLSICVKSTSEAIVAGATASAKGLQVAEDGSQEAPTRIALAI

SEQ ID NO: 19305 - protein, 417 aa, unknown
  TnpB Polypeptide
MLRAYKYRIYPTEEQKVLFAKTFGCCRFVYNWALNLKIEAYKQEKKSIGNVEMINRMRSELKAEYEWLSEVNSQSLQSALRNLDTAYKNFFRDTHTVGSPKFKNRKSKQSFQCPQHCSVDFGKGTISIPKAKDIPAVLHRKFKGTIKTVTISMTSSGKYFASVLVDTSIQELPAMTIQGGTTLGIDLGIKSLAVCSDGRTFDNPKNLKRNLDRLKFLQKRLSRKQKGSANRNKARSRVARLQEHIANRRKDNLHKITHALTHDSQVRTICMEDLNVKGMQRNHHLAQAVGDASFGTFLTLLEYKCSWYGVNLIKIDRFAPSSKTCGKCGYIYKGLKLSERSWICPECGTHHDRDFNAACNIKEFGLKALPTERGKVKPVDCPLVDDRPRVLKSNGRKKQEKRGDSKISEAAKSLVWR

SEQ ID NO: 19306 - protein, 174 aa, Eubacterium sp.
LQKFLGLDFSMHELYRDSNGKEPAYPGYYRNAEKKLAREQRKLSKMQKGSNNRNKQRLKVAKLHEKVSNQRKDFLHKQSRQIANAYDCICIEDLDMKAMSRSLKFGKSVLDNGWGMFTTFLKYKLEEQGKKLVKVGRFFASSQTCSVCGYVDFLQAAKPVLFVVTKMQKRKILR

SEQ ID NO: 19307 - protein, 353 aa, Escherichia sp.
VKRLQAFKFQLRPGGQQECEMRRFAGACRFVFNRALARQNENHEAGNKYIPYGKMASWLVEWKNATETQWLKDSPSQPLQQSLKDLERAYKNFFRKRAAFPRFKKRGQNDAFRYPQGVKLDQENSRIFLPKLGWMRYRNSRQVTDVVKNVTVSQSCGKWYISIQTESEVSTPAHPSASMVGLDAGVAKLATLSDGTVFEPVNSFQKNQKKLARLQRQLSRKVKFSNNWQKQKRKIQRLHSCIANIRRDYLHKVTTAVSKNHAMIFIEDLKVSNMSKSAAGTVSQPGRNVRAKSGLNRSILDQGWYEMHRQLEYKQLWRGGQVLAVPPAYTSQRCAYCGHTAKENRLSQSKFRC

SEQ ID NO: 19308 - protein, 388 aa, Actinomadura sp.
MYDSRVRLRYRFRLYPTPSQQRSLARAFGCARVVFNDALRAREEAHAAGLPYLSDGDLSKLVITEAKKTGERAWLGEVSSVVLQQALADLNTAYRNFFASVSGKRKGRRVAPPRFRSRKDRRQAVRFTRNARFTVTAGGKLRLPKIGDVRVRWSRDLPSAPSSVTVIRDAAGRYFASFVVETMDGPLPEAAAEVGIDLGLTHFAVTSDGRKITSPRFLRRAERRLRKALQALSRKQKGSNNRRKAVARVARMHARVADARRDHHHKLSTQLIRENQAVYVEDLAVNGLARTRLAKSVHDAGWSQFVAMLEYKAARYGRTFAKVDRWFPSSKLCGACGTVTEAMPLTVREWACPCGTVHDRDVNAASNILAAGRADSLNACGGTVSPPA

SEQ ID NO: 19309 - protein, 522 aa, Eubacterium sp.
MHTIRFLLLTTKEDDRILEKRFRMLWHIHNQTVKYAQKQLHKLMRDRAYIDARKERSALKPEAEKLQKRLDEAEAQKKPAKRGERSRLKAVKKRLRELTDIMNERIEFFCLTQTGLESYVKVMQHRFQKHISSQQAQKEADRVYTGVQKVLYGNGKFVHLKKLDDQRSISQKCSTNGIKVNRNANTVNWLGLTIPFRMNKKDPYAAESVGHQLKYGELIRLPFKSGWRYYINLYLDGDAPKKLCVSSGLTCIDPGVSTMASVSEKAVSLKELAPMSGCYNKEIARQQRLVDQEKRALNPDHYDADGRVIKGKHNWVISNNCRRHQRRIRELYRKKSASTECSHNHQANELLVNNGNCFLIEDMTYAALQKRSRKPTERQEKATVVKDKNGKEKTVRKCKKKKRFGKSLNDRSPALFVAILTRKAEQYGGQAVRIDTRKFRASQYHHDTGEYHKAALSDRWKTIDGHEIQRDLYSAFLIFCSNPSGTAPDQDLCNSMFEHFVTMHDTFIKATAKENHPACFGY

SEQ ID NO: 19310 - protein, 373 aa, unknown
  TnpB Polypeptide
VNKAIVYAIYPNNKQNEQCQKTFGCCRFVYNQMLTVQQARHKSGEKHLSKISANTYCNQYLKTDYLFLKEVDKFALTNAIYHLSDGYDRFFKHLGRFPKYKSKHKAKKSYTTNFTNGNIEIGNSYVKLPKLGKVKAKIHRNPNADWKIKSATITQNKDNSYQVSILFEYEDNTLSAPVTSQTTIGLDYKSDGLYVDSNGNNCNMPHYYRKSVQKIAKAQRKLKHMIIGSNNYNKQQKRIAKIHRHIANQRKDFLHKESTAITKQYSCVCVENLNMRAMSNKGFGNGKATLDNAYGMFLNMLEYKLKDKGGYLVKVDKFFPSSQICNCCGFKNPLLKDLSIRYWNCPNCGMTNIDRDVNAAQNIKHEGLRLLLA

SEQ ID NO: 19311 - protein, 352 aa, unknown
  TnpB Polypeptide
MSTTFQAFKYRIYPTDEQVEIIEKTFKCCRFVWNHFLEQTSKIYERRQEKMTTFDCMKVLTEMRERWPWLADCGCTAERYAIIDLFEARKAFFRRIKAGEKPGYPKFKGASHPTQSFTTAGTIYVTDDYIQVPFGGQYQKINKLRRGTGRPIEGSPREVTISRSATGKYWASVCCKVERDTLPIVDGEVGISLGLKELAIDSNGVHYENPKHLSKSAKRLAREQRRLSRKKKGSANYEKQRRKVAGVHEHIANQRNDYRHKISRELVNANQLIAVEKVAVKPLVEGNEQAKSILDAGWSELTGMIKYKADWAGRTLVDVDTATVAPEAKHDEALAQVVLSEGQRMASEQNPA

SEQ ID NO: 19312 - protein, 441 aa, unknown
  TnpB Polypeptide
MIVTRILKSKNLNRGKYEQLEEQAKRLGQVRSEVWHSYGSINGVSIKSDRKIRDQWLSKKRQFQVSANAWKETLRDSFGDMKANREAAKEKVRKIIYKQVSDEKKRLELYKKLKSDNWTSDNYLRRLMRKYWKHGRNHTHNQIVVRSDNYTTFQLGGCAWIKIPSLQKGKRIAIPLNTTVEPTGTLRLILKDGEVEVHYTIEVAETQNCGKATIGIDKGYTEVFVDSDGEHYGEGLGELLTKHSDNLKKKYQARNKLKAIITKKSHKQKNIIENNLGRKKLNRQNIKVKCQVKDKICQATHKLVNKASLIAAEDLTSPIKSNKFGKNVIRRLSAWTKGVIANALDTISRRRGSSVILVNSAGTMQMDSRYGILLGKRSGDSFHCFDGVVLQADENAARNVLARLHFPTIDRWTLWQKVKSILLKRTERLRLGLLNQDSSCN

SEQ ID NO: 19313 - protein, 536 aa, Okeania sp.
MVKNYVMPGEKICSVNVNISNPNTLKESLSKKPESDSINNEKKCLPYWNGSCQEMSNLLWSHTKIGSFDLASICSNGSAPYTLAKSWFTAELNFLPNQKWLKTSFQSSTVFELDCMDSVCAAFRLRSIPKERKSIHLKSQRIRVYPEKSLHQIWKQWLAASRYCFNQAIAYQRKHGLISKYDLRKVVLKNESLPDWIKESPYHLKVNAIYDANAAFKTSRKSGIKQPSCGKFRSIRDRIQSIKFRVEDFKKGTWLPSVTKGLKFQASEVIPTNNIEYQQKQKDGTYKTFVREESWNTETQLVYDKKRWFAVFPKEFKPENSKSQSIIALDPGVRSFLTGFDGEKFVDIGKGDITRIFRLAQHIDRLISNKTVLKGRQNKYKRQGLNKKINSLFIRIRNLIDEVHKKVAKWLTTEYRVIFIPTFESSQMVAKSGKKKRKLNSKTVRQMLNWAHYRFKQTLKFHGLKRGATVIDVTEEYTSKTCTKCGHVHQNLGGSKHFKCPHCGHSMPRDWNGALGIFIKALRDTASVDGCAVTLL

SEQ ID NO: 19314 - protein, 447 aa, unknown
  TnpB Polypeptide
MKRTNTFAVRPLSDDGEQLLRDLLDASAALWNEVNYQRLMRYNDEDGFEDEDVWDADTGRLEGKYKGIVGASTAQQVIRKNSEAWRGFFELKEAYHNPENQSVTEHPEPPGFWGNQDDGRKLHTVIRNTSYTVEWGDRSRLEILVGTELKERYNHTGRLRLEIAGEPNWPDYEKQGRLDLWYDETDSTFRASQPVTVSSDEQATPLADETAALDIGANNLVACTTTTGEQYLYEGRELFQRFRETTREIARLQSKLEDDRYSSERIRRLYRKRTRRRDHAQEALCRDLLERLYAEGVETVYIGGLTDVLETHWSVETNAKTHNFWAFKQFTERLACTAEEYGISVEVRSEAWTSQECSQCGSRNRTTRHQDTVTCECGFEGHADLTASETFLERYTEKSVRPMARPVRFEWDDHEWSESPRSHESPKEQRTDPSTVNRNGNVASGES

SEQ ID NO: 19315 - protein, 391 aa, unknown
  TnpB Polypeptide
MLKAYKYRISPTNTQKELIAKHIGSSRFVYNFALETKNSTYLGSKHSLSSFDLIKRLPELKKEHVWLKEVNSQSLQQSIQNMDIAFKKFFKGSGFPKFKAKNKGKQSFSVPQNVILNDNLLIIPKFKEGIDIVLHRPTKGILKSATISVTPTGKYFASILCDTGEDVIPKAIINEATTIGIDLGIKDFAITSNEEVFENPKNLRKAQSKLKYVQRKYSKNKGKRTKKRLALLHEKVVNKRKDFLHKTSTKLIRENQTIALEDLNVVGMLKNHNLAQAISDVSWSTFVSMLEYKADWQGKNILRIGRFAPSSKCCNICGTINKELTLKDRKWTCPKCNSVLDRDVNASINIKSFALKNYFCKELTVKNQGKLPELSGALTLEAHPIAYGVGG

SEQ ID NO: 19316 - protein, 398 aa, Kribbella sp.
MSRYRLYPTPTQQAALLEQCRQARYVYNLALEQWSMWTPDKGATPGYVEQARQLTEARAASDWLRAGSQTVQQQALRDFHQAVTNFYAGTHQRPTWRKAGRHEGFRIVGQQASRIVRRNRKWAVVNVPKVGRVRFRLSRPVPDAKSYRVTRDRIGRWHIAFAAIPEPIPAPGTGEVVGVDRGVTVSAALSTGELLTCPGLTDREQARLKQLQRRLARCRRGSKRRRRVKAAIAKLHARAADRRKDWVEKTSTDLARRFDVIRVEDLRIPQMTRRPKPKPDPGRPGRYLPNRRRAKAGLNRGILANGWGLLVQRLEHKAAGRVKRVKPAYTSQTCSVCGHCAPENRESQAVFRCAACGHRANADLNAAVNIAAGRAVSARRETPPRVSPKREPQPATSA

SEQ ID NO: 19317 - protein, 269 aa, Marininema sp.
LRKHLTQLKQTDDYRWLFSVTKQAIKDCDVAFQRFFKGQSRFPRFKSRRRSKWGFYNDPHKVKIEPTRIRLEKIGWIRLAEKKYLPEEFKPLSYRMGREGVHWFVSITVEVPDYVDYSTPANPPVGVDVGIKTLATVSNGVTYKNINKTSKIKRLEKRFKRLQRRVSRKYQMNKEGDRYWKTRNLMKLGQRVAKLRNRMTNIRKDTIHQMTTEIVKTKPSHIVIENLNVQGMMKNKHLSQCVFGETGHDEPGRKRRLFVEFYKFFVTAK

SEQ ID NO: 19318 - protein, 448 aa, Escherichia sp.
  misc_feature (365)..(415): Xaa can be any naturally occurring amino acid
VKRLQAFKFQLRPGGQQEHEMRRFAGACRFVFNRALALQNENHEAGNKYIPYGKMASWLVEWKNATGTQWLKDSPSQPLQQSLKDLERAYKNFFQKRAAFPRFKKRGQNDAFRYPQGVKLDQENSRIFLPKLGWMRYRNSRQVTGVVKNVTVSQSCGKWYISIQTESEVSTPVHPSASMVGLDAGVAKLATLSDGTVFEPVNSFQKKQKTLARLQRQLSRKVKFSNNWQKQKRKIQRLHSRIANIRRDYLHKVTTTVSKKHAMIVIEDLKVSNMSKSAAGTVSQPGRNVRAKSGLNRSVLDQGWYEMRRQLEYKQLWRGGQVLAVPPAYTSQRCTCCGHTAKENRLSQSQFRCQVCGYTANADVXXXXXXXXXXXXXXXXXXXXXXXXXXXXXXXXXXXXXXXXXXXXXXXXXXXVLWSYSERKSPVTKSIQMPGMWIYSERRCKWRS

SEQ ID NO: 19319 - protein, 416 aa, unknown
  TnpB Polypeptide
MPTVCLKFHFKENSKVKTLMDACASIQRQAVEFAIDNNKTATFTIIKALYPSIKSQFPNLHSQWFQSAVRSGAAVVHSFKNRKRKRERTGEKGQRNTNLEKPKIKRPFVYVSKQILNVDFDGKKLTLTFPVHPYDKEPITLVFRPHHKYCRLLYDWKEGRAKMGEPTLTYNSISIPLKFPKVEPYKPKTVIAVDSNEMNLTVYDAVSKELREIDTSYAARISREHERRVRKGTKGKQNPKAKRKVASKHGRMRKEKVKNFWHHVALMLIAWAMATKAAIVLEDLKWLKGMIAKNVNSRRMRQRLLNFWSVMTFHRILALKAAFYGVPLVFVEAKNTSRTCPVCGRINERLRGHVFECPCGLKKGKHEVAAINIACKGMEILGVALPRQGLVGDPCCLSSGFGLKAQGHDRNTQANA

SEQ ID NO: 19320 - protein, 400 aa, unknown
  TnpB Polypeptide
VAFVLQYTLGRLHIIDMKAQRKEGFHMAEKAYKFRLYPNRQQEELIRKTCGCARFVYNTTLAARQDAYKVGTSLSGNDCVKLLPGLKVKYPWLKEVDSTALQSSVKNMDRAYQNFFSSRSGVRKGKAIGFPKFKAKHHCRDSFTSKVGLAVRDGAVKLPKLGWVKAKTSTAVQGRILNATVSITRSGKFFVSLCCTEVDIQQLPSTGAAVGLDVGIKDLVITSDGAKYANHKYLSKSEKKLAKLQRRLSRKSKGSRNRDKARLKVARLHEKIANQRNDYIHKLTTQLVRDYDIICVESLNVQGMMKNHSLAKAIADASWGEFCRQLQYKAAWQHKRIVEVGTYFPSSQLCSCCGHKNPDVKDLAVRGWVCPACGTKHDRDVNAAINILVEGLRLLGILAA

SEQ ID NO: 19321 - protein, 355 aa, unknown
  TnpB Polypeptide
MARCVKFRIPDELCHVLDDLYPRVLETAREMIHNRKLASSKYWPSVPCVVAKSLITKYQRNKKCRAIRSLVIPICGDKGKIIKLVLGGIRIPALFKKQIIPAVFPWKVDGFVRQVEFFKREGIWFMSACVNTSCEKPKEITGVVGVDRNSVGNVAVMADIQTGKVFKLGIDPAGTKQCFRGRRGNLQRARKFNLLAKTKRRQSRRMAYENHKVSKTVVDYATTHCRAIVLENLSTVRTKGSKIRKYSEKNQWAYAQLETFIRYKAALRGVSVVTVDPAYTSQECCKCGHIQKPNGKKYLCAVCSHREHRDANAAFNIARRGARVVSGTCSDILSVVSLGPIGGPYAGKERALCAS

SEQ ID NO: 19322 - protein, 403 aa, Sporolactobacillus sp.
MKRGESMTLKGLKVRIYPNEKQKVMMHLNFGYNRFVWNQMLNMLIERYKNNPQAPFLNAYALNLLLPALKNAFPWLKEAESTSLQATNHDLIEAYRKFFREKRGFPKFKSKKFLKQSYQSKCVHQNIRQVAPHYMKYPKLGVMRFKTGKPIPDTIKSVTIKQSFTGKYYAVLLVECENQAFEKTNKQIGLDMGVSDLLIGSDGIRFPSIRFDKKLAPKKRYWEKRFARRSLRAKKEMAWDNRNHVLHPRQFSDFKNVQKAKLMVANYHEKIANQRQNYLHQITTQLVKKYDLLVIENLKTQNMLHNHKVARAIANQAWRELRRMLEYKCAWYGKQLIVVNPHKTSQICSHCGYDDGKHTLDIREWTCPSCQTHHDRDINAAKNILNNGLGISLGKRTVTSAPD

SEQ ID NO: 19323 - protein, 469 aa, unknown
  TnpB Polypeptide
MSIIEFKAYGKKAQYQAIDEAIRTVKFVRNSCIRLWIDNKGLNKYDLNKYCKTLAKNFPFANELNSTARQAAAERAWSSISRFFENCKKKVPGKKGFPRFQKHCRSVEYKQSGWKLSPDKKSITFSDKKGIGKLKLKGTWDLWRFDKKQIKRVRIVRRADGYYVQLCISVDVKEQLDPADATVGLDVGLKDFYTDSRGNTEPNPRFYRSGEKRLRFYQRRVSRKKKGSANRKKAVNRLGRQHLKISRQREDHAKRLARCVIRSRSVGFAESNDLVAYEDLRVNNLVKNHCLAKSINDAGWYQFRKWLEHFGQKFGRVTVAVNPAYTSQNCSKCGEVVKKSLSTRTHVCECGCELDRDHNAAIRRSRRYANNILKRALGTVGHTGTWIDRRSRYANIDPNASGDLASTVLGFGQEQQVESMSEESPRLKARGVSKNRLSVRIGWHWKELAFGLSGQYYHRLVLFFDIIFL

SEQ ID NO: 19324 - protein, 382 aa, Escherichia sp.
MRRFAGACRFVFNRALALQNENHEAGNKYIPYGKMASWLVEWKNATETQWLKDSPSQPLQQSLKDLERAYKNFFQKRAAFPRFKKRGQNDAFRYPQGVKLDQENSRIFLPKLGWMRYRNSRQVTGVVKNVTVSQSCGKWYISIQTESEVSTPVHPSASMVGLDAGVAKLATLSDGTVFEPVNSFQKNQKKLARLQRQLSRRVKFSNNWQKQKRKIQRLHSRIANIRRDYLHKVTTTVSKNHAMIVIEDLKVSNMSKSAAGTLSQPGRNVRAKSGLNRSILDQGWYEMRRQLEYKQLWRGGQVLAVPPAYTSQRCACCGHTAKENRLSQSKFRCQACGYTANADVNGARNILAAGHAVLACGEMVQSGRSLKQEPTEMIQATA

SEQ ID NO: 19325 - protein, 457 aa, Halobacteriales sp.
MSDRYRECLYDWLAAHAPLWNQLTYRRRQQYFTEDGDVWDVEYQDLYDDYAPVIGKAACQQLAHKNSEAWRSFFALLDQYHSNDSTVAERPSPPSYWGNREESYDLHGLVRNDLYAFDWDETRSTLEFGVGEVLEDRYDFEYQERLMLEVRGDPQWDGDNGRLELVYDEAANQLRVKHPVRIRPDDVQRQRLDAFTHTLNSENATQSAAIDVGVNNTLAIVTSQGETAVYHARPLFKQFQQYTEQIAALQSELPVDRYTSHRIQRLYDERGEKRDHSRDAAVRHAAEWLLARNVDTVYVGDLTEVLDTHWKAKVNEKTYAFWSHRQLLDRLELTFGDVGIKIESVSEAGSSSRCPKCGSENVSRDGDAFRCCGCEFGGHSDVVGAWNMLQSEAGPMARPAALAAERPRDAPDNSPNSECDGAYWEWDGHDWTPAGLGEQSSPVDQTSVGKPASSQPG

SEQ ID NO: 19326 - protein, 399 aa, Campylobacter sp.
MLRAVKYRIYPNKAQQELILKHFGCARFVYNHFLNYRQERYALGIKETYFTMQSKLTELKKEHTFLSECNSQSLQMALRQLVTAFDNFFSKRAKYPRYKSRKHSKQSFAIPQNIKLSKNRVILPKFKEGIKAKIHKILSNDCVIKQAFISCVAGNYYVSLSYEDNKSIPKPVEIKSAVGLDMGLENLLIRSDKIVYENKKFLQNKEAKLIKLQKAVSKKKKGSNNRAKTIKKLAIAHHRVVLARDDYLHKITNEITNDYDFIAIENLNVKGLIRNKHLSKSIANVSWHKLISMLTYKAELKGKTLMQIDKFFPSSQICSNCGVNTGKKALNIRAFTCPNCNTYHNRDINASINIRNYALGMLDDRSRVKIDKFRVGITRSYACGDSSCGTSKYGKIFAS

SEQ ID NO: 19327 - protein, 216 aa, unknown
  TnpB Polypeptide
MEVRRTVPVKLDVDSDDAGLLRETVDEFLWAANYVVDHAWQGDYKTTSKAQLQEETYDEVREQTRLHANLVQNARNKAADAVQGVVARWKQGEYAGKPHFSKPTVVYDKRCATFHDGHVSLATINGRIEVEYVLPDEGRDTPHSRYLDNDDYEVTGAELHNKDGKWFLHLRTKAELESDTAEQATTGHSTVLGVRKSGALAQPIRNLRFLGTLTSA

SEQ ID NO: 19328 - protein, 370 aa, unknown
  TnpB Polypeptide
MEKAYKFRLYPNREQEKQIQRTFGCCRFVFNHFLSNRIELYKETGKALNYNDCSAAMTAMKDELTWLKEVDATALQSSLRDLDTAYQNFFRRVKQGDKPGFPRFKSKKNPRKTYKAKRVGNNIAMLDKQIKLPKLGPVRAAISKQVKGRILNATVSQSPSGKYFVSICCTEVEIPQHESTGKTIGLDLGLKEFVVTSEGTTYENHRYLRQSEKKLARSQRALSRKTIGSHNRDKARVKVARIHEKIASQRNDTLHKLSTSFVRKYDLICIEDLQVKNMVRNRKLAKSISDVSWYEFVRQLEYKANWQHKMVVKVDRFFPSSQLCHVCGDQNANTKNLAIREWVCQKCNTVHNRDINAAINIKAEGLRLIS

SEQ ID NO: 19329 - protein, 167 aa, Nocardiopsis sp.
VFFYPLATCEVAEAEQYEPEGFIGVELGIAHSATTSTGYRAAGRGLNRHRKRQLALRARTTACGRGLFPTPQRVALHSWALAQLAGFLVYKAERAGVPVVFVDPAYTSQTCAACDHAGKRNRVGQGLFICRGCGVVVHADRNASRNLAARGQSVWNAGRESRAPATP

SEQ ID NO: 19330 - protein, 409 aa, Halorubrum sp.
MQYNYKYRLDPSEALHQELCYHVDTCRQLYNHVLYLLNDADDIPARYEVQGRLPDLKSWWDDLEDVHSKVLQMIVKRVYDNLSTLKTQKENGRAVGMLKWKPPREYRSLTYNQSGFELKNTSGRSVLWLSKIGEIPIRLHRDIPENAIIKQVTIKREPTGEWYATFGIDVDEDSPNKPETPAKVVGIDVGIIKYAHDTDGYAIESPDFSEERNRLERAQRDLSRKEYGSNNWEKQRKVVAERHADLKRKRRDFLHKLSNYYATEYDLVAVEDLDAKGLLELPGNSRNRAGAAWGTFPRMLEYKCEREGTHFVAVDPKNTTKICASCGVKTDKPLWVREQSCPACGFEADRDANAAWNILSRGLEDLGVGHSEVTPVETALPVDTPVSAKRVVETGSPTLKQRPALAVSE

SEQ ID NO: 19331 - protein, 451 aa, Streptomyces sp.
VVVCGGKRLGLGVQVVGKSQIQLGHASSLALEWGHFQISCVPDARAGERHARTLRACPVRVEPGRRAARALAQRPQDRPGFREQCRQLTEARRDNAWLGAGNADVQQQALKDFARAKNARFTSGFGEPTWRKKHVHEGFRVIGTDRVPECEPNGSPTLSAKTGRQVMGRSVRVHKLNRRWAQVQVPGCGWVRFRLTRGDLPKAKTFRITRRGGQWHIAFAVVPEPIDAPGTGNVIGIDRGVTITAALSDGRKLNCPQLTVKERAQVRKHQRRAARAPRGSERKTAEYATVARLKTREADRRKDWCEKTSTMLARTCDLVRFEKLNIKNMTRSAKGTVQEPGKQVRQKSGLNRVILAQGWGLLRQRTEHKAPGRVEDVPAPYTSLRRSACGWIDKNSRKSQAEFCCSSCGFICNADTNAAANVAAGQGGTTRPRRSAGAGGDDTAHTAVERP

SEQ ID NO: 19332 - protein, 562 aa, Streptomyces sp.
MIRAYKFLMRPTVRQGQALGEMLRDHCSLYNAALQERRDAYRHVSKTTVKYGMQSAQLKEIRAVDPERQGRWSFSSQQATLRRLDKAFAAFFRRIKSGDTPGYPRFRGVNWFDTVDFPKDGDGCRWDSSPHDPVTRVRFQGVGHVKVNQHRAVLGRVKTVSVKREARKWFVVLTAEQDVPEPLPATGSVAGIDLGIANFLADSNGEFVPNPRHGHRASEKLRAAQKALSRFPRCKAKDRTANHQRAVHKVAQLHGKVRRQRLDHAHKTALDLVRAHDFIAHEDLKIRNMSKAPAPKPDTDQPCTFLPNGGAAKAGLNRSINDAGWGVFLTILHAKAESAGREVIAVAPRNTSRTCPVCGHCAKGNRPTQEKFHCVSCGHHAHADTVGAQCSTGRAGPSRRQPGIARSPVLQDGEESRSTQADPAQDGTGQCPPLGGRPAAAAHRRRPCRSGRLRHPPSAAGRRSARLRDLPAQGGRCREDPHASVTPVVAGGARPATREETPSSPGSSQRNEPIPDYRGGLGSCGAPGRPCTCISPQEVERLSLDHRREAQPEIRQHAQDQV

SEQ ID NO: 19333 - protein, 394 aa, Streptomyces sp.
MKRAFKYRFYPTDAQAAELSRTFGCVRKVYNMALAARTEAWARQERVNYNQTSAMLTVWKKTDELAYLNEVSSVPLQQALRHLQSAFANFFAKRAKYPRFKSKRKSRASAEYTSSAFRFDDGRLTLAKMAEPLQIVWSRPLPEAVSPTTVTVSRDSAGRWFVCLLCEDPSVKPLATAGKAVGIDVGLDQLLTLSTGEKIANPRHERRDRERLAKAQQELSRKAKGDGANRRKAREKVAKIHARITDRRRDVLHKLTTRLVRENQTLVIEDLTVRNMVKNRGLARAISDAAWAQFRSMLEYKADWYGREVIAVDRFFPSSKLCSVCGTLQPEMPLNVRNWTCDNCGTCHDRDVNAAHNLLAAGLAVSVWGAGVRPQRRTPSGQSAMKQKTPRREP

SEQ ID NO: 19334 - protein, 360 aa, unknown
  TnpB Polypeptide
VNQTLTLKLKLYEPTHVIREMYQLMADRVTQFANRYLDLAPGERPKTSKKAAKISDPLPSALLNQAIRDIKLKPKAKRFKRMWPSFNNQNFRMEKEISKGGGAVWKASFPTLEKRVGVPVVVRPYQEKYLEMLLSGEARQGSAKLVRYGKDWYIHLSLTVAVEQTEKPEKIMGADLGLIDLLVASVNGQTLFFSGKELAYTRRHYAELRHRLQKAGAHRALVRLGNKEHRWVTDINHKISRAIIDFAIAHGVTKIRLEDLTGARWTKQQRKEQREDHGRSLHYWPYYQLRKFIEYKAALAGIRVEQVDPDLTTLTCSRCGEVIKSRPKGRWFRCPRCKKTKHIDVNGADNIAQAISGLAA

SEQ ID NO: 19335 - protein, 350 aa, Ruminococcus sp.
MLLSKKTSIKVSREYANLIGHMCYAASKFWNVCNYERQHYKETGIEQYPDWYYQKKTHKEDLWYKQLPSQTAQEVCKLLGKAWKSFYDLKRSGGIETPRPPRFKQESIPITYMQMGIVHERDMGRVRLSLPKALKKYMEETYQIHENFLYLENKIFRGMDQIKQLRIYPPEKGNCKIIVVYEVPDQEELPQNGHELSIDLGLHNLMTCYDSGNGKTFILGRKYLALERYFHKEIARVQAQWYGQQSGKGVKYLATSKYIRKLYKRKHDSVTDYLHKVTRYLTEYCREQGITCVVAGDIRNIRREKDLGHRTNQKFHSLPYNRIYIMLEYKLKRYGIRFIKQPANKKSRLN

SEQ ID NO: 19336 - protein, 208 aa, Microcystis sp.
RVEERIAEVRIVPKCDCYVIEVIYEKTEQFLAPNEKIAAIDLGIDNLMAVTSNQPDFIPLLINGRPLKSLNQFYNQRRAKLQSLLKGNRQSSQRIRRLTRCRNQKVDDYLHQASRYLVNLLVDQEITTLVIGKNDGWKQEVNLGKVNNQKFVTIPHARLIEMISYKCQLEGISVILQEESYTSASNFLNDDPLPVYGQITEKPVFSGN

SEQ ID NO: 19337 - protein, 500 aa, Anaerobacillus sp.
MTKKNKKQPSVMLTYPGVVSEITETNSFILDELMRRFQSAKRYSRERIFEGSDRKQTVEKTKPLFLNNVRYMRDAFLEAEGGISSQKELLPLYITQYNRKIEKLKQKIEQLSRSKKKNKDELILFKQQKIERLEKEVRYYQHHIDNDTVPKAVDGSKQKMRLLNKGKITKIEWRESRSNNIYSRGEASKGGNENIKLFYITENLFEIKMLNPLSDKKGDRLSFFVRFPNKFVVKIASYLATKQAYTVRILRRKGKYEVKLTLDEKLNTIPSFQKGIAGLDINPNNLSITIVYPNGNFRVSKVFWMHDLNTVSANKRDWIVQNTVIEMIQWIKTFDIDSLSIEALKFLQNNVDKSFNRISNNFSYSSITNAIISTCFKENIALIEVDPYYSSFIGKVKYQKTYGLSVHQSAAFVIARRGLGFEENVPKELLSVLFTKEVKKGQRVYKLFTHWKKAKQWHDDIIKEMKKMKIKTKNHFISDVISFVRFQIKDIDTEGIEFPF

SEQ ID NO: 19338 - protein, 364 aa, Pseudomonas sp.
MEITKTLKLRIKDKHAKAMLAMARDVNQVWNFCNETQFRSLKRYCNKPKVWLSGFDLQKLTNGYSKCEGVSIGSATQQQVCEEFASRLRQFKRQRLNWRVSDRKSPRYSLGWVPFKARALTYKNGQVRFNGINIGLWDSYGLSKYTFRAGSFNEDSRGRWYLNIAVKIEVVDKRVPAGSSVVGIDLGLKTLATYCSGERFEPARWYRESQAALGIAQRARKKRRIKAIHARIANQRKNALHCETSTLVKRHAAIFVGNVNAKALAKTSMAKSVLDAAWSTFRTQLQYKAIRHGVVFAVVNEAFSTQTCSCCGVNPPSSPKGRAGLGIRQWTCSDCGSIHDRDVNAARNIARLGLQALAEGIPAL

SEQ ID NO: 19339 - protein, 487 aa, Mycobacterium sp.
VARFEIPQGWTAQAYRFALDPTPTQLRGLVSHAGAARFAHNHMLALVKAVLAQRDAERSYGIDEAELTPGLGWSLPALRKAWNQCKASCAPWWAENSKEAYNTGLDGLARGLDAWSKARTGERKGRAVGFPRFKTSRAPRSVRFTTGVIRIEADRRHVRLPRLGAVRTHESTRKLARRVEAGSARILSVTVRCDSAGRWYCALQVIVEAKTRPAHARRSAHAVVGVDVGVKADSLLVIATPDGVEVDRIAAPKSLSAAQSRLRALQRRAARQHGPYDPATKTKQVPSKRWRRTQDRIGRTHAHVAAVRRDVLHKATTALAQSHDVVVVETLNAAGLRAKGGARKRGLNRALADAALAEIRRMLSYKSRWYGSTLVAADRFYPSSKTCTACGRRKPNLTLADRIFECDGCGIRIDRDLGAAINLARLGVPTPAVGEQGPAGSGPAAGRGATRETDPAPAGNAAGDETSTPHHRSVDQTGTASPQGEAA

SEQ ID NO: 19340 - protein, 201 aa, unknown
  TnpB Polypeptide
VVRRADGYYAQFCIDVERSESHEWSGRVVGIDVGLEYFYTDSDGNTVENPRFLRKSEKALKRLQRRVSRSKIGKKNRKKAINRMARKHLKVSRQRRDFAVKAALSLVRSADLIAYEDMLVQNLVKNHHLAKSIADVSWSLFLNWVEYFGKVHGIVVVAVPPQYTSQDCSRCGHRQKKTLSTRTHQCVKCGLKLHRDHNLCN

SEQ ID NO: 19341 - protein, 405 aa, Phormidesmis sp.
MGMLKATKVRIYPTDEQVIQLSKDFGATRWLWNQSLFVMSQTYKETGKGVSAYDMKKRIPELKKEFEWLKETYSQCLQQSVLNLSQAFQNFFEGRAKYPTFKSKFDRQSVQYPANVKVASESVIKFPGNLGIVKAKIHRELPDGKLKTVTVSKTPDGRYYASLLMDDGIAKPEITSDGKAVGIDLGLIDFVVTSDGSKFRNPKHLKKHAKNLKRKQQKLSRKVKGSNTRAKARRMVAKVHSKITRVREDFLHKLSRKLVNENQVVVVENLAVKNMVKNHTLAKAISDAGWGKFCTMLKYKAELEGKTYLEVDRFFPSSHLCSNTLLQIPKMDLSVRAFDCPHCGQHHDRDVNAAINIRNEGLRLLALGISATANRGSVNPKGSGRKKSTNSEVAPIEIGSPQRTA

SEQ ID NO: 19342 - protein, 573 aa, unknown
  TnpB Polypeptide
MSSWNKDVEVGERCVLELPMMATKAQRDLLDKIFRVANDMKNYLIGWYKKQLTEMTRTRRWRENQRSLADLHKEYDPDLAKLEKLDAAIKLEEEHCAKFGTPFKLSHKKTKQRAELVARAQEFKKKQKPLIAVRNEMIKRYGFSKNDFEKRMSIYRSSYTALVGSAVAQRIADNVWIMFDAYLYSNGRKISFSKFSKFLSVEGKSNGANIIFNKKEMTLSIGTGKRHKTEIKVKKSKKDPYGYEAEAISRKICYCRIVRKAYPEGWRYFLQLVLDGPPPVKADPKTGEVLHSLGKGRVGLDIGPQTLAYSAEKDVNLVELAEGAQNMQDEIRRLKRAMDRSRQASNPGMFYPDGQIIPRNRLPAELLDRRGRRKWVKSKHYRQMEMRLRSIYRRQAAFRKHQHHRMANAMLPLGDKFFVEDMRWRALAKRAKKTRRNKKGKFLSKKRYGKSIANKSPGSFLTILEEKVVRFGGTFQRIVTWEAKASQFDHQTGKYNPKKLSQRWHILSDGTKIQRDLYSAFLIQHTNADLKSFDQSSCDRDFRAFMVMHDRAIGRLKASNKYLPSSMGIKKSA

SEQ ID NO: 19343 - protein, 357 aa, unknown
  TnpB Polypeptide
MSSWNKTAATGERCVIELPLSYSRHQHDTLDKMFRIANNMKNNLIAWYSRQLTEMMRTRIWRSNQKVLADLYSEYVDEVETLEKLQEKISRKKKNAGKKKAVRLFGKDEQQLAYLQSRVDEFTEKKKALCVLRNEIIRRYGFSKADFEKQMKKYRKSYQTLIGSTVAQKIADSVWAMFDAKLYRNGKDISFSPFAQFAAIEGKSNKTNIVFDKEKMAVTLGGGSNKLCIRVKRSRKDPYGYEKDALSRRVCYCRIIRKAYPEGWRYFLQLVLEGPPPVKVKPETGELLHIMGKGCVGLDIGPQTLAFSANKDVGLEELAEGVQLAQDEIRRIKRSMDRSRNGYHAEVELFFEKSTGG

SEQ ID NO: 19344 - protein, 492 aa, unknown
  TnpB Polypeptide
VVVSRVPVSHVGWRGCWRAFARGRGSCYGWSCDEVLICSSSLFCAISLPTEREERKEGRAMFEAVKVALDPTPAQERRLLSHAGGARFAYNTMLAHVKAALDAGEKLDWSFYSLRKRWNADKDTLAVDAEGSPWWQENSREAYYSGIEALAKGLSNWSKSRRGDRKGRRVGFPKFKVKGKAAPKFTYRSDSFGLIKNDPKALKLPRIGRVHCMEDVAARVGDAHVLRMTVSQRAGRWYASLTVEHDEPVATPPKGGSVGVDLGVKRLATLSDGTVVENPRYLRKAERKLKQAQQTLSRKTKGSNRRAKARMKVARLHAHVANQRLDTMHKLTTRLAETFSDISIEDLHVAGMVKNRHLAKSISDAAFGEFRRQLEYKTARSGARLHVVDRWFASSQTCSKCGSVKVKLSLSERTYRCDSCGLVLDRDLNAAINIHVAGSAPETLNAHGATVRRSDRSGHATRVAVKCEPSWRGGRRAVRLGADSRKAVLQTN

SEQ ID NO: 19345 - protein, 396 aa, unknown
  TnpB Polypeptide
MIKGIKVMLMPNNKQNTKMFQNTGAARWAYNWALAKQQENYKNGGKFISDNDLRKELTQLKKIEEYKWLNNTSNNVPKQAIKDVCIAYQRFFKGQSKFPKFKSKKKSPPKFYQDNIKIQFSETHVKFEGFSRTKKQNKQKLNWVRLAEHNKIPFGKDVNYINPRVSHDGLNWWISVGIEYEDNVALPTNQSIGIDLGIKDLAICSDGIIYKNINKTKKIKKLEKRKKRLQRQVSRKYDNLKENKVFTKGEKPIKTKNIIKLEYAIKTIQQKLNGIRDNYTHQTTSEIIKREPSSISIEDLNVSSMMKNKHLSKSIQQQSFYEFRRQLSYKSSWNNIELRVIDRWYPSSKTCHECGYIKKDLNLSDREWICPNCRIVLDRDLNASLNIRDCQKYKIG

SEQ ID NO: 19346 - protein, 665 aa, Streptomyces sp.
VTALQTARPQQKFRGKNKAPKWTKPDDGMVSVMVLPLAVTDPADLARLEKLFGAMWSIKRAVQRDARAKVDAYWSAKHERDTHSAKDVRQRLSLSREALERCAYKHLEAAGHLKHHASKALSMHMADEVWNGVQRHLFADATGNRHGRPRVGRRHGFTRIPGRARSHTTANKWETFRLVGTFRGHLMAYTSGGQHDLMQPRRMPKPTRPNGKVPTGKGTRKANWWDHAGPLAVVFAGGPDGKRGDLVLPVRIPQSPAQENRVRHFLETDARWHKVDLVRRRKASAPGGWAYEAHLTVLGPGYTSPAVRQVRQQAAELDRIGGVDGNVSNLSVVSFPASLEASAGAAKSSEIVLTDDERTRLEKEAKKRRGRARALERSRRATNTTQYVLSRRQTARAERRAAKGLTPKAVIVPGGARAARADGVPKQPFRRDRLSAGHRELRARQAEASASTAEYRRHRARAVARDIVAAHGPRLTVEDCDIRTWYRLWGRRLAQTTPGMLIGALEIECEAAGGRLVRASTWSTALSQHCMCGERVAKTLRDREHKCVACGLLGKRDLVSAALAAFVDLSNPDDPKTATLDTARSRHAQIVFAQGLKEALRESTTPCQNTPRGAGRVAVPAQRVTSAHRTAERRDRATPDEPRPVRDHAGAPGTRPARSPQLTLW

SEQ ID NO: 19347 - protein, 369 aa, unknown
  TnpB Polypeptide
MANKAYKFRLYPTKEQEQLLAKTFGCVRFVYNQMLAERIEIHEKFKDNKEALKKQKFPTPAKYKQEYPWLKEVDSLALANAQLNLQKAYRSFFSGRSAFPKFKSRKTKQSYTTNMVNGNIKLVDGYIKLPKLKWVKLKQHREIPVHHTIKACTITKTKTGKYLISILTEYKHQPVPKEIENVVGLDFAMHTLYVDSEGKRANYPRFYRQALEKLARAQRVLSRRRKGSNRWHKQRLKVAKLHEKIANQRQDFLHKTSRQLANRYDAVVIEDLNMKGMSQALHFGKSVADNAWGMFTTFLQYKLEEQGKKLIKIDKWFPSSKTCSCCGRAKESLSLSERQFCCECGFEMDRDINAAINIKNEGMRQLGVA

SEQ ID NO: 19348 - protein, 435 aa, unknown
  TnpB Polypeptide
VVEKTFKYAATPEDDETATAAWADIQTCREVYNHALTQEYRPRPEYDKPSYRDMQNKLTDWKDTWPEWGTAYSKCLQMAVRRIKQSENVLESLKSRGYNVGRLKWKAPREFRSIVYNQSGFDVDYNTGRAGHATVNFSKIGDFHLNYHRPLPDEGEITQVILKKEKTGDWTVSIVVDYDPEYPERPAVEDISPEETVGIDLGITKFIHDSNNRSFESLDETRDRDRIDRRHRELSRKEHGSNNWQKARQSLARAYDRLQSRREDYREKLAHEYTTRYDAVFLEDLDVKSMTESNGNSRNVAAMSWRKTIQAFKRHGKKNGCHVIEVPPEGTTKRCSQCGCSTKKPLWVRDHSCPACGFEADRDYNAALEIKRLGLEKLGVEANMKPVGQGMAESTPVETALPRDTEATANDVSPKRVVETGSSCLTERTAHAVSE

SEQ ID NO: 19349 - protein, 319 aa, unknown
  TnpB Polypeptide
LKDRHDHAGRLRLEIAGDPNWPDYEKQGRLDLWYDETDSTFRASQPVTVSDDARATPLADETAALDIGANNLVACTTTTGEQYLYEGRELFQRFRDTTREISRLQSKLREGRYSSERIRRLYRKRTRRRDHAQDALCRDLLERLYEDGVDTVYVGGLTDVLETHWSVETNAKTHNFWAFKQFTERLVCTAEEYGISVGVRSEAWTSQECPQCGSIDRTTRHQDTLTCPCGFEGHADLTASETFLRRHQNSPSSDWRTRREASRQRHTEKAVRPMARPVRFEWDDHEWSESPRSHERPKEQRTDPSTVHRDGNVASGESA

SEQ ID NO: 19350 - protein, 394 aa, unknown
  TnpB Polypeptide
METVETHIQVKLHPTKEQEVVLKKSCEIYVKCLNEASKYYFEHDCNLTENQLKKSIGKSLRDEFGLSPLVASAIKEVLLYYKEEEKRLKKEFYIYPNEKGEQKQPKDLSWLKKPIVFKEEHVRYEPMYWKIKYGGVKIALCCFDETVLCEITHKKGVSLTNDSRKSAKLVYQGSGCFYFLIQTKMKVKPEIPFEKTSTTTVVGIDIGERFIITAYDGTKTIFVSGKEVLEKARKYQQQKAELAGKKSKAAQERLKAVTQKERSWLCNVNHKIAKDLVESYGKQTVFVFEDLPHAMFQSKSRLWFLERLEKYFRQKISARGGYLLKVSAQYTSQRCPYCGKISKKQRNHNKHEYRCSCGFRTNDDRVSAINLHELGQRWLEGETNPRIVLPDVIQ

SEQ ID NO: 19351 - protein, 402 aa, Streptomyces sp.
MAQQVKRAFKYRFHPTDEQAAELSRTFGCVRLVYNKALEERTRAWYGEQRRISYVQSSAALTQWKKTEELAFLTEVSSVPLQQALRHLQTAFGNFFARRAKYPRYKSRKKSRASAEYTRSAFTWRDGHLTLAKMSEPLDIRWSRPLPEGAVPTTATVSRDSAGRWFVSLLCEDTIPPASATTNAVGLDAGITSLVTLSTGEKIANPKHERRDRARLAKAQRELSRKAKGSANREKARRKVAKVHAGIADRRRDFLHKLTTRLVRENQTVVIEDLTVRNLLKNGRLARAISDASWTELRSMLEYKCAWYGRELVVIDRWFPSSKLCGACGTVAAKMPLNVREWTCGCGAVHDRDVNAARNILAAGLAASACGDGVRPQRESSRTGQPSMKQEPQRATAGISRP

SEQ ID NO: 19352 - protein, 275 aa, unknown
  TnpB Polypeptide
MIHFPKSFNGFVCKFYCCNRPDFVKLNQVRFLPHYNCIVIEIVYEVEITDTVKQNQNYISIDIGVDNIATVANSFGKQPFIVNGKPLKSVNQYYNKHVSKYRSIANQMNGVAYTKRMDKLTEKRNRKMEDYLHKTSREIIEYCKKYNVSKIIIGNNKEWKQNSKLSKKVNQHFVQIPYNRLIQMLEYKAQEIGVTVIITEESYTSGTSFVDNEMPVKENYNKSRRIKRGLFKTSDGSFINADVNGSYQIMKKVIPNGEILWNRSCAYQPFRVAIV

SEQ ID NO: 19353 - protein, 378 aa, unknown
  TnpB Polypeptide
MIKGYKIKLHPTKEQEQILRQSAGVARWAYNWTLGKQKENYDSGAKFVNDGDLRKELTQLKKTEEFAWLNDVSAQIPKQAVKDACQAYQRFFKGHAKFPKFKSRKHSVPKFYQRYDKLKFIDGKVVLEKIGWVNIAEEISSGEYSNPRIKYDGLNWYLTVGVTVETLVLKSHISEPIGVDMGIKELAVLSNKDVFKNINKTKEVRRLTKKLKRLQRQASKQYQKLKKKGGENRYKKTSNLLKLENEIQLVHKRLNNIRTNHLHQATSRLVKANPEYIVIEDLNISGMMKNKHLARSIQEQKLYEFRRQVEYKCQWYGVRLIIADRFYPSSKLCSQCGQIEKDLKLSDRIYHCDCGLHMDRDLNASINLREYGRTKLAS

SEQ ID NO: 19354 - protein, 389 aa, Lactobacillus sp.
MLKGIKIRLYPNENQKDKLWQMFGNNRFVWNQMLGIAKQRYQNNPSSQFINGYQMDALLKRLKQEYPFLKDSDSSSLQIVNHNLDQAFKMLFKHRGGYPQFKSRRTAKQAYTGKSTISVVAKRYLKLPKLGVIKSSKTNQLTNCKIKRYTVSHDATGRYYLSLQLEAPKPLSLPKTGKKVGIDVGIADLAISSDGEKFGTFNAKWLERQALVWQSKYAKRKYLATIAQRQWNHNHKTVKEELDDYQNWQRARKQKARYQQRIANKRKDYLHKLTTNLVKKYDVIVIEDLKAKNLQKNHHLAKSIANASWYQFRAMLEYKCAWYGKKLVTVKPNLTTQTCHQCGFVMGKHGSSKIVLGEEEWTCPKCGIHHDRDINAAVNILNKGIDAIG

SEQ ID NO: 19355 - protein, 402 aa, unknown
  TnpB Polypeptide
MKRLLKAFKTEIAPTKEQACKIVCSMGICRFLYNQYIAYNKKLYQMYQRGLLDSHQKPFVSANDFDKYVNHTLKQELPWINECGSKARKKTLVNAEVAFKRFFDGLAGFPCFKKKSRYDVKLYFPRNNKSDWKIWRHKLMIPTLKHVRLKEYGYLPVGLAVTSGTVSYEAGRFYVSVVVDIDEKSKYNNDLEAIYQPTGEGVGIDLGIKDLAIVSDGRTFKNINKSSKVRRLEKRLRRMQRQLSRKYEFKKKKGGITATASANIDKQKLKVQKLYQRLNHIREDHENKAIHEIVKQKPRFITVEDLNIKGMMKNRHLAKAVAAERFYSFLSKLKRKAEIIGIEMRVADRFYPSSKTCHACGYVHKGLKLKDRVYICPQCGYTADRDFNASLNLRDAKEYRIA

SEQ ID NO: 19356 - protein, 404 aa, Chlorogloea sp.
MLTLTYEYQIKPNRQQEEQMFFYLETCRKVYNYALAERKAWINSRSCAINSCSIRHEYIMRADAPKPSYHWQCKSLAAAKKDIPELALPHTHVLQQALRTLEASFVAMWERGHGFPRFKKPGRMRSFLFPQMGVNPVQENRLKLPKIGSVKMRLSRPIPDGFELKQVRIVKKASGWFAMLCLQCDVSIPSAMPHGHSLGIDLGLLSFLATSDNETIARPKFFVDAQRKLKLLQKKVSSKLIGSSNWRKAQNKVARFHEHISNTRKDFHFKTAHHLCNQAGMIFAEDLNLKAMSRGMLCKHTLDAGFGQFLNILEWVCSKRDVFFAKVDANFTSQTCPSCRTHTGKKDLSERVHSCPHCGYKTDRDVAAAQIVMIRGIVAVGHTVLKLSEGKDISLPMKKESPSF

SEQ ID NO: 19357 - protein, 387 aa, unknown
  TnpB Polypeptide
MMAIKVQPCVFTLRLKVKAEGYDWLNAAATEVNQVWNYANATSYKAARPFAGKGKWLTAYELDKLTAGATECFERIGSGTIQRVNAEFATRRKQFKKSKLRWRVSQGAKRSLGWLPFKAVQLKRKGRSLRFSGKAFRVFERELLEGVMWKSGCFAQDAVGDWWLCLPVERRVFQSAAPKEVVGIDLGLKDIAATSDGDKLQAGHFYRNIEQKVASAQRRGHKRRAKRLHRTAARRRKDALHKFSRKIVNEYQTIKIGDVSSLKLAKTRMAKSVLDAGWGMLKTQLHYKGQQAGRSVIIVSERDSTRTCSDCKALTGPTGLDMLVVRTWVCSACGVTHDRDVNAARNHLSAGRSPPPVSGNESSLAVAEPSLTYSQCEAEISALKAAA

SEQ ID NO: 19358 - protein, 494 aa, Hydrogenibacillus sp.
  misc_feature (93)..(93): Xaa can be any naturally occurring amino acid
  misc_feature (208)..(208): Xaa can be any naturally occurring amino acid
VKNSFTIIGEFFPEVYPAFRSGKWARGEEDPLTTEMRLFSACLRWSYRRILKGVSRTEIKKQGQDLFGLNSRYVDDARLKAQGMIDAQKELLXEKRSRAEKNGLSKDELRTLDRTVPGRQARVSALEKRLKELREHKENGTVPTAIFGGRKLWRNVCKGKATRDEWRAARKNRLYARGDRTKGGNPNLKITFDGHAFRMAVTISHLSXKGGNPNLKITFDGHAFRMAVTISHLSEPTGVDALGRPIMRRAPRVLGRLWIPPKHRARLLGWLAEKRPYTAELIRGPDGRFRVHIALELDDQPAPDFSRGALAVDINPDGVGLANVSSCGLPEPWPKGFRIPHPKNLGKYDGEFQVIPYPSGFLTIRVPELAYASGFRRRYLIGVLAKVVVDVAKALGKPLAMETLSFDQGRLDRGKTFNRMAAQFPYAMVLQALMRRAVKENVGYKQVPPQHTSTIGRLKYEKKYGVPVHGAAGAHHARGSGLRASGERTAETDG

SEQ ID NO: 19359 - protein, 373 aa, Clostridioides sp.
  misc_feature (57)..(98): Xaa can be any naturally occurring amino acid
MYPNKKQQELINKTFGCCRFVYNKYLAKRIDVYKSDKETFTYKQCSSDLTNLKKELXXXXXXXXXXXXXXXXXXXXXXXXXXXXXXXXXXXXXXXXXXGFPKFKSKKINRFSYKTNFTNGNIMYCGQYIKLPKLGMVKIRDKQVPQGRILNATISKEPSGRYYVSLCCTDVDIEVFENTNNHIGLDLGIKEFCISSCGDFIENPKYLKKSLNKLAKLQRELSRKTIGSLNRNKARLKVAGLQEHIANQRKDFLQKLSTKLIKENDIICIEDLQVKNMIRNRKLSRLISDVSWSEFIRQLEYKANWYGRKIVKVGKFFASSQICNKCGYKNEEVKDLNIREWICPSCNETHDRDINASINILKEGLRLITIQNK

SEQ ID NO: 19360 - protein, 373 aa, unknown
  TnpB Polypeptide
MELYTKGFKFRIYPNKTQQNLINRILGCCRFAYNHFLAIRRDEWTANHKSVTYNQTSALLTDLKRREDYCWLKQADSMALQESLKNLDTAYQNFFKHQAKYPRFKSKHTHSQSYRTRNQSNGIRIVDKRLKLPKIGTVKIKQSRYFEGRILNAAVSRTASRKYFVSLCVEIDKEILLRTNNGDEIGIDVGLKEFYSDSNGNTVANPRILRHLTSKLVREQRRLSRKMPKSGNRDKARIRVARVHEQITNIRKDFLHKTSTELVRKNKTIAIEHLLVKNMLKNHKLARAISDVSWSEFFRELEYKAELHGAEVLKIDTFYPSSQTCSECGYRNTETKKLGIRKWACPKCGSHHDRDINAAKNILRKALEEKRSA

SEQ ID NO: 19361 - protein, 241 aa, unknown
  TnpB Polypeptide
MREPVRFPGQIKSAVVSKMADGWYVALAVETEAKLERQANGGTVGVDLGVKTLAVLSSGEAVEGPKPHRILLKRLRRLNQSLSRKVKGSANWRKAKTKLARLHKRIADIRTDAAHKLTTRLATGFDAIAIEDLNVKGMVENRRLARSVMDGGFFELRRQIEYKAKMTGSNVVVVDRWFPSSKTCSSCGKIHDMPLSARRMVCGCGNDIDRDLNAARNLAKCAASSAVSACGVQSAGVAQAA

SEQ ID NO: 19362 - protein, 367 aa, unknown
  TnpB Polypeptide
MRYPWKERYFQPIRWPAQALQRKRDGTRFPLGGIGKNRRYIDLPIHLPRHAGACQVIWNHGQYELHVCVTQDIAVGAPGCGRGCVDLGEIHAAALVTDTGTGLIVSGRSIRTVKQGRNRAIGDLQKKQARCTRHSRQWMKYQHARDRINGKSERQVRDLRHKGTHLVIEQAQKEGVGELYVGNPDGVRRHKTGRRHNQRMSQWEYGRDIRYLKEKGARAGITVRTGPERGTSSTCPNPSCRHKQKVRGRRWVCRQCGGSWHRDLVGATNMFALAFGGTPVVTVPERQNTTYRRPGLAGLRQRGRAGNARRSSPDRGLRGTPIPTELITSAVGHPPIPGSAKANCGMGSDECVMDALDEHGSARAALA

SEQ ID NO: 19363 - protein, 421 aa, unknown
  TnpB Polypeptide
MYEERNHKIRENGKATRERHSHMDCRVISVKIQENRLSKAKLEKLKRFFLEGKWLYNAVAASETLVLDNTKTVQIKVKDTFEEREINTLSAQMKQSIVDSVKTNISNLSKAKSKGLKVGKLQFKKECNEINLKQFGQTYAIKGKNKIRVQNIGVLTISGLEQINLDEVEFANAKLIQKPSGFYINITVYSNKQPQVQAEKEILGLDMGIKDQLTFSNGVKVNFYLEESEQLKGLTRKLNRQHKGSNQYKQTLNRIKRIYEYYNNKKKDVVNKLNSVLSKNYIICFQDELLNQWKRTKSKRRFSFGRKVQHGILGRVKDKLKKNTSNVMLESSVPTTQTCPMCGCLTKHSLDKRKYCCSHCGFENQDRDVHSANMMVLLSGYGTYRSLNTDAVSTEKMVGFLNNLTNLGVVVTTNSMEARGL

SEQ ID NO: 19364 - protein, 381 aa, unknown
  TnpB Polypeptide
MIKRAYKYRAYPTSSQEKMLLKTFGCTRVIWNACVSSFNSYDKETNPNPKIISKSDLIENKPWLDEVSAATLQQKQRDFIEFSKQYFNKERSKKLGRPNFKNKHGNQSFRLPSPKFKISENKVRLEKIGWIKISIDRNIPDNSRLISCTVSMNRSGQFFISILVETEQYNKLKTGKTIGIDLGIKTLVTLSDNTIIDNPHYLRESQAKLKRMQQNLSRKKKGSKRRDKCRLKVARLHQKIANKRSWLIHNITTMLVNNYDIICIEDLNTSGMLKNNRLAKSISDASFSMFRSQLEYKCDWYGKEIVVIDRFYPSSKTCSSCGWKKEDLTLSDRIFVCENCGNKIDRDLNAAINIKRMGVDILYNRTSSDKSTSRVETSKIP

SEQ ID NO: 19365 - protein, 403 aa, unknown
  TnpB Polypeptide
LKNLCRAKTIPQKTNFTFLNQNNEEKSGLNIPLDYTCCDSQIITQQASLVPTYNIKFQDKWYLFQAKIPKFIQNKLDNEKIEKFCKPKFQLINQKWYCVISYILKKKQKNVSNKSEQQIRSMGVDLGLVKNYSASVVKFEQNIKNEHYRILQSKNITSELLPSRESNSLLRKVNKLNGILKSIYQKIDFYKCLKDGLLNNQKVIFYKNKFFKIIDTLTDLENKIERLLLEKMFLRKKIKNIKKHKSYCIARDIVKQIKYLKVNVLALERLNWVENKGGGWDFSQQQEIIQQKVMEASCSGFIPYSIDIVKVNPAYSSNANPYLDWLITEEDNNVPKSKPDILKGNKNGRSIVFKHKNKKMIMNRDHLAGINLSLRGIKKKFESMKILNGKDDNENLLTYALIV

SEQ ID NO: 19366 - protein, 418 aa, Halobacteriales sp.
MEVRRTVLVKLDVDSDDAALLEDTVDTFLWCAQYVTDHAFQGEYVTTNKPTLDDETYDDVREATDGFNGGLVQAARNKAADACKSVVARWKNGKKASKPRFTSPHVVYDHRTATFYDEYVSLATTDGRIEADYVLPDRDSDTPHADYLFTEKYETTGAELHYTNGNWMLHIHCKRDVESDTAEQATPENGPVLGVDLGVNQLAVTSSGTFWTGDEFDHWRREYEKRRGDLQEHGTRWAHENIQSVGRTEEGRFKMTLHRISNELVAEARDHGCSVLAFEDLTDIRERTGASWGHKWAFNRLYEYVEYKAEEHGITVAQVDPENTSRRCSTCGFTHPDNRDGEEFECLKCGYQNHADYNGAKNIGLRYLRRNQTGDGGGAPLGVRLNSGTLNVNGAYEPPASPEARTGVHAESHPCTGG

SEQ ID NO: 19367 - protein, 453 aa, unknown
  TnpB Polypeptide
MQQIITAKLKLITTPEQFSALRQTQLAYRDALNAVSVYAFEHGKMSNAQRLQKGMYNELRMRYKLPSQMACNVPRQVGATYKGLWTKLRQNLEHRRTKRTKKRFKGLDQAPRYVSPTVTYNYQQDYSFKIEQQVSIRTLQGRIVLPYQGYTAHVALIQRGATIGAAKLWYDKPHKQFYLLVSLEVEVADPKPTVQHQAVGVDVGQRYLATVATLEGKSQFFSGKAVRAKADHYARLRKRLQRKGTRSAKQRMIALSGRERRFKLNTNHVIAKTIVNSYPNMLIGLEDLTGIRDRTKRRKRRRKGKQVLPLTAKQRRANRHASKWAFAELHHFITYKAVLSKTSFAVKVDADYTSKACPLCGHIDKRNRPNNGLTFECQNKACGYRVRTGRVYRLHADLVGARNIAMRTFLIRQDWVRTGQLSFVPDVSDRETKAARLKRYAELRWSLDTTSLH

SEQ ID NO: 19368 - protein, 474 aa, Streptomyces sp.
MSTRRGVAGRSAAAAGERVLTAVVPVWLDRADHEAAHRGCHASALLWNRCVAWLREEWRAGRRPGREDVRRFVTALPAAERPVHAHTAQAVAYDLWDAVETARARRAGGATGVRLPWREKAYRPLVFTRNFGWRTGPAGGLSLSLGRGRRRITVPLPVFTDREGVVVDPGRWGEITLCWDGDARMWALHVSYRSSVGTAPDSPAGRGEERVVTVAVDEGVINPLTLVHRAPDGVHEVTVINGRSGRSIKRGRNKAVGRLSSMMSRCRNGSRRHRRLAAAKRKTRSRAKARLRDFNHQVTAKAAEVVRAAHDRHQGAAPDGVTVVVRVVVGDVRGIEQRTARRRRVHRSTRQQLSQWDRGTHEHQLAYKTGLEVEHISEAYTSQSCPRCGRRRKVRGRWYACGECGLRLHRDAVGGVNILTLADNDGTLVPVGPSLAVRVTYLRAQPGWGPLQRALHSRHQRARGRAGAGRRGSP

SEQ ID NO: 19369 - protein, 391 aa, unknown
  TnpB Polypeptide
MLFAGIFSHKGENMGNRAIKYRIYPTYEQSKLFAKTFGCCRKVYNLMLAYQIERYQSTGKFGSVTPARFKKEYPYLKEVDSLALANKQLDLQRAFRSCFSKSRKKKNGFPKFKSAKHSRKSYTTNNQNGTISISGNAIRLPKNGWVKAVIHREPEQEWNIKSATVSQESDGSYYISVLFAFPDAVNDYAADLRNAIGLDYASNGLYTDSNGNSGSNHKYYRESHAKLARAQRRLSRMTGSRKHEAKSNNYMKQLRKINKIHRHIANQRKDNLHKLSTEIANLYDVVCVESLNMKSMSNKGFRNGKATLDNGYGMFLSMLEYKLQDRNKYLVKADKWYPSSQICSSCGYKNPMLKDLTIRKWDCPVCGSHHDRDENAAKNILLEGLRILKAA

SEQ ID NO: 19370 - protein, 442 aa, unknown
  TnpB Polypeptide
MKIITSYNVRLKTEYISAMKQTVMLYTDAVCFYMDVILEEWNTFAGLSTNEAVLCAERLSHATTAHPAPKYDFDGRFPKFPCYLRRAAISSAFGKCCAYNSSLANWEKLNPAVRKKAPGRPRITIEMPAFYKGNMFVRTGDYTARLKLFFRNDWQYVDVGLRKCDVDYLLRHCGSRKESSPVLRHCHKVWELCFSYEEDRILNKTPVSGQRILAVDLGIHNPCTCCVMTSDGTVLGRHFYKAPVEEDSLNHKLGKIRKAQRQGSQRIPKKWASIHGTNTSLSRKTADFIISMAVLYNVDVIVMEHLDTSGKKRGSGKQRLHMWRKTAIWKQTELQAHRLGIRVSRVCAYNTSRLAFDGSGRVLRGREADLGSYSICQFRTGKIYNCDLNASYNIGARYFIREILKPFSEKEKLPVLAKVPDCGKRSTCTLASLIRLNAVLAA

SEQ ID NO: 19371 - protein, 403 aa, Lactobacillus sp.
MKQAVTLKLRILLAAEEAQLLQETMRQFAVGCQLVSQYLFDHGFVLDQYALHEALYHRLRTDIGLKAQMAQSAIRHVIGNYKTVQTQMKSEPYAFKDCYTGQWTRCHRDLTWLRRPLQYRKPQLTLVRNRDWSWLQDGQLSLNTLAKRLRVTPYLNGFEQYLTSDWQLGTATVVRTGGHYFLHIAATKEVATVNRTQVKDIIGIDRGLRFVLVSHNGAGQTNFASGRAIATKRAKYHRTRQELQQKNTKSAKRCLQRLSGRENRWMSDVNHRLSKTLVSQATPKTLFVVEDLTGIRQQSRRQAQTRRERHSWSFFELEQDLRYKAILAGHIVIAVSAQYTSQRCPKCGLIEKTQRDHKHHAYRCAACGYQSNDDRIAAMNLVTLGQQYLSGSHHPRFTKEVVG

SEQ ID NO: 19372 - protein, 390 aa, Xanthomonadales sp.
MYNVRKTKIGKTEQMDALAQASGDLYRRTVLSFWRTVRHKDRWLSQYAMMRWQNSKQLHAHSADAAVQSFFAALKSWRALRKTDPKAKPPRRFGKYFRVQWKASAIRLRNGSLILANGKGNEPLIINGWEYGLPALVEMGWDGKQYELRCIYKSEAPPKIVGGSVAGVDLGEIHLATVVDGKGAIIVNGRELRSKKRYQNKLKGQLSGMIDVKKKGSSRRRRLIQSKQRQLLKLKNQIKDIHHKQTTRLVRALHERGVGTVVIGDVKDIRDGLDYGKKTNQKLHQWTCGESRRMIEYKSERLGMECILQEESYTSQTCPACGCRHKPRGRVFRCPSCGLVCHRDVVGGANIRAKYLGTFGSPVVGAMASPTGVRFRPDMRCSSGGMLDAS

SEQ ID NO: 19373 - protein, 428 aa, Clostridiaceae sp.
MPVNEVINISHKILLIPNNKAITHFRKAFGCSRLAYNWGLNKWQEYYKQGIKKTHLELKKEFNSIKKEEFPFVYEVSKYATQQPFLHLNAAFKKFFRDLEKGKISYPKFKKKSKNSGSYYIGGDHVVIKDEKYLKIPNLGLVKMREKLRFDGKINSVTISQNGDKFYASFSMQITKQTYADTHKKPKRNNIALGIDVGLNSFLSLSNGLEVKAPKPLKKLERTLIRRSRQLNRKQHAKTKQEALDGVESSKNFIKASRKLNKLYSRITNIRKDYLHKLTSSLVANADYFCLEDLNVQGMMQNHRLAKSLSDVSFYEFKRQLEYKAAYNDKQIIQVDRFYPSSKMCSKCGNIKTDLSLKDRVYYCQTCGTIIDRDYNASLNMLSHLQKAIGQVRPEFTLADLTALQLDLAINQIVTSKAEAGIQQKYCA

SEQ ID NO: 19374 - protein, 358 aa, unknown
  TnpB Polypeptide
MPSGAYNSLLNWRKHDYEVVGKSPSWYDQKKGITAWKADHPELSEVHSQALQDVSVRVDLAFKAFFRRVKGGETPGFPRVKGYGYDSFCFPGTGYAVVNGGVRLSKITEPNSTIKMRLHRPVVGQVKTCTVRRYGRKWFVCFSVEQDNFLPNSDEAIGLDAGLNSFLALSNGEFVANPRFFRRDEKELAKAGRKQAKTKKRSRARKKANKVLSRIHERIRNRCHDFVHQTARRIVNRFGVIAVEKLGVKGMVKNHCLAKSISDASWSMFRSILTSKAESADREVIAVNPAYTSQDCHACGYRAKKKLSERWHFCPNCSASLDRNTNAAINILNSALSQNLNGITLSQVIPVEAPRFNL

SEQ ID NO: 19375 - protein, 456 aa, unknown
  TnpB Polypeptide
MQVVKTVKVPVHYATTKRKLGILERLTARLTHGVALWSKLIEAHNIRARGRLRDRNLERKVKDRTGLSAGLVQCCGDTALWMWRSYREQHEAWLRRLRTAQKQGDERWVKKLLKREPQKPFSNGVKRKVPIWFDYRIGRLEGARDIKVASYVIRMATLKGGEWVTIPLNPAPYHIELLEQGMIKSFQVVKKNSKYYIHVKVEYEVPDKPVTGVLGVDLGIKRSAAAVLLQPNMKLSPKSFLIIREGEKRHRLDQLNRLISKLQKARKYEALKRLRHKRGHVAEYLDRLSAKRLADLSEGCLLAAGCPKGVKYDNFKGNGRKRLRQLLTGWGYGRIIKYVVEERAERGLPTEAVEERWTSRTCWKCHSRNTERINQSTIWCWNCCKYFNADYNAAINIGLPFLAKAAGRGAEVEPAQTGDEQAREIAACKPGSQHPSGVGSSQGAVILTISRKWCTR

SEQ ID NO: 19376 - protein, 404 aa, unknown
  TnpB Polypeptide
MAVRTIQVALPYDQSLVGTAIAFNRACQMVLDYGSQHKTVRKLYLNQGTYKQVREAVPLLPSALVQTARDEASEMLKHYKKTHKRFGHIRKEGLSIRYDNRCFKFYPDSNLVSLTTVAGRMAFGFKHYAYMDHWKGRYTNAQLVIRKHRIFLNVQVQLPDFHVKQPASFLGIDVGIINTAVCSDNTFYNSKRLRAVKGRYQFLKRKLQHIDTRPAHRKLQQLSGRERRFVLNTNHCISKAVVSKPYDAFVMEKLTYVRRRGRGKKFNRKLGSWSFSELQRFVEYKAEQLGKTVIYINPLRTSQTCSRCGYSYKYNRVGSMFKCRRCGFTLHADLNAARNIGALGRSGCLRLSVNQPIVASDEPAATVAVDGQPQAQGGQFCFYSRGCPQPFRGGWFTCSQRRSS

SEQ ID NO: 19377 - protein, 327 aa, unknown
  TnpB Polypeptide
VTFKARKTIRTKIVYLTGTKRRLLEDEYENLQRFLHGEDTALYSANKQQALRYYKEIKRGKECPLSIRKDLLKIEKQTTEIVSYWARIPVKGRRGGVWVAIRPHCPIEPNMEVCESKLFKHNREFYLHIAVQKEVEAKKCNGILAVDMGIHNAAVTVNSKTKNTTFYGKKIRAVRGHYFYLRKHLPNRKTVKKVGSHENRIVNHELHKISKSIVQEAKETNSTIVLGKLKGLRRNRGGRRFNRKLNTFPFRRLSYYIRYKAEWLGIPVLEVSEATHRRPAPAAATPTSTTASVQCSSAVAVASPSTPILMPPETSGHSAGLGASGCP

SEQ ID NO: 19378 - protein, 297 aa, unknown
  TnpB Polypeptide
MNISRSPRNIRGGRSTAGGASELLITDRRLYITFVTSGGKKKPLGSRFVASDLNFNTIDSTVAIKQEDGGGDDGGTIKLDSVETEPVERIARIQNDFSRRRRRIQLHIKNPQKRAKKLKETRGRQRDRIKDALQKLSTEQVRKNPGASFVFERLTGIRENGNAKRSKRLRTYLNRWPYRMYQSMVEYKSPFRTVYVSPGGTSSRCPVCGGRLEHPAWAMSRCNTCGADYGRNRLASLAILCRGMRLCGQPFAVSADASWRLMRDEYLYAPAVPDSRGAGWTEAANAPNGSVYENIHS

SEQ ID NO: 19379 - protein, 408 aa, unknown
  TnpB Polypeptide
MIVLEMKAVVQLHQQDLIDDAIRTVQFIRNKCVRLWMDASREDNINKAALSRYSAQLAKEFVFANELNSTARQASAERAWSSIARFYDNCKKGIKGKKGYPKFQKNNRSVEYKHSGWKLSEDKKKITFTDKKGIGTVKLKGTRDLNFYPVDQIKRVRIVRRADGYYVQFCININVLDYAQPLEPTQECVGIDVGLKYFYADSKGNTVKIPQYYRRAERQLNRLNRRKSKKFRKGQKQSNNYKKARQKYARKHLRVSRQRKGFVEREAWRDQQSNDLIAYEDLNVKGMVKNHCLAKSINDAAWSTFRQWLEYFGFKYDKETVAVPPHNTSQNCSNCGEKVEKSLSTRTHKCPHCGYVEDRDVNAALNILKLGLSTVGHTGTWEKSLKAQGDSSSGSIGQDLSGDDESGN

SEQ ID NO: 19380 - protein, 407 aa, unknown
  TnpB Polypeptide
MREVKAVQIPYQSNEEVLGILGAFRNTVNYCIHVDLQKNITSRFRLSNEVYNRLTEFGLHSWYCLSAIEVAAAILKNYRRAKRRNKDKSINLPYARRLVTKLGNQTYKVIGDKLRIPIKPRQYFYVKLHKRALEFLSDATLKLGSITLTARRISMVFSKTTKVMEPKHMTFDVNEKSIVGARVEDDEIKASIFYLSRIYEVRHGYFERIRRVQAKYAKDRRVAKKIQNKWFDNQKNKVNSILHKVSSEIVKEAKAKEQGIILESLTHIRRAINQKIPGINKYNGKRELISRYSKRHKRRLNSWSFKKLQSFIEYKARWEGIRVIYANAKNTKFCSICGYTIEPKEQNCSRCGIDRHVNACLNLLRTQDESLRFRLDRSAYVAMSSPLGYEQKRSQVSKTYHMLIRYK

SEQ ID NO: 19381 - protein, 396 aa, unknown
  TnpB Polypeptide
MVSDTDYHRRTLITRLNIRTEADEQLLHDTINEWVDGANIGSTLAWETCNTKSAVRNLAKDEIKQKTKLGDQHATLACHEVASSITSCIERRKNGKKASKPQFTTRSMTFDRRTLTVFPDQEKITLTTLGDHGRVHADLCLPDDEDGYQYEYLASDDWEYTESTLHYRDGDWYIHLGYRTPKDEAEATTENGTVLGVDLGVTQIAVTSTARFFDAGELNHYRREFENTRGELQQTGTQSAHRTIETLSNREERYVKHVLHAVSNGIVEEAIEHGCDGIIFEDLTDIREDLPEAAWHSEWAFRKLKEFVEYKAEYEGLFIDTVNPRNTSKRCNECGFTHDSNRHRGEFECVSCGKSNHADYNAAKNVAELYLRRGHQPSGRRSVSQYALKSGARTPS

SEQ ID NO: 19382 - protein, 404 aa, Cyanobacteria sp.
  misc_feature (186)..(187): Xaa can be any naturally occurring amino acid
MEIKRMVPILLPKDPDLLATVQTFQQVQQELSGSCYNKGGKPLGAIALQHKCYDSVKGKLSAQMTISAIRLVAATYKTAKSSQKPITKPFDFRRARALFLVGQRGRDADFRADGTLSIWTVGGRKRLNYQVPKALQYIFSKALEIDSLTVIEHDGKLVGRVRVTLEAPEPKGIHPVGIDLNETNIXXVAVDADDRELFISGLSTKVRNHRTHKTRSRLHKKLATRKAEKKDTRSCRRLLKRLSRRQGNRTRTFCSQVAKQLVDWVKPNSVLVFEDLKMPKVSKKLRVAKGAKRRLSQWEHHLIRLNVTNKAQERGMVIEYVNPRYTSQHCSKCGLRGKRKRHRFECPHCGHLDHADKNAAINIRNRYTVLRSQGGESQSVGSEAQEKSEGKPRHQSQVTDRKYP

SEQ ID NO: 19383 - protein, 373 aa, unknown
  TnpB Polypeptide
VLRRTFKYRLYPTEDQLQILAYCLTTCRYPCNGVLEDRKNAYDCCGVGLTYNEQAGQLKYFNLGVYSQVAREVIRRLDKAFQNFFRRVKNGEKKVGYPRFQGKNRYDSFKCPQSDFKIKDGKLHLSKIGMTRIFRHREIEGNAKTCKIKQYGSQWYACFAVELLDSEKKEINTSAGVDIGITTLVTLSDGTEIENPKTPDKHDSKLRKAHRCLSQKKSGSSNWNKQKIGIAGVYRKVRNARKDYLHKSSRILADAYNRILFEDLQIKNMVKNHHLARSLHGVSRSILIGLTTYKAEEAGGIVEMVNPINTSKQCPVCGCIQSMPLSQRTYQCPDCGAVMSRDHNVAINIKNRYVRADCPELTPVKKGCMSNRY

SEQ ID NO: 19384 - protein, 261 aa, unknown
  TnpB Polypeptide
LLHLSKIGDIPIRVHRQVEEKVKQITIKRHSSGKWFACISVEVEEEISVNNVNNVIQREKRVIGIDVGVKHLLTDSNGRQIENPKFYEQSLQRIRIEHKKLSRKKKGSRNREKQRIRLARAYEKIVNQRDDFLHKLARFYANNYDVICVENLNIRDMVKAGNHNLAKKILDASWSKFLHMLEFKAERAGTLVVKVNPRGTSQEYKHGKIDRDYNASLNILERGLSVSGLGRSFEPAEMEPLLAIPASSIVEAGSPQPFRGG

SEQ ID NO: 19385 - protein, 381 aa, unknown
  TnpB Polypeptide
VEVVLSVPFSYNISDEVRRLLEDFRDMVNFCIDYAFKNQITSYAKLRKDIYGKWKNRWDYSTHYCHSACKIALAILKNWRRRMKKGGVRCEKPVARKLFMQLDPQLYKFYGDRIRISVKPRQFLFIDLKFGEYQRRFIEAWMRGELKTGEITINESKIVVPFKKYVDLSNPSDWIAIDVNESNVTGVSTNPHLLRIDTNMREIKSVYFEKRRRIQRLSKHRPLTAMRLLKKYSKRERNRVKDLCHKVSKRIVEFVVKYNFGIIMENLKGIRKSIHYNRILNRRLHSWNFRMLQFYIEYKAKFNGLPVEYVNPKHTSSLCPICGGKLAPNGHRLLRCDACGYKADRDIIAAVNLLRRNPRCGESPLPPKALNESLIEVRGKG

SEQ ID NO: 19386 - protein, 299 aa, unknown
  TnpB Polypeptide
MLKHSQKKIMPKSFKYRLYPNQEQREAIDKILETCRWLYNYFLAERRNKYEREQKRISYTHQQNPLPSLKETNSKLQGIYSQVLQDVAQRVKKAFRGFFLRLRNKTEKVGYPRFKSFGRYDSFTYSQNNGSYKLEQGQLRLANVGKVNIRLHRELMGEVKTCSIIVKNGKYYACFSSEVEPKLLPKTGKKVGIDLGLTSFLATSDKELKKAPKTYRKAEKDLAKAGRKVSRRIKRSQRRKKAVILLAKQHEKVSNQRKDLAHKLARELTTKYDLIAHEKLAIKNMVKNRHLAKSINDAG

SEQ ID NO: 19387 - protein, 677 aa, unknown
  TnpB Polypeptide
MNSKKAKVKIKNEKLDLMIVSKTPLKNIVKSDDLNNKINEVVCRVNKIVIYTCQFLNLYLIYLFDNNIEFPDIDEKIIKTIFNIITIKVDGRGKKPSDNTEKQIKILEDFYAKHYKQCIIDSDIINIDKLSYILAYEAIDIVKNIKNNITEHFKDYINKFVNQSFDIKSVNQDIRNMNFDKESTKKYINQSYADLRLVKKDLLKSTDNFESDEIFSDWLKLHKPNIIRKNKFNKDSIDYDLCSNPSDYLKSLFYMNKELEKINDKRIKKNEEQFKLFQVIPQRTNIKPNYITLDTCSLINLTITENFKKYLDKVEDCQSELWDKNFMTDRKEFKRNNYKFNYMIKTDGVGCSVLLVKLKDGTPVYITSKMQKNVKTKLESLDKYIENVEITKEMKNKRIVTCDPNLSDIVYCVSKNIKEKVIVDENNKLKVIDDEEIITFRYTQNQRRLETRNKKYNKLQDSINKETKINKRTVKEIESELSNYNSKTTNYSNFIEYCKKKNKVNRILFAHYSQKIFRKLKFNRYTNTQKSESKMIKNFSNKFGKPDECTVILGDYDKGEHNMKGKEPIINRRIRKIFRNNGYNVYKINEFRTSKLCNKCESNCDTFHKRESEKPKDLDKKTGKKKVIEVWGLTLCSNNKCSQIHNRDKNSALNMYKIVESIYRGEGRPKKYCRETK

SEQ ID NO: 19388 - protein, 407 aa, Streptomyces sp.
VGWLIRAYKFLMRPTAGQAIALGEMLRDHCSLYNGALQERRDAYRHPSRTSVRYGMQSGQLKDIRAFDPEHQGRWSFSSQQATLRRLDKAFSAFFRRVEAGDKPGYPRFRGVNWFDTVDFPRNGDGCRWDSTPHTPVTRVRFQGIGHVRVNHHRAVTGTVKTISVKREGRKWFVVLTAEQPLPEPLPATGSAIGIDLGIASFLTDSNGTHVSNPHHARKAARKLEAAQRSLSRFPRCRAKDRTRSHQRAVEKVAALHRRTRRRRIDHAHKTALTLVRGHDFIAYEDLKIRNMLKAPSPKPSADAPGLFLPNGASSKAGLNRSITDAGWGVFVTILNAKAESAGREVVAVDPRNTSQRCPECGHTARENRPTQEKFRCVDCGHQAHADEVGALNVLRAGLARRDANTA

SEQ ID NO: 19389 - protein, 468 aa, Streptomyces sp.
VKIMGQEIAYEKRQFGHRARLALTPAQVRLMDDQGHAARTTWNLLHDFWTMTPKYRRDLKAADEAIRQARKEIDWLGVLPAQAAQAVLKTYFQAWKNCWEGRADEPNFKARIRTPLTVDVPQGRDLNIVRINRRWGEAQIPKIGRVRFRWTRDLPIGKRADTDNRITGARLVKDSLGWHIAFRVQTREAVPAPHTGPEIGIDFGVNLPLALSDGNHQDHSHAPRLPDGTADRDKWLTEKEKTVLLRLEQHAARLKQHRKRGEKFSGRLRAVYRRIGRLRATATRRATDWQHQTTTMLARTYGVIVVEDLHITNMTKSAKGTIEEPGRNVAAKAGLNRSIAQEAWGRTMTMLGYKTARNGGTLVKVPAPYTSQRCHACGLVTPGSREDQATFVCKNSMCGWTGNADENAARNILHLYRIGHTVVIPAAGRAVVRRRKPSNPPAQARRESPSFTTPLGNAETGLVVRLSG

SEQ ID NO: 19390 - protein, 389 aa, Streptomyces sp.
MLYMKIVVQVKLMPDAVQASAIGATLRTVNDCATWVSSVAFAHGVPREYELRKHTYAELKASGLGAQAAQHTIKKVRDAYTTLKANIRAGNLGRPGSRRRVKAESKPIMFRPDAAHPYDDRCLSWQYDAQTVSVWSTAGRLKDVRFACSPDALKTLREYRKGESDLIERDGVFYLLAVCEVPAAPVNEDPSGFIGVDLGIVNIATASTGYRAAGRGLNRHRKRQLALRRKLQAKGTQSAKRLLKHRSRKEARHAANINHIISKQIVTTAERTGSGIALEDLTGIRDRVRLRKDQRAQLHAWSFHQLGSFLEYKARRAGVPLVYVDPAYTSRRCSQCGHTDRKNRVDQATFACRACGFLANADDNASHNLARKGEAVWTAGRESRVPATP

SEQ ID NO: 19391 - protein, 393 aa, Collinsella sp.
MDKTFEYRIYPSAEQEALLQKTFGCCRWVYNRVLAMRRDEYARTGKSRHINSYITQIPAWKRADAPWLSEVDSMALQQSLRDLDKAFKNFFRAPGKVGFPKFKSKRAGRKSYRTNGVGIIDARHVRLPKLGTVRARVSRPVEGRVLSATVKQVPSGKYYVAICCADVPATDAPAPTVGFLGVDAGIHDIATCSTGERLPNPKNLQRSERRLAREQRRLSRKRKGSANRARQRVRVARAHEKVANRRKDALHKFTTHAVGESQNIAVEDLNVRGMQRNRRLAKAVGDAAMSELARQLEYKCAWSGRGFVRVGRFYPSSKTCSACGYVYRGLTLAERVWDCPACGMRHDRDLNAAVNIAREGRRILEGTAGHAGTAADAANACGEGVRPTAACAV

SEQ ID NO: 19392 - protein, 402 aa, unknown
  TnpB Polypeptide
MRTAYKCRAYPTPEQATQLGRTFGCVRVVWNQALSARHQRYHTTGQSTSYAETDRNLTDLKQRPEFAYLNEVSSVPLQQALRHQHTAMTNFFAKRARYPRFKNRHGRQSASYTRSAFRMKDGELWLAKSSAPLRIVWSWPDIDLATLNPSTVTVSRDPDGRWFVSLAVDIDAPEPVEPTHGPVGIDLGLKDFAVLSTGEHIPHPKHMEQRERRLKHYQRILNRKQKGSANRAKAKVKVARAHSKVRDARRDFLHKTSTRIVRAHSAIAVEDLNVAGMVRNHKLAKSISRTGWAEFRSMLEYKAHRDGRTLATCNRWYPSSKTCSNCGHLLSKLSLSTRAWTCPGCGTRHDRDLNAARNIMVAAGLTETQNACGADVRHGGQPPVRSAENQETRGGDPGNLLP

SEQ ID NO: 19393 - protein, 212 aa, Okeania sp.
LRTVAESFHSYYGLIIAYREGKISDRPRIPNYRKKGGMATVSYPKQALKLKDNQIRIQLGNTCKRWFGVDSFLIPMPSNLAFSTLKELRILPRNRCFTQEFVYEKEVIVKPLLNQENVLGIDHGVNNWLTCVSNVNTSLIVDGKQIKSMNRWYNKQVSTIKENQPQGFWSNKLAAITEKRNRQMRDGINKAARIVINHCARKFYWYNCFWLE

SEQ ID NO: 19394 - protein, 511 aa, Vulcanisaeta sp.
MLCRAVAVELEATKELNRLLCSVESVYLGIVREVVEYAVTNNVTSAKQLQGLFYSKYRSEYPSLNSQLIIQAIRQAAEVAKSFVERRKKGLVSKPYPEVKTVSIRFDETAWNYEQFIRSTAPVRVELSLLGGRREVWLRLHKRFWQYWWKVLSGEARLASTLVVKRRLNKWYAIFVFEIKPREEEPKSIISFDINENTVAVGRIDIETTVGKVVDWNRRYATPQLYEIRTDFGRLARRYGRVRNAIIERLKPHFALPSGKYVNVTNTREFRKQVRKLRERGRKVGRVRHVASELTKTPAIIVTEDLGGKPQDEMINGINKSELRHRIKQTPFKKLEEAVEDKALERGSRIFRVSSYRNSRVCPVHFTRLEGTDDWHTLYCPRGHYVNRDYASVMNMTWKTTPESWTKGVWWNMKKDMNWREYEGKSNPIIPYEIVKHIHAMLKTFTASLEQSPAMPARAKPMNPARGANEGRARKPPKKGRRPAYPRVRRRFTKNLPKYYYRNSHKGEVKR

SEQ ID NO: 19395 - protein, 251 aa, Vulcanisaeta sp.
VRGERKTIQIESPKGNKVASIDLGINNLASVVVDDGTWILYKGIRTKEDYFYLQRRIAEIQSLRDSLKDKLLSDAIDELNHEVRRLFGKLRRRLLHLYRNLANHLIEKLHELGVSTIYLGYPFNIVQERGNKFTVNMWSYRKLMEAIELKAQEYGIRVFIVIEYNTSRYCAYHNVEVKRQPRGVIHCPKGHKLHSDLNGALNIMKKATGKIPLIIKKPLSFTVDHNQVAPTKREVTPKTPTKPAQKAGRGS

SEQ ID NO: 19396 - protein, 478 aa, Vulcanisaeta sp.
VVFVPSLGELSRESWGPAPTPAGIPGEGVYPVEFSNRRTNVVRLLPNSAQERKLRKLADACARLYNELNYERRQQFFSGNGVDFKGTWNKYYNKYKGVLGVNAQAVMQKNNEDWSSFFSLLKLKREGKLPPHMKRVSPPGYWKDKETGKRRLIIVIRQDRYVVDVERRILILKDFNMEIRFVGRLRWYGRQGRLEIIYDESKGAWYAHIPVEVGVEVTKTGNKSKHIVRGERKTIQIESPKGNKVASIDLGINNLASVVVDDGTWILYKGIRTKEDYFYLQRRIAEIQSLRDSLKDKLLSDAIDELNHEVRRLFGKLRRRLLHLYRNLANHLIEKLHELGVSTIYLGYPFNIVQERGNKFTVNMWSYRKLMEAIELKAQEYGIRVFIVIEYNTSRYCAYHNVEVKRQPRGVIHCPKGHKLHSDLNGALNIMKKATGKIPLIIKKPLSFTVDHNQVAPTKREVTPKTPTKPAQKAGRGS

SEQ ID NO: 19397 - protein, 371 aa, Bacillus sp.
MILAKKIRIVPTKEQEIQLWKSAGTARFTYNWALAKQQENYKQGGKFIPHTVLRKIFTKLKQVPEYAWLYDVSNNVAKQAMKDLCSAYANFFKGLADKPRFKSRRRSKPSFYNDTDKLKVKEKLVLIEKVGWVKTVEQLPIGVKYTNPRVSFDGKYWYIAVGFEQILPNQTATDVSLGIDVGIKELAVCSSGKRIKNINKKKKVKQVEKRLRMLQRQVSRKYEMNKEGNRFVKTSNIIKIEKRIRHLHRKLTNIRTNHLHQATNDIVKTKPYRIVMETLNSKGMMKNKHLSKAINEQKLYEFKKQIQYKCEKYGIEFIEADKWYPSSKMCSTCGKIKKDLKLSNRVYRCICGHEIDRDLNAAINLSRYQLA

SEQ ID NO: 19398 - protein, 310 aa, unknown
  TnpB Polypeptide
MNMNDQNIPYPVKNRGSPCRLGTSGFRDPGNPHQRHVFLGIDINRASANLAIIGCMDSINVFTKTFTSELKSMGLAHASNYVGIIGNYLISHVRVVFPSFNDNEIEKLLTVAFTSWGNLSNAGWMDFLRLGTTRFRQSLRQERRREAMLMIDALHVAVSFMRSMGMEVALGIEDLHAMEKIGAMYDFEIDFINFLNNIESMFHLNPLSVERVETRLNTGTTWSGSLMRGNNVYLILLNPMHTSKLCSSCMRRGQINEVRRFGRRNILCSHCGSIIDRDENAAVVIAVIAMLMLGGYLPQTSMRQCFKHPH

SEQ ID NO: 19399 - protein, 625 aa, unknown
  TnpB Polypeptide
MGKKKKKEFEGFRKSEKSPYKTIKTTLKSILRNKTEVLPCINNLVCELNDLVIHSYQFIRLYILECFNNKEEIPKINDKFISYCIKTLGVRDNRGKKSKDTELLDKLHNFYESIYQPLLNHEPVSLKNKSYMIPYLAIQIHTSLHNNIQERFCQHLLRFINKTTTHLECDKSTLFQFKKQLFQMEETDVLFDEWKHTHLHNILPSEIKKSIYYEVKVKPFDYLKGMLYMNSVLEKEGHKLFQPLPLRNNIIPKHIILDTGCIVDYFTPKVDNEGNKIKKGELLKAIKENQYEVWNNLLNLQHKIFKNKHYQFHYQIQTDGFSCCLLFIRKDLKDKKWGSKLPVVNDDEFYNIEDLPKETLDTLKNKTIVGCDPGKHSLVYMMDDKRNKLQYTASQRKVESYGKRNQRILLQEKKRNNIIQKETELTLQNSKSVDVEVFKRYLVEKTKLNEEVKEFYQREVWRKMGFRQYSYGKKSIDTFLNKIKETFGENLLIGYGNWSRSTQMKHIMPTMNKGLRKLIHKKYDTITINECYTSQKCCDCFGDLEYYRNKQLKKEFRLLVCSNCVSCENKKIVFRTRDANSAINIMKLTKLWIEKQERPCEFQKTNSSFTISDCKRNCMEKVRPS

SEQ ID NO: 19400 - protein, 408 aa, Pseudoalteromonas sp.
MVIRKAYKFRLKTTPDINAKMVQYAGNCRFLWNKALAINLFKLQNKQKICYYQELDFFSKLWKKSEEYGFLTLSPAQTIQQTLKQLERAFKDAFDKNQPLKRMPTFKKKGEVNSFNFPQGFKIDKNGKRIFLPKIGWVNVRKSQAILGKAKNVTVSQKGKHWFVSIQVEQEVAPPKHPSNAMIGGDLGVKRLITLSDGSFVEPIDTSKQTIRIKRLQKQLARKVKFSSNWKKLKAKITTFHTKVANIRHDKLHKISTQLSKSHAIIVLEDLKIRNMTKNSKGNSEQHGKMVKQKSGLNRVILNQGWGMFKEMLKYKQDWLGGQVIFVDPKHTSQTCPACGHQSKDNRLTQSKFECAKCGYQDNADHVGALNILARGHRVLACGEIDISQLVEAGTCLMSDHKAPMVLN

SEQ ID NO: 19401 - protein, 414 aa, Actinomadura sp.
MALRGLSVAIGMLWGVSQFRLCPSPAQEAGLLEHCGHARFVWNLAVEQQAWWTPRRGPAPGYVAQARQLTEARAANPWLAAGSQTVQQQALKDFAQAMANFFAGTHRRPTWRKAGVHEGFRIVGARGRAWDVRRLSRRTGEVRVPKVGWVRFRWSRPVPPGVKSFRVTRDRAGRWHVAFAHVPAPVPAPGNGEAVGVDRGVAVSAALSTGETSTVPGLTPGEAERLNRLLRRLARAKPGSNRRARVKAAIARLKAREADRRKDWVEKTSTDLARRFEVIAVEDLSVRAMTRSAKGTNDVPGTNVRAKAGLNRSILANGWGRLVTRLEHKAPGRLVRVDPAYTSQTCNACGHRARDNRESQAMFRCVACGHQDNADVNAARNIRDTAVGRTVAAQGGGAAARPVNREPPPALLPA

SEQ ID NO: 19402 - protein, 388 aa, unknown
  TnpB Polypeptide
MLLGFTTKLKLNNQQRTVMAQHAGYRRWLWNRALSWWSIAYKEGLKPTANKLKKFYTKHVKPSYPWQSQLSSKVYQYCFQDLGNAFENFFKGASYPKFKKRGVNDSFTIDNSGKSIALKGVKTKLPFIGWVSTYEPLPECQVKKVTISYRAGDWYISFAYEQNRTGPPKAKTSVGVDLGIKALATLSNGKVFANLHVYRLAERKLKRLQRSLSRKKKGSANRLKARFKVALAHRRVADIRKDYLHKLTSYLAKNFETVVIEDLSVSSMMANHKLAKAIGDLGMYEFRRQLEYKCQLYGTELVIADRWFPSSKLCFGCGHVKDMPLSERVYNCDKCGLVLDRDLNAAMNLSNWGRLAPGCLSDGVPPTVPVEAGSKPQCPDMSGVVSVL

SEQ ID NO: 19403 - protein, 310 aa, unknown
  TnpB Polypeptide
MKTYKFKLYSNHGNRELHKTIDGHAHVWNHCVAFQRRYYGIYGKYISKFRLINHISKLKRLPTFAHWNPLPSQSIQDVAARIDKGYKAMFEARATGKTWGRPRFKACRKYKSFTLLQAGWQLLPGNKIRIGKCVYHYFKSRAIFGNPKRCTIKRDAIGDIYICILTDYEASNYNRVMTGKIAGFDFGLKRYLTGHNEHDIDSPLFFNRSLNAIKQANRAHSRTKKQSKNRERARLDLARKHRKIERQREGFHWKLAHQLTDAYDEIRLEDLNLKGMKRLWGRKVSDLAFADFVVKLKIYCGEKGCQTHVH

SEQ ID NO: 19404 - protein, 236 aa, unknown
  TnpB Polypeptide
VTISRQADAWYASFSIEVADELPNRSDETVVGVDLGITALATLSDGSPKVPSPKPLRRSLQKLKRLSRSFSRKQRGSRNRAKAKTKLARLHRRIADVRADALHKLTTSLIGYRFVVIEDLNVSGMLANRHLSRAIADVGFFAFRRQLEYKTAMAGSTVIVADRWFASSKLCSECGAKNDNLTLAQRIWTCASCGTSRDRDRNAARNLARYAESSAASACGAEGAGSGHQTAVKPAA

SEQ ID NO: 19405 - protein, 407 aa, unknown
  TnpB Polypeptide
MSDMLARGVAFRLKAELPPEAKFLLEDFRLAVNNAIRAGLQARVTSRNALSKLVYKDFRKEHPNMYAQHLVSAFEVAGSVLKNCRRRLRRNCASRVPYVRRLMMKTENQAYKLDREYGIVDLPIRAWCHVKLELLVSDYHRRYLDDPSLTVGSLTLLPDRVVVVFRKEAPRPYLPESALSLDTNERSLDGVFVKDDEARAVKAVFPDIAIIQQRHHDRRKRLQKKKAHDRRTSKRLCRREGAREHHRIEYRLHQVANAVISFAEDRRSAVVLDDLRGIRPKWNKELNRRLSLWPRRKLHQIIEYKAQWRGIPVVKVDPRNSSRTCPICGRTRDSRMGAEFECECGWHLDRHINASLNLLQTAISRGMAGGLRFNPGAFQHDVMMILYDPVTGARSEPNGTSCVGAVT

SEQ ID NO: 19406 - protein, 482 aa, unknown
  TnpB Polypeptide
MEKGEQIFIYTRKLNANKSHKEQFAKRFRMAEDIYKKTLITLLKRYSKMKKDPLYKKAYKFSKGKERNAILKELEVKYDLVGNFTAGKFANDYRNARNYSEYIPSKVAYTLGFRAWGAFSKVIFAKGAEKVNLRGTLTSFESSGNTGVSIKGDVFTISTRKKKVSCTIHNENDAFEEEVLRNTLKYNRIVRRFEFGEWNYYVQSIFEGTLPTKYTSDLEGSVGIDIGVSTIAVSSYYQTELEELAKDVTLDQREMTRLSRKLDRQRRANNPHKYNEDGTIKRGVRNPWVDSKEYLKTKAELNELHRKAREQRKLSHKTLANKIVRMGSIFVVEKLSFKDLQARTKETKINERTGKFQSKKRFGKSILHKAPAMLIAQIRYKTMYQGKTFILANTREVKASQLNHLTEEYSKVSLGTRVKMIGNDLVQRNLYSAFLLQHVGLDGVTVDLQGCKSDFDTFLRNQELTMSQLNTDLKSTGKDYFN

SEQ ID NO: 19407 - protein, 391 aa, unknown
  TnpB Polypeptide
MARKPGAARSAGEGRAIRYSTIKARLYPTPEQAELFEKTFGCCRYIWNRMLADQQRFYSETGAHFIPTPAKYKNGAPFLREVDNQALIQEHNRLTQAFRQFFRSPEHFGHPAFKRRKDGRNSFTACNHEFESGPTIYITRDGIRMTKAGIVRAVFPRRPRNGWKLKRITVEKTPTGKYHCCILYEYTVKEPVPVEPSADRTLGLKYSMGHFYVGDDGRPADPPRWLSQSREKLVRLQRQLNRMVPGSRNYQEAVQKYRLLHEHIANQRKDFIHKESRRIANAWDAVCVREDDLRDLAGIAVQENPAGIGFGAFRECLRYKLAHQGKQLLVVDRYFPSTRLCGQCGRVSAEGISPKLRTWVCPACGARLSREVNAAQNIKAQGLAQYAGKSA

SEQ ID NO: 19408 - protein, 492 aa, unknown
  TnpB Polypeptide
MYDMANSNRKKARKLQEAKQTKKAESAKKAKFVKQAKAETEKPIKYTVTAEQLDDGTFKFQCGRNTFNITKQKKKALEPYGKCIHNYGVLLELIPGDKQAAINQQIGNARVVHNDYLSKRIDYYNENKKTLTVTQYKKEYLPALKEEKEYLKDTDKFVYENACHNVDDAYNRFFKGLSGFPKYASRTKPNGNSYTTNFTNNNIELKMIDGIPYVKLPKIGNVRFILPRGKTLIDIQPQEVSIKGATVSREPDGSYRISLRMESVIDKPVFPTVINAREIVSVDLGLKEFGVFGNLEESVPVPNPRWIQVHAKRLRRFQQSLSRKQYDQNTHRGSKNWEKARAKVAKEQRKTADQRRDFHHKLSRAIADNYVAFICEDLAVKNMMQNRHLSKSIASVGWSQFLTMVQYKMERAGKYFRKISRWYPSSQTCGCCGYKNTDVKDQGVRKWICPKCGTWHDRDVNAQQNIYKLGAKMLQDEGIQIAGLPVTNKHSN

SEQ ID NO: 19409 - protein, 393 aa, Brasilonema sp.
MYAIKVELKLNNKERTLMRKHSGYARFVYNYGLALTQSLYSAGVKVSIAKQINEIKKVFTGYTKKQVENQWMNKLSSKVYQRAFMDLGQAYQRWSKGLSGKPVFKSKNDGDSFSVYDGNGKVLISPGKKIKIPTLGTFRLKEDLACSYCTQTFTISRQANKWYVSFAIDADRIPPTHHPEELVGIDLGVKCFCTLSDGSQIEAPKPYKQAKTKLAKAQWRNRNKQSGNRRQGIKQSNRAKKFYDSIATKHAQIANQRKDFLHKTTTDISRRFYRIRIEDLNVSGMLANRKLSAAISDLGFYEFRRQLVYKSEFFGTKVEVVDRWYPSSKLCSICRNKHDSLKLSDRVYQCQNKSCLAHTITMDRDLNAAYNLLNAPSDFVRLAQPEVTLVDKK

SEQ ID NO: 19410 - protein, 379 aa, unknown
  TnpB Polypeptide
MISYKYNIYRSKKTKYLDKMLRECCFVWNHALALQRRYYKLFGKYISIGKMKKHFAKRIKRNLLHSQTTQEILERLDESYNRFFKRKSKRPPKFKRSDCFNSFVFKQGGFTLNGNILTINKGKKRFKFSYSRAYEGNVKQIRIVRETCYRFSLIIVTDYNPANSYRKTYDGASVGLDFGLKTYLTKSDGNKIGSPLFFKQYQNKIRKLNRKFSNAKKGSNNRKRRLFELQQAYRKTNDFRSDFQWKLAHELCKRYDYIFIEDLNIEGMKRLWGKKVSDLSHSSFINKLTYIASKYGVIVHKIDKWYPSSKTCECGFVNKNLSLRDRTWCCPKCESINDRDVLAARNILRKGISELESKSNPSDSNIGVSCVCIQESHLL

SEQ ID NO: 19411 - protein, 439 aa, unknown
  TnpB Polypeptide
MKLTQKIRIFPDSEQEEILWNISEKCRLLYNFALTERIDSWKNKGEYVSYFKQQNDLPIIKKKYPEYRWVYSKVLQYTLRTLDADYHSFFSLFKKGDKSARPPKFKGKKYFTTMVYNQSGFKLKDGYVFLSHKYNKTPLKFKISNKFKFGKVYQVSVFKKEGKFFICVTYDRQVKDYVDNKKYQAFDLGIMKHTGVNLDGKFIELKNSRVDKYWQKRVQEIQSRRDHCIKGSNKYNKLNKNLIRMKRKCANQLKDFQHKLSKKIIDNTKANTVIIGDLSIKDMSKKKKGKSNHKGIRGLNRAIQNTGTLGRFVRFLTYKAELIGKRVIEISEKDTSKTCCVCGKKHEMPLYKRIIKCDCGNHIDRDINSSINIMSRFLSQNAKWTGYQLFADNLRQTGLSIKIDTRRKPLALAGGSSPTLYYVNIDEDSSLKSLNQKTF

SEQ ID NO: 19412 - protein, 192 aa, unknown
  TnpB Polypeptide
MDMGLKDSVVLSDGTKYPAPKVLSKYERKLKHAYKKFSSKEQGSKNWDKAKLEVARIHEKIKNTREDFLHKLTKEISENQADVFVVETLNIRGMLKNHHLAKSISDSGWYQFKTFLKYKAERLGKKVIEIGMFEPSSKVCSVCGYKNEGLKLSDREWVCPECGTKHDRDVNAAVNIRQFGLKQAFSTQPYGT

SEQ ID NO: 19413 - protein, 466 aa, unknown
  TnpB Polypeptide
MFPTIAQAKILRRWIKDARLTYNTAINRLKSKTNKVHKYSLVAELVIRKNTKITDPKFLEAMDRTPTAIRLKALFEACAAHNLSVDRKSIVNPRYIIQEKLIKTEQTKIDNNEKILEKVNKFRKDLEHMKPTTKSYLNKLISIDKLEEKIVKTMDIQKLTETLESIPKFSRKESKVKFRKCKSQYSHIFIPKLRASVEDKKLTVYTKYNIGPIRILNNVDVEADFQIQYNERSNSWYMINSFLTKSESSSKTNSIISIDPGIRTFLTGIDSEGNIHEIGADWDEKIRPRMNKLDKCESAKINGKRKGERYNVVIAKRIANLHRKKIRNLIDEMHKKVSLDLLRNHEYIILPKMNTKRMLKSEDSLGKDVNRRINILSHGKFHDYITWKSKMMGKIVINQDESYTTQTCYQCGILNNIGSNKIYSCEHCGHTCDRDIQSSLNILTKFMGSYSPRAEGDGLVSGYDEG

SEQ ID NO: 19414 - protein, 439 aa, unknown
  TnpB Polypeptide
LKLELNSKEEYILRAEMAKYIACVNSLVAQDLSGESIRKFTSKDVNAELASAVRSQAVRDAKSVLRKYAKNQRKVERKRAWFAAQGKTPMYPIRDAKVPVWRKPVLFVNNQNFKIEFDAKTVSVPLFRDGKMTRKKYRIALTPRQREILTTTSHLATLRIIRRGDKLFAQVGYKIEDPETDALDKLLADPKTVVMGVDLGIKCPAVSCATNGTVRFFGNGRENRYKRRKFYARRKKLQKAKKLRAIKRVSDKEARFMKDRDHQVSRAIVNEAIRQGARVIALETLDGIRKGCTQSTPTRKSRKNVDKPKVDAVTENVKCASSNAGEPVQLDLFSWTETLTKKQRRKKRKLSKKQIAARRKNNRSLNSWSFYRLTKYIEYKASLAGIHLVYVNPYKTSQRCPVCGSEHKAHDRRYECTCGFYAHRDVVGAINIAGNAFKR

SEQ ID NO: 19415 - protein, 174 aa, Clostridioides sp.
SNKPQFISNLKKSLNKLAKLQRELSRKTIGSLNRNKASLKVARLQEHIANQRNDFLQKLSTKLIKENDIICIEDLQVKNMIRNRKLSRSISDVSWSEFIRQLEYKANWHGRQIVKVGKFFASSQICNKCGYKNEEVKDLNIREWIYPSCNETHDRDINASINILKEGLRLNCIQ

SEQ ID NO: 19416 - protein, 382 aa, unknown
  TnpB Polypeptide
VLKSVKLVLYPTREQEGLFRRFSGTSRFVYNMCLAYMIQQYQDYGVTCKLSDLMSYIQDCKYSEEYAWLQEVPEAVQKQAMKDLLTAYKLFFKKGKGFPKFKKKSREIPSFYQRTDKLHLDKKDLSKVKLTGVKEPVKFKCNSEIDLKSVMERPLNPRVKYDGKHWYLTISYDLRSEHKKLTDEIIGVDLGIKNLAVVSSGVVYRNINKTRSVIQLEKRLKRLQRKVSKKYFLNKQGGKFVKTSNIIKLEQKIRLLYRRLSNIRDNYIHQITADLVKTKPNTIVIEDLNVSGMLKNRHLSKAVSQQCFYKFRQYLEYKCRFSGIKLILADRFYPSSKKCSCCGEVKKFLSLHERVYKCSNCGLMLDRDFNASLNLKNYALPL

SEQ ID NO: 19417 - protein, 405 aa, Pyrobaculum sp.
MGTAYRTLLLSYDLLRLPPEAAEKVSALPKVQKEFRRWAEEWLRGEAEKPRQNPLKYFAKVFLHAGKAPDWLYGVKTKPKKFKPPLIFDAQLRPDKERDVGRGVFVDIPKREVRVRKWGGGTLMLPLGDKAVEWILARVREGGRLVLAAAWVGASRRSRAARLYVALVFRREVAPMRPRRLHVVDFNALHNGVSWAVVEGERILKRGVLRPDVSKLIHLQRRAAELDTLCANKGKACEEATAAKSRLWRILRSFEVEVVKKLIQLALQYKAAIVADVPNDESIRELKENNYSAERKVFLNFGRLRKRLKRLAEWYGVPYREERLYSTICPHCGAKMEEQPNRRVKCKVCGFETHRDEVPFYWAQKRFHELTSPFFESNHQILFCLRTLWRLRPPPPGVGPPPGAA

SEQ ID NO: 19418 - protein, 402 aa, Planomonospora sp.
MTQQVKRAFKYRFYPTDEQAAELSRTFGCVRLVYNKALEERTRAWYGEQRRISYVQSSAELTEWKKSEELAFLAEVSSVPLQQALRHLQTAFGNFFAKRAKYPRFKSRKKSRASAEYTRSAFKWRDGKLTLAKMADPLDIRWSRPLPEGVEPTTVTVSRDAVGCWFVSLLCEDSIAPAPATTNAVGIDAGVTSLVTLSTGEKIANPEHERRDRARLARAQRELSRKAKGSANREKARSKVARVHARIADRRRDFLHKLTTRLVRENQTVVIEDLTVRNMLKNHSLARAISDASWTELRSMLEYKCAWYGRELVVIDRWFPSSKLCGACGTIREKLPLNVREWTCDCGTVHDRDVNAARNILAAGLAASACGDGVRPQRESSRTGRSSVKQEPQRATAGIPRL

SEQ ID NO: 19419 - protein, 528 aa, unknown
  TnpB Polypeptide
MKRTKTPTFLLELPLAVHAGQAKHLGAHFEAARCLYNTLLGEALKRLNQMRADPTWQAARAIPKTQKQERAAAFSHLRQMYGFSEYALHEFAKEANCTWIADHIDAMLAQTLASRAYQAVNRICLGKAKKVRFKSKGRGLDSVENKWEKSGLRFLLQPPEEGNQGWLVWGKDRLLAIIDWNDPVVKHGLDHRIKYARLIRRKASSPKAQGADCQGYRYYVHLILEGTPHQKPKKKPGHEVIGLDLGPSTIAIVPREGEARLVPLCEELKPDACKKRRLERKLDRQRHANNPQNYDEKRRVKKHGKQRLTWKNSKGYLATRRRLAHQERKLAAHRKSLHGRLVNEIIHIGNDIRIEKVSYKGWQKQFGKSVGLRAPGMLIEHLRRTVAKTGGTLHEFPTRSTKLSQYCHGCRTYVKKPLAQRFHDCTCGVGPIQRDLYSAFLAAYLDPPDFLPSSARYHAYWEGAELRLRAALERLLQRAKEGQVLPQSVGITRARARLPESLVTNRQELVYQHGRLEASEMKQEPPAL

SEQ ID NO: 19420 - protein, 297 aa, Microcystis sp.
MKARYQYRIYPTDQQKRLLSQLFGCVRVVWNDTLAYCQELYQQGEKKPKYTELSKRLTQIKKTKEKQWLTEVSSIPLQQSLRDLETAYSNFFASCKGERKGKKVKPPKFKKRKSKQSARFTDNGFTINQHHVTLAKIGDLKVIWSRPLPSKPSSVTVIKDAADRYFLSFVVEIRPETLPNNDQTVGIDLGIATFATLSTGEKIDAPKPLKKRLKRLKKAQKNLSRKQKGSKRREKARKRVAKIHAKITDTRTDFLHKLSTKIVRENQTIVLEDLNTSVMVKNRKLSRAISDLGWRSF

SEQ ID NO: 19421 - protein, 382 aa, Actinomadura sp.
VQVKLLPDAAQAAALERTLHTVNNCASRVSAASFEAYGLKGSVRDLRSLAYGELKALGLGAQAAQHVIKRVVDAYSTLRANIRVGNLGGEGSKRRRKATSKPIAFRPDAAHTYDDRCLSWNYDARTVSIWTMDGRLKTVCFACSPAALKRLVAYRKGESDLVRRDGKWFLAATCDVPEAEQYEPRDWIGVDRGIANLATTSDGGNHSGRRLERYRRWQARKKAEIQAKGTRSAKQLLKKRARRESRHATHINHTISKTVVAVAQRTERGIALEQLQGIRERVTVRRDQRARQSSWPFHQLGAFIAYKARRAGVPVIEVDPAYTSQRCPRCGHTAKANRPSRDAFCCRRCGLAGPADVVAGVNVRDRARSAWVFVNMPPPVPA

SEQ ID NO: 19422 - protein, 394 aa, Mycobacterium sp.
VSRYRLFPSAEQAVVLVAHCRHARYVWNLAVEQQQHWQPGRRAPGYNEQCAQLTAARAEHEWLAAGSQTVQQQALRDFAQAMRNFFNGTHRRPTWRKAGVHEGFRQVGFKAQHVERLNRRFARVWVPKVGWVRFRLSRPVPQGVKSYRVTCDRAGRWHIAFAHIPEPIPGPADGSVVGIDRGVTVAAALSTGELLHAPRLSDGEAKRLKVLQQRLARAKRGSHRRARTKRAIAKLKAREVDRRKDWVEKATTGIARRFETIRIEALDVRAMTRSARGTVEKPGVGVAAKRGLNRGINRSGWGKLAARLQHKAVGRVEQVPAAYTSQRCAVCGHVALANRKSQAVFECEACTAGPCNADVNAARNIAAGRAVTARGDLGVSRSTNREPLPCSPAA

SEQ ID NO: 19423 - protein, 471 aa, Bacillus sp.
MATSKERTPSFVATIRLKTNLKEEKQLLVLSDCARQLYNACLGECLKRLKAIQGTDLYKESIQLSKTSKADVELRRANFKDLNETYGFKNASIQSFGTKTKNDSKFIAEHLGTHVCQKISTRAFKATQKFAFKLAKKVKFKHKGEFVSLEGKNNKTFLTYSNGYVFVGKNLTLKCLFDPKDKWMQYALKQKIKYCRIIKKEVKGENRFYVQLILEGNPYRKYELGKEEIGLDIGPSTIAIVGESKAELKEFCEEVALLDKEKRRINRKMDRQRRANNPNNFQNNGVVKKGKKEWFYSNRYIHTRSKHREMERKIKDVRKQLHGRDTNQILHRASSIQTEKLSYKAFQKLFGKSIGRKAPSMFLSILKQKMKSRGGEFREFPTYCTKLSQTCHCGTIKKKPLKVRWHKCECGVVAQRDLYSAFLARYVTKSNHVDIKKAKGDWVQLSIVLDECVSNLEKMKLERKLITTFGI

SEQ ID NO: 19424 - protein, 333 aa, Bacillus sp.
VKFHKGEFVSLEGKNNKTFLTYSNGYVFVGKNLTLKCLFDPKDKWMQYALKQKIKYCRIIKKEVKGENRFYVQLILEGNPYRKYELGKEEIGLDIGPSTIAIVGESKAELKEFCEEVALLDKEKRRINRKMDRQRRANNPNNFQNNGVVKKGKKEWIYSNRYIHTRSKHREMERKIKDVRKQLHGRDTNQILQRASSIQTEKLSYKAFQKLFGKSIGRKAPSMFLSILKQKMKSCGGKFREFPTYCTKLSQTCHCGIIKKKPLKERWHECECGVVAQRDLYSAFLARYVTKSNHVDIKKAKGDWVQLSIVLGECVLHLEKMKLERKLISTFGI

SEQ ID NO: 19425 - protein, 471 aa, unknown
  TnpB Polypeptide
VKIKPDIKIEKAKSEGSYWSPRAAAISSGLWLPATENKKENHRISHHGWMTALKPLSSPSNFDVTLPAAALDIKNNQPVTIKATKKIRFYPESEMKYIQAMILYRRAYNLAISRYLEGSYKDEDGKMYDLRPWVKFACKLEQEEKGHVYNSLICDNAVREAKNTFLALANKNKGKRADQPGFARPHYKSRKGEIHSFRMCRMPVCLSPAVKALDKINLTETVPQEAIDQAVTVTFDKGRWFINVQQHITTKAETQGAVQCVSVDPGVRTFATCYSPSEVIVAGDRLAQEKLFPLMRRVDNLLSQRQRIYNQFAKDIKFDDLPQWARDRLRYIQKATQRLKAKKEDIVLDLHQRLAHYLMENYDVIFLPHFETKSMVRRKAGRVIRRNTCRQMLDLGHYKFKLMLKWLGKKKGKRVVDANESHTSKTLSHSGEVISNLGGREFINDGKLRIHRDINGARGIFIKTILQVTCT

SEQ ID NO: 19426 - protein, 406 aa, Streptomyces sp.
VKLVVQVKLMPEAGQAAALVATLRTVNEAANWVSAVAFEQGVPREYELRRHTYAELKSRGLGAQAAQHTIKKVRDAYTTLKANIKAGNLGRPGSKRRRKAESKPIALRPEAAQPYDDRCLSWQYDAQTVSIWTTAGRIRGVRFACSADGLKMLQQYRKGESDLVERDGVFYLIATCEVPEAEEYEPDGFIGVDLGIVNIATTSTGYQAAGRGLNRRRTHERDLRGKLQKKNTKSARRRLKARARKEQRHVKNTNHVIAKMIVTEAERTSSGRGYGSANPNGSRSTPGPSPSSESSSRTRHAAQACPWFTSTPPTPRRRAASAGTSTRRTGSTRPSSSAGTAGSLPTRTGTLPTTSLNVAPWCGTRDVSHASLLPRKGCLDGGVHPAASWALPPSPVLQERVKLTGC

SEQ ID NO: 19427 - protein, 202 aa, unknown
  TnpB Polypeptide
VNDNELVKFNKTSRDVGVDLGIKDFVITSDGKKFENKHFFKADERKLKKLQRQLSKKKIGSNNRNKQRIKIAKAFEHIMNKKENYIQYVVNKLLSSYDTIYMENLNVKGMFKNHHLAKAIQEVGFFKFKEILQSKANMNDKKVVLIDRFYPSSKTCSCCGYKNKNLKLSDRHWQCPECGEIHDRDLNAAINILREGQRINVA

SEQ ID NO: 19428 - protein, 368 aa, Planosporangium sp.
MTRVVRRAFRYRFYPTHAQVEQLNRTFGCVRLVYNKALDARASAWSTHRRTITYGQTSAMLTEWKRDPDLAFLGDVSSVPLQQALRHLNAAFAAFFAKRAKYPRFKSRKRSRVSAEYTRSAFGWREGKLTLAKMDQPLDIVWSRPLPEGAEPSTVTVSRDAAGRWHVAILVETTIETLPPAEAAVGVDVGITSLVTLSTGEKVTNPRHERTDRRKLAKAQRCLARKQKGSANRAKAKLTVARIHARVADRRRDLLHKLSTRLVRDNQTVVIEDLAVRNLLANHRLARAISDAAWAQLRSMLTYKAAWYGRRLVVVDRWYPSSKRCSTCGRLAETMPLAIREWTCPCGARHDRDVNAAKNILAAGLVER

SEQ ID NO: 19429 - protein, 337 aa, unknown
  TnpB Polypeptide
MSYYKLTVISQACGRLSQMKRDIKKGKNPKSPFVQKPYLVSCYGFKVNGMLLSFPVRNREFANILLNEHTVKILSDQSVTPRSFTMTPQSISISIAKDVEPIQTESAIGVDRNLRNITFGNGKEIIQVNTSEMLKIKENYSHVKSTCTRNDHRIRKKVYGKLGKRQTDRIKQRIHRMSKSLVNYAKKNKAAIIFEDLNGIRKLYQRGNGQGNRYRRKLNSWSHYELERQVSYKAAWDGVPFYKEDPRRTSTLCPICGGGLQGDRQRHRDLWCGICKRWYDRDVVAAMNIACKGLHRFCNPQGDAGEAMRGNLNPAILRVDVSKLVTDWSDACIVQVS

SEQ ID NO: 19430 - protein, 394 aa, unknown
  TnpB Polypeptide
LRARACGSRRHCYNQLLAHFQQSGAKWSKAAAYPHFIGVIRPAFPWYNEVSSRVTRNAIDDLDNAYQHFWRRVRENKPANPKAKTFRERFGYPTFKKKGEGDSFALREFAKFDVDGRSLRLERRPGRVELRQPLRFTGKTQQVTISQQADKLYASVLVETDDHDPHAPDGFAVGVDFSVKSLATLSDGTVFPANQKLKANLRRVKRRQRRLKRKVKGSNRRANARLSLAKLHKRIADQRKAVLHEGVRSPDPQLSGGLYRRFEREGHGEKPSPCPRGQRCRIRYAPAVHRVQGRVARWNGGDHRPFRAQHADVLQVSSDPRYAARPADDGVRLRQRDGPRFERGLNILNSGLNPLTPDLKRAQESGKTTVRRGADMDGAKMTTLPDSHRSARLA

SEQ ID NO: 19431 - protein, 418 aa, Anaerotruncus sp.
MQIGETIKVRLTSESGTNLLFFQTAYQYMLGCNFASEWIFQHDFCINSNEVQKHVYYDLRELFGLKAQMAISCIKTVTARYQTVDTQMRNNPYRFTADGKHYSFHRDMTWLQKPIAFNRPQCDLVRNRDYSFVHNKIDGHIQLSINTLGKRAVCDFVLPESMQRFFDSSWTLGTAKLVELNGIWYLHISVTKNVDEFERGDVKHVVGIDRGLRFLASVYDEQQKTQFFSGKEILRKRDKFDAVRAQLQAKGTRSAKRRLASISGRENRWIRDVNHCIRKALVRRYGSGTLFVLEDLTGVSFEEENMHGAKQTHDLRNWSFYDLETKLTYKANESGSSVLKVNPQYTSQRCPRCGAVVKGNRDHREHLYRCRQCGYTSNDDRIGAMNIYTLGTLWVSGNENPQFDKIKLIEPAESVSVN

SEQ ID NO: 19432 - protein, 450 aa, Anaerotruncus sp.
MQVVSSYGVHIRDSYDALKRTADLFSYAVACLVQTALANWSSLSDTDSSFARLRMIECMVHSANGFSSSDSFDQKFPKFPSYYRRAAIMQALGIVSAYQSAMKSWKAAGCKGEAPKLDSCRHRMPALYRGNTYKPVIDKETGEVLPYMAQIKVFRNNDWVWDTVRLSKTDTDYLEKRSRNAEISAPVLEKKHGCWKLRFAVTETVKLSKKPISEQKICAVDLGVNTDAVCSVMDSRGTILARKFIMRGREKDPLSNALHRVSVFQSLHGSHDSGRLWNIAKRRNTNLAHQAAREIMNFAIANECDVIVMEYLDTRGKKRGSKKQKLTMWKHADIQNTVESLAHHYGIRVSHVNARGTSRLAYDGSGRVKRGREVSEDTPYDVCVFKSGKTYNCDLSASYSIGARYLIRVLFMESPDLMTKVSGIGSGTQRTLADLWKINRAMCSPLPAAV

SEQ ID NO: 19433 - protein, 432 aa, Cenarchaeum sp.
MQYRGEKYVIKTLQYRLKTSSKLTKYFDSMYSESHIWLNAGIEARRAGLSVFDTQKIAAKLRTIPQTWARGAIREGYKLENCRYVRYGRKTYPLFSDVPLGKKSKGNTVYFPKCNVQFKLQKGKLPSDSQLYKIVDVTNNADKERQFELHITIREHVPARVCTGVHAGIDMGGKHTLVVGKSDGTIAMLTLREKDTLRNIARIHKKISRCKLHSHRWRKLYDQLDSIYKKMGNRQTDKMRKFNKKLMKQCDRIIMEGMNLRTMTSKGKGQKTKNRITRQSRCGKARNDIAQKSLRYNVEYIEIDPKNTSKQCCMCCSMNTWREGSKFRCYNCGMACHADVNAAFNILFAFRIIRWSKRSQGVYELYNEAGMVSRGKIHLGTCTIPSGVNDVIAGTGGHQVRRQSHTDNERLLETPLDGNLPTFVALGESPSV

SEQ ID NO: 19434 - protein, 468 aa, Cenarchaeum sp.
MVLRTYTFGVRFRKGFKKEMLARQAGMDRYVYNKLLETFKEEYRRAGRVNTTRGRINAWYTDLRNHSGPRWMRQSISGVTRQILHDLGRHYDQYVETEKLKAVNIKPKAEFGEPHFKKYGGHISIPFTITHDGTIGQARFTDTRTIKIAKMGEVKLSREFPVLNYRYKTAQLFQLPDGGWRITISCDIPDEKPTVTEPTVIGIDRNVGNVATPDCVMIIPEKVARRMNNAEKTASKAQKIASRRQKPDYTNRKPGSRRWVKAAKRAAKNKRKAANIRKTTAHKISRVISDSTTHAAFEKLPIQNMAKSAKGTEENPGKNVAQKSGLNKAILEQCWGLLALLLAYKLAGEIIWVAAAYTSQRCYSCGYTHKDNRDGRKFLCKKCGYTYHADCNAGSNIEDVGLKKLGPGARHGQLNLRNLPDNTGSTHCTRGVWTWRVLALAPLRNVKHRPGNEMHHVLSSSGVTCNVL

SEQ ID NO: 19435 - protein, 548 aa, unknown
  TnpB Polypeptide
MLTSSISFIRTSKILFKPNYTNQIKLDELSNFLDLCSDALNFYVVYFAKHYQLDELLFVSTKHKNNKIFNPNSNLTKLNNIFYDLVYDKEKNKYKFSRKLKFYPDEILEAKSVDLLDFNELNDSADQKFRSILSARTLKSVKTQAMGIIRSWVQQILQSYQFGYLNRDKYKKSHRKNIRKYCDDKRKVVKNIIKGGAKAKLNIEKFEFNSVNCQLLRAGIDDSFKLSTDSEFCFDLLFSLHSMYTKEYSRINYPDRKNQLHIPLRSHHHFNELKSGIVANTQCKLEEIVKSLLVSKDGIEVRFKLSSIAKEAEFKFKKLGIDQGQRKLFTTALSATKVNNVNKVKGEAEDKEKSIYSLLSETALKEHLHSYAHSYNEVCDKIARKQKGSKGFKRAKEHRKNLINQAVNILAQIFNFEDDVAEVCLEKLRRLGEGKNKSRKLQAFNYADLRYKLERKCIETNVRLTETSNAYRSQRCSLCGFVHKKNRLNGGEEFVCLKCGFTLDADFNSAINQIAELPQLYHNRTLYPNNSTGFYWLSSGVAYLDTTA

SEQ ID NO: 19436 - protein, 171 aa, unknown
  TnpB Polypeptide
MMVKAVRVMLAPNNVQQTKMFQYAGAARFAYNWALAKEKDNYEKGGKFISDSELRKEFTRLRNSAEYAWLQNVSNNVTKQAIKDACIAYKNFFKSLQKHPRFKSKKKSTPKFYQDNIKIQFSDTHVKFEGFSSSRKGKTSVTANDSRQALSIITNSSSSFGARCGQKAFPI

SEQ ID NO: 19437 - protein, 464 aa, unknown
  TnpB Polypeptide
VRGLTPPRLIQSRCPSGGDRLVANPTRPIARRLHAQARDFHLDVVIPGMEQRLALYRTIEYTANMGYRTVEIKWMPDRASQWTTYTAARTEAARLWGDLVARHHRLRRLNWRWPSKARFQRWAKGRYPGLSAQATQQIIGEFIEAVDATRHLRKNGHAEARYPWKRPRYRDVVYTNQDARIRGNRLVLPNGTSGTLRIPLPADRPLPGRLMEVRLCLGHVLLTYEIPDEARHQRTVVGVDLGVNTLIAATDGTKAVLISGREAKATVQWRNKRLASAVSKQSTMLKGSRRWRRVQRRKKQMLAKARRRTNDLIHKATHRVAHEFPGATCYVGTPFNDASRTMNGVWAQQVSQASNGKIARQLDYKTSGVIQVDEHYSSQTCPHCGVRQTCRRVYRCRACGIVAPRDVVGSTNILCIGLHEAMRIGQALATEVVYVRPVKVFRREPDSALGHSGHSAPRREAHDF

SEQ ID NO: 19438 - protein, 183 aa, Anabaena sp.
LGENANLKIQKLCFKLDKLISKISKAKSQQKKRLKNAATQLRGKIKYLVDELHKKTARFLVDNFDVILLPTFETSIMSKKAKRRIRSKSVRQMLTLSHYKFKQFIKHKANEFNKIVIDVNEAYTSKTVSWTGEIISNLEGSKIIKSRMDNRTMNRDLNGARGIYLRVLVDTPWLRDNLNLCIC

SEQ ID NO: 19439 - protein, 453 aa, Symploca sp.
VTTLRQTFRLYPNQNQQRQLFKARRWHQYIYNACLAGRKHAWETEGRSLKYFDQQNKLPQFKKDNPEFAVLGSQALQATVKRVDLAFVAFFQGLRKRPKFKSLRNYSGWTYPGSSGWKVYTNGKHGKVELRDLGLSIRMRGVAKQWGNPTTLTIVYRPSLNRWYASFTVEVPTVEAKYGSTSDLKYESIIAYDLGISTALTTYDGSEYVELTNPHFLRNKEQEVKRKSKQMRRKVAPNRNKKNKPSNRWKKARTAVSRLQRKVSNQRLDWQHKVTSDIASRYDIGVTEELRVRNMTRKAKKGSKRNRQKAGLNKSILDVGMFTLNKMIGYKIEAKGGLLLVLDTKKVKPSQRCPNCGKVHKHWAQLSNRHHVCDACGFEIERDQGSALVMYQVAINKQPGDGIALADVDASGSTSKRRNRKDTASLKQLQQKKRSKLSKSSPDDGVARNPVLL

SEQ ID NO: 19440 - protein, 262 aa, Alkalihalobacillus sp.
MEINKAFRYRIYPNKEQQNLMNRTFGSCRFVYNHFLNIWNETYKETGKGLSYGKCSKQLPNLKSTYSWLKEVDSIAVQTAVKTLGEAYDRFFKKQNDKPVFKSRKHPVQSYTTKMTNNNIKVDGNKIKLPKLGWVRFAKSRDIEGRIMSVTVRRNSSGKYFMSVLTETEVTKLLKVNNTVGIDLGIKDFASMSNGEVVANPKYLRKYEEKLSKLQRVLSRKKIGSSNWHKNKNKLLNYTNKSAIFEMIFYINCPRSSFARIK

SEQ ID NO: 19441 - protein, 390 aa, Alkalihalobacillus sp.
MLVKKAYKYRIYPNQKQIELINKTIGCSRFVYNFFVGKQKDKDAYWSIVNEMVQNGQLLQNNWKGKFFNKNESIKAIRELKQNYPFLKEVDSIALQKSVENVNDSYTRYYKKQNGEPRFKSKKNPVQSYTTKCVNGNIQVLDKHIKLPKLGLVRFANSRKVEGRIMNATTRRNPSGKYFISILAESEVEPFRKTGSSVGIDVGLKDFATLSDGTVYANPKFFRTLEIKVAKSQRILSKRKIGSSNWFKQKAKVARLHEKMANARKDMLDKISTDIVKNHDIIGIEDLTIKNMLKNHSLAKAISEVSWSQFRTMLEYKAKWYGKRVVAVAKNFPSSQRCSTCGHKHKDVKNLALREWTCPICESHHQRDINASMNLRNEALRLTAGTAGIA

SEQ ID NO: 19442 - protein, 460 aa, unknown
  TnpB Polypeptide
  misc_feature (446)..(446): Xaa can be any naturally occurring amino acid
MLTGVSFRAYPNKEQGLTLSQWMGCAKFIWNAKCAEDNYLIQFARRYLPIGTYPEVDQKYSQYKDHELVPWLFDCPSSILRNTTTNWFKTRQKYMKGICGRPRKKKRGGKGSIHLTNDMFRFQKCSDGNTRLFIGAKRNNIGYLSFKAHRNFKEPKSIYIIKRHGKYWVSFAYEDGFSEEHLKSAEEYLKSLRGCSKEELEEYTIGIDRGVVRPVQAGDKVYDFSEEQKRNLKKNDRSTVKAQKKLARQEKGSNRSKKTKQYIGRTSEHSSNIRKDFSHKTTRKLVDDEKTKVFIIEDLRTSQMTKKSKPKKDEKTGKYLPNNRRAKGKLNKSILGSCWFSIEYCLSYKAYRKGKAVFKVSARFTSQECADCGHTHPNNRKRQDLFVCESCGHSVNADYNAAEVIKKRAINLILDSGTELSKGGVLLDRGRGATYKSRSANALLAXGYEASKKKETAIAA

SEQ ID NO: 19443 - protein, 383 aa, Chloroflexi sp.
MKMFEYRLYPNREQSRLLMACLSETRHLYNEMLALLKAQYEQDGTFPSKYTLEATFKERGSEHVPATTVQCLADRLTKALKRFLAAKELGLPAVGFPRFKQPNRWHSIQLRQYGKDCYLHEDKKHLVVPKKLGHFLKIKLHRPIEGKPKMVYLVYRADGHWYACIACEIEPQNDHSPAECDHPDIGIDVGLNVFLADSEGNTVDNPRFYRTSQKMLRRKQRQLAMRKKGSHRRRKAARNVAKTHLKIHRQRRDYHFKTAKRYAERYHRIVVEDLRIPNMVKNHHLSKSILDAGWGQFLDILTVKAARAGHEVIRVNPRFTTQACSSCGALVQKSLSVRTHVCPFCGYVADRDSNAARNILQAGAPPSGAKHPGGDVGLRSPRL

SEQ ID NO: 19444 - protein, 348 aa, Kandleria sp.
MLADKIESYKSTGKFVTVTPAKYKKDYLYLKEVDSLALANVQLNLQSAFKNCFGKSRKKNNGFPKFKSAKRSRKSYTTNNQHGTVAINDNSIRLPKIGHVKTVIHRKPNDSWIVKSATVSQESDGKFYISVLFEIADSKNTYVADTNNCIGLDYASDGLYVDNNGNVGTNHKYYHESHDKLAKSQRRLSRMQGSKKHEIKSNNYLKQLRKVNKIHRHIANQRLDNLHKISTEIANQYDVVCVESLNMKSMSNNGFGNGKATLDNGYGMFLSMLEYKLSERNKYLVKVDKWFPSSQICHCCGKIHPEMKNLTIRTMKCDCGLTISRDQNAAINILHEGLRILNESFAVA

SEQ ID NO: 19445 - protein, 380 aa, Azospirillum sp.
MPVLSYKYRLYPTTAQGAGLEAMLGAFCDLYNAALQQRIEAYRRAGKALRYVDQAGELKAVRAADERLAGYSFSAEQQVLRRLDKAFVAFFGRVKKGKTGFPRFRAKSMFDSAEFRVGDGLTIRKSKRLGLVGIPGEVKVKWHRDLPAFAKVRAAVLSRAAGKWFVCFQITMPDEEGQPRDGASVGLDLGLSSLIATSDGETVAAPQWTKHAAKKQRRLQRALARAKRGGKRRLKAKCRLARHSAATANRRRDFLHKLSRSLVDRYAFIALEDLDVDRLARSMLAKAVHNAAWGQLRLFLEYKAANAGVRVEAVNPRGTSQTCPECGTVVAKTLSDRTHRCDCGCVMDRDVAAARVILQRAGHGTGPGHGLRTPSQRGAA

SEQ ID NO: 19446 - protein, 149 aa, Clostridioides sp.
  misc_feature (142)..(142): Xaa can be any naturally occurring amino acid
VKKAYKFRIYPNKKQQELINKTFGCCRFVYNKYLAKRIEVYKNDKETFTYKQCSSDLTNLKKELNWLKEPDKFSLQNALKDLENAYNKFFKEKAGFPKFKSKKTNRFSYKTNFTNGNIMYCGQHIKLPKLGMVKIRDKQVPXLKILIIR

SEQ ID NO: 19447 - protein, 216 aa, Escherichia sp.
LQQSLKDLERAYKNFFQNRAAFPRFKKRGQNDAFRYPQGVKLDQENSRIFLPKLGWMRYRNSRQVTGVVKNVTVSQSCGKWYISIQTESEVSTPVHPSASMVGLDAGVAKLATLSDGTVFEPVNSFQKNQKTLARLQRQLSRRVKFSNNWQKQKRKIQRLHSRIANIRRDYLHKVTTTVSKNHAMIVIEDLKVSNMSKSAAGTVSQPGRNVRAKSG

SEQ ID NO: 19448 - protein, 503 aa, unknown
  TnpB Polypeptide
LDGELLDGALVLAWLASEVRDISAYATYVVRNDETLGGELARVTASAPSEAGRQAGVTMPNFLATGKSGRSRKEKLVQHNVVTAYRSYQERVNAANGESSKYVSQGWKRTVNAAAPSYGEDSVNLGAVDRAYARIENNPFADGEIVLKMVIQGQWYRLIFDFDNKRFTEGKVTLPVIKVQDGQPVFVFTVVTDNPVVQFSGDYTIGVDVGINAYATVVVRSVETGRIVHETTLSQRVHSLWNSIRASEQQVRDLKAKAATLLCDRQARMSALDEAQLHREAASRKKRELAILAAQEIADLSHVWGNAVVAVEDLSWIRNTMGSGRWNRGAFVQWLTHYVSQNGGWVVAVNPSNTSQLCHKCGAKVSHPTHKSSVCPEHGAMDRDVNAAANIAARAVPRVTKARVTRAKNRKLRPQAPLRTPVARNSLKYPGRDRTKNKPTPRRKKHCRAAREVNLPVCPARTQTHSLEVRVLADGGTVRVAGTSKAALKKGNATYKSGLCSLI

SEQ ID NO: 19449 - protein, 386 aa, Gammaproteobacteria sp.
MAIKIQHSIRTLRLKVKAESYAWLNAAAIEINQVWNYANATSYKAARPFVGPPKWLTAFDLDKLTAGATKCFERIGSDTIQRVNAEFVTRRKQFNRAKLRWRVSRGSRRSRGWIPFKAVQLKRKGKSLRFSGKAFRVFERELLEEVRWKSGCFAQDAVGDWWLCLAVAREVSQAVAPKEEVGLDLGLEHIATTSDGEKLRSGHFYRNIEQKIATAQRRGHKRQAKRLHRTAARRRKEALHRFSRKIINEYQSIVIGDVSSPKLAKTRMAKSVLDAGWGMLKTQLQYKGQQAGRCVSIVSERNTTRTCSSCKALTGPASLDMLVVRTWVCSACGDTHDRDVNAARNILSAGRSPPSVSGNEPSVSHAPPSQTSSRCEARKSALKTAA

SEQ ID NO: 19450 - protein, 426 aa, Streptomyces sp.
VSQGTLEKRQFGHRSRLALSPAEVSKNDAQAHAARTMWNLLHAWWQMMPKEKRTLAHADAAIRQARQDIDFLAVLPAQAAQTVLKTYFRAWKNCWEGRANAPKFKGRFRSVMSVDIPQGRDLNIVRVHRRWGMANIPRVGRVRFRWTKDLPVGKHAGPENRITGARLVKDALGWHIAFRVQTLGTKPEPHSGPEVGIDVGINVPIALSDGETYEHGEWLTAKEQARLLHLEQRAAQRKRHRKPGERTSRRLHRTYDQIAELRAKAKRRAFDWQHRTTTAIARTYGTVVVEALTLTSMVKSARGTIKEPGKHVAQKAGLNRSISGEAWGRTVSMLTYKTALLGGTLHQVPAPGTSRRCSACGITTPGSRESQAVFVCKNPDCGWTGNADHNAARNVLHLYRTGLARVPAAGRAVVRRAKRVKPAAAR

SEQ ID NO: 19451 - protein, 272 aa, Streptomyces sp.
MAHSHVKRAFKYRFYPSDAQAAELSRTFGCVRKVYNMALAARTEAWTRQERVNYNATSAMLTAWKKTEELAFLNEVSSVPIQQCLRHLQTAFTHFFGKRAKYPRFKSRKKSRKSAEYTTSGFRFLDGRLTLAKMREPLDIRWSRTLPKGASPSTVTVSQDAAGRWFVSLLCDDPSVEPLPATDKAVGIDVGLDHLLTLSTGEKIANPRHERKDRARLALAQRRMAKKAKGSNNQAKARRKAAKVYARIADRRRDHLHQLTTRLVQLGGEPTA

SEQ ID NO: 19452 - protein, 274 aa, Streptomyces sp.
MHAEVLRQVGAHPGALASRDLKTRCRDGLDHDAASVEGVIGVDMNADHLAAWHLNTHGNPGGDSRCFSYDLAGPAEHRDARVRHALTRLLHWATARGVKAIAVEDLDFTAEKTREKHGARRRFRQLISGMPTARLRARLTSMADATGITIIAVDPAYTSKWGAQHWQKPLTTSTRRTTRHDAASIAIGRRAQGFPVRRRTAPPRTHRSDGCGHRTVQAGPEPPGREGPCPRIPGSRTRSVPPDTARTRATRTPNTVRGARSGQERVQNSLLPTE

SEQ ID NO: 19453 - protein, 545 aa, Streptomyces sp.
MAEKKLLRQIARPFVADGPSGVSIRDRLKGLTVQDEQVLRAVGAHMGRLASADLARRCRDGLDHSTDRWAERKRELTAASSSRWAGSVTSNTHDQWGLSRRAQHAHLQSLDAGIATVRHRLSLPIGQRGCKGKPGGYRSKGEWFAKTRRLAVLEDRYEQVSAEREAGRVSVVRGGRRLLNTRHNLDAAGLTEAAWRQQWEAARWFVTADGESGKRHGNETIRVTPDGEISIRLPAPLADLANAKRGRYILTAKVSFPHRGEEWRDRIEENRAVAYRIHFDVTRDRWYLDASWTRKDLPVIPLDALRPDGVIGVDTNADHLAAWLLDEHGNPTGSPRRIDYDLTGTADHRDAQLRHALTRLLHWAQTTGVQAIAIEDLDFTDSTTREKHGRKKKFRQLISGIPTGRLRARLLSMCTEAGISVIAVDPAYTSMWGAQHWQEPLTSKNRKTSRHAAASVAIGRRALGHAIRRRTTPPPAHQSDVQGHRSAQARPRDRRREETRPRIPGPRTRSVQPDAERTRATRTPKTVRDVRSDQDWVQDSLLLTD

SEQ ID NO: 19454 - protein, 385 aa, Synechococcus sp.
MQVRYRYRLYPHPPRQAALARAFGCAPVVWNDALALSQDLYKRGENYLGSTELQKRCITQARQAPERSWLAEVSNVPLLQSVRDLDQAFPAWWSCRKGKRQGRVPAPRFKRRSNKQSLRFTRNAFRVEGETLRLTKVGSIPITWSRDLPATPSSVTIIKDGAGRRFASFAVQVERPPLESNGRAVGIDLGGAALTVTSDGEKIAPPQFLRSAGKRLRRVQRSLRRKARGADNRFKARFRLAKAQAKVSDSRLDVLHKLSTRLIRETQAICIEDMHGAGMMQNRKQARSMADAGWRMLRTLLEYNADLYGPALKGISRWQPASQAGSTCGHSDGKKPFRVRAAWNILAAGLAERLDACGAEGLTGVSPSGREAGTHLNQGVQLCTA

SEQ ID NO: 19455 - protein, 412 aa, unknown
  TnpB Polypeptide
MVAETTATKTLEATLAPPTAHKERRLERTVATYRRALEDAFESGADTQSAVNDVVTPYTLTSYAKDALKSYVPQLSRTYDAAEIGDDHPVRFTNRGFRIDHSSERTHEFCWRVPQAGRGNAFWIPLRINPEQESLWFDLFTDDVTVGEFRLQQHRTTWVLHVTVEYDVVDPEPTDDPTRIGFDIGESKLLTGCACQDGTPTQPYIYDGGRARALRKEMHTTLKRLQERDAAEWRIDERFDYYQNALTDIVEKGSREAVEYAASFEDPVIVLEDLSHIRENLDYGTYMNRRLHAWAFARLTDRIEDKALEAGIAVEFVNPRYTSQTCHACGHIGSRESQAAFTCTNAACWVSEYQADINAAANIAGRVDPWGESVPWKSERDDSPRDGSTVDSATARREPSARPAQTTLAEWG

SEQ ID NO: 19456 - protein, 420 aa, Streptomyces sp.
MALGPAEVRLMDDQAHAARTMWNLLHDWWTMLPKDKRSLAAADAAIRQARKEIDWLAVLPAQAAQAVLKTYFQAWKNCWEGRADEPSFKARFRTAMSVDIPQGRDLNITRVHRRWGMVNIPRVGRVRFRWTKNLPVGKRANKDNRITGARLVKDALGWHIAFRVQTLAPVFEPHAGPEVGIDVGVTVPLALSDGDTKDHAEWKSSKDKPNAWLTEGEQAKLLRLERRAAHRKSFRKRGERTSNRLRATYDQIQGLRARAKRRHQDWQHQTTTEIAAKYSVIVVEDLAITNMVRSAKGTIEEPGKNVKQKAGLNRSISQEAWGRTVTMLAYKTARYGGTLVKVPAPGTSQRCSACGFTTPGSRENQATFVCKNPDCGWSANADWNAARNVLHLYRMSLALIPAAGRAVVRRTRGVKPATAR

SEQ ID NO: 19457 - protein, 406 aa, Gloeocapsopsis sp.
MATTTLTLKLPLLRLNQAKVQEFLRLQELNTDIANQLLTIPKGERTKLTSKDFNHIEIGSAWINQTIRNTNAATKVKQFKVLPLETNNQNWSLHKVGETYSLGFGVLRGIKQRVPLEIHQSKYQEILDGVLNKTVQKGSMKLWRSKKGKWYALLSVSMEVPDADKPQGWIGVDRGQNVLAVASTPSGMPKFWKFAQIRKIRKHYAAKRRRLHKAKKMRVIKRLEQKERRMIKHINHMISKEIVELAVDLKCGIRLEDLSNIRQTTQQKKKQKSDASFNRDYWSYFQLEQFIFFKAQMAGVAVEKVPAAYTTKSCLKCGAINQRDKHNYTCRRCGYRGHADYGASRNIGNWVGLSCPIELQKPLSVMVKGVQSGEVNGTPLSLVSGSNSCMGLVTQEQESPAFNETK

SEQ ID NO: 19458 - protein, 307 aa, Gloeocapsopsis sp.
LQLKDSSITVKLKYQGKKVILNSKKNNRSVEYKACGWKLSENRKYITFTDKCGIGEIKLKGTYDLHYYQLDQIKRVRIVRRADNYYIQFCIDAKRYIDTEPTGKTIGIDVGLNYFYTDSQGNQVENPRYLRKSEKALKRLQRKVSRKKKGSNNRKKACRRLGRKHLKVSRQRKDHAVKLARCVVMSNDFVAYVREACAKRIDLKIKNMVKNSKLALGIHDASWSIFINWLSYFGSVFGKVVKSVAPNYTSQDCSSCGARVRKLLSVRTHVCTCGCVLDRDENAAKNILAKVLKETGYLVNTAGSAEI

SEQ ID NO: 19459 - protein, 361 aa, unknown
  TnpB Polypeptide
MILTFKVKHDRDFFIELKKARQIAEFAIRTHTLSSKDVKQFGLKSIIANQILRKYSRNKKIKNVKRVKLTIPNQGIHVDKEKHEIYIPSLKLTLPYSFRNDFEKINQIEIGDVYAYVSVTVPDKPLIEPQVWLGIDRNATGHIAVVADPETGKVWKLGKRAEHIHRKYREIRRKLQKAKKYRLLKKIKNRENRIIRDLNHKVSRKIVEIAKDRNAGVKLEKLDGVRNNKKHTKSFNYGLNSWSFYQLQKFIEYKAKLNGIPITYVEPRNTSKECSRCGSIGIREDKSFKCPNCGHVDHADANASFNIALRPPLVEGAGQLHVDRDACKGSTDTPRGATLRTTETPEPPSFSEESMSDMTQE

SEQ ID NO: 19460 - protein, 203 aa, Enterococcus sp.
MESIGMFQLVSMKCNQRGETLEIDLGIKDLEIISNGKVYKNINKTGKVRKIEKRLRRLQRNVSRKYEMNKEGNRFVKTCNIYKLEKAIRHIHRKLRNICRSRIHQTTTEIVKTKPSKIVVGTLNVKGMMKNKHLAKSVAQQKFYKFKRQLQYKCEDYGIELVEADKFYLSSKLCHECGYMKVDLKLSEHIYHCEECGYTADRL

SEQ ID NO: 19461 - protein, 347 aa, unknown
  TnpB Polypeptide
MHRAFAYRLDLTVMQDRALGRSMRLQCELYNAALQERRMTFAWLRRGISSARVPSKIDQFKSLTGLFELRPEMAPFGITVCRGTLTRIDEAFAGFFRRVRAGQAPGFPRFKSASRFDSLSWSDAQGWKLDVKARRLYVQGVGHVKIKLHRPPRGVPKTLTVARRGRHVEATIFCAEVPKNELPPTGRAVGIDLGVGVLAATSDGVLHENPRHRRDLAPVLARAQQERARHRRGSSRYRRATAAIARVKSKEASRRKDALHKLSRHLVDNNDVIVHERLKIANMSRSAKGTVDKPGKNVAAKSGLNDAIQDSGWAMLIAMITYKAEVRHEVARCEWTRRKEGRLMSTA

SEQ ID NO: 19462 - protein, 347 aa, unknown; identical to SEQ ID NO: 19461
  TnpB Polypeptide

SEQ ID NO: 19463 - protein, 425 aa, unknown
  TnpB Polypeptide
MIRTSKHITRYSNKNKIKKLSIFIDEYRRVASELINYLWNNEYVFNVKDEEHIFNIKENKLKFPSMLTSDIVQKANIVSFLSGRALKCCLTQIAGMINSEVEKQMKRLIILNKLKFEGKPRKERKNLIKRLKQNIPQIPYCGNINPELNSICCQYRKIESKEFDGYLRLTSITKDKMDIRIPIKMTRHSRKLSSRGNLKSSFLIKKDEIDFRWDIMTPVKKEEGNIVGADQGLLDILSLSDKQTTPKRDIHGHSLSSILDKMSRKVKGSRGFRKAQDHRENFINWSINQLNFSNIKQVNLERIWNIGYRNATSRMMSHWTNTIIRDKVESRCEELGVQVNHQGSTYRSQRCSSCGIVKKTNRKGKVYLCSCGNIIDADYNAALNHEVKLPEIPYSFRSFKLNVDGFYWLESGIFSLEGRSLQSLF

SEQ ID NO: 19464 - protein, 428 aa, unknown
  TnpB Polypeptide
MVTKHNESMANRKVTYRLYPSAAQTERLLEMLGLHRRLYNTALEERIRNYQETGKRLSFSAQCKDLTQWRKGSAGLAGMNAQAEQVTLKRLDLAFQHFFRRVKNGEKPGFPRFKSIHRYPGWGYKTNGDGWKLHPGEHGAHGKLYLQGVGIVSIRGKARTAGAPVTCEILHKAGQWYASVTLEIESIRRERGTEMGAFDWGLREFLTVATVQGIETVANPRHLQNQLAELKRRGQTVSRKIRMARQQSGKQRGFPISANLRKAIQHLARLHAKVARARRDFLHQTSAGLVKRFGAIGTETLAVKNLVHSGGAHKKGLNREVHAASPATFLKMLRTKAEEAGSWYEEAPTREIKPTQRCHACWKLPDEKKKLSDRNHQCPHCGAACGRDENAALVLLRWLEAKLSGREPSYVWSGGSFTASKHETHAIP

SEQ ID NO: 19465 - protein, 391 aa, Thermus sp.
MTRYADFVQTLSVRCTLKPTPEQAEALEATVQLFTEGCNHALRVAKERGEFRRFRLHRLVYKDLRAMGLSANLAVQAIARVGRKRGSRAKFYQPTSCHYDQRTFSLRLADETVSLTTVRGRMRIPLKIGNYQRHLLRQAESVQGAVLTKGPKGKWYVHIQIRVRTPEPPPGGRVVGLDLGQKALATLSTGERFSGGPLKGKRLHYLRKRAEVRSRLDRPSERTKSVKRLWERLRGREARFVNNALHVLTKRIVEALEPGDVLVLEDLTGLRERTTKRGRKERHLHNLWPYARFRFLLEYKAVLKGVRVVAVDPRRTSQECPRCGYTSRQNRRSQALFRCGACGFQHNADWVASVNIARRALAQGAGSEGLGHGQLALMPGNRLTYFRFLAS

SEQ ID NO: 19466 - protein, 395 aa, Aneurinibacillus sp.
VKNVPTLSIKLPLFEPTKTKEEMYETMRSRFSLACNKVLELKKDNPKLKKSEIDRLLSEIELPSTLHQEARKLALSRYQDWKKNKKTKGFPSFKEKISILFNNQNWQLRFDNGYLKVGIPTVEEGNLTMDKYVPVKVNAYSLFWVNYYLTGEMDKESKYFQSAFEEISKAKKGSAQLYYKKEHWYFSFSLSFELKEKNKAEKSIGVDRGLRLVAVAGNPETGKYITFNGKQMGHIRRKFSRLRHKLQKAKNTKALKQLEDKEQRINKYWNHVISKRMVEFALECGASMIKIEDLSGIRSMKKFWKRSDRNVNSWAFYDLESKLTYKAMLAELSVQKVNPYKTSQECSKCHTIKKSNRRKDVYKCSSCGHKENADINASFNIASRPSIVNEDNPAA

SEQ ID NO: 19467 - protein, 441 aa, unknown
  TnpB Polypeptide
MQIVSSYGVEIKKKNIPLRSTLDIFRKAVSYLIPVYAETWEELSEIRNPQKRFNEAEHLVHETKKNHARFLFDRHFPKMPSYLRRAAIQHALGAVSSYQTRLSLWEKGELRGKPKLVCENHAMPVFYRDVMYKEAEPGEDAAHLKLFDGREWKWFQVKLLHTDMEYLRKKWSGKKASAPTLERKHHKYFLRFSYTEEVSLSKTDVKEQVICSVDLGINTDAVCSIMRADGTILGRKFINFPSDKDHLYHVLGRIRRFQREHSSRQVQSRWDYAKRLNMELSRRIAAEITKYAAEYQADVIVFEYLEMQGKISGKKKQKLHLWRKRDIQKLCEHQAHRNGIRVSRVSARNTSRLACDGSGVVVRNPENHSLCTFRTGKQYNCDLSASYNIGARYFIRELLKPLPETGRSSLEAKVPAVKRRTSCVYADLRKLYVEVNNLKAA

SEQ ID NO: 19468 - protein, 362 aa, unknown
  TnpB Polypeptide
MLTYKRKLILTKGQEERLSSWIGACRFVYNLGLEIRIESYKNIQKSVSKFDLMKQLTEIKDVDWIKDVPSQSLQNTMDRLDNSYKNFFRMCHSGGGFPKFASKRRYSSILMKKVSIKNNKVRIPKIGELKMFKDVPIIGIPKTATIIKEPTGYFVCIVCDKVSKNIQNTDENQVCGIDMGIACFCVDSKGKVIDNPKHFKKYEDKLRIENRSLARKKRLSSRWKKQTKKLGLLHHTIANVRKDFLHKESTKLAKKYNTIYVEDLRIKNMVKNHNLSKHILDCGWGDFRLMLEYKTNVIRVNPMYTSQTCNECGVKDATSRISQSEFVCKHCGNISNADFNAAKNIMSKGIALNRQREALACA

SEQ ID NO: 19469 - protein, 349 aa, Lachnospiraceae sp.
MEHPEQETKKARQYEKNGQLEPVFRPCYCSIRCEVIRGKLRCYVQILVGADPMPKLDRFGRPRHVPGKGRVGCDIGTQSAAVVSEGTAELVNLGERVPGAYEKNSERKKFLLRKMDTSRRVNNPERYNPDGTYRKGSHGAWVLSRQYRKYQAELHEIERKESLTRRYANRELANHLRSLGDELITEPSNTAALAKRSGRPAERLDRTITVQKKDGTLQVVRKYRRKKRFGASVARRSPAAFQNELRKKFGSGYHETPKMTYRASQYDFMLDDYIKKKLSQRWHILPDQRAVQRDLMAAFLLYCADEHFETIDRSRCIREFENFWESHQNCIRQIVENHLHICNSGINAA

SEQ ID NO: 19470 - protein, 387 aa, Anaerolineales sp.
MNRNFKYRLYPNRTQGLALERILDLHHQLYNAALEERREAYRKCRISLNYYDQANQLKALRAQDSDMAGLNYSSCQQTLRKLDKAFQAFFRRLKAGEKSAGYPRFKSRHRYTTVEYRWGDGVRLKGKRLYVQNIGNLKVKWHREIPAQATIQCAYFKRDAAAWYVIFSLDLPDVTPAPHPGSAVGIDVGLNSLVALSNGQTMENPRWYRSTEAKLVRAQRIVSRRKKFSGRWRKTVRNVATLHRKVANQRLDWHHKLSRQLTDTYRLIALEDLNILGLSRSHLAKSVHDAGWGQLIALLTYKAENAGSQVVLVDPRLTSQVCSQCGCVVPKDLSVRVHCCPECGVVLDRDVNAARNILHRALLETARTEPTVTSLSMDGCSREAACL

SEQ ID NO: 19471 - protein, 582 aa, Halobacteriales sp.
MQLTEQFHVPAEHHEACDRLTTLVQKHARRLLADDYWDDEHLAAISDHTGQSYTYIRDNDHDAFEGVEEYVYSRFKRCIYQRITQVLDAHTDEYHAFQFVTEIVPEQKIQRIGWQRLRSRLFDEDSPYIEWAVLESVVEQLNDYYDTHGRFPDTYTELVKTPTPNGTLPYAPDKGDYHIHELSVEGAELIVTLNAPDSLSPDSHHDWTEHELRFPVHDRFREMLATGRLKAPTLHASEYGYTLDVPVAIPETECETADGRVLSVDLGVKKQATCVPVEQDGGLAQIAPPEFIDHPAKDKLFRVKADTEGINDRLAELRRQGKDHTDRFDHLLAEYRQTRRTERRLREQIQHDVANQLVWLAAEYGCETIVFESLGQIESGATSGAVAWSISSWARGELLALVEYKADLLGVDVETVNPWGTSRHCPRCGEKGQTVKAPNDHTEQRHGGHFHCPACGYECDRDVVGAINVGRKHLSDSRMEEANPAAYTEVGDHASFPSPQSGARSDASSELTTAEVTGVQSTTDTQDSASGRQTQLSQFRPVTKRGERDTGGLPQSHGSKTGQRRLSGSVTQHVLASTTNHG

SEQ ID NO: 19472 - protein, 460 aa, unknown
  TnpB Polypeptide
LPTSYIKSAIYKAKQYPTDKPVVFGSRRLFEKLCKNHLTGKARERLRKQWRELRQGTLISIGSKSKEDKGNRLLRFEDKDEQLHLRITIGNREFIYAKVLREPSNSRDKWITFMLMLLESWQTKNYFAYTVELKLRDGEVYGSVSFEIPTPEVKYTKENGVIAVDTNASPIHLAIAEVSKTGELLSYQTISLHNLLGLSQNSKDHQEWILAHQIVDIAIQKNKAIAIENLKKLEKGRRGDGKAKLRKILHQWNARKFLQKLKRVAMLKGVEVVEVNPAYTSIIGMLKYALQLNIDKDIAGAYVIGRRALGFKEDTPENYERLLKDKAYLEFALRKYEEREKELIELIATESNEYKRNALESELRNVQNAKKLLTNLVQSLQSESSSCEGANGRNPEQGRVAKTTLQSAWQVLRVALLFPILGRVLPRDLSPLKPVFVEGAWDRVRRFKGLVPLEAGGRSR

SEQ ID NO: 19473 - protein, 391 aa, Deinococcus sp.
MTTHRKVYRYRIEPTPVQESKLYMLAGSRRFVFNWALARRREHYAETGKTLGYNAQAGELTALKNQEETSWLKESDSQLLQQALKDVERAFVNFFEKRARFPRFKSKKTDTPRFRIPQRVRIEGSRVYVPKVGWVKLRKSQEIEGKTKSATFKREADGHWYVLLVSEFEMPDVPLPPVPESEVVGIDLGLKDFYVLSDGGRKEAPRFARKGQRKLRRAARRHSKCTRGSNRKAKAKRKLARVHRQIANQRKDFVHKATSGLVQQYQGFCIENLSIKGMAKTKLSKSVLDAALGEFRRQLAYKAQWHRKWLAVIDRWFPSSKLCGECGSINADLTLSDREWTCECGAVHDRDLNAARNIKREGLSQIVVAGHAETLNARGEGVRPAIAGSPR

SEQ ID NO: 19474 - protein, 260 aa, Natronolimnobius sp.
LTANLVQKGIRRAIEATKSGVARLKDGDKTSQPHFDTWSVVYDKRSATFHRDHVSLSTVNGRVECDYVIPTEPEGTPIGEYLLNEDYEFRMSTLQYDRSSESFYLHARMRRLERDEREKSTASSDTKHRTVLGVDLNVDGSLAVTSTGVFIGNADEMNHRRRAFEKTRGSMQQTGTRSAHLSIQSMKDREHRWMQDELHRASNQILEEARDHGCTHIAFENLTGIRDRMASAKRFHAWTFRRLYHYVEYKARCSGSGSNR

SEQ ID NO: 19475 - protein, 337 aa, unknown
  TnpB Polypeptide
VPCPLNQLEFKLKGKQAKYRVIDDTIRTAQFIRNKALRYWMDHQNVKLSDLYKQCAILAKEFAWAGKLNSMARQAMAQRAIFAIQRFIANCKANKPGNKGYPQFKKCARSVEYKTSGWKLSSNKRKLTLTDGFAAGTFKLVGSRNLHFYAPDEIKRVRVVRRADGYYVQFCVNVKRTEEVSPTGKAIGIDVGLNHFLTDSNGDTVPNPRYLRKSEKALRRAQRKVSRKKKGSANRKKAINKLGKVYGKTVVAVAPQYTSQDCSGCGSTVKKSLSVRTHICNCGTVLDRDHNAALNILAKALRQTGIEINTACPAGINAWGQTHLYSLVVTPTGKPTG

SEQ ID NO: 19476 - protein, 370 aa, unknown
  TnpB Polypeptide
MFHWGSCRRSAYQAIYKQGFTGNDIKIYCKKNYMSLLNQRYVADAVCEASKIEQEHAFFGGKKLWDKFVKGSISKKKWIHARNNTLYSRGDRAHNGNANIRVVGDQLWINDPKNGWIKGKLWLNKPINPVCYESRVQLKDGKFNVTISWEEAEPKKITDISKGVIGIDTNPNGLALSEINSSGNLQSHVFLKNDRIQFSLRGKRDYDIKMLAIKTIDIAIQSGKPLVIEQLKFKNKKRSKKFNRMTHNFIYRKIIEAIKSRALKMGVEVIEVPAAYTSIVGKLKYQDMYSLSIHNAAALVIGRLGFLYKSDKVVIDVSGSEDRPKLEARSRSVTLKKKSLLWFKHKFRVRVRDRVYQKQPALTGPCLAPG

SEQ ID NO: 19477 - protein, 427 aa, Bifidobacterium sp.
MSMTKRYNYRAYPTQGQCGELACLFGACRHAYNWAIEQRELMRRRHGRMQTYNQLSAMFTQHRHDPDHAWLTSVSSTPLQQAIRHADKAYQNFFRQYKAGRTRIVANQRTGRKRRTGLPRFKSRRDGEQAAEFTKSARFKIEHTHGCKWAFLTLPKVGTVKLRWTRDLPSQPSSVTIMRHADGTYEASFVVQAEQATAPAPIHEACGIDMGLESLMSIVHADGTRQKIPHPRTLARKARRLRKLDKQLARQRKGTSNHAKTLLLRARAYKHIQNQRKDMAYKLASTVTGENQAVALETLNVNALARTRMAKSLLDANWTRIITRITELCAQYGRTLVRIDRWYPSSQICSYCGRRDGRKPLNVRTWQCPACSTTLDRDYNAAVNILDAAGLAESLNARGDEVRRALAAADEAHLSTKREPTEPYAFI

SEQ ID NO: 19478 - protein, 418 aa, Raoultella sp.
MRRAYKYRFYPTPGQAELLAQTFGCVRFVYNSILRWRTDAYYERQEKIGYTQASARLTALKKEPEFVWLNDVSCVPLQQALRHQQTAFSNFFAGRAAYPAFKSKRHKQTAELTASAFKYRDGRLYMAKCKAPLDVRWSRELPSAPSTVTISKDAAGRYFVSCLCESEPVSLPIAASTVGIDVGLKDLFVTDTGFKQSNPRHTAKYAARLALLQRRLSKKARGSKNRARARLKVARLYAKIADCRLDALHKATRKLINDNQVVCVESLKVNNMLRNPSLSKAIADASWSEFVRQLRYKGEWAGRSVVAIDPYFPSSKRCSCCGFTMQKMPLDVRKWHCPECGADHDRDINAARNIKAAGLAVLACGESVNPKTLSAAQVRLRETRIPFLQGGECQNRVLRSRVVSADNVPSGRTTAPRP

SEQ ID NO: 19479 - protein, 433 aa, unknown
  TnpB Polypeptide
MGRSRLLLSLLSTKIVIYFLEKQVIKISNLTKTIKLRINATPEQIELFCHLTEQYRQACNFVSRYIFDNEFDLAYLSLNRALYADIRSRFGLKSQMAQSSIKTVIARYKTVKQQLFQNPYRYKDENGDWHLITKTLEWLWKPVFFGRPQVDLVRDRDYSFVNDGKTLSINTLGKRVKCSFFGKHFAAYLDGSYDLGTAKLVELNGFWYLHIPVTKAVEDFEKENVKHVVGIDRGLRFLTVSYDEQGKTEFVSGKKIATKRRKFQEVRRQLQSKGTKSAKRRLKSISGRENRWMSDVNHQISKTLVQKYGENTLFVLEDLTGVSFEESNLSCGAKQNYELRSWSFYQLEQFLSYKAHENKSEVLKVSAKYTSQRCPKCGTIRKENRNHYKHLYSCQCGYKSNDDRVGAMNIQLLGTMWISGDNNPRYEKITAPE

SEQ ID NO: 19480 - protein, 244 aa, Beggiatoa sp.
IFVYEDDDIKATVVPSDKVMAIDLGLNNLATCVTNGVTKPFIIDGRRLKSINHHYNKRFAKLQSHLKKTRNRKWSNRLQRLTDRRNARISDYLHKATHQVTSICVENGISKVVVGDVAKSLDQINLGKKNNQNVVNLSLGQFIDKLRYKLELHGIALEVLQKRVLLMMILCLKNTSLKRHTHSAANELNGVYIVPKMALLSTPMRMGRTIFLRLSNPKFSFSELAKKVSEGILDWLLTVTRLKV

SEQ ID NO: 19481 - protein, 368 aa, Leptolyngbyaceae sp.
MMRTVSIPVNLSSERFLPLMAQCAEIFNAHVDWALVNGTYNKNKAHQDLYADLRVKYPGVPSALLQTVRDSAMEAVKATKFKRTPRKKPTSGLRYDKRTMTLRGQQLTLSCVGKREQVILNVPEYFKEVFENWSFKGATLTYSKHNKQFWVRLVFETDTPEFQPGEAQGIDRGLYHLATTSDGQFFSSSKVRATQRRYLHNRKTLQQKGTRGAKRRLRATSGREQRFMRDVNHCVSKKLAHQQAFTIFVLEDLSGIRNQRRGKKVNKWLSSWTFYQLEQFLGYKSEALGKRIEFVDARYTSQRCSVCKHIAKTNRTKSRFHCRNCGHQAHADTNAAINVRDNYILSTTVVSVEQGTVNCPDATDLIVV

SEQ ID NO: 19482 - protein, 395 aa, unknown
  TnpB Polypeptide
MYLTEKHIIKRTHPFYNECDKLCFQSKNIYNQGLYNVRQHYFNTKKYLNYYGNYHLTKTQECYDYLPTRVFCQTLKHVDMVFKSFFALLKNKTVKNSLPKYLDKVNGRYVATFIKQAIGLGQFKKTGKLHLSQTDVYISTKLTDFSSLKEVRIVPRIHHYVIEVVYQVKEKTHCDNGKYAAINLGLNNLATVAFNDGSKPLIVNGRPIKSINQYYNKKKAQYQSRLKGNKRRSQTICTLTNKRNNKVTDYLHKASRLLVNQLVSQGITTLVIGKNKNMKQDINIGKVNNQNFVQLPIMRFADLMKYKCELEGIKVLFNEESYTSKCSFLDGEPICKHDKYMGKRVKRGLFVSQNGIKINADVNAAYNILIKAIPNAFADGIEGVVVHPLVLTIKK

SEQ ID NO: 19483 - protein, 442 aa, unknown
  TnpB Polypeptide
MNRLIVREAFRFRLYPNRRQEQKLLMMIEAGRQLWNDALAHRKRRWEGKQLSTSYSQQCWILTAERQANPRLGELYSQAAQEILHRLDRAFEAFFEHRARYPRFKKFCESGSFTYPQAYSGSVKPDTARKRLFLSKVGNVKVVFHKELPSRREKLKTCTVVREPSGEWYASLVYEGGDAPQAQTKFASPVGVDLGLKSLIATTDGVKVPHPQFLRKSERRLKRLQRNFSRTRKGSENRDRARRLFAIQSSKVARQRADFNHKLSAELVLRHDLVAFEDLRVRNMVRNHALAKSITDAGWGQLRSFSEYKAARSGELVVRVPPAYSTQECYFCGTLNQVPLSVRVFDCQGCNRTLDRDFNAAWIVLKRAIAKVGQDMPELKPVETGPLPLRATGAASPVEESGTIRDGAHSQPLDPIAGSPRLSVVGGCHKTATQRLAGRIAP

SEQ ID NO: 19484 - protein, 444 aa, unknown
  TnpB Polypeptide
MYFGLKRVSICLYNRSKKEVNKMKQKRMADYAYHYGLKVRIYPSQRQKEVIKHNADATRFVYNEHVAVNKEIAQFGKRNICIDFIEKRIKILRERIRTVTALKDRYPWLRHPDIDAQSIANARQNYQRAWKQFRTVHLVGVPNFHKKTSVESYQTNPHYNNDMKISLFTSNARFLDMHHLMLPKLKRIRFQSSRKVLERLFAMKEVRIGTITITKDSLNRYFASFQLGSDEPFVGACPKTDAEIGVDLNIENFYADSNGEIVDNPCYYRRQKRRLANAQRKLSRRIVRAKKEHRPLREAKNVEKQRLLVAKLTAKVMQRRKDFLHRTSATLIKNHDLVAAEELRSKNMMKNHALAMSIQDNGWRIFLNLLTYKATLYGRKFVAVDPRNTTQTCHVCGHVMSGKEKLTLKDREWTCPNCGMHHLRDINAAKNILARAKQKLALTQ

SEQ ID NO: 19485 - protein, 367 aa, unknown
  TnpB Polypeptide
MIVKAVRVKMRTNDITAAALADTMSRFNAACNALSQTAWETQTFRAFDLHKVAYHHTRAEFSLPAQLTVRAIAKVCDTYKTDRSQCHTFGPRGAVVFDARCFKMKGVSSASLTTTQGRHSFSLAHGGKQREQLSQGTTGEADLLFVDGNYYLSIAVKFPDPPKADTSGGVLGVDMGIVELATDSEGQSFSGAVVKAVRCRVREHRRQVQKKRSRSAFKRLQKINRRASRFTRDVNHCISKSLVLKAKVLQKALALEDLSGIRERASGFNKTMRWQMGNWAFADLAAKIVYKSAEAGLPVVFVDPRNTSRTCSVCGHCDKANRKSQASFQCLSCGFCANADKNAAKNIEARAELSDSLMFRSNPALFA

SEQ ID NO: 19486 - protein, 304 aa, Clostridioides sp.
MIKTHRVKLNLTRTQFELVREKQMESANCWNYIVNLSKEYYFEHKQWIKKNDIQKLIKGKYNLHSQTIQAISDKFDANRKTISELRKKGNTKAKYPYKTKKFYIIPFKASAINRNAKGNLKLSMSKGRYLELDFNVENIKTAEIVWRNGYYLYYTFDNELNGVVAKGTNTVGVDLGEIHSIASVTNKGVGLILSNREGRSIKQFRNKMYAYISKRLSKCKKGSRQSKKLWRLKNKIRSKTDNQLMNLYHQTTRKFIDFCVEQKVCEIVLGDIKGVEKDTKKKKRLNRVNRQKISQMEYGRIRTI

SEQ ID NO: 19487 - protein, 680 aa, Caldilineaceae sp.
VAAHWIGHLCGSGVHGQVGDAMGACIPDYAVGATGTTLYTRAIRVSCKQESPADIRTRHRTGIAPLGPDTRHPATEAPETVHRTVRLRLYPGDAATGILLTAIAGACRHVWNHLPADQERRYRLWQAYTIGPKPVPTFFTLGRRFTQLRHDPDHAWLKDYPFACVRYSLKYLADACQRYFKDPQTEGKPRFKAKHRTVPAFTMPEAVRLDGDRLHVPKVGWLRWAGSNLYADGKPLTVRVRREGTEPNPKWYAYVTYAVPAEQVKQPAPDGALGLDRNVGQATDSEGTVYALPDTDQLDANLRRKQRALSRKQGWGPKDKRPQSNRGRRVNGQLQKLHRKRKRKRDDATHRASRTLADTAHTVVVEDLNTKGMTASAKGTREAPGTNVKAKSGLNRVILASGWGQLERKLAYKAGHVVKVDPAYTSQTCSRCGHVGQANRPSQAVFACQACGWALNSDHNAAINILVRAGLPSVPVPARGTGAAARGGAIPLGTPVIREPGMPTAQSGIYVPRYSRCRPVPIPGRQTPKTDATRRLSRQRRCCRPTRSATGKPGRVQGLPRPHLAPATRRDLPPAHRSPTPAAHGSGDADSPGPPRAAGPEATGAGVRDRDGRTKPAPHAGNADDNLEPTSTSLKQGRANHNVGDDGLHGPGHGPGTGKQACSSSPEPPDCGRGRHRETG

SEQ ID NO: 19488 - protein, 202 aa, Gammaproteobacteria sp.
MGAVLEKLKEKNPKKAKRIIKHNLGCQKLDRRKKKHQGKVKTLIFTAANKIVGKAETVVCEDLTKTFKSKNLGKNTNRRLSGWVKGLMASAIDIVASRRGSRVVLVNAAYTSQTCSQCGCLGKRTGNKFYCAEGCRAVMQADLNAAINILARLDDKELHRWLPFTKVKQILLKRCRRSDETAHPELQLQLQRFELSTESELS

SEQ ID NO: 19489 - protein, 439 aa, unknown
  TnpB Polypeptide
MQVQKTIKIPIHYQTTEKKLSYLDRLTARLTYAVRQWWRIIEENNLETEPDCSPYESRVQEETRLSSGFVQQARDKALWMKEQWEKSHRKWERKMKKAKKGSKWHEKLKGREPSKPFSSNRSKTKKIPTRFDYRTGEIKEAEIELTDLVARISTLKKHERITILLNPSEYHKEKLEEAEDICSFEIVKHPERKCKWMFHITCRYQVETHAPETIRGVDLGVNRDVASVKLPPTPKNFSLVKTEKLKKLKELDDRIAHLQREEKYEALKKLRRKRRNIAKDHDRKTAKEFAEQTENEIVIVGDPQQIQYHKYRGNGNKRERKMLQHWSFARQGNYITQKCMEKGVIAVRFNEWGTNKCKNCEGELKGRGRRVKCKDCGAEYDREFNSCITLLQKASTYLKNKSSETIKNSQKLAGATDELARTIDDSGLEPWMSMEASFH

SEQ ID NO: 19490 - protein, 400 aa, unknown
  TnpB Polypeptide
MATQTLALKLPFLRLNATKAAAFARLQDLNTATANAILALPKEERGALTTAHFAHVELGSAWMNQTIRTARAKTGVKTFKALPLETNNQNWTLHKVGDTYSLGFGLVRGVKKRVPLAVYGAHAARALDAILDGTAKKGGLKLWRSRRGLWYALLSVTMDVPVAERSGRWVGVDRGQNHLAVASTPTGRPRFWTFGIVRQARRHYAAKRRRLQQAGKHKTIARLEHKEARLVRHVNHVISKDLVRFAQDHDCGIRLEELRGIRHTTRQRKDTKRQADKNRDYWPYFDLETKIVYKAALAGVPVEKVPAAYTSKSCCRCGAIGQRERHRFRCPRCGYRGHADHNASRNVGRWVGASCPVVLERGVGAMPSSVPPGAVHDSPHALYATDPVRGTAQEGESHGL

SEQ ID NO: 19491 - protein, 387 aa, unknown
  TnpB Polypeptide
MSMRTIALTLRPTASEKAALARLQERFNAACNYISGVAWDAQEFNKVRLQRLTYEAVRRDYGLMAQHAIRAIAVVAASYKADRKGVHSFREDAAVCLDTPRLYRVEHNRASITTLDGRLKIELGIGGHQRQMLKDAVKLAEADLIRDRKGRWRLLVSAHYADPPTMDTAGVLGVDLGRADIAHTSDDVTFSGAHVTAVRDRYTATRRSLQRKASKGTRSTRRRVRAIEKRISGREHRFQADTNHIVSKHIVGQAVASKQAIACEDLTGIRERTNRQPRNKTERRRSNSWAFHQLRAFLAYKCQAVGVPFVLVNPAFTSQMCHCCLHIGDRSGKRFACTNPACAWRGDADYNGALNIALLGQTVMLPGGPPLCCSYQPGGRATASLAF

SEQ ID NO: 19492 - protein, 232 aa, Escherichia sp.
MHQENTMLPRRISVSLFIDQSIIWPVKRLQAFKFQLRPGGQQEREMRRFAGACRFVFNRALALQNENHEAGNKYIPYGKMASWLVEWKNATETQWLKDSPSQPLQQSLKGLERAYKNFFQKRAAFPRFKKRGQNDAFRYPQGVKLDQENSRIFLPKLGWMRYRNSRQVTGVVKNVTVSQSCGKWYISIQTESEVSTPVHPSASMIGLDAGVAKLATLSDGTVFEPVNSFQKN

SEQ ID NO: 19493 - protein, 487 aa, Heliobacterium sp.
MKITTRGEILALSDEAKTALDDLMRIFSSAIRYGFQRLIEGNMPVGEIEKDVASRYGLNIRQAKDAVEDARQMLFSQKKLLPEYVKNYAKKAEAIQKKLPHVKSERKRKALLSKLDKRLRKRDEYQKFLDTNRIPPVVFGGKKIFHQVCAKTISIEEWRERRSNRVYARGDKTKKGNPNLRIRYLDERFLLEISTIQKTASGRAVKITVPLYVAQKKSKKTGMINGRNYRQMLIDYLQTGDAYQVEILRRHGRYYVHVTFDEAAVRSYPVEYTGHAGLVGIDTNPDGFALTHIDRTGNYRDHTYIARHELTYARSNRRENLIGEMVREVIQYAKNHQCGVAFEDLNFEQDTDTQRKFSRIRHQFIYRKMLTVLETACIRSGIEYTKVKPQFTSKIGLYKYTHQYGLDVHHGAALVIARRAYGMREKVPKLLLERFLPTFKKTTEWKRWSLIHQRIEKESKLITKGSATPEFWRSHRREILGLALTVA

SEQ ID NO: 19494 - protein, 155 aa, Aphanothece sp.
LKKAQKALSWKTNGSNNRNKARLQVARIHALIKDARTDFLHKLTTKLVQENDLIVVEDLAVRNMVKNRKLTRSISDASWGEFFRQLEYKCQWYEKELIKIDRYFPSSKRCGNCGMIHDRDINASRNILAAGLAVSASVAHGGNPQDRADLSVERP

SEQ ID NO: 19495 - protein, 372 aa, unknown
  TnpB Polypeptide
MIWGVGVVVKRAYRYRFYPTVEQADQLNRTFGCVRKVYNLALQARTRAWSVDGQRSTYVQSSAWLTEWKRTDDLAFLNEVSSVPLQQTLRHLQAAFAAFWSKRARYPRFKSKRKSRASAEYTRSAFRWRDGQLTLAKMDAPLAIAWSRPLPAEPSTVTVSRDSAGRWHMAILVEDPGVQPLPPQATAVGVDAGITSLLTLSTGEKITNPRHERVDRRKLASAQRNLSRKTKGSANRAKARLAVARIHARIADRRRDHLHKLSTRLVRENQTVVIEDLSVRNMLRNHRLARAISDAAWSELRHMLEYKAAWYGRTVIAIDRWHPSTRTCSACGRINTTMTLAMRVWTCPGCGSEHDRDVNAANNILAAGLTER

SEQ ID NO: 19496 - protein, 277 aa, unknown
  TnpB Polypeptide
MKARYQYRFYPTDQQRQSLARLFGCVRVVYNDALAICKQSEKKPRSAELQKIVITQAKKTEARAWLSEVSNIPLQQSVADLEMAFKNFFNSCNGKRKGTKVGYPKFKKRTNSQSARLTRGGFSFKNGGGVYLAKIGVVKPIWSRELPASPSSVTVIKDGANRYFLSFVVDIEPVQIDAKNQSIGIDLGIKTFAVMSNGEKAFSPYYKVLDHRVRKRQKRLARQQKDSNRRHKTRVQIAKVHNKIADTRKDFLHKLSTKVEARKPSYSLGRFKCVRDG

SEQ ID NO: 19497 - protein, 346 aa, unknown
  TnpB Polypeptide
MLLTYKFRVKDKHAAELNRQARAVSHVWNFCEETQRHALKWGKKWPSGYDLQKLTAGSAPILDLHAHTVQRVCMEYEKSRRTQKKRNLKWRGRKSLGWVPFNTGHVSFKDDAFMFRRRRYDVWMSRELPKGARIGAGSFNQDAKGNWYINCPVEVPTIKSAGTASVGIDLGLKSFAVMSDGEAIEAQRFYRDMEPALAVAQRSNNKKRVKAIHAKIANRRKDHLHKISTRLVRENGAIFVGNVNAAGLAKTKMAKSVLDAGWSSFRAMLEYKAIRHQVLFAEVDEAWSTQTCHECGSIAGPKGQTGLNEREWDCPDCGAHHLRDVNAAINIRERGHALLTGGIHVL

SEQ ID NO: 19498 - protein, 459 aa, unknown
  TnpB Polypeptide
MIRTYKFPAKLSPSTYRRLDAFLLEIMLIWNMALTHRKDAYKEATGLDEAKRLKDVLDDAMAEEVKEATAENKKAVKKAKKEYWACVKENGGFPTYQDQCKHLANLRQEHAKHGIWSSPAQRSALDRLHKAYQAFIRRLKEGKRNAGFPRYKTENRVRSFETENFTIQRSGKLHAVNVKGVGKFRFQGDRLPDIDKEQYRKLRIVKTAKRIWVMVVCELPDLNISDPRPDLGMDLGVTHLYAFSDGTLAPEETDHKMVANDKEIKKRQRKLSKAQGFRKGETKSNNYKKKQRALAKKKQEEKERRRGKLHELTTWMVNNRTAKWHIEDLLILLMTMAGRSSQKRGLNRAILEMGWGILVAMLIYKAESAGGWVNKVNPRDTSKTCSKCGEVNKHLGRRDPMDCIYCGHEEQRDVNAAKVVRIKGREALVGGASRHARCEVKPAVRGAPASVGVTLAVSA

SEQ ID NO: 19499 - protein, 371 aa, Acaryochloridaceae sp.
MEQTLTVVCKLQPSVEQVAMIEATLKAFADGCNFANEAVKPTVTNKARIQAEIYEQLRGRFELSANLAVRACARVGAARKAAKQHKKPVREFKPTSVDYDARIFAFREKDCTVSLTLIGGREHIPLMLANYQIGKLKGRKPTAAVLAKRRDGSYYINIQVSDEAPDPIKVDNVIGVDFGRTDIAVTSEGEKFSGKQITQVRDRFSRVRASLQSKGTKGAKRVLKRLSGREQKFQRWVNHNISRRIIERAKEQNAAVAIEDLTGIRNRTNKQPRTKTERRRSNSWAFYQLRWMLEYKGIQAGIPVVKVNPAYTSQTCHQCLHIGLRSGKRFKCGHCGWHGDADLNGSLMVRILGGVVSHPESSVLCCPIQAA

SEQ ID NO: 19500 - protein, 420 aa, Lactobacillus sp.
MLKKMAELKYHFGLKVRIYPSDTQKQLIKRNSDASRFVYNEMVAINKELWQLRRVKLPIDTVRSRINQLKERKNAKAMSNHFQFLNAEGIDSLAKANAIQNYNRAWKNFHQTLGTGIPKFHRKSSVWKYQTNCQYPKQKEAWLTNGTAKFVDAKHFKLPKLDVIRIKGSKKRLSQLLSRTDQTRIGTVTITKDATDRFFLSLQLGSDTPFVSAFPATKRQVGIDLNTENFLTTSDNTVVANPRYYRTIKGKLAKAQRTLARRQRRAKKEHRSLRNSKNYQQQRLVVAKISAKVADRRRNFLHQLSTTLIKNHDLVVAEELRSKNLLKNHALAMSIADVGWRSFLSMLEYKATLYGHQFVTVNPKNTTQTCHNCGFVMGTEGTDKLTLGDRQWECPKCHVHHIRDHNAAQNILTKGLEQLA

SEQ ID NO: 19501 - protein, 172 aa, Lachnospiraceae sp.
MKIEKQIGLDLDIKDLCITSNAKKYENPKIVGNYEKKLAKLKRQLSHKEKGSSSYFKPEKIALCYERIVNIRRDYLRDIFYEIISENQVIVGENLQIKNMIKNYHMTKTILDVSRNEFQRQLEYKALWNKREYVEVKKLSIRKWICSVYGAEHDRDVNAAKNIFMEELRQTV

SEQ ID NO: 19502 - protein, 341 aa, Helicobacter sp.
MGKQMTLTERHIIRPTHPIFKRIKDFCHLSKNLYNYANFILREHYFAGFKLPTAYDLINRFVKESQRDYKALPAQSAQQVLMLLSQNWKSYLKALKAYKLKPSSFLARPKIPKFKPKDGVSIGVLTNQQTSFTKGRMTKIKFPKKANLKRLITKINPQTSRLKQVRLIPKTTCFIVEVVYEQTTHKLPQTHGIGIMGIDLGLNNFVTAIDNQSSPFIIKGGGVKSLNQWFNKLKAHYQAKAKTSNKRFWTKRLGKLALWRECKVNDFMHKASAYVVGHCLKKGISTIVIGKNDGWKQKLKLGKRTNQNFTNIPYESFIEKLAYKSALVGITLHTTEERCNI

SEQ ID NO: 19503 - protein, 507 aa, Thermoproteus sp.
MENVRSVRRAVAVEVESPPPELSAVEEAYRRIVEEVAVYVAERGTLEREKYSELYRRFRELYPWLHSQLVQQAMNQGVEVGKSFLEARRDGRVHKPRPEVRRVSIRFAEQSWSYKKAVGSAAPVRLALSLPGGRREVWIKPHRRFWLYWWKALRGGAELASTLMLKRRRGRWYAVFVFDVQPREEPPAEAVAFDINENSVAVARVSLLSTVDAVARWNRRYVDPAVYSVRTDFGRLAKRYEAVRSAKLEELKGKYPFAGRDEDGRGQNVADTREFRRFAGRLRERRRKEGRVKQVAREVAKSPAIIVTEDLGKNPQEGMIGVEEKAKKGVRKKVEKGELRHRIKQTPFRKLVRAVEDKARETGSVVVYVSPYRNSKVCPIHFALLRDNGDWHILHCPHGHAVDRDAAAVLNMLWKTTPTGWVKGVWWDLRDVKRRLERERGLVPKELAKRGNPLIPWPVVRATWASLALLKAGDKWPAMLARAASMNPAGGAYEGGARAPPRGAPAL

SEQ ID NO: 19504 - protein, 390 aa, Calothrix sp.
MRISYQYKIKPNKEQTEKINNTLEMLRYQYNYLLAQRFDWYEKNRCPIDRCPLICHLPELADKPNYYSQKAFLTQLKLDRPWYKNIHSQVLQEVPKKVEVTFERWLKGDSNGKKSGRPRFKGVGQYKTFTFPQFKRHHFSNNRITLSKIGDVKVIVHRQIPDGFDIKTVSVTKKADGYYVTLSLDDKTVPVIKPDFDADNIIGIDVGLIDFYVASDGSRIAAPKHLRKAERKLKSAQRKVSRRKKGSNRRRKAIQKLGKQHKKVADTRKDFHFKTAKSLLNKYDVVAVEKLNIKGLIKTRLAKSINDAGWGQFVSILSNKAENAGLKIIAVNPNGTSQECSSCGHKIKKSLSQRMHNCPVCHTSLCRDLNAAINIKARGTHALKAQLMSS

SEQ ID NO: 19505 - protein, 362 aa, Brevibacillus sp.
MWKNKRRGGEYVQALTVTIRLFPDQPDILRHLGKEYICVVNQLTEQAEQHGAFPKMTTKDVDTILPSAVCNQAIRDAKSVFRKIKKLGIRPILKKSVYFVNNQNYTVSDNTVAFPIVVDGKTKKTAFRATMTSRDRKLLSKGKSGLMRIIEKSGKWYAQISVEVPTSVINNENMMGIDLGLKVPAVAVTSTGKTRFFGKGRQNKYIRRKYQQRRRKLGKLKKLTAIRKLGNKEQRWMKDQNHKISRQIVQTAIQEGVSIIKLERLGNIRKTARTSRKNAKNLHSWTFYQLQQFISYKANLVGIKVVEVNPAYTSKSCPACGEKNKARDRKYECLCGFNAHRDRVGAMNIMNQPVADGNSLSA

SEQ ID NO: 19506 - protein, 754 aa, Streptomyces sp.
VFNDAISAREDARKAQRPFPTAGQLSTRLITQAKRTVERCWLGEVSAVVLQQSLRDAETAYRNSFASLKGERKGPRIGAPRFKSLKDTRQSIRFTANARWNITTGGRLNLPKIGAVKVKWSRTLPVRPSSVTVVEDAAGRYFASFVIDTDPAVDAARMPGTDQTVGIDLGLASFAVLSDGTKIDFPRFLRRAEKKLKKAQRELSRKQKGSRNREKARLKVARAHARVADARREFLHQVSTKLIRENQAIGVEDLAVRGLARTRLAKSVHDAGWAQFIGMLEYKAARYGRTLVKIGRFEPTSQTCSTCGVKDGPKPLDVREWTCTACGTLHDRDHNAAINIKQAAGLAPSACGAPVGPEPVLAQREESRKPRNPDRKPCRVAARQPVMEGRNPRPSGRGACQTSIGCDAEKIKECPTAFKDPLEPQYKGQVALNGNPAKSGSAFGGAYAVALASGGSFGGIQPGVDPAACVAVEDTQTGVTSAESAGCAVLAVPSLAPIAPAAGRTVLGSLEGVSPARLRSMVAPGELRVMSWNLWLGGTEAEGYREKRLEAIAGTGADVVGLQETYGNAARELAEALGRYHHRAGDNPGVISRPPIVAELGDPDVGFYGGAGVRIELDGGQRVDVWSVHLDCAPYGPYEARFDGLPAAEPIAHESGRLARMREILRRVAATGDASVPVVLTGDFNAPSHLDRPDAARSVTRATEKAGLRDSYREAHPDPVRDPDTPGRPSMPSTRTAAGVPSLRTGSTSSCTGA

SEQ ID NO: 19507 - protein, 491 aa, unknown
  TnpB Polypeptide
MGREMKRSVTIKLQPSKEQEGILFELAQATAIIWNKINYERLKQFKKFGKIDFATTEREAYHAFKDWIGSSTVQQLARKNAEAWRSFFQLNKKKKTGELPGWFKPKPPEFIKEENGRKLFIIPLRNDQYRIDGNVIELRRLGKFGRLRIQFKGRIHLKGKQGRMEIIYDSVKRKWHAHVSYTVEEKLTNGEWVKVPREPQSNLTAGIDLGVNNLMAIYISNGEGFLVNGRPLKSIAFYWQKRIAEYQSKLNKSGCKTSKKLKRMHQKAKLQAKHYINTAVRQTVEMLYEMGVAKIIVGYPEGISRNSDRGKKQNFILSHVWRFNYVIKRLTEVAEEYGIQVLIVNEAFTSQTCPLCGQRHANGRVFRGLFECRREGVVMNADLVGAFNILKKVVKTITPSLSALAGGRGNWPKTRPEGSKTCLSWALMKPLKPPRIGEGLTRWNPRPSGRGGGQGVGSHRDYSHLFQSPVDSIKIFFPNNGFNLFHKLHQI

SEQ ID NO: 19508 - protein, 430 aa, unknown
  TnpB Polypeptide
VQLVERHIINRSHPDWAECDRLCAGANAVRNQGLYLQRQSWFYGHGVIRFGKTEQYKNIDNFMQQCNAYRLLPAFLSQQVMMSVNAEWTSFFEAAKAYSLSPDKFKGRPRPPNYKPRNGRYLVNFPSTRVYKKVISAGIIHLSKTLIKIQSEHSYDFNCVRIVPACGCYVIEVVYEVGLPELKSSEYVAAIDLGVNNLATVTSNKPGFQPILVNGRPLKSVNQGFNKFKAALTSRVKRQSGLDFSRRLENLTRRRNHIVDSYLHRATVMISDVLKSENISKLVIGLNPNWKNQVELGKRNNQNFVGIPFRQFISMLEYKLRLLGIEVRVREESYTSKASFLELDEIPTYGEKPEGWKSSGRRIQRGLFKSSLGRIINADVNGSYNILRKEFPKAFSKGIESVVVAPRKVNVVGFVRFCRLASKVPYPSPT

SEQ ID NO: 19509 - protein, 412 aa, unknown
  TnpB Polypeptide
VTHTDYTDRVPVRRAYKFRVYPTRPQQGRSVRLLADHCDLYDAALIERREAWRMRQASVSYGVQSAQLKEIRAADPNGQGRHSFTAQQQTLRRLDAVFAAFFDRVKAADRSGADNKPGYPRFKSYQRFSQVMFVAGDGAKWQPRGTGKWAYATFQAVGSVEVRQHRPVPGTVKALQLKREHRRWYVIVITETQPVPLPVTGRQVGVDLGVARFLTTSDGQVVANPRFLAASAEVIADLQRRKARARAGSGNRKRIRRALAKEWRKVRNRRRDFHHKTARALVSSCDAIALENLNTAGMTKRPAPKPDLENPGTFLPNQAAAKAGLNKSILDAGWAQFAGILAAKAAEAGRRVVLVNPTGTSIGCHRCGRRCIRPRQDTVTCPVHGQIDADLNGARNICTRAGLGSGQATTAA

SEQ ID NO: 19510 - protein, 379 aa, unknown
  TnpB Polypeptide
MMRTYKIRLFPTKEQEELIYKHIGCCRFIWNWALETKESYYKETKNHYNTFDLINMITTLKKQNEYSWLNEVSTISLQTICRDLDRAYKNFFNSGFGFPKFKSKKRSKLSYPVRQDVLCFTDEHVKIEKLKKVRYKTNYQIPLGKDVKFYNPRISLVNDKWILTVSYECENQAVELTNKVIGIDLGVKELAVVAHGNKEYNNCFIYKNINKSTKMKNLQKRLKRLQRKQSRKYATNGSYEKTSNILKTEKQIKDLYYHIANIRKNYIHQTTHSIVELLPYKVVMEDLNISGMIKNKHLAKAIREQNFYEFIRQMKYKCEEKGIEFVQVDRFFPSSKTCSSCGYFKSDLKLSDRIFICENCGNVIDRDYNAAINLMQCAI

SEQ ID NO: 19511 - protein, 464 aa, Actinoplanes sp.
MVHRTARTGLRLTHAQRQRCFGLLRSAGDVWSCALEINGWRRRRGDAPAAGYQELCRLLAQSGPGTFGELDSTGARSVLRRYSDAWFSAAARRKAGAVEVRFPRRRRSLMPIRWYHGTFGLEGCRVRLPVARGYPPLLLRLARLVPYPAATVRSVTLLFADGRLWIDVTAELPVATYPADQQPDPDRVAGVDLGIIHPFAVATRDGHALLVSGRAIRAEHRLHLADTKGRRRATARRAPSKGQRGSRRWRKTRRRARLIGGRHRRRTRQALHEAAKTVVGWAVDHRIGTLTVGDPRDVLDVQAGRRHNLRLRQWQIGRTLQILQDKAALAGIRVHLVDERGTSSTCPHCGKKITKPSGRTMACRHCQFAGHRDLATAFTIAARTPGSAITTCTPIAAQVVTHRRAGRRLPGVATARRDPRRPPPRAAAGGSVGRRRPAPPLISGRESLAHTRGRGSTTSPDLNR

SEQ ID NO: 19512 - protein, 362 aa, Paenibacillus sp.
MLRHKAFKFRLYPTSEQETQMRRTLGCVRFVFNHFLAAWKERYETTGKGLSYNACATQLPGLKQALPWLKEVDSIALQSSVRHVADGFQRFFKKQNQAPRFKSRKHPVQSYTTRYTNGNIALKANTIQLPKLGAVRFAKSREVEGRLLSAKVRLAPSGKWFVSLVSEVDIQPLPVCEQAVGIDVGIKHLAVTSDNLVIDNPRHTRRYEKQLATWQRRMARRTRGGSNWNLAKRKVARIHEKIRNSRHDALHKHTTKWIRENQTICLEDLRIVNMMKNRKLARHIADAAWGEMSRQLHYKAEWYGRTIKEVPAFAPSSQTCHVCGAVNTAVRNLRLREWECVVCKTWHDRDGNAAQNIKVMAV

SEQ ID NO: 19513 - protein, 402 aa, Escherichia sp.
VKRLQAFKFQLRPGGQQEREMRRFAGACRFVFNRALARQNENHEVGNKYIPYGKMASWLVEWKNATETQWLKDAPSQPLQQSLKDLERAYKNFFRKRAAFPRFKKRGQNDVFRYPQGVKLDQENSRIFLPKLGWMRYRNSRQVTGVVKNVTVSQSCGKWYISIQTESEVSTPVHPSASMVGLDAGVAKLATLSDGTVFELVNSFQKNQKKLARLQRQLSRKVKFSNNWQKQKRKIQRLHSCIANIRRDYLHKVTTTVSKNHAMIVIEDLKVSNMSKSAAGTVSQPGRNVRAKSGLNRSILDQGWYEMRRQLEYKQLWRGGQVLAVPPAYTSQRCACCGHTAKENRLSQSKFRCQVCGYTANADVNGARNILAAGHAVLACGEMVQSGRPLKQEPTEMIQATA

SEQ ID NO: 19514 - protein, 439 aa, unknown
  TnpB Polypeptide
LTNGTRCKPRRFNGCGEAGFWEALASTWLLVRAASYRFCRSVKEEIDMRMYQVRRVNIGKTTQLDELAHECGQLYSQALVFFWRTVRHTGIWLQPKHLMRLYSNPRLHAHTADACVQAFFANLASWRQRRKTDPTARPPHRRKWYFRIEYKRSAMSLKDGVLRLSNGKGNQPLVPDWPWILPQTVVVRWTGTQYEAIATYKAEAVMQPQGDKVAGIDLGEIHMAVTHDGATTHILNGRLLRSRRQYRNKLIEHLDKKISRCKKGSRQRKRLIRSKHKQLGKLRHQIADIEHKSTTRLVSKLYQEGVQTVVIGDVRDIRQGNDVGSTNNQKIHQWSFGSVRHKLTYKAERRGMGVALQDEHATTRRCPVCRHLRKSKVAGRMFHCTNKSCGFTWHRDGVGAINIRQKYLGCGPVVGDMTPPIGMRYQLRAGVAHREQGSV

SEQ ID NO: 19515 - protein, 440 aa, Streptomyces sp.
VATERAQERRQFGHRARLALTPAQIRLIDAQAHAARTTWNLLHDWWTMLPKGRRTLAAADAAIRQARRDIDWLAALPAQAAQAVLKTYFQAWKNCWDGRAEAPNFKARFRTVMSVDVPQGRDLQIKRVHRRWGMVNIPKIGRVRFRWTKDLPIGKAASTDNKITGARLVKDALGWHIAFRVQTLATVPEPHTGPEVGIDAGVNIPLALSDGHHQDHGRPARLPDGTADRDKWLNLDEKARLLRLEQRAAHRKSFRKPGQKTSSRLKRTYDQIASLRATAKRRASDWQHQTTTHLARTYGVIVVEKLDIPNMVKSARGTIENPGKNVAQKSGLNRSISQEAWGRTVTMLTYKAARHGGTVHKVPAPGTSRRCSMCGFTTPGSRQSQAVFVCKNEGCGWSDNADHNAARNILHLYRMGHALVPAAGRAVARRPRGVKPATAR

SEQ ID NO: 19516 - protein, 265 aa, Streptomyces sp.
  misc_feature (171)..(250): Xaa can be any naturally occurring amino acid
VKRAFRYRFYPTDAQAAELSRTFGCVRKVYNLALAARTEAWAWQERVNYHQTSAMLTAWRKTEELACLSDVSCVPLQQALRHLQTAFSNFFGKRAKYPRFKSRKKSRKSAEYTTSAFRFCDGRLTLAKLAEPLDIVWSRPLPEGASPSTVTVSQDAAGRWYVSMLVEDPTXXXXXXXXXXXXXXXXXXXXXXXXXXXXXXXXXXXXXXXXXXXXXXXXXXXXXXXXXXXXXXXXXXXXXXXXXXXXXXXXPRIRPSASTSDSATS

SEQ ID NO: 19517 - protein, 455 aa, Acinetobacter sp.
LIISELTVSIDSILSDTHSLMKINKAYKFRLEPNAEQEVVLNNLVGSARFVWNQILAVSFEMLAKNERITKDNLVRKIPDLRKKPECAFLENSSNGVSLQQKVRDLGSAWGKFFNPKEQAKLKQKPFKAKKPKFFKLPDGTELQLRPLMPRFKKKSDGYDSIRLVQFEKYCHIEGNRVKLPSGIGFVKFRKSQDILGTIKNVTISKVSGRWYISFGTEKELTEMPIHPSKTAIGVDLGIKKLVTTSEGDVFKPIHSFKANQVKIVKLQRKLRKKTKFSQNWKKLNLKINKLHHHIANIRHDYLHKVTTTLSKNHAMIAVEDLKVANMSKSASGTIEKKGKNVKAKSGLNKSILDQGWSMLVEMLEYKQQWRGGLLVKVNPRYTSQTCCQCGHVAKENRQTQARFECVECGYVANADINAARNILAVGHTVLSVEGGCGKGRPAKQKASEVREEVT

SEQ ID NO: 19518 - protein, 430 aa, Micromonospora sp.
VLEVNAWRRRRQNAPLTGYQELCRELSASGPGTFAELDTRGARSVLRRFSDAWFAAAKRRKTGDVSARFPRRRRGLVPVRWYHGTFTLDGRRVRIPTARGTRPLWVRLAREVPYPVEQVRSITLLCEGGRLFLDVTAEVPITVYPPGVGPDPGRVAGVDVGIIHPFAVVGPGGEALLVSGRAIRAEHRMHLADSKARRRAVARRAPKPGQRGSRRWRKYRARVRRVEGRHRRRVRQAQHEAARTVIGWAVNQRVGVLKVGDSRGVLDLPAGRRHNLRLRQWQIGRLLQILTDKATLAGITVHLVDERGTSSTCPTCARRVPKPRGRTLTCPHCQFSGHRDVVAAASIATRTPGGGPTTTGTQVVLPGVVTHRRAGRHLPGAGRSRRDPRRPPGGAKVRMARCGPPHQPVVGSRSPNQRGSTTTHRTAGER

SEQ ID NO: 19519 - protein, 550 aa, Micromonospora sp.
VAPRRGPTGPTRTGLPGSRPAPPCVGSCSATRPPGSDVRRPRRQVRERPARRAAGRCRPSEPGRWCLRWLLVTCCPCSVSASVRAARTLRAVASSSTDSFRGYSGLQAGEETELLRSRTGPSDPLPGRIGVCPRVTPSVTARLTSMWTVTRAVKRAYKYRFYPTPEQADLLNRTFGCVRKVYNLALHARIEAWQQRQERVTYNVTSGMLTVWKKSEELAFLNEVSSVPLQQTLRHLQAGFVAFWDKRARYPRFKSKRRSRASAEFTSRAFRYRDGTLTLAKLAEPLDIVWSRPLPDGATPSTVTVSRDAAGRWFVSLLCEDTITPEPATRTAVGIDAGLDSLLTLSTGEKITNPRHERTDRERLARAQRELARKEKDSANQAKARLQVARIHARIVDRRRDHLHKLTTRLVRENQTLVIEDLSVRNMVKNHSLARAISDAAWRQFRELLTYKCAWYGRDLVVIDRWYPSSKTCSVCGAVAETMPLGVRSWTCRCGTIHDRDVNAARNILAAGLAVTACGAGVRPQRDTSRTGQSAVKQETLGATQGIPRL

SEQ ID NO: 19520 - protein, 316 aa, Micromonospora sp.
MRTAYKCRAYPTPEQAAVLNRTFGCVRVVWNRTLAARTDRWRTTREGTSYAETDRTLTELKKQPEWAFLREVSSVPLQQTLRHQDAAMTGFFAKRSRYPRFKSRHGRQSASFTRSAFRLRDGRLSLGKTPGVLAFVWSWHGIDPAGLDPTMVTVSRDPDGRWYVTLTVDIDTPTAPEPTGQAVGVDLGLTDFAVLSTGDRIPHPRHMERRERRLKRYQRMMARRQRGSANRAKARRKVARAHARVREARRDFLHQQSTALVRRFDAIAVEDLAVGNMVRNRRLAKAISRTGWAEFRTLLAYKTQRAGRHLVVVDRW

SEQ ID NO: 19521 - protein, 296 aa, Micromonospora sp.
VTAEVPITVYPPGEGPDPGRVAGIDVGIIHPFAVAGPGGEALLVSGRAIRAEHRMHLADTKARQRAVARRAPKPGQRGSRRWRKYRARVRRVEGRHRRRVRQAQHEAARTVITWAVNQRAGVLKVGDPRGVLDLQAGRRHNLRLRQWQIGRLLQILTDKATLAGITVHLVDERGTSSTCPACRKRVPKPRGRTLSCPHCQFSGHRDVVAAASIATRTPGGGPTTPSSTRIVLPGVVTHRRVGRHLPGVGRSRRDPRRPPGSARVRMARCGPPHQSVGSRSPNQRGSTTTHRKPGER

SEQ ID NO: 19522 - protein, 355 aa, Micromonospora sp.
LVPVRWYHGTFTLDGRRVRIPTARGTRPLWVRLAREVPYPAEQVRSITLLCEGGRLFLDVTAEVPITVYPPGEGPDPARVAGVDVGIIHPFAVAGPGGEALLVSGRAIRAEHRMHLADSKARRRAVARRAPKPGQRGSRRWRKYRVRVRRVEGRHRRRVRQAQHEAARTVITWAVNQRVGVLKVGDPRGVLDLPSGRRHNLRLRQWQIGRLLQILADKATLAGITVHLVDERGTSSTCPACRKRVPKPRGRTLTCPHCQFSGHRDVVAAASIATRTPGGGPTTTGTHVVLPGVVTHRRAGRHLPGVGRSRRDPRRPPGGARARMARCGPPHQPVVGSRSPNQRGSTTHHRKPGER

SEQ ID NO: 19523 - protein, 409 aa, Halorubrum sp.
MEVRRTVQVKLDVTDEQADLLHETIDEFLWAANYVVDAAWDGEWAETRSSVLHEQTYDDVRDQTRLHSNHVISARDCAIDAIQSVVGKWSKGEYASLPTFTSQFCDYNHRNATFNKDHASLSTVSGRITADYILPDEDRDTPHTEYLQNDEWEQTGATLHFRRGDFYLHIRTKADVKPSEPDENGTVLGVDLGVENIAVTSTGVFWSADELDHWRREYVARQKSLQECGTRWAHENVQAVGRKKTGRFEQLLHRVANELLEEAISNGCTVIAFENLTDIRNRIPKARRFHEWAFRQLINYVSYKAEERGIQVEQVNPKNTSRRCSSCGFTDDSNRPSQDTFRCQSCGYENHADYNAAKNVGYRLLRNQTGGKGGAPVGVRLNSGMLNANGLQPVPDSVRAGVHAESQPS

SEQ ID NO: 19524 - protein, 460 aa, Actinobacteria sp.
MAPLSSVISSREKAKKYGPGWLLVDGSDETVIRKAELSFRPSKCQAVLLERLLGACCEVYNAGLQERRDAWRIQAKSIRVYDQFNQITFLRGVRDDVLVWGIGPLRGALRRLDEAYGAFYRRCAAGLTPGHPRFKSRRRYDTVCWDEPTSWALDAERGLLRIQGVGNLALSKSARRQLARLAGRGGTAVTLTVTRGRSGKSWRACVGFKGVAVAKTAPADGPDTLVGADRNAIVTVALSDGQLLQMPAFLGEARDLIAELQRQRATKKKGSVAWKNLNRRIAKAYRRARHRSDNWARQTARDIVANYGVVALEDLKLTNMMASAAGTVEAPGTNVAAKAALNRKLAEAALGRLHHWICVKAEEAGRRVWAVPAKNTSRRCAACGHTAATNRDGPRFVCGKPECGHTNHADINAAENIAALGHDCETAWQTVGRPPMVRLKPRLRRRKADNQPAPAPPLAA

SEQ ID NO: 19525 - protein, 445 aa, Sarcina sp.
VTIYTSYDVRIPTHEYNKVFADTAEKYRAAVEFFISVRMKETAILSEPKAQHVQLRKMEILTHRTKNNPDPKYDFGKDFYKFPSYLRRSAIAEALGKVSSYESNQMLWEKTHEGKRPGKPTAGYVYPALYHGNTFIRVDEQTAKIKVWIRNTWDWVTVSLRKTDVDYIRKYCSGRKECVPVLRKRHKYWVLSFSYEEEVKLMDVSVKDQIILSVDLGINSACVCTAMRSDGTISGRKFLHLPKEEDSLTHGLNRIKKAQQHGSRKTPGLWARAKGINDRIAVRTAAFIVETAVMFHAAAIVFESLDTKGKKKGSRSKRQRIHHWRAQYVQNMVTDKAHRLGMRISRVNAWGTSSLAYDGSGKVTRGKEAGFKTSAMCRFTNGKQYNSDLNASYNIGARYFIREILKSVPETERLRILAKVPECSKRSTSTYATLINLCAELHAAA

SEQ ID NO: 19526 - protein, 399 aa, unknown
  TnpB Polypeptide
MILTYNIQLQPDKTTYDYWVSLLTDTAKAYDLCSSLLADNNTPLTIKSVHAKCYNIVREQFPNLPAQSVIRVQKETMSALRSRKGNKHNGDKPTKHNLSITLDKRMYSRLTAESIAICGGTKGKRTAVPFVTYDKEKQMFSMYKPCDPLLFLRSNTLWLSVPFNVPDAVVCNDNSIGVDLGMKRLFVTSEGNAFVDKEYLRNRRKLRYLKRCLQSKGTKSAKRHLKKASRRERNISRDMQNRAVLALIESTDAGVIVMEDLSKIKKNTSKSKDGFKRKRHNNAIAQVPFAEFKTRLTTKAHLFGKEVKTVSPVYTSQTDCRNDKRNGKRIGCRYYCKDGLVLDADWNAAVNIAKKGKHPFPNILPVDGRLRFLNGRVSSITQSSAPLNGSGQAPHFREG

SEQ ID NO: 19527 - protein, 341 aa, unknown
  TnpB Polypeptide
VFSFERCEDGNLRLFIGTKTNNIGYLSFKAHGKFEIPNSLYVRKERGQYYVSFCYEDGNSEEELPSNAEHLEFLQGSTKKYLEEHTIGVDRGVAIPVHAGSITFDFCENQKSNMTKADRYIKRLQRKLSRQKKGSSRRNKTKHRIATHHAKKANIRNDFAHKTSRSLIESKAKVIVFEALRTSSMTRKPKAKQDEQGRYVSNKAKQKAGLNKSILNVGWHIIEIYTKYKAYQAGKAVFKIPAPHTSQECAICDHTHPDNRKSQELFVCGNCGNTDNADNNASKVIKKRAINLILDTGTVLSDDGVLITQADSGRGGNCKTSRVKSSTSGVQRSVKKERLVA

SEQ ID NO: 19528 - protein, 383 aa, unknown
  TnpB Polypeptide
VRRTYRYRLYPTRPQKEALDAQLADACALYNSALQHRRDMYREHGRLVGYYDQSAELRELRATGLVSAVSNCWSQQAVLRRLDRAFAAFFRRIKAGEKPGYPRFKSWRRFDTLDFSFAGNAGGIALTDTSRLRLQGVGHVKIKMHRQIPAEAKLCEARVTRRNGRWYVSISLKGVPERPLPEAGATVGVDLGINTFAALSTGELITGPRVNRAGAVSVRRAQRKVARRKRGSNRRRKAVVLLARQRERETNRRRDHAYKTARDLVNRFDLIAVEGLNMRGLAKGMLARDCNDQGWAAFVALLVEKAEEAARRIVLVDARNTSQACSACGVIVPKLLGVRAHSCACGYGADRDVNAARNVLWRALGPDGAVRRERWGEEARAVA

SEQ ID NO: 19529 - protein, 432 aa, unknown
  TnpB Polypeptide
MLEVHRSHQAKILNHGQVAESLDRHGWSASKLWNVANYHSREVWDETGEIPNHGDLKDELKTHNKYKGLHSQSSQRVLEELAEAFNSWYGSDDDRDNPPGYRKENYYDQQGRRVHEEHPRSTVTWKQKGIRHDTENNRVRLSKGRNHKEYPRAREYILVEYETVPGVTVENLQQVRAVYDRAKERWELHLVCKDKIETPTAPGTETAGIDLGICNFATVAYSTEDADLYPGNRLKQDGYYFSKRLARCDDSGSEQATRLNQKKSARRTHYFHTLSKHIVERCVDEGIGTIVVGDLSGIREDEENGESKNWGKHGNLDLHSWAFDRFTGLLTYKAEMEGIAVEKVSERDTSKSCSCCGRKRDANRVERGLYVCDECGTVANADVNGAENIRQKVSPSLATDGGDRSNGWLAQPSVYLFDKESGCFAPREQATS

SEQ ID NO: 19530 - protein, 386 aa, unknown
  TnpB Polypeptide
VKNNMQQTYKFRLYPNKKQEEQLLWTLEKCRLVYNDMLAGLNKEEKPNRLKLQSMLPELKKQYPELKGVYSKVLQYEVYKLFSNLKGLGELKKKGRKVGRLRFKGKGWFKTFTYNQSGFKLIDTNKRLKSLHLSKIGDNISIRVHRKIDGNIKQITIKKHCSGKWYANVVTERNNKKHDKKISSVIGIDKGIKYFLTDTEGRRIENSQFLKNSLKKLRREQRRLSRKKKKSSNYNKQRIKVARVHEQITNHRIDFLHKLSRSYIDNYDMIAVENLNIKNLVRNHHLARSISDVSWSAFDNMLSYKAENANKTVVRVDPKGTSQEYKYGRDLDRDYNASLNILERGLASLPQGLRKVTPVEIEPLQKLETISASLIIETGSLFQNHK

SEQ ID NO: 19531 - protein, 392 aa, Micromonospora sp.
VRRAYKFLLRPTVKQAAAIAACLNDHRHLYNAALEERREAYRRARTTIRYGHQSGQLKDIRRTDPDGQGRWSFSSQQATLRRLDKAFAAFFRRVEAGQTPGYPRYKGVGWFDTVEWPKDRDGCRWNSAPDSGQTRVYLQGVGHVRVHTHRKVDGTVKTISVKRDGRRWYLILSCDQVPVEPLPATGRAVGVDMGVASFLTTSDEIEVVNPRLLAASAARLAAGQQALARCKRGSGRRRKARERVAALHGTVRRQRLDHAHKTARWLVRHHDLICHEALQIRNMTRSAAGTVDTPGVNVAAKSGLNRSILDAGWGVFLTVLHAKAESAGRTVVEVDPRNTSRTCHECGHCARENRVTQAEFRCVACGHTAHADVNAARNILRAGLARQTAAAV

SEQ ID NO: 19532 - protein, 370 aa, Chlamydiae sp.
MIFTKTFKFRLRPNREKASLCAQFAGASRWIYNRGLAQRNTLWKEEQRSASLFDQNDELVLLKNKEETGWLKEIHSQVLQQALHDLNQAFNHFFRRVKNKETPGYPHFRCKGEQDSFRYPQGVKVNKDYVWLPKIGWIRFRKSREIEGKIKQTTVIREGKYWYVCFACEIEKEQQPSETPKEVIGIDVGLEHFATIATGEGIKEIKSPHFLKKKLAKIKFLSRSLSRKQKKSKNRLKAKQALNAAHARIKNQRRDFQHKLSTDLVKSHDKIVVESLAVKELLEREPRHRARAISDAGWRGFLQMLKYKCEEKGKQLFEVGRYFPSTKQCYKCKNKNEIPLEQREYSCSCGHRMHRDHNAALNLRAAGMSV

SEQ ID NO: 19533 - protein, 394 aa, unknown
  TnpB Polypeptide
MWGGFPLAFLLSLCYHNAMHKMFQYRLYPTKKQIKALNDILTECRWLYNHLLEKRKAAYEQEGASLSYYGQIKTLPGLKQERPSLHKVHSQVLQNVAVRIDLAFQAFFRRLKAAEKPGYPRFRGRDRYDSFTYPQSGFKIDEQGKLYASGIGHIKMVLHRPIKGTIKTLTIRRSSTGKWYASFSVEGEAERLPDNPTQVGIDVGLHTFATLSDGTEIDNPRFFRKEEKALAKVQRKHSKLTKGSPQRRKHRKAVARVHERIAFKRENFTHQISRKIVNAYGFIAVEDLHVKRMVHNHCLAKSIADASWSRFFAQLSCKAEEAGRTFVRVNPASTSQTCSQCGHRQKMPLSRRIFDCPCCGLHLDRDLNAARNIKAVGLHSVGLPLQAPVLLPGE

SEQ ID NO: 19534 - protein, 392 aa, Anabaena sp.
MLVLEAKLKGKQNQYNSIDEAIRTALFIRNKALRHWIDHKDVGKNDLQKLCAVLAKEFDFADKLNSMARQASADRAWLAIKRFYDNCKAKKPLKKGFPRFKKRGHSVEYKTSGWQLSNDRKYISFSDGFNIGRLKLVGTRNLSFYSIQQIKRVRILKRADGYYCQFCVDVERTLTHQHNGKQVGIDLGLEFFYTDSDGKIVENPRLLRKSEKSLKRKQRLASKCKKSSSNRAHAVKKLAKKHLKVSRQRKDFAVKTARTLVQSNDLVVYEDLQVKNLVKNHHLAKSISDASWSLFTDWVDYYAKVFDTWVIAVAPHYTSQDCSVCGTRVKKSLSTRTHKCHSCGTVMHRDHNAAIMILNKGLKSTVGRTESKACGQNDLCLSGETPLSKSAE

SEQ ID NO: 19535 - protein, 375 aa, Anabaena sp.
MINASGVIYNHCIALHKRYYQMWGKHLSCVKLQSHIAKLRKRNPFWQSVGSQAVQDICQRIEKAYQLFFKHNKKGVRPPGFKKVKKYKSFTLKQAGYKFLGGNRVKIGSKIYQFWKSREIEGTIKTLTIKRTPLGELFMVVVVDRDAINRVCTEVEVKTGKIAGFDFGLKTFLTCSDGTTIESPQFFKLSLNAIKKASIRHSKKLKGSSNRERARKNLVRKYEDISNCRCDWFWKLAHELTDKFDVLCFETLNLKGMQRLWGRKISDACFGEFIQILEWVAKKKNKLVVYIDPWYPSSKTCSSCGHILEKLDLSVREWRCPSCQSINGRDDNAARNIQTVGASTVGLGDVRLALPAIAVSSPESPELYSGEYVNN

SEQ ID NO: 19536 - protein, 389 aa, Anabaena sp.
MLLAFKTELKLNNKQRTQLLKHCGVARHAWNWGLALTKQILGHNKANPGEKIKFPSAIDLHKWLVALVKPENPWYFEVSKCAPQYALRNLRTAWDRCFKKVSGVPKFKKKGKSDSFELDGTIKICGTRKIQLPRLGLLKTYESLPQVQPKSVTISRVADRWYISFRIEVEPTNTTKMVDVVGVDLGVKSLATLSTGEVFEGAKSYRKLEAKLSRVQWLNRHKQIGSANWKKAQIKIARLHQLIANIRKDTLHKLTTYLAKNHGVIVIEDLNVSGMLANRKLAASIADMGFYEFRRQLEYKTELYGSELVIVNRFYPSSKTCSNCGTKKKSLSLQERVFKCEHCSFECNRDLNAAINLSMAVSSTVLACGSGEADFSEMKQENFGLERKR

SEQ ID NO: 19537 - protein, 393 aa, Anabaena sp.
MLNLTYEYKLIPTKAQRRTFDHWLEICRKVYNYALRERKDWVNSRKCDINSCSIKQEYIIPADAPRPTFARQCKTLAEAKKSIPELKLPHTHVLQQTLRQLEAAFVAMWERGQGFPRFKKRMRSFVFPQLNLESVKRFDGALWVNLPKIGLAKIRLSRPIPEGFEVKQIRVVKRDSGYYVMLSLQCDVEIPSPSISGHGIGIDLGLQHFLATSDGELIDRPRFFVDGQRKLKLLQRQLKRKKKGSRKSRQLHQRIAKDHEYISNSRKDFHFKTAHHLCDQGQSIFAEDLNLKAMSAGMLCKHTLDAGFGQFLNILSHVCFKRGAYFAKVDASGTSQICPRCQSHTGKKLLSERVHKCPECGYQTDRDVAAAQVVLQRGYSVVGHITVNFGEGK

SEQ ID NO: 19538 - protein, 433 aa, Selenomonas sp.
MIKSVRIRLLPNNKQKTKLFQFAGASRFAYNWALDKQMDNFREGRNLQSDYDLRKEFTVLRNSEENVWLLGISNNVTKQAIKDLCIAYKNFFHKQRQEGYVKYSPKKLAHFARIDRKPTVYDMNGHPKFRSKKNGDFRFYQDNVKIQFTAAHVKLENIAGSRKKNRQRLNWIRLAEKGKIPVKGRYTQPRITFDGENWWLSVGIRTSYTLKPMRGLNFIRKQLGRSCTEGVGIDLGIKDLAIISDSTVVKNINKSHTIRKLKKKRRRLQRQVSRKYQMNKKGERYCKTSNLIKSEKRLLRINHRLADIRANHVHQATRIIINRKPRFICLEDLNVQGLMKNKHLSEKVQEQNLYEFRRQIEYKAHWARIPVVIADRWFPSSKTCVECGYVNKDLKLSDRTYVCPVCGNVIDRDFQAALNLKRYGEEELFKSAS

SEQ ID NO: 19539 - protein, 454 aa, Bacillus sp.
MDKGGEKMATDKNGNYIKGTKKELPEGWVTYGFRFAIFPAEEDRKVLERSFGCERKVYNEYVAALYEHLEKIGFQGGFIQYKTPNYTTITQKYDFLDKSNDSFVYNDAKIRFQAAVKKYNDEFAKKPMQYKKAVRKKMRTAGYVPTLRDMKGLPKFHSKKQGKFSYTTNQTNGNIKIVQRNAQSLLCIPKFRNGIPIAMHRELPKEAIIKKATIKREGDRYMVSLSVDFPMKQEPLRSNIEEDEVLALDYSQTNLYVDSEGCKAGYPRYHKIIEKRQRRLNKSLARKRNRALVDSEDRILYSTTYQNTLKNYQKTMAKAKNQRKDFLHKRSNQITNDYAAIVVEDLDLSNLAQCLSLGKKLHDNGFGMFRTMLEYKAKKKGKHLIFADTFFPSTKLCSECNSKKETVKLSERVYVCEHCRTKMDRDYNAAKNLKQYGIKILSDLGFMAGVPVPV

SEQ ID NO: 19540 - protein, 498 aa, Bacillus sp.
LPSAKAEANFHKFLCQYTNKHSIFAQPNAIIIDKKDLPISAGKVVNKMAKKKPVKVLRKRKKTETIQRFTQKQNIGRASLTAKEFRLLQRMSHSSKALRNVGLYTMKQSYLTNNRIATVKEVDAAMQADVNYWGVQSNSVQAIRRTLYAEVKSFFEALKKWKENPETFTGRPKFPKYSRSTEKRVIEIYQVPKVDKDGYWTIPMNIEFRKRFGSIKIRMPKNLLNKKISYIEIVPKQKGRFFEVHYTYEVQIAQMKKQPTATVRALSCDLGVDRLVSCATNHGETFLIDGKELKSINQYFNKKISNLQQKNSENGISKRVVTNQIAGLWNKREHQINGYFSQTVGLLFKKVKELNIDTIVVGYNAGWKQECDMGKKNNQQFVQIPFNKLISAIENKCMKEGIRFKKQEESYTSKASFLDKDLIPFWSESDKFLYTFSGKRITRGLYRSKTGPCMHADINGALNTLKKSEVVEFHETINVKTPTVLKVQKRKAVASCIA

SEQ ID NO: 19541 - protein, 323 aa, Bacillus sp.
MNFPSFIKGICSNGLVIAQPVLRCSIKMIGYGWIFNSKEQDLYKRDVWDWKECNPKLVSVGKKYFLNISYEKDIKLNKTKTKDRIVCSVDLGLTNSAVCSIIDANGTVLARKFINQAKEKDRLYRLTNKLKKAQRKSGRIGAPNFWRRIRGLQTHIIYDTCHNIVGFAKQHGADVIVFEYLKKMKVPKGFYGARRLRFKLHYWRKTAIQNKVTETAHYNGVRISRINARNTSALAFDGSGFVSRNQKKDLATFTTGKVYHADLSASYNIGARYFIRELTKPFSEMERLSIQAKVPELAKRTWQTLASLSSLHSALETKALSHS

SEQ ID NO: 19542 - protein, 403 aa, Halorussus sp.
VSPTDATRLRELVEEWKRGCQLAVNEAWGVCHTRSEVQQLAYDRLREETDLGSQHAVLATHRAAEAIKRSRQRDGVAGSDATGGSSGWPDGGKPEFTTPTVAFDTRTMTVFDDRTVSLTTTGERVRCEFDLPADGGYQSQYLDDESWEPAKSALHYRDGEFTFHLGFRTPSPAVDPPTEGATVLGVDLGVENLAVTSTARFFDAGELNHRREEFERVRASLDATGTRSAARTLRQAGERLDGFVRQRLHEVANGIVDEADEYDCELIAFGELSEVRELLPEAGPLHEWLFERLLSFVEYRAAERGIAVVEVNPEYTSQRCMECGFTHPQNRDLERRQFECLKCEASAHDDYNAAKNIAFRCVRRGPLSSRGLGAAACALRSGVVTPDDGFTPYAEISEAPKSD

SEQ ID NO: 19543 - protein, 420 aa, Hydrococcus sp.
MIITYQYKLRPNKDQVAKIQTWLELLRRHYNYCLGQRFDWWKYNRSDVNSCPLTCSIAPLADRPNYYSQQNKLPETKELFPEYKNIHSQVLQNCVKRVDLVFDRFVNPDSTGKRFGKPRFKSKGRYRSFTFTQMNQSCINGNKIKLPKIGEIKFIYHRSIPDGFIIKTATVSVKADGWYIALSLEEKSVPVLTPQEIPTVKNTVGIDLGLIDFLVDDSGNNEPIPQYYRKSQKRLAKLQRKVSTKKKGSKRRAKTVSRVGKQHKKVADKRKHFHNHVANKLVTKAKFIACEDLNIKGLAKSRLAKSVNDAGWASFISILKIKAANAGGLVIEVNPNGTSKKCSNCGCSVHKTLSDRTHKCPECFLEIGRDQNAAINIRNLAIAEGHPVIGEKPKARTKKLSGGCLPTETRSPRCTSLKSA

SEQ ID NO: 19544 - protein, 544 aa, Nonomuraea sp.
  misc_feature (257)..(303): Xaa can be any naturally occurring amino acid
LTAATPTCTSRRPVSTSTAACGAMASTCSSASSPVASGRVRSTSTHWIWEVSLALVSRRLRTQVILGGASACLRSSSTRKASPSSSSMRSSVSVSERVAVTHASSCRGDRCRSSNLLEAGDPVLQGGEESRNNAIKSNTCTRFGGSCSRLCGVAQIVKRAYKYRFHPTPEQAVELARTFGCVRLVYNKALEERTRAYRLEGRGVSYAESSAALTAWKRTEELSFLGAVSCVPLQQALRHLQAAFAGFFAKRAGYPVXXXXXXXXXXXXXXXXXXXXXXXXXXXXXXXXXXXXXXXXXXXXXXXAEPSTVTVSKDAAGRWFVSILVEEMISPLPPVAQVVGVDAGITALVTLSTGEKIVNPRHERADRRRLARAQRALARKEKGSANRAKARLQVARVHARIADRRRDFLHKVTTRLVRETQVIAVEDLTVRNMVKNHRLARAISDASWRELRGMLEYKSRWYGRRLVVVDRWFPSSRLCSVCGTLQPSMPLNVRTWVCACGAHHDRDINAARNILAAGPAESRNACGAGVRPQGKSSFLAGDRR

SEQ ID NO: 19545 - protein, 395 aa, Acetobacterium sp.
MILAIRIKLKPTKKQEDLFKKSAGVARWSYNYLVGRREEHYVAYKQGLESEKYLKESDVRKYINTVIKKTTHTWLKEVGSNVMKQAVKDADLAYQRWHKGTSGKPKFKSKHRSKPSFYVNYESLKRIKDGFRGEKIGVVKTCQPLPELREGEKYQNPRISFDGKNWFLSVGYNQIFEAVELTNVSLGIDVGVKELAVCSDGSFKKNVNKTKEVKRLEKKLKREQRKLSRKLMANTKGYTKNRRPVYQTSLKEMKNIQKQNQVIQLLHKRLTDIRTNHLHQCSNEIVKTKPFRIVMEDLNVKGMMKNKHLAKAIQQQKLCEFKRQIKYKCEKYGIAFVEADRWFPSSKTCSCCGQIKSDLKLKDRVYRCNCGLEMDRDFNASVNLANYQLKGLNTQ

SEQ ID NO: 19546 - protein, 382 aa, unknown
  TnpB Polypeptide
MIKLDTSEEQHAALLETMHKFNEACNYIANIAFERKTANKIELQKIVYYGVRDKFNLSAQLTIRAIAKVSEAYKRDRTIKPEFRPDGAIVYDQRILSWRKLETVSILTINKRQIIPIRIGEYQKVRMDRIRGQADLIYRNGIFYLAVVVDVPEPSKFDAVGTIGVDLGIINLATDSDGETFSGKQIDEVRERNARLLVNLQSTGTKSAKRHLKKLSGKERRFHRNVNHVISKKIVAKAKDTGKAVALEDLTGIRTSTTVRKAQRSRNHSWTFYQLRSFIEYKATLSGVPVIFVNPRGTSHICPICGHNERRNRPNRNTFRCVKCGFSGHADHIAAINIAARAAVNQPIIACDEVKAFIGIETEHSYKPPSGSYMPSNSSGGN

SEQ ID NO: 19547 - protein, 369 aa, unknown
  TnpB Polypeptide
MVMNRAMKFRIYPTQEQQILFTKTFGCTRFIWNHIYSDCLQYFEEMGEVRTNTPAQYKEQYPWLREVDSLALANTQLDLNQAFKNHKKNPAHFGFPTFKAKHRTKKSYTTNNQKGSIRIEGKKIKLPKVGFVPIVQHRAIPDHWSIKSVTVTETPTCKYFVSILFEFESQEIEKKKPQNFVGLDFSMHELYMSSEGEVPAYPRFYRLSEEKLAREQRKLSHCVLGSKNYRKQRRKVALCHEKVANQRRDFLHKRSRELVDNFDMIAIEDLNMSGMSKALRFGKSVHDNGWGMFTTFLSYKLEERGKHLVRVDKFFPSSQLCHVCGYKNPDTKNLDVREWTCPCCHVHHDRDHNAAINIREEGKRILFSS

SEQ ID NO: 19548 - protein, 401 aa, unknown
  TnpB Polypeptide
MLIFEYKLRGTKEQYAAIDEAIRIVQFIRNKALRLWMDTRGTNGYDLNAACSQLAKEFLFASKLNSQARQAAAERAWAAISRFYANCKTHKPGKKGYPRFQHDNRSVEYKQTGWKLEPDGKHITFTDGCNIGRLRLVGNKNQRIEEFPTKQIKRVRIVKRADGYYAQFAVDAERQIEHIPTGKQVGIDMGLKAFLTDSEGNTVANPRHLRKAEKRLKKLHRRLSRKQKQSQNRKKARKALAKAYLKVSRQREDFARKTASTLVTSSDFIAYEDLKIANLVRNRHLSKSISDAAWGRFLSWLTYYGQVHTIPVIAVEPAWTSQDCSACGTRVKKSLSVRTHICSGCGLVLDRDHNAALNILAKALDRTGGQSETGLSQKRRNASGQTPATRSGKARAGKVAG

SEQ ID NO: 19549 - protein, 505 aa, unknown
  TnpB Polypeptide
MQTIKFRLHPTRVQENQLREIFTVYNRVKRVGYKLLFQLKDADFTKTEKRKIVQPRLMELCDNNPYVNSVLIDAETKLAQQRAWYKKRKKYLNQQITSISEKIENVSQKDKCDRRLKGLYSRLSSVQNRWNRLEIRPIVFGTKQLFRERIRRKIDRGKFRIQRDSSFCCVGKKQGVNLNLKVLPDATLKIRRFSKEKGKKWLLIPFTVNFKQEKWLSELLSVDKYTVEIVRRFIRGEVRYIAHVLYEIPKVKATYGFENGALGLDFNYNFVSLSNVDKNGTLKSYRTISLRNLHTLRKHSRENYISYKLDKIINYCINKNKGIVIEELSLDSKFSYNTALNRKLSNFRRTALDLLERKCLRKGVGVRKVHPAYTSIIGKYKYLRSYNLSTHVLASYVIARRGLGCKEAIPAVYKRLLAQVGDLIEPRLNPSSPYYEWSQIRDFLEHSGITSFKASEIAKKTLLVKNALNSATGAQFDNLKAGLSACGKIEDYYKFWNFIEITNFL

SEQ ID NO: 19550 - protein, 291 aa, Oceanobacillus sp.
MPTFHSRKGSKSSYTTFNQNGNIYIKDNILYLPSAQKSPVKVVGLKLNTHRALPQAGKIKNVTVTMNTKGQFDVCINVAFPMEIESIGPPANILGLDYSQSHFFVDNEGKKANYPHYYREMEERLAKEQRVLSRRKKGSKRWEKQRLVVSKLQAKVANQRKDWLHKKAYALAKRYDMIVVENLDLRAIGQNKYYAKNQQDNGFGYFRLYLKYKLEQRGKYFIKAPKDFASTQLCSICGYKNTALKGNANIREWDCPSCGNHHDRDRNAAFNLKLYGERYTKKEILPQTVVV

SEQ ID NO: 19551 - protein, 402 aa, unknown
  TnpB Polypeptide
MKIHKSFKFELIFNHPQKVLAAQTAGCCRYIWNEWLSLKKEKWETNKEKITRYDLDKKLTTLKKEKDWLCLPPSQTLQQVNKDLDQAFKNFYKGFGYPNFKKKGINDSFRIPQGIEIEKKLSKKINQVKLPKFGIVRFISSREIQGKIKHATISRDGDKWHISFNCEIEIEIQEKTHGFQSGIDRGIVTLAKLSNNTDINQISPLKKNLNKLKKEQRKLKRKKKFSSNWKKVVKKLKKTHQHIKNKRKDYLHKVTTQLANSHRLIVLENLKVANMSKSAKGTIENPGKNIKAKSGLNRSILDQGWHMFQTFLEYKMKLSGGTVIYVDPKNTSLKCNMCKHISKDNRKSQSRFECVKCGFKINADLNASKNILAAGLAVIACGVETLVSSKKQELEIRKPVLV

SEQ ID NO: 19552 - protein, 460 aa, unknown
  TnpB Polypeptide
  misc_feature (284)..(284): Xaa can be any naturally occurring amino acid
MLMGINISIKPTGFLKKTFSEWMGCCRFIWNAKCEENHYLISYAKKFLPINTYPKIDQKYSQYKNEELSPWLFKCPSQILRNSAVNWFKTYQNFLKGLCNKPKRKKKSNKASVHLTKELFYFEKISNKVFCLHIGTKKNPIGYVVLKIHRPFKNPSSLYVIKKNGKYSISFCYEDDLDESKLVSQKDHLKYLKKLSEKDLEEQTIGIDLGVTIPVLAGEQAFDYSKKQKKKKKAKEKYIKRIQKSLSKKQKGSKKWKRQKNKIAKAHEKILNIRKDFCHKTSYXIVKNEKTKIIIFEDLQTKNMTKKPKAKIDEKTQKYLPNKKKSKAGLNKSILDKGWHQIVTFVTYKAYRRKKPVFKISAHFTSQECADCGHTHPNNRKTQKKFICERCGNSDNADCNAAKVIKKRAIKLILDSGTELSKRGVLLDSGRGAANKTRKANANRAYGNETSKKIVKAQVA

SEQ ID NO: 19553 - protein, 239 aa, unknown
  TnpB Polypeptide
MSATLQEKAYKYRFYPTSEQALLLKKTIGCMRLVYNKALAARIEAWQERQESISYCQTSRMLTAWKKEESLQFLNEVSCVPLQQGLRHLQRAFVNFWEKRAKYPRFKKKRNGGSAEFTRSAFRWKDGKLFLAKCDQPLDIVWSRPLPDGVEPSTVTVTMDAAGRWFVSLRVEENVETLPPRTEAVGLDAGINSLVTLSTGEKIANPKTFVKHYRRLRNAQKKLSRKEKTSRNREGSQNP

SEQ ID NO: 19554 - protein, 342 aa, Blautia sp.
  misc_feature (215)..(301): Xaa can be any naturally occurring amino acid
MLLSKKTSIKVSREYANLIGHMCYAASKLWNVCNYERQHYKETGMAQYPDWYYQKKAHKKDLWYKQLPSQTAQEVCRLLDKAWKSFYALKRSGGIEAPRPPRFKQESIPITYMQMGIVHERDTDRVRLSLPKTLKKYMEETYQIHENFLYLENKIFRGMDQIKQLRIYPPEKGSCKIIVVYEVPDQEELPQNGHELSIDLGLHNLMTCYDSENGXXXXXXXXXXXXXXXXXXXXXXXXXXXXXXXXXXXXXXXXXXXXXXXXXXXXXXXXXXXXXXXXXXXXXXXXXXXXXXXXXXXXXXXSPVSLQGISGISGEKKTWDTGQTRSFTACRITGSTSCWNIS

SEQ ID NO: 19555 - protein, 336 aa, unknown
  TnpB Polypeptide
VKYPLPWDNALLYFRRSAANAAIAAAKSYLTRSAGGHAGKTETFHSAVTYYKGMYRELTSHGVELRVWTGDEWHWMHCRLYGKELPEDGQLMSPSVVYEHPYTMLQVPVKEVVQDASGIKERIAAERNVCGVQFGTKDVFAVASVLTADGKEAAVRYFKGGNRYTDQCRRVVEHIDKSDASHGENGNGPVNQRYWMQIKHLNSHYAHQVSREIVEYCKAHEGWGIIAFPKYAESYEKHVKKASGNYSALHLSTRIREYLTYKAWQSGILVIDINAKGLHENCAVCGANIGSVDKKTQECTCEAGHKTNRYLNTARNTAKRCLAQFQKKQKASETAG

SEQ ID NO: 19556 - protein, 410 aa, unknown
  TnpB Polypeptide
MKKIIRKAFKFRLNTNSDQAQKMLEFSGVNRFVWNKALSMNLYRLENKQPILWYQEMAYWLGLWKSSDEYGFLKTVHSQTLQQTLKNLERAFKDAFDKKQPLKRIPKFKKKGLSDSFRYPQGFKLEQTSKRVFLPKIGWVKYRNSRQVIGDVKNMSISRKGKYWYVSIQTEYETEILRHESNSIIGIDMGVKRFFTLSDGSYIEPLNSFRKLSKKLAFEQRKLSKKVRFSANWKKQKLKINRLYEHIANARLDFLHKTSTKISKKHAMVVVEDLKVRNMSKSAKGDITSPGRNVKAKSGLNKSILDQGWGMFVQMLEYKQSWLGGDVIKVNPQYTSQTCPCCKNTSKENRKSQSAFECIECGFKANADWVGALNVLERGHRLLACGVETLVSTMKQEPVGSSNTSLLLTA

SEQ ID NO: 19557 - protein, 668 aa, Streptomyces sp.
MQADQTRRFRGKNKAPKWTKPDDGTVSVMVLPLAVTDPADLDRLEKLFGSMWSIKRAVQRDARAKVDAYWAAKHERDHDGAKAVRQRLGLSREALERCAYRHLEDAGHLKHHATKALVMHMADEVWNGVSRHLFADNSGRRLGRPKVGRWHDFTRIPGRARSHTTANKWETFRLVGTLQGHALAYASGGRYELMQPHRMPKPTAPTGRVPTGKLTVSAKPVTRKATWWDHTGPLAVVFAGGSNSSRGDLVLPVRVPQGPKQYARVEYFLSDPGCWHKVDLVRRRKASAPGGWSYEAHLMILGPGYVSPTVREMRRTAAELDRIGGVDGNVSNLSIVSFPASLDPADGCPKSSEVVLTEEERVRLEKEANKRRGRARALERSRRATNAAQYGLSKRQVKRAERRAAKGLKPKTVTVPGGARDARSNGVPKQAFRRDRLSNGYQELRARQTEAAATAAEYRRHRARAVARDIIAVHGPHLTVEDCDIRTWYRLWGKRLSQTTPGMLICALEIECKAAGGRLVRASTWSTALSQHCLCGERVTKSLRDREHKCIACGLIGKRDLVSAALAAFVDLTDPDDPSTARLDSARSRHAQIIFSEGLEEALRESTTPCQSAPRGAGRVAVPRQRGTSAHRTVGKRLRATPDETRPVRDHTGKPGYRPACGPQLTFW

SEQ ID NO: 19558 - protein, 446 aa, Moorea sp.
MRQTLTAKLKLKATPEQKEMLRGACLAYRDALNFTSEVAYQMGKTYNGTKIQKEVYYTLREKFRLPSQMACNVPRQVGATYKSLRTKLKQNQEAIKAGRTKKRYKGLDQPPLFVSRTCTLNYQRDYSFIKDQKVSVITLDGRVKINYQGYSKHLEMIQFGVAKIGAAKLWYSKTTKTYYLLVTMEVEVPDLTPTDINRVIGVDVGQRYIAVVADTQNKSQFFSGKQVRHKASRYLRARKSLQRKGTRSATRRLVALSGRERRLIADTNHCIANQVVTPSTLIGLENLTHIRERTRPKKTGKKASKKQRRANSNQAKWSFAELHSFIDYKAVLSGSLAVKIDAHYTSVACPCCGHTSKENRPNKGLTFVCQQCGYTLHADLVGARNIALRVLLSRQDWESTGRFSAVPDASSDEALGERLSRYSQLRWTIDAISTLYSASSFQDEAE

SEQ ID NO: 19559 - protein, 426 aa, unknown
  TnpB Polypeptide
VRLVYKFRYPKKNETTKQLDILARISKNLYNEANYIIRQEFFNNGHWVRYYELNAQLKDSENYKFLLAQTSQQTLRILDKNWASYYKVVKGWKKNPSEYHKKPGIPRYKPKDSRFLIILTNQNSEIKKGKIIFSMSKTFKKEHPDFKEPIEISIPLPPGKHFSKYQQVRILPRKRYYEIEIVYEESIIRNPDLDKNLYLTMDLGVGNLVTGAENRNKRPIIVSGKPLKFINQFFNKRSARLLSIANKQGKKRTDKLEQITDKRNRFVNDYLHKTARFYIKYCLDNKIGNICIGKLKGIKDGVQLGRRNNQTFVNIPLAKLKYMIKYKAKLVGIKLYEVNEEYTSKCSSLDLEPVEKHEKYIGRRIKRGLFRGSNYLLNADVNGALNILRKVIGDDFIRNLLDRGCWFQPIRIRDMCQTSYEHFCLV

SEQ ID NO: 19560 - protein, 444 aa, unknown
  TnpB Polypeptide
LKTFKTVRLTSFQLTKRKYEKIARAIACFKDSINFLIAKCIDNPLFRKVSKKGNTYYNYSSYPTIRKSFYFEWKAKFPYLHTHYCHSAARITKDILRSWNSWCFKKKRRLPNPNYKKTSMKLEECLCYLEGHYVVLVIEPRSKLYIPFQPTRHFNELRTENHGEITLKLNPDRTVGIFIPFIQEVQPREIASLLFIDTNERSVDFLLVNETSAQVRSLDTTQLSTTHFTYSLKRRNISQKIAQDSKHQPQKRKKLLDKYGKRERNKTTNMMHAVTNEIARTVETNRALVVLEDLTNIRQSLARQKNLKPRHQKKSKKMRRRLNRWNFRQFQIYLEYKVKATGHPVKHINPRYTSQKCLQCGKRTKCWGKIFTCKHCGFTIDRHILATLNIAEVFLSTQDVARPDPAERSRMTMMARAVRNCKDTIIREASHRDEIIGIHPVLST

SEQ ID NO: 19561 - protein, 423 aa, unknown
  TnpB Polypeptide
MKMNKGIKVRIYPTKRQQELLHKTFGCCRFLHNQMLKERQSVYNTLKEDKDHLYAHKYKTEKQYKQEFPFLSEVDSKALQSETRNLLQAFQNFFRGIREGKRIGYPKFKSKKQKQTYTTYNINNNIRIDQKTKRIKLPKVGWIKYRDNRNVIHPIKHVTVSRTRTNKYFVAITIEVDLDVELLTTIPLHRIEAFDMSAPKFLVNKKVELTNPRFYRAHERKLKRLHKLVSRKQKGSKNRDKARLRLAKVYEKIHNQKMDWTHKLTHSLSNQFDAIILEDLNIQGMQQFNSGLSKSVTLDFSWHQFISYLRYKLEWQGKPLVLVDQFFPSSKRCSACGQINNDLQLSERTWTCPCGVTHDRDGNASTNIKEEGLQILHDQGISIINENYATVGTTGSHASGDRVSPALAGSGQGRRNPSAFRQW

SEQ ID NO: 19562 - protein, 366 aa, unknown
  TnpB Polypeptide
MTNKAIKYRLYPTAKQEKLFAKTFGCCRKIWNLMLADKIEHYKTTGKMLITTPAQYKKEYLYLKEVDSLALANVQLHLQTAYKNFFRDKKTGFPKFRSAKHSRRTYTTNNQNGTVSILDNGIKLPKIGFTKAKIHRKPEPDWKIKSATISQEKDNKFYVSVLFEFDKVIDKVPVSDNAIGFDYTSDGLYTDSNGDVCGSPKYYRKSQKKLARLQRQLSRKAKNSNNRNRARIKVARLQKHTANQRLDFLHKKSTEIANQYDVVCVESLDMKNLSNKGFGNGKATLDNGYGMFLSMLDYKLADRGKHFVKVDKWYPSSQICYACGKQHKGMKDISIRKFVCDCGYSNDRDVNAALNIKREGLRLLAI

SEQ ID NO: 19563 - protein, 384 aa, unknown
  TnpB Polypeptide
LEETLETCRLVYNSLLNTRKYEYEVNQKSLSCFSQQKDIATYKTGNLELKSVHSQVLQNVAVRIDLAFQAFFSRVKRGDTPGFPRFKSDGYDSFTYPQGGYKINDSAIELSKIGTVKAKVHRKLDGNVKTCTVRRQNGKWFATFSVEITAVDLPESGKAIGIDVGIEKFAALSNNTYIQNPRFFRKDEKALAKAQRKTEKYKKRSQERTKAKKVVSRVHERIRNCRHNFIHQESRKIVNEFGVIVVEKLNVKNLSKSPAPKPDPKHEGQFLSNGASQKAGLNKSILDASWSMFRSALCYKAENAGRKFLEVNPAYTSQDCHSCGYRAKKKLSDRWHLCPKCGVSLDRDMNAAINILSLAIGKSLNGITLSQVKPVEAPQFIDGE

SEQ ID NO: 19564 - protein, 376 aa, unknown
  TnpB Polypeptide
MRAQSPVLRTFRYPLHPNKAQETVLESWLAACQRLYNGTLEHRREAWRKQHISVTLYDQQKELTELRAADLEWAAIPVWVERSAIRRVDHAFKAFFRRVKAGQTPGFPRFRSLDRYDTFDLGSSLPRIDDDRVNLPKLGQVRFHKYRELRGAVRHVRVSRTSRGWSISFVCDLGDAPPKAAVRSAVGVDVGLEAFATLSTGERVENPRFGREAQEVLARRQRSLARKRRGSNSRKETKRLVARAHERIRNQRTDFARKLACLLFSRFDLVAHEDLQIARMVHGNLARSIYDAAWGQFLRCLALKAEEAGKHCIAVDPRGTSQACTACGAVATKELSQREHPLRLRLHRAPRPQRGAERVGARLARGAVDRSCKVEP

SEQ ID NO: 19565 - protein, 370 aa, unknown
  TnpB Polypeptide
MSLWLTGGLESRPREPSYRKRGGLFPVTYPAAACTFYLDRSEVRIPLGNGVKDDSGLAELFIPCPHGVKPEQIKEVQILPRNGTFYAVYVYKTLVFTADVDFNIALGIDPGLTNWLTCVSTDGKSFIVDGRKVKSLNQHYNKRVATLKKGKAQGFWSDELAAHVSGGSTPPGTLRAITEKRNRQLRDAINKAARFIINRCLASQIGTVIFGWNQGNKDSIDIGKKNNQEFVQVPTAKLKDRIAQLCKQYGLRFVETEESYTSQSSFLDDDFLPIFGEKPESWKPSGKRGQKQKGVRHNLGRGGYQTADGSRINSDCNGAVNIIRKVATQLNLCLAKVVRAVLALPQRYNLDSLSRSYRKKYYKARLKPAL

SEQ ID NO: 19566 - protein, 435 aa, Gemmatimonadetes sp.
MDVQGKNHMPAASQLLLSVHQTKYIEPMNRMQAFRYRLRPTGEQERRMRRFAGACRYIYNRALAEQKVRYAEGEKKLGYAGLCKQLTAWRGAEDTAWLADAPVHPLQQALRDLERAYTNFFEGRASFPEFKKKGRSRASFRYPDPKQIKLDRENGRVFLPKLGWLRYHNSRTVLGEVRNVTVSERAGHWWVSIQTERVVEAPAHPSTTAVGIDVGVARFATLSDGSFIVPLDSFRRHERRLARAQRALARKQKGSSNYRKAKAKVARVHARIADARNDFLHKASAAISKDHAVVCIEDLNVRGMSASAAGTPEQPGRRVRQKSGLNKAILDQGWGEFRRQLGYKLAWRGGRLIAVPPQNTSRTCPACKHVAAESRRTQAEFCCVRCGYSNHADLVGALNVLEAAGHAASACGGTAEGAPPVKQEPAEATRARRAA

SEQ ID NO: 19567 - protein, 536 aa, Lachnospiraceae sp.
MTDGDYSKTLKKFHKLSDRHILVAETDMPYSDVLKVVALSGKIRRAGNELVGLMRKNYDQLLRTKRYRKLLSLYGNTEDKAKRKTFAGQLNEMQKSYNVTWEHCRTSMIPIGKKYGIDAVFALTKAEDVWRGIEKCLYGNGKSIHFLKYGELPCIRAKQINRGIPISVKDNGLWFKLGKTVFGIQINDRFQQDELNAVLSYLSEPEVIDKKAVSTLIEDAYCMDTYRPCYATLVPKMIRGKYRVYLHLTIEGKAKPKYDKHGNPRHKYGRGMIGADIGTQTVAYTSDTEVGLKNLAERGNSIQTSERKERLFYRAMDRSRRATNPQNYNEDGTVKKGRKTWKYSNHYKKLKARHSELCRINAVNRQLAINEDANHLRSLGDTFITEPKNARKLMKRAKEATKNDKGKFNKKKRFGKSVKNRCPGGFQSTVERKFKTTGGTYTEVPNNYRASQYDHTADDYIKKKLSDRLYRLKDGTEVQRDWYSSFLLYCYEPKTQNIDKDKCVKTFETHYHKEKALISWIKAHKVKVLNSGIKVA

SEQ ID NO: 19568 - protein, 377 aa, Blautia sp.
  misc_feature (266)..(377): Xaa can be any naturally occurring amino acid
MVKAIKVMLIPNNVQKTKMFQYAGASRFAYNWALAREIENYEKGEKFISDAELRKEFTKLRHSDEYAWLLSISNNVTKQAIKDACTAYKNFFKGLQKFPRFKSKKRSMPKFYQDNVKIRFSNTHVKFEGFSSSRKANKQKMNWVRLAEHGRIPTNAKYMNPRISFDGLNWWISVCVEFPDCREILNDDGVGIDLGIKELAVCSDGTKYKNINKSQKIKKLEKQKRRLQRSISRSYEKNKKGESYCKTNNVIKKEKLLLKRNHRLTXXXXXXXXXXXXXXXXXXXXXXXXXXXXXXXXXXXXXXXXXXXXXXXXXXXXXXXXXXXXXXXXXXXXXXXXXXXXXXXXXXXXXXXXXXXXXXXXXXXXXXXXXXXXXXXX

SEQ ID NO: 19569 - protein, 125 aa, Succinivibrio sp.
VKIHGFNRVDESTHSKLINENQVIAVEDLNIKGMLKNHKLAKSISSVARSKFFETLEYKAEWYGRKVIKVPTIYPSSQTCSKCRYKNPLVKNLSVREWECPCCHARHDRDLNASVNILNKGLSVA

SEQ ID NO: 19570 - protein, 424 aa, unknown
  TnpB Polypeptide
MSIKAYKYRIYANVHTTDKLQWVLDRCRELYNAGLQERRDAYEMGVKRHPNYYDEEARTQLTHEHAIGYYEQKRELVDIKEERPEYQDIASHVLQDVMMRLKRAYDDFFRRVKNGEQPGYPRFQGRARYDSFTYPDGAGWKLDGQTRPADKKGIVRVNLKLTKIGTVKLHLHRDMAGTIKTVTVKREGEHWYAVFTCEMGAPEPLPISYEDVGIDLGVTHFAALSNGAFIDNPRFFRTAEKKLAKAQQALSRKKKGSHRRKKAAQRVARCHRKIANQRKDFQHKASRVLVKQYQVIVFEDLKTANLTKRPKPKQDEETDHYLPNGAAAKAGLNKSILDAGWRTFTEMVSVKAAWAGRTVLFVNPFMTSQLCSGCGAVVKKDLSVRWHSCACGTELDRDTNAAKLILNRGYHQLSVGTRPTSATA

SEQ ID NO: 19571 - protein, 378 aa, unknown
  TnpB Polypeptide
MNKQIRKTYQFKLYQSKKLSTLHDQVNISGIIWNHCVALHKRYYRLFGKSLNVYQLQKHITKLKKHEKHAFWKLVPSQAIQDITSRVDKAYAKFFDDLKRKQRTSPPKFKAVRRYKSFTLKQAGWKLDSNILTIGKRTFKLFLSRELKGTVKTVTIKRNSLGEFFVYFSVIEDASQSIFTSGKSAGLDFGLKTFLTVSDGSEIHSPEFFKTNLGLIQQASRGLSTKKKGSNNRAKARLHLARVHDKTLNQRKDFFFKLAKELTQKFDYISIEDLNISAMSKLWGRKISDLAFSEFVQILESQGQKYFCEFTKVGRFYPSSKTCFDCGNINKELKLEQRTWTCPGCNSLLHRDKNASLNLDREGERVRTLTHKVDKTAA

SEQ ID NO: 19572 - protein, 294 aa, Micromonospora sp.
MIRGAGVVVKRAYRYRFYPTVEQADQLNRTFGCVRKVYNLALQARTRAWSVDGQLTLAKMDAPLAIAWSRPLPAEPSTVTVSRDSAGRWHVAILVEDPGVQPLPPQATAVGVDAGITSLLTLSTGEKIINPRHERVDRRKLASAQRNLSRKTKGSANQAKARLTVARIHARIADRRRDHLHKLSTRLVRENQTVVIEDLSVRNMLRNHRLARAISDAAWSELRHMLEYKAAWYGRTVIAIDRWHPSTKTCSACGRINTTMTLAMRVWTCPGCGSEHDRDVNAANNILAAGLTER

SEQ ID NO: 19573 - protein, 373 aa, unknown
  TnpB Polypeptide
MKKTYLYKAKINKQTETNCNKWLDICRTLYNLALEQRIHAYRQYHKSISVFQQMAELPGLKKAYPEFKTVNSQCLQDVIQRVDRAFKIFFQRLKQKNGKAGFPRFKSKNRYDPFTLKQTGWKLEGKYLYVKNVGRFKLFLSRPIEGVIKTITIRRSSTGKWLVAFSCDDVPAKKVPETNACVGIDVGIKSFCVDSNGNRIQNPKFLEQSLKLLRRRQRSLSRKQKGSNRRNKARVLVAKAYEKIKNQRRDFLHKVANFYISNFQTIYIEDLNISRLTKSRYLSRHIADSSWGMFFNLLSYKAAGAGRAVIKVTPYGTSQICSGCGEKVSKSLSDRVHHCPFCGLRIDRDYNASLNILRLGQSLQALNTQRVFA

SEQ ID NO: 19574 - protein, 389 aa, Methanosarcina sp.
MESTKTIQLKILNPDFNLVETMQKYSKGMNYTSNVVFEHGKIIPAMKLQKMVYPYLRENIGLKSQVSCTIPRQVAGTYKTIVKLAKIGMSYWQKVVYSPTSMTLSYKRDYTITENSVSITTFSHGRNTYQIQNYEYALQFFKSPWKFEASKVVKHKDGDYYFHLTVSQELPDQKIENASTFMGVDVGINYLAVASTTDKKCKFFAGGEIKNKRNIYKEMRARLQSKGTLSAKRVLKRLAGKEKRLMTDVNHCISKAIVKFAIENSVSVIGLEDLTGIRDHTNNKLRKKQKYLHNSWAFYQLQQFIEYKAKNAGIITEYVNPEYTSQTCCRCNHISKNNRNGLTFRCKACGFDLNADLNGAQNIEHRTRDYRYILESQGCKSPTHTDNMI

SEQ ID NO: 19575 - protein, 89 aa, Okeania sp.
RQLEYKADWYGRELIKIDRYFPSSKRCSKCGHVVEKLSLSVREWKCRECDTHHDRDVNASINILAAGGAVSVCGATVRPSGSKSRLYGC

SEQ ID NO: 19576 - protein, 308 aa, Okeania sp.
LDKVRKISINLENLLIICYGIFNSPNLSNAFFHGLPVPMKSIKTKLKLNNQQKTILAKHAGVARHAYNWGLATCIKEYEETKKRPSAITLHKRLVAEVKSINPWYYEVSKCAPQQALRDLDRAFKNFLTIPERGFPKFKKKGRKDSFYLEGSIKIFQGNYIQLPRIGVVKTYEILPPVPVKNVTVASFRGASLTKKADSWYISFKYNFEPCPTEKARETIGVDIGINTLATCSDGTKFANVKAYRQAKKRLVRHQRAVSKKVIGSKNRRKAVKKLAKLHKKVADIRADALHKLTSWLAKNHSTIVIEV

SEQ ID NO: 19577 - protein, 360 aa, Okeania sp.
MKSIRTKLKLNNKQKTLMAQHAGYSRWCYNWGLSLWNAAYKAGYKPNTRKLREVFTNHTKALYPWMKNLSSRVYQYAFINLGEAFKRFFKGLGKYPRFKKKGRSDSFTIDNCGKPIELNGWSHKLPFIGWVKTYEPIEATTKKITISRQAGDWYLSCSYEWNPTTTPKKTDVVGVDLGVKTLATLSDGKVFESVKSYRRFEAKLSRLQYLNRHKEVGSANWKKAQLKIAKLHAKVANIRKDAIHKLTTYLAKNHGTVSIEDLNVSGMLRNHKLAKSIADQGFYEFRRQLEYKCEWYGSELVVVDRFFPSSKTCSHCGHVQDMPLNVRTYDCPECGLSIDRDLNASINLRDAVGLTVNACG

SEQ ID NO: 19578 - protein, 407 aa, Natrialba sp.
MKRTNQFVVRPQSEQDRKLLHELLDASASLWNEITYERRQQYFDGETVWDTEDYRKKYVGVLGSATAQQVIRKNKSAWKSFFAAKENGEDSNPPGYWGNEDDGRELRTYIRNDQYTLKMGDRSRLEIPVGQDLKKKYGLGYRERLRLEVAGDPKWEGNQGQLELYYDERSNQSRAFQPVTVDDSRLDSPLADESAALDIGVNNIVACTTTTGQQYLYEGRDLFERFRETTQRIVELQSKLDNQHRTSKRIDRLYRRRCFDSARRQPNRRPRDTLVGADEREVAQLLGVPPVHRETRRYCRGVRDLDRGSIGSLDIADVSELRFNRGHDPAPGYAHLPVRVRRSRGPRSERDVHETARIGSTADGTARVPQVGRPYMVGDTTLSPSQRGAHKPEYPRIGESRPRGGST

SEQ ID NO: 19579 - protein, 253 aa, unknown
  TnpB Polypeptide
VKELKKKEYIPLTDEIAIDLGLNPLFATDKGDLFGRNFLDVLKSFDEKITKRMASLQKRNIKPRDDKKYRQYVDKLRDYLKNEINRLINVIVKIYKPKRIIIERLDFRSPELSKRLNRLIQRFGKKYIKQKLERLQQLYGIEIIEINPAYTSQECSSCGYVDERNRKNTQEFECRACGNKTNAQINGARNILKRSSLGSLYLTKKQVLKILTERYLERLKGCKSPPLDILKGNPYFKDCLESILNPCQGLTSS

SEQ ID NO: 19580 - protein, 469 aa, unknown
  TnpB Polypeptide
  misc_feature (281)..(288): Xaa can be any naturally occurring amino acid
MITLQCLLEFKNEKDKEIVLDLMRRFSSAMRYAYKRSLEGEKRKDLKKHLSKTFNINTRYSDDAILLAKQTIEIYKSHNKNPKKVIFGSRALFDKLNKKHLTGKSRKSLIKKWREKRQGNLYSRGDKSKQGNLNLRLQWINDKLYLRINTGDRQYIYAKVIRGVKREKDKWIEFMFMLLKAKESGSWFPYSVRLKVKNGKVYAFISVEEKLPPITIKKDSGVIGIDINAYPFHLALATVSKDGNLENYQAISLHELLDVSSEKRQYLEWQIAHNIIEMLRXXXXXXXXKAGDVSAYIPTNVISITDGQIYLEPDLFNKGIRPAINVGLSVSRVGGSAQIKAMKQVAGTLRLDLAQFRELEAFMQFASDLDKATQDTINRGLRLVELLKQGPYSPIPVEKQVIAIYAGTNGYLDDIPVSSVRKFEMELYGFLDANFKDLLDELRTKKAIDDSVKAKLKTALDKFKASFIP

SEQ ID NO: 19581 - protein, 133 aa, unknown
  TnpB Polypeptide
VARVYEKVTNQRNDFLQKQSTMLVRENQTICIEDLNVKGMIRNHKLSKSIASVSWAKFFEMLEYKAGWYGNEIHRVPTMYPSSQTCSCCGYRDPRIKNLGIRIWECPKCHAVHDRDTNASINILKKGLQMQSA

SEQ ID NO: 19582 - protein, 405 aa, unknown
  TnpB Polypeptide
LIKTYSLTHQLSLDAFFVAYKTLLNQMLTESWGHIQWKEKPLKKKTQKRLLPTLPTYAFKKVLRTQYLPTWPYAKHWVDSALKTTFAILKSWQKNYLKGNRTRTQPTVKRSFVRVKQTLMKLEGERLRITIKPREFVYIDLSKRYFQLKGKLGEPILTSTKIHLPFREIDPIPEGIEQIAWDSNKFSLDGFSPTQGWLKIDLKPLHTLHITYDNKRRHLNRIYARNKRQGQRLYRKYRARERHRVQNYLGHLIKRLTALPATHGFEALEPRKMIRAHQRRWNRELQHTDWRKIVRLMQNRAKVIEVPAYYTSKICARCGYLHKDLRGTKIFECRTCGLKIDRQLNACINIYLRMRGFSHDIAWFDRTVVGGFALIGAETKSSDELVRSLDELMKPQVYICVSMPT

SEQ ID NO: 19583 - protein, 209 aa, unknown
  TnpB Polypeptide
VAKTAVARSLPSTPAQQTLRSVTEAFKSFKSLRELYFKGQLHFKPKVPDYLKGSKLFKIAYPNSGGQKPGLDNGQLRFSLGLTVRRWFGLSAFFLPMPSNIDIRKVKEFTILPKNGAFYLELSYELKSRINALDINQALSIDFGTADNLAACVDSLGNSLLIDARAMKAMNQLWNKKVSTRKEGKSEDYWDNWLFPRHSIAQSSNAGWY

SEQ ID NO: 19584 - protein, 370 aa, Bacillus sp.
MAKQNKAYKFRLYPTEEQALIIRKTFGCVRFVYNKMLGERKETYETFKADKEARKKMKYPTPANYKKEFSWLKEVDSLALANAQLNLDKAYKAFFKGNAKFPTFKSRRHKQSYTTNVVNRNIELLDGHIKLPKLKKVKVKQHRTIPAEHTIKSCTISMTASGKYYISILTEYEKQIVKKEIEKVVGLDFAMNGLFVDSEGKKANYPKFYRQMLNKLAQEQRKLSRKKKGSSNWNKQRIRVAKIQEKVANQRKNFLHHKSKEFVTYYDAVIIEDLDMKGMSQALKFGKSVADNGWGMFTSFLQYKLNEQGKQLVKIDKWFPSTKTCSKCGSVKDIKLSERTYQCSCGLKLDRDYNSAINIKKEGIRLLAIA

SEQ ID NO: 19585 - protein, 445 aa, unknown
  TnpB Polypeptide
MNRYPLSGKTYTFKTIGCRLDQADVAANRVAIDELFRQFAAVMGVFRRLMPVRAPFRKAFRMEDFAAARAAGPGLKVDTRMAALDKTIEMWRSFEAKGKVGKAGIPGHPEAPFVRLSRRSYSLAASGPTIVECKKLGVSIDTPRGPVRLGLLGDGYQVPILQKVLRGDGGLIRCFAELVWRPELAIDIHIGRPVDPAVCWLPESPLPGIIYIAIGVDIGVRNLVVAVAPGKGMKGVLFVKGGRWREFRRHNARLRAAARVRGDMDAWKASREAEGRHTMDAAHKASHDVIELARRVADRRAKELPVIIIEDLDFDDMAIKDTAPLKADMAAELREWPFALIRKLLIEKAAWEGFPVIVVPPAGTSMSCPGCGSLDAVRRYDVHRLVCPDCGYRANDDYCAAVAIARRGMAALMEDIHNASGTFHHHIDELCGANGPTDGGAVDAP

SEQ ID NO: 19586 - protein, 395 aa, unknown
  TnpB Polypeptide
MLKAFKYRVYPNKEQAILLNKHFGCVRYIYNQGLQNKIESYETTGKSLSCNKLTTGMLIDLKNDPSKEWLKEIYSQCLQMALRNLDNAFTRFFREKKGFPKFKSKHKSIQSCQFPQNVRIDLDNKRIIFPKIGGLKTVFSREFEGKIKTTTLSRTSTNKYYVSILVDNEVEFPEKVKIEKETTIGIDLGIKDFCILSNGEKIENPKYLKNNLQRIKVLNRRASRKVKGSNNKKKANLKLALKHEYVRNIRQDFLHQLSSKLISENQTICLEDLNVSGMMKNHCLAQSISDVSWSQFVDFLKYKAEWYGKNILQIGRFESSSKTCSICGWIKKDLTLKNREWVCEKCGVKHDRDINAATNIKKFGLITHFKYANYNYSGKELPGEPMEMSGRKQNL

SEQ ID NO: 19587 - protein, 394 aa, Proteobacteria sp.
LNLESGRLYTQVLVTHWRIVRKQGHWLRPGTAEKLNDFFNPVKRWHAHTIDAAQQGFYKACTTAKAVKKLDPDAKYPHWPKRFRTTIWKHTAIKKAGLVLTLSNGKGTPSLSVRLPSHLADVLRVLEVRLVYDKRARRYTWHVVVENGKHPAEATGRNVVSVDLGEIHPAVVGDAEEATLITCRERRHEAQGHAKRLARLTQALSRTTKGSRRAKKLWRTTSRIKAQHARVIRDLEHKVSRAIVEVAVERQASIIVMGDVRDIADGVDLSKQTNQKISGWNHGKIRALITYKAAAEGITVTLQDEHYTSQTCPQCGHRHKPRGRVYTCGQCGFSGHRDVVGQVNILSAYLHGEPGKITAPATVKHRMPHNLRLMRRCRDTGQVPRACSLETDHV

SEQ ID NO: 19588 - protein, 365 aa, Proteobacteria sp.
MRKTMQYRLYPKDAQIQALKVQLGEACRLYNAALQERRGAYKHAGLSLTYYDQATQLKAIRAAGDLALANFSASQDVLRRVDKTFKAFFRRVKAGAAQPGYPRFKSRKRFDSYTFPSWGDGCRLTDAGRLYLQGVGHLKVKWHRPLEGQIKTVTVKRQAGQWFVGFSIEYEGEALPGTDAQVGIDVGLTDFATLSTGETIPNPRYYRKAQARLRIAQRRVARRTRGGANRRKAVVLLQKAHAHVQNQRADFHHKTSRTLVETYGVIAVEDLNVKGLASGMLAKSVNDAGWSAFINKLDYKAAEAGRQLVCVNPRGTSQTCLCGAEVHKTLAQRWHECPACGLSAARDHVSAQRILGLGLSLLDLT

SEQ ID NO: 19589 - protein, 527 aa, unknown
  TnpB Polypeptide
MNPGMPKGKPSKVFQGVHARLVFLDKEDERAVLDLTRRFSSATRFAYQRLLEGKNREELKRESGPLCVLFSLNTRYADGAIEKAQAILDSAKELGNDPRKVVFGGRKLFEQLKRGHLSGKALLALKREWKEKRQGFLYSRGDAAKKGNANLRLELGNGTLWLRVNLGDGDYVRALVKTSHPQLNALRERVYASLPYNVTLQLKDGKVYAHFTWSEELPPPVYTKANGVLGIDVNADPYHLALAVVSPDGNLARYMTLSLEEVDRAPNRGAKELALWKVAHQVVAVAEEHGIAVATERLKYLRKSRKGDGSSRAFRRTQHRFAYRSLLEKIHSLARKRGVEVLEVNSQDTSTIGMLKYAPQLHLSKDVAAAYVIGRRALGFAERLPKGYKVLLKDDTFHAHAQGFYKNRLQELKKLRKAEKNPYLKRRLSRKIGKAKTALNLVSSLQGLPGSWWKSTDGRNFPGANPWRVLRVGLFLPLLGLEVPRDLSRLKPILHFSPPTQGSWKGWKIGLRSSSWWGPGCANVRFC

SEQ ID NO: 19590 - protein, 399 aa, Nonomuraea sp.
VQLRYAYRIDPTPTQRFALSRAFGCARTVFNDALRMRNDAHDNGFPFVSDAELSRQVITEAKKRPDRAWLGEVSAVVLQQALADCTTAFRNFFASVSGKRRGPKLAPPRFRSRKDNRQAIRFTKNARFKVSQDGKLVLPKVGKVAVRWSRDLPADPSSVTVIKDAAGRYFASFVVEVTAQRLPGIEAETGIDLGLGHFAVLPDGTKIDSPRFLRRAEKRLKKAQRVLSRKEEGSKNRDKARHKVARAHARVADARREFHHQLSTQIIRENQAVFVEDLAVGGLARTRLAKSVHDAGWSAFVNMLEYKAKLYGRTFAKVSRWFPSSKLCSACGAVTEAMPLQVREWTCGCGAVHDRDINAAINILAAGRADRLNACGGPVRPSFGMAQPREAGSHGSAAA

SEQ ID NO: 19591 - protein, 409 aa, unknown
  TnpB Polypeptide
MAEIVKTMKLHIHPQKNDIAALTELTESYQVACNFVSCYIFDHGFPLNSVELSKLLYQTLRTEYGLKSQLAQSCIKTVIARYKTIKDQLLNHPYSYQEKDEPRQYITRTLDWLQKPALFSRPQADFVRNRDYSFVDGGSVLSLNTLQGRIRVSFDVPECFKDYFDGSWKFGTGKIVSLLGEWYLHIPMTKEYGKEYSSETVKHVVGIDRGLRFLATTYDEQGTTTFFDGKTIMQKRDVFQAVRSEAQSRGTKSAKRVLKRVSGRENRWMTDVNHRITKTLVTKYGQGTLFVLEDLTGVSFNEENISQLTKTGRRQLRSWSFYQMEQMLTYKAHETASEVIKIKPDYTSQRCPKCGRIRKENRHHDIHEYICDCCGYRSNDDRIGAMNIQLLGTFYVSGDTNPKLKHKEN

SEQ ID NO: 19592 - protein, 338 aa, unknown
  TnpB Polypeptide
MYSEKVMDHFQHPRNVGEIEDASGVGTVGNPKFNAAEHLVHTTKKNPARFDFDLRFPKMPSYLRRAAIQHALGSVSSYETRMDLWEKSGEKAGKPRLAYENHAMPVFYRDVMYREEKEGKDEAYLKLYDGHDWKWFCVRLNHTDMEYLRRNWSGKKASAPTLEKRHHKYFLRFSYTEEVTLTKTPVKEQIICSVDLGINTDAVCTIMRADGTVLGRKFINHPSEKDRMYRTLGRIRRFQREHSSAQSRGRWAYTKRLNIELGRKIAGAIVKNAEENHADVIVFEYLEMQGKISGKKKQKLHLWRKRDIQKRCEHQAHRKGMRVSRVCAWNTSPRCFRI

SEQ ID NO: 19593 - protein, 451 aa, unknown
  TnpB Polypeptide
MSQKVRIDGVKHIGASVFLGVDHCNNPCWTRNPERIMVWLCDGWRTRFNQRREQRPCNIPVKNDSGEIVDWIEGPLGGPDVSELLSDKEARLQCSWMAAVPSSILATSNRLEDTEWSAGIKRKKTIGGCVPGFKSRRRGLGFVCWYHPSGNFYNAVFHKTGRKSGVVVITGMNPKRWVKPGEKSHWRVVIHVRVSQPIRPYTSVHVDWTHRTLVFVNMPLPLPRIGDGVIGLDCGCVHTLASSGGIFMDMPKPSKVELKRLKYLQRRMSRQDRVNEARGGRAAKFESKRRRKTLSEFNALNGRIVRRRNDWIEKTTTSLAKANVLVAMEDLDVKAMTKRPKPRPDPDNLGQYLHNGAKAKAGLNRSILSNNWSRLRKRLQDKMNANGGRLVVVPAAYTGQTCHECGHVASENRDSQAVFHCVECGYKANADVNAAMNILGRAISKTGGGTA

SEQ ID NO: 19594 - protein, 206 aa, unknown
  TnpB Polypeptide
LPGSLDRLKVLQKRLSRKRKGSSNRNKARIRVARLQEHIANCRKDNLHKITHALTHDNQVRTICMEDLNVKGMQRNHHLAQAVGDASFGMFLTMLEYKCNWYGVNLIKIDRFAPSSKTCGKCGYVYKGLKLSERSWTCPECGTRHDRDFNAACNIKEFGLKALPSERGDVKPVDCPTVDDRPRVLKSRGRKKQEKRRDNSLRSLCL

SEQ ID NO: 19595 - protein, 405 aa, unknown
  TnpB Polypeptide
MRKAFKYRLYPNKEQERTLFWTLARCRELYNAALSERRDAYKMAGKSISYYEQKRDLPEIKGVLREEYQRIHSQALQDVFLRLDRAFKAFFRRVANGEKPGYPRFQGRNRYNSFTYPQGGYSLTEKRVTLSKIGSIKIKLHRPIEGTIKTCTIKYEAGQWYAVFSCECETPEPLPVSQEEVGIDLGLLHFAALSDGNFIDNPRYYRKTEKTLARRQQVKDRRKRGSHRREKARRLVAKAQRKIANQRRDFLHKQSRKLVEQYQTIVFEDLQIDNLVKRPKAKQDEQGKYLPNGASAKAGLNKSIQDAGWGMFIKMVSYKAECAGREMLKVNPCKTSQICSACLQECPHKELDERVHICVHCGVVRDRDTNAARNILRLGRSQQGAIPVEAPAFQARGTSQGYITG

SEQ ID NO: 19596 - protein, 309 aa, unknown
  TnpB Polypeptide
MEKRAYKYRFYPTPVQAEALVRTFGCVRYVWNWALRLRIDAWLNEKRKIGYHGLSAELTKLKAQLETSFLNEVSSVPLQQTLRNLDRAYQNFFEGRAEYPKFKPKHNRQSATYVSTAFSWKDGQLTLAKMSEPLNVRWSRKFKGTPSTVTVSKDSAGRYFVSFLVEERIKRLPISREVIGVDLGLLDTVATSDGSKFGNPRFFQKDEKRLTKAQRRLARKKKGSRNRQKARFKVARIHARIADRRNDFLHKLSTRLIRENQTICAESLAVKNMIQNPHLAKAISDGGRSQPLSLSWGREIMHERRRMST

SEQ ID NO: 19597 - protein, 523 aa, Chlamydiae sp.
MSYTYQTRFEIESSTILDEYAQVFSQVERKLFADISSGKNPNNLKNSYLQSFQITARQYNAVRTQIQGKITSIKKRTPQTIISLGQCITSLKQKIKKAKRKNKSVLHQKKRRLFRLENKLQKLKEDHKNGKIRLCFGSKKIFRAQFHLEKNNYKSHLEWKKDWEEARNSSFFILGSKDETAGNQSCTATICEDGSLTLRLRLPNKLSKKHGKYLTLPNIKFKYGHEAILASLASCLERQKTTGPNKKQLGQAISYRFKKDKKGWRLLASTTLEKPKQITQEGIGVIGVDINSNHLAAVEIDRFGNYLEKKTIPLNTYGKSKDQALSIIGDACKIIIQWAETTKKPIIIEKLDFQKKKTALKEQAFKKHARMLSSLAYNKIIEFLNSRAYRFGIAIHTVNPAYTSIIGVVKFAKRYGLSKHHAAALCVARRHFRFSEQPPKSFAEIPDGKQDLFTLPLPVRNRGKHVWSLWGKLNRKYQAALAAHLRAKSYRSLRSAPADLRDKKIPNVVGEIPARESLATLLG

SEQ ID NO: 19598 - protein, 288 aa, unknown
  TnpB Polypeptide
MVPGMFKTYRYGISSEKLEGEESVSPDPGKETAPVFSAFFYTEEVTLTKTAVEEQIICSVDLGINTDAVCTIMRSDGTVLGRKFINFPSEKDRMYRVLGRIRRFQREHSSVQAGGRWEYASRLNAELARKIAGAVSAYAEEHHSDVIVFEYLEMQGKIAGNKKQKLHLWRKRDIQKRCEHQAHRKGMRVSRICAWNTSRLAYDGSGAVLRDGKNHSLCSFSTGKRYHCDLSASYNIGARYFIRELLKPLPATERSLLEAKVPSVKRRTSCVYADLRELHLQMEILKAV

SEQ ID NO: 19599 - protein, 340 aa, unknown
  TnpB Polypeptide
MLLTFNIKHGRDFSAELTKARKVAEYAVEHHSRSSADVKHIGLKSVIACQVLRKYSNNSNIRTVSRVQLTVPGQAVKVNEGRKELYISCLKLRLDISYLPKFEKVNQVELDKEYAHVAVTINEPPVREAEQWVGVDLNSTGHIAVVANLATGKVQKYGKEAPHIRRKYSKMCRRLHIKGHHRVAKKKIKRKESRKIKDINHKISRAIVNEAAQQACGIKLERLSDIRTTARQSRSSRPSLHSWSFYQLQFMIEYKAKLLGVSVAYVDPAYTSQMCSRCGLLGARNGKDFTCPHCGHVDHADANASFNIALRPSLEESVGRSHADRDACEGHIDTPQEAPA

SEQ ID NO: 19600 - protein, 376 aa, Paenibacillus sp.
MCGMLSSDQDFGSQKRVHKAYKYRIYPTKEQQQLIHQMFGCCRFVFNHFLALWNDTYATTGKGLSYNTCATQLPALKGQFDWLKTVDSIALQSAVRHVADSFDRFFKKQNQAPRFKSRKHPVQSYTTKQTNGNIAIKENKLKLPKLGWVRFANSRALEGRILSATVRRNAAGKYFASIVCEVDIHPLPQNNKAIGIDLGLKEFAICSDGLRVANPKWFCHYEKKLAFWQRRMARRTTGGSNWFKAKQKVAQIHEKIANGRHDFLHQLTTRLIRENQTISLENLHVANMLKNHKLAKSIADASWSEFERQITYKASWYGRTVKMADTFAPTSQTCHVCGFINQEVKNLSVRQWTCPCCDSLHDRDENAAHNIKQMAI

SEQ ID NO: 19601 - protein, 399 aa, Desulfitobacterium sp.
VFVIIRVYKLNFRTSRDNLNRLYACNRVSAQIWNQCLELAKDHYKKTNTWLNRKELHLATKGLYPIHSQSIQAVYEKYLNARENARQARALGYIQIRYPYKEKHHFNTKWKKDGFRIGEKGRIELSLGLWEGKRQQPITVRVAKLPSGQIKEIELVYDRGLKLAMAFEDGINPKENLAQGQAAIDLGEIHALASVTDQGQGLIITGRKVRSIKRLRNKKIKELQRKMAHCQKGSRQWKKYRRAFHYVLSKSEAQLTDALHKTTREFVHWCLENTIKDVVVGDVEGVQRHTSPKKKQNKRKRPRRTNQKLSQWTFGKTLGYLQYKLAAEGISLKKVDEAYTTQTCPVCGKRSAPSSRTYRCPCGYSQHRDLHGASNILTQHRYGHYQKIVLNDYKYLRIA

SEQ ID NO: 19602 - protein, 414 aa, Saliphagus sp.
MEVRRTAVVKLAVSDKHRDALHRTAEYYLYCANRTSEFCWSKSSIDDCKTNKRTVRDALYTDLREETELHAQLVQAAIRRGVEAVKGVVERWKKGQRVSRPTFTAETIDYDTRSATFSRTTASLATVDGRVELPFVLPSSSPTPYEQYVLSEDYEFRESTLRYDPVTDEFYLNISMRRYDSDQSGVSTDTEHQSVLGIDLGVNSLAVASTGTFWQGDDYDHWCREFEKQRGKMQQRGTQAAHNAVLRLGKREDAWRKQYIHTVANEIVSEAVENGCDVIVFEKLDGIRERLPFAEWHHIWAFRRLVEYVEYKAPERGVSIEQVAPNHTSQRCSRMDCGFTHESNRDGEHFHCQKCGYEVNADYNAAKNIGLRYARKRHHRLRSSPTSGGGDAPVDVRVNGGTLNGESHRPIVGD

SEQ ID NO: 19603 - protein, 373 aa, Desulfuromonadaceae sp.
MKRTISIKLATSPEQEQLMATLQAEFARACNLLAGMAAGKRIRNRVSLHHEGYYLMRAEVPDLGAQMTCNAVAAVAQSYGSLLSNNPDLRKTDWPVISFRESGSVHFDKRTYTIRGNAISLFTTHGRIIVPMKIGKFQQRFLDQGFPKEAKLICRKGRFFFNLVLDLPDVAQNDTGSVLGVDLGENTIAAVSTGKLFDGGRLRNDRDRFLALRGRLQRNGSQSARQLLKKVSGREARHVTHVNHEVSKAVVAEAARNGCSTITMEELTNIRKRIKGGKRMRSRLHRWAWAQLQTFITYKAEAAGIRVEFINPAYTSQTCSVCGCLGSRVKHRFSCACGSLAHSDLNASRNLAKLGATAVASTGAVNRPHVGTV

SEQ ID NO: 19604 - protein, 470 aa, Herminiimonas sp.
LNKLTTGSSKELGLHSGTINAVCEQYAKSRAQKKRPYPRHRGRKALAWVPLKGRELTREGNAFRFAGHTFRVFHSRPLPDGKIRDGTRFAKDRRGNWFLNIAIEVPAAPAIAPVRGVGIDLGLKDFAFFSDGTRIEAQRIYRDAEQQLAVAQRANKKRRVTAIHAKIANRRRDFHHQRSARLVRDFDYIAVGNVNAAALAKTSIPDRARLSDGAGLSVQPADGRLAFRTERRHGGDGGPVLERAHSSCGNLPPMYHGHRTGSAAGAGPAPVPSSTIKRRHEHPQPGLSVPSAIRCRHRRIEPCAWRRRDRAAQSDRRRFCRRDLAGKSEVHGTRRLAGLCQRGGATGRPGPGRHLHAGCNRRRDHRATRRARHQGGDRAHRRPECLEGCGRHQHAGRDAGGGQAISPAYPRLELRWSPGAGHRPQCEFCAYWRAARQDRVRVAIGCAGDRRARLGKVAWHRVFEIHFAGR

SEQ ID NO: 19605 - protein, 218 aa, Herminiimonas sp.
KRRPAIRPWLTGFDLNKLTTGSSKELGLHSGTINAVCEQYAKSRAQKKRPYPRHRGRKALAWVPLKGRELTREGNAFRFAGHTFRVFHSRPLPDGKIRDGTRFAKDRRGNWFLNIAIEVPAAPAIAPVRGVGIDLGLKDFAFFSDGTRIEAQRIYRDAEQQLAVAQRANKKRRVTAIHAKIANRRRDFHHQRSARLVRDFDYIAVGNVNAAALAKTSI

SEQ ID NO: 19606 - protein, 385 aa, Streptomyces sp.
VKVVVQVKLLPSPEAAAALAATLHACNRAADRASAVAYETGTKSRNNLQKLVYADLKADFGLGAQPAVRTVKKVVDAYATLRAHIGAGNLGPVGAKRRVQAESKPIVFRADAAQPYDDRILSWQHDAATVSLWTVAGRLRGVRFVGHPGQLKTIRECRKGETDLVHRDGMWFLTAVCEVPEEPLSEPVDWIGVDRGIVNLATASDGSNYQGRRLSRYRRRHAAKRAELQARRTRSATRRAKRRAKNEARHAAHVNHEISKEIVAVAQRTGRGIALEELRGIRDRVRPSRDQRATLSSWPFHQLEEHIRYKAQRHGVPVLAVDAAYTSQMCPRCGHTARNNRPSRDLFPCRRCGLAGPADHVAGVNVRNRARSAWVLANGPVPQGT

SEQ ID NO: 19607 - protein, 475 aa, Micromonospora sp.
MSYRMVSVPGMGHRDRPSVIQSYRFALYLSPVQERALVGHAGAARKAYNWGLKRIKAVMDQRAAERSYGIPEGQLTATISWSLPALRRAWNVAKPVVAPWWRDYSKEAYNTGLDALARGLRNWADSRSGKRAGRPVGFPRFKSRHRSTPAVRFTTGTIRIEPDRKHVTLPRLGRLKLHESARKLARRVEAGTARILSATVRRDGGRWYVSFTCEVERAKCTPACPDAAVGVDLGLQHLAVLSTGDVVPNPGHLDTAIGKLRRISRGLSRKVGPDRRTRRDASKRWCRNQTVLGRAHARVANLRRDGLHKLTTTLATGYGTIVVEDLNVAGMLRNRRLARRISDAGFAEIRRQLTYKTRWYGGRLLVADRWYPSSKTCSGCGTVKTKLALSERTFTCTTCGLVLDRDVNAARNLAALAATVAGSGSETLNGRGADRKTPHPGPVAVKRLPGTATVGKTGTVPPQGRTSNHVLTSAT

SEQ ID NO: 19608 - protein, 405 aa, unknown
  TnpB Polypeptide
MKFNRQVRLYPNKTMKHVLDSLCDYRRYCWNEALACWNNQYEARLIGLSESVLDKLRSDTESLTNEERKLVTQYPRPSYYNVRDELVSQKEDWQYTFSSRVLQQAVKDVAMAWELFFKNQDTAGRPTFKTRKSTKQGFKTDRARIHNGQLLLDKPHGYHGQWKTIQFKGLSIPDGKLTLCSVTRVNGRYTATFTIEVEQTHLTYTGQKTAVDANVDHFDTTEGRTSLKPEVLNPLYARVRHYQRVLARKRCRNPRAIHSKEYQTTRTKLQRTYERIAHIQKDLLHKFTTDLYQRFDTIVIEDLDVKKMQMSKRAKNLHRSLFGQFRQMMEYKSQKFGKTLIIADRFYPSTQRCSSCGFIKTGDDKITLSGNIKHGTRHNEYICYHCGYEDDRDHNAVLNLLVLAK

SEQ ID NO: 19609 - protein, 382 aa, unknown
  TnpB Polypeptide
MLTAVKYRIYPNKQQTILIHKTVGCSRLIYNLMLHDFYKNDLIKTPAKYKNEYPFLKEVDSLALANSQMDLKQAFRNYKNNKEHFGKPTFKKKSHSKLTYTTNNQKGTIRIENNKLILPKFKSGIKIVLHRLIEGIIKSVTIEQVPGGYYTASILYDVPECQEKPTLSKENSVGIDLGLTHLAITSDHKKYTNPKHFHKLQAKLQKEQRTLSRRREQNIEKRIYDEQGKVVKTIYKKPLKDCRNYQKQKQKVAKIHQKIKHQRLDNLHKVSYEIVKNHDYIVMETLKIQNLMKNKKLSKSIANVGWSMFMNMIRYKTERYGKELIQIDQWFPSSQICSHCQQNDGKKALSIREWTCSHCHTKHDRDINAAINIRNKGLELIS

SEQ ID NO: 19610 - protein, 285 aa, Richelia sp.
LTAARKNNEYLSKVNAQSLQQTLRRLEKAFVSMWEQNHGFPRFKKVGQMRSFSFPQLGKNPLQNGYIKLPVIGKIKVRQSREIPDGGVLKQARVVKRVSGWYVMLTVQWNVNPPQPTPHGEGIGIDVGLTSMVATSNGLLIKRPRFFVDAQRKLKLLQQRVSRKRKGSNNWLKATKKVAKLHEYVANCRKDWHRKLSHQLCDNVGMIFGEDLNLVGLSRGMLGKHCLDAYVLLKYLYKQQQQRSKFIAFHNAVDITKQLNQQRIQRNHNYKEARLMTGLLAARSN

SEQ ID NO: 19611 - protein, 372 aa, unknown
  TnpB Polypeptide
VNYNYRYRLRPSDALAEQLAWTVDTCRQVYNHFLHRLNRIDDTSAYSEQKLLPSIKKWWDDLKSVHSKVLQKVVQRLYDNLSTLKGLKENGHCVGELKWKGKGYYHSFEYSQSGFKLNQTSGRDSDELYLSKIGRIPVVAHRNQPDGAEVKTNRSPTEAGPDDKLASSTLKADQGQDQNVTKNLTSTALPRAAVLAYARQEEGQDISEGDIERIGSAMAENTDVAQVDLSTRVDISIKDQDSPQFVETYFDKMDKAFSSVRHDDQPSPFAVIARAQQNGSLESAQIRPYIDQYQTAVERLQSITVPKTFRDVHLKTLNSLERMLFALRRINSVSEDPVSAVIGVKELEKGLKANLEAVQMLNQKAKSYAESS

SEQ ID NO: 19612 - protein, 380 aa, unknown
  TnpB Polypeptide
MLRAIKIKLYPNKTQEQTLNKVLGCYRFVYNQMLARKHNVYKIDKTNLSVTDLSKWFHGTLLKDEHYVWLKEQNTKVMKQAIRQMDGAYQKFFKLHNGFPKFKTKKDKQTALFPLEAISKKNKFETRHISLIGSLKNIKFRCSDLYFSRLQKYNKNIRSATLSKTKSGNFFLSILIEMDDTELKRFEHTNKQVGIDLGVKDFVITSDGEVFENKHFFKKKEKQVKMLQRQLSRKVKGSNNRRKVQIRVARLCERLANRKVAYIHYVTNELLTYFDTIFMEDLNVKGMLKNHNLAKAIQEVGFYKFKETLVSKSLVNDKKVVFIDRFYPSSKTCSQCCYKKRDLKLSDRFWVCPICGTKHDRDINAAMNILLEGQRMLAAV

SEQ ID NO: 19613 - protein, 393 aa, unknown
  TnpB Polypeptide
VLNEEKEEMNGVKMLRAIKIRLYPNNTQEQTLNKVLGCYRFVYNQMLARKQEAYTSENKSLGLNDLSKYFHGTLLKDEQYSWLKEQNTKVMKQAIRQMLSAYDKFFKQHNGFPKFKSKKNKETALFPLEAISKRNKFNVKKITLTKPLKDIKFRCSDLYFKRLKTYKEGIRSATLSKTKSGNYFLSILVELPQEEFVKFGLTNKHVGIDLGVKDFVITSDGEVFENRHFFKKQASKLVKLQKQLSKKQKDSNNRHKQRVRIAKVFEKLTSQKDAYIHSVVNELLTYYDTVFMEDLNVKGMLKNHHLAKAIQEVSFYKFKETLVNKALVNDKKVVFIDRFYPSSKTCSQCGYKKRDLKLSDRFWICPECGTKHDRDINAAINILLEGQRMLTAA

SEQ ID NO: 19614 - protein, 418 aa, unknown
  TnpB Polypeptide
MLRAVKIKLYPTALQSTQFNKLLGCYRVVYNQALARKINQYKDYNISENRTTLGRWFHHELLTNPEFYYLKEQNTKVLKYAIINMLTAYKNFFEQHTGHPKFKSKHNNKQSCTFERAAISRRNDYTNYKLSLANIKNIKFRCSKKYAEYLQKHKANIRQATLTKLPCGEYHLSILVDGNLTHKGIQDTDKCIGIDLGIKDFVITSEGEVFNNLHFKKNETNKLKRLQRQLSRKVKGSNNRNKARIKFAKANKKINDKKQYYLHSVSNALINENQVICMENLNVKGMMRNHKLAGSISEMNFGEFRRMLEYKAKWYNRKIVFVDKYYPSSKTCSRCGYKYKNLTLSVREWTCPECGTTHDRDVNAAVNILHEGMRLLGSSTTEFTLVDYPPMDDRPVMDLKSNDRLKQESNKEQGSDFV

SEQ ID NO: 19615 - protein, 401 aa, unknown
  TnpB Polypeptide
MRKINRTYRFRLYPNKGQTELLAKHFGCSRFVYNYFLNQRKEQYKLTGKSDNYYAQAKTLTILKKQKETAWLNEVNAQTLQFAIRSLDKAYNNFFKKRTKFPKFKSKHSKNSFTVPQTSSVAGGRLVIRKFTEGIKCRVHRKIKGKVGMVTITKTPSGKYFVSVFTEEEYITPIKKTGKSIGVDIGLKDLVVTSEGEKINNNRYTRKYEYKLAKAQQHLSRKKKGSRGFENQRLKVARLHEKIANSRADYLHKCSISLVRRYDTICIEDLNVKGMTKNHRLSKSITDASWGGFVSMLTYKAEWNDKKIVKVDRYFPSSQTCNVCGYVNKDIKDLSIRKWECPECHSHHDRDINAAINILRFGLNNISAGTVDYTGGGEVRADLLESHSSVKPEANESLTQG

SEQ ID NO: 19616 - protein, 238 aa, unknown
  TnpB Polypeptide
LSFLTVTAPFDTGAQVGLDRGIRVLAALSDGTLIPNLRPGSTCAAVVALHARHLDALSKKDAAGHVLNRRDPARIAAGRRLARAKEHEANARRDWLHKKSRDIVNTYDQVAIEDLRARSMTRSAKGTVEAPGTNVRAKAGLNRALLDAGLGMFATLIREKAAHAARVVVGVDPRYTSQTCAECGHVAKESREGAQFVCVSCGHQADADVNAARVILLRAQLAPTRAPGTARGKLHDAA

SEQ ID NO: 19617 - protein, 238 aa, unknown; identical to SEQ ID NO: 19616
  TnpB Polypeptide

SEQ ID NO: 19618 - protein, 402 aa, Escherichia sp.
VERLQAFKFQLRPGGQQEREMRRFAGACRFVFNRALARQNENHEAGNKYIPYGKMASWLVEWKNATETQWLKDSPSQPLQQSLKDLERAYKNFFQNRAAFPRFKKRGQNDAFRYPQGVKLDQENSRIFLPKLGWMRYRNSRQVTGVVKNVTVSQSCGKWYISIQTESEVSTPVHPSASMVGLDAGVAKLATLSDGTVFEPVNSFQKNQKTLARLQRQLSRRVKFSNNWQKQKRKIQRLHSRIANIRRDYLHKVTTTVSKNHAMIVIEDLKVSNMSKSAAGTVSQPGRNVRAKSGLNRSILDQGWYEMRRQLEYKQLWRGGQVLAVPPAYTSQRCAYCGHTAKENRLSQSKFRCQVCGYTANADVNGARNILAAGHAVLACGEMVQSGRPLKQEPTEMIQATA

SEQ ID NO: 19619 - protein, 596 aa, Rhizobiales sp.
MSRAERLLLAQLEAGRAWSGDLKVSFYQPLGISAVHLDMAYRQLMAKLASVSEFAKERANDLARKVASKKTDIKRKTLALARAKKARGKLAQELATISVKVEMRRASMRIAVEKHRADELFALKQLLIKHHARTAAFDTTRVEIKELRFALHQHKRRLAILEGKHAKACGQAVDPTICFGSKKLFREQFVLNGNGYADHDEWLVAWRGARSAQFTLDGNSSKEGGNQFAWLRPCGNGRFDLELRLPKALAHLATRTFKVSGQTISCIDLPGLSFNHGNDVIEEALASSKPVTVKFLRDAKSWKVMVSVDHALDWKMPDFSAGALGVDLNAGHVSAALVDREGNPVEVFKFPCVTYGKTTDQTQYAIRKVAAKISALAERLGVPVVCEQLDFSERRKTLKDAKDARYARMLSSFAYSAFGRALGSACARRGVALRRVNPAYTSIIGRVKFARRYGLSVHEAASVAIARRAMGYSERLPRSSTDTVTVPTNGCVHVTLDLPVRKDASEHALKSRHVWSRWNGLNKEYQKALAALGSSRRKPRPKRGKSQAWGRQLSRARDGILAGGADNRSMVLRRRQDVPAERRFSHDARGGQRARK

SEQ ID NO: 19620 - protein, 543 aa, Lactobacillus sp.
  misc_feature (320)..(542): Xaa can be any naturally occurring amino acid
MLRTQKVKLYPNQAMKKVLDELCDYRRYCWNQGLATWNEMYDASVILADKKQRPNERKVRDELVANKADWQYQLSARCLQLAISDLGKAWKNFFNKAQPDWGKPRFKSKKAPRQGFKTDRAKLVNGRLRLDKPRGIAEKWSDIKFKGAKDLAGELKVVSIYRENGQYWASLPLEVTVPSKPKTGSKTAVDVNVGHLNYTDGEINTLPSHLQKLYKRIKHYQRQLARKRKVNGKQATQSNNYAKTRAKLQRDYRRVTNVQHDLMQKFTTQLVNDYDQIVIENLAVKKMQMSHVASKGLQRSMFGYFRQVLSYKCDWYGKAXXXXXXXXXXXXXXXXXXXXXXXXXXXXXXXXXXXXXXXXXXXXXXXXXXXXXXXXXXXXXXXXXXXXXXXXXXXXXXXXXXXXXXXXXXXXXXXXXXXXXXXXXXXXXXXXXXXXXXXXXXXXXXXXXXXXXXXXXXXXXXXXXXXXXXXXXXXXXXXXXXXXXXXXXXXXXXXXXXXXXXXXXXXXXXXXXXXXXXXXXXXXXXXXXXXXXXXXXXXXXXXF

SEQ ID NO: 19621 - protein, 460 aa, Filamentous sp.
MKTTYQYRFYPDTNQKLELNHWLRICRYWYNRQIGDRFDWWEMNRTTANACPLIASISAPRERPNYYSQKQQLPVIKKDLVKVFHSGELLDFKQVDSTVLQDVSKRADKAFERFIVGDSKGGKSGKPRFKTEADYRTMTFATASNDWIKLVRKNWIYIRLPKLGVVKVRLHRPIPDGFTVKQASVTKKADGWFIQLMLEDPSVPEFTPDEITPTWGNSIGLDAVLHEDVYLATSEGDKLPSLKPLRKNQSKLDRISIKRNKRKRGSRARRKLAKREAKQHQRIARSRQDIQYKTAHKLVKTGAKFFFCEDLNLKGLTKRNKVKQGDDGTYLPNGQSAKSGLNKSWLDAAFGQFFKTLDYIAAKAGAVVISKKPAYTSMVLSYRNEIIFTDCSIRDYWDEQNSLMVDRDINAAINLKRLGLDIFPSIKRRSGNLSVVGSIDDSTIKEILYTLDRAAKMPTS

SEQ ID NO: 19622 - protein, 408 aa, Okeania sp.
MRLVERHIIQPTHRFYPEIDRLCFLSKNLYNYANYLVRQSFIFEKTNNSYYDLQKTLFTQADYQAMPAKVSQQILMILDRNWKSFLAANEVYKQNPSKFKSRPRLPGYKNKITGRNIVVYTKQAISNKQLKQGIINPSKTGIYLKTLVPTSQIKQVRLVPRLNHYVIEVIYEKCEKQYELEENHWASIDIGLNNLATLTFNQAGIKPLLINGRPLKSINQYYNKIKSFLQSKLRENQSSRRLKKLCNKREFKINDYLHKTSRLIIDTLINQKIGILIIGHNEDWKQKINLGKRNNQNFVCVPYKRLIEMLSYKAKMVGINVIITEESYTSKASFIDNDLIPVYKKDQKNKVTFSGKRVKRGLYRSASKGLINADVNASLNIMRKAVPNVFDHGIEGVVVHPVRVTPAK

SEQ ID NO: 19623 - protein, 408 aa, unknown
  TnpB Polypeptide
MKNILKAKGKKEMLKAYKYRIYPNNEQKEFLAKTFGCTRFVWNKMLEEKLEVLKQGKKIPRITPAKYKEEFTFLKEVDSLALANVQLQLEKAFRNHFKKPKHFGVPKFKKKKDKQSYTTNNQNGTVRIDCDKQLLFVPKLKSGIKIKLHRKFVGTIKSVTISKTTTGNYYASVLVETDNVQNKVKEPTSKVCGIDMGVKTFLVMYTDNGIHKIDYSKYYIKAEKRLKRLQRRLSRKEKGSKNREKARLLLAKQHEYVKNSRLDFLHKLSKIIIDDNQVIVVEDLTIKNMYQFSNLSKRIQDSAFGTFLRFLEYKAEHYGRTLIFADRWYPSSKTCSVCGYYYKEMDLSIREWECPECGTLHDRDENASKNLYKIGVIHLMSGRVGTIRTQACGETNSLCEAGSSHFYK

SEQ ID NO: 19624 - protein, 378 aa, unknown
  TnpB Polypeptide
MIRGEVVRLFPTPEQEKMFRECIGYARFSYNYCKSYDDNYVKTHNTRLSIFDLPKLIVQLKHSGNYDWMKKLPADIAKQAARDFAQAKTNSKRIYKNASHTSYKRKHDHKQSFFCDPYKTKIKSRKRVYISKIGDVKMGRKLPKDKKLKNPRVIQQYGKWYLSVSFEEEPKEKPILSEETIGVDMGLKDLMVLSDGSVYENINKQSKIRKLDKEKRRLESSLARKKVKGAKCQSKNYYKTRTKYYKVIEKLNNIRKDYRHQVTRNVINKNPKRLVLEDLDIKDMLKDATKAKAISEASWYTLRVYLTYKAEENGIDVVIADKYFPSSQLCSCCGYKNKQVKDLNIRTWTCPKCNVNHNRDLNAALNLKNYSDNYCTNL

SEQ ID NO: 19625 - protein, 602 aa, unknown
  TnpB Polypeptide
MTDSDLAVARQFSVTTRAYMAVDDATGEPIGLDDVDIRAGWLLDLVASAGAELVSRLWRPATFDVLAAGRDRQDRKLPVQGHVAAARLGWAPSYPDGTYVPSRVSRVVTAQVVATLRTLAYRDGAITALADRFDPATGRLSAPTGSEAHVPTGFARGVRRQLADRARRGERAPAERLRITDVQRPPQIAAMVRLSAADQQLAQLTVADRELVLTVKLPTCPAPEGPAQWRRVRLTAAIPDHLHGRPITDWHLPTLAIDHKGLLWRCAATEMVPAGDLPAGTVAVGVDWSPSTLGAAALATDTTDGLSSDYRGWAYDDRGLGIKLARLQAEGQMLHRKSARLAALAAAAAEPWVRAGLETKIAVLDGHRTAVGVKRGKINREMAFHFARQVTGYATAAGAQVIAVEDLVTLETRGHGRVNNNRAAQSARRKAVAALAHTAASIGITVVSVPARGSSALCPGCDEPVSRPGGYHFAWCSSCEVGGNRDHVAGINLAKRALLGKSKATRRRGQLPAVRVAEHAPVRRCRDKVGPTPRKPRHRRVRRSLPAHAPRVGVNSIKHVPAPQASVWDTVKPSAPHGDASIRDTRTSPTTATSVAGSMRST

SEQ ID NO: 19626 - protein, 364 aa, Veillonellaceae sp.
MVKTYRYRIYPNKSQETMFMKTFGCVRFIYNRMLFDRLKYYRETGKMLFNTPAQYKDTYPFLREVDSLALANAQLHLNNAYKNYFQRKGAGRPRFKSRKSLHQSYATNNQRGSVRIERGHIRLPKIGFIRIRQHRPFTGKIKTVTVTRTLGGRYYVSILVEDENQVRAIDPHTFAGIAFSLHGLYAASDGTGADMPQNCLRTLRRLRREQRKMARTKRNSRNRVKQRRRVSTLSDRFTNQRADFLQKVTTQLARQYDAICIEEISARKLGREFGKGNRIGHMLTRKGWSLFVIMLQYKLAWQGKALIRVNIPHGRLLRSDDLEGAKRSFRLLPREKRSPFADAADCAAAVRIRDKGRSQIPATA

SEQ ID NO: 19627 - protein, 397 aa, unknown
  TnpB Polypeptide
MILKAFKYRLYPTNEQKTLLNKHFGCSRFVYNWGLETRIKEYQETQKSLSSIELSARLTKLKQELEWLGEVNSQALQASLRNLDNAYTRFFRQHKGFPKFKKKVGKQSFQCPQKSEVNFEAQTISIIKVKNIKAVLHRKFKGEIKTVTISRTITNKYFASVLVETPDKPKKVKKPKQDKAVGVDLGLKHFITLDTGEKVDNPKHLQKSTGELKRLDRWAKRKEKGSKRREKARLKLAKLYERITNQRNDFLHKLSTRLIRENQSVCLEDLNVQGMLKNHCLARSISSASWSRFVEMLRYKGEWYGTNIIQIGRFDPSSKICSCGVINHELQLKDRSWTCKECGKLHDRDVLAAKNIKKFAFDRQSLIENLGNNRVGRTQINAQGEDKVAALCGQWSS

SEQ ID NO: 19628 - protein, 369 aa, Massiliomicrobiota sp.
VATAYKAYEYRIYPTDEQAVIFQKTFGCCRFIWNMMLSDKIDYYNKEKKMLKCTPAQYKKKYDFLREVDSLALANVQLNLQRAFQKFFKEKKVGFPHFHSKKKTRKSYTTNKVGNNIDINDRYIKLPKVGIVRIKKHREPYGVLKSVTVSQTPTGKYFVSILFEYENQVQVKNDTSKSVGLDFSMKELYVDSSGHEPNYPHFYRKMERRLAREQRKLSKMYRKGLPQSNRYYRQKMKVNKLYEKIANQRKDFLHKLSRHLVDTYDYICIEDVDMKAMSQCLNFGKSVHDNSWGMFTSMLAYKCEEEGKHLQKIDKWYPSSQTCHVCGTVHDITKDLSVREWTCPDCHTHHNRDVNAAINILNAGMQMMA

SEQ ID NO: 19629 - protein, 353 aa, unknown
  TnpB Polypeptide
VSNLTKTLKLRIQVSPEQEILFRQMTEQYRQACNFVSQYIFDNSFNLAYQSLNKELYRDLRVLFGLKSQLAQSSIKTTMARYKTVSQQLFQKPYKYKDEDGSWKYITKTLEWLWKPIFFKRPQADLVRNRDYSFVDNGQSLSINTLGKRTRRTFESKPFSKYLDGSWNFGTEKLVELKGRWYLHIPVTKAVEVFQKENVRHVVGIDRGLRFLTVSYDEQGKTEFVSGRKIAAKRHKFLKIRQQLQSKGTKSAKQNYDLRSWPFYQLEQFLTYKAHENRSKVLKVSAKYTSQRCPKCGIIHKENRDHSSHLYCCQCGYQSNDDRIGAINIQLLGSMWISGDNNPRYERKTTALE

SEQ ID NO: 19630 - protein, 409 aa, unknown
  TnpB Polypeptide
MVRGMLIRQAFKYRLDTSIETERLMCQYAGNCRFLWNKALGLNVCSLENKQPLLWYRELDWMSKLWKQSEEYGFLKLSPAQTLQQTLKQLERAFKDGFDRSQPLKRIPTFKKRGDRDSFTYPQGFKIEGKRIFLPKIGWVNFRKSREIIGTPKNITISRLGSHWFVSIQVEIEVPEPSHFSQSMVGIDMGVKRLFTLSTGDFEEPIDSKKWRDKIRRLQKRLAKKVKFSKNWHKLRGKINRLHTKLSNIRRDMLHKFSSALSKSHAVLVLEDLQIRSMTKSAKGDRENPGSRVAQKSGLNRAILDQGWGLFKTFLEYKQKWLGGQVLYVNPKHTSQTCPVCYNVNKDNRQIQDSFACIRCGHLEHADVVGAKNVLERGRRLLACEENWVAKLVEAGTGKLSDKLEPTFV

SEQ ID NO: 19631 - protein, 459 aa, Lachnospiraceae sp.
MAKAYSVSQYVISDDQKDLFSWCDIMCRKAKLLSNAATFRLRQHYTSYGKEDADLQPQQLEVEEEIRRTIASTGMTAPGRQIGYAFLEKLMRVNRNPDFFGGLPMQAAQQVLKMRTGDFASWIAACRAYKKDPSLFTGKPKMPHYIKGDLATVCFTNQDCRLNYKDGAPYLKLPMTDAIVLLGRVPSQGRMKEVKVVPFYEKFRIIVTFEELANRALPQGTHAGAVDLGVDNIAAFVSNDGSPSILYKGGYLKSRNQWYNKQIGSYRSTLMAGHDPKTHRCPTTKMMQSLGRKRTLQVRDELHKISSDIIRQCRIRHIRYLVIGRNKLWKQKTDMSKQSNQNFVQIPLYSLIRMIRYKAERAGIVVIEQEESYTSKASFLDQDDIPVYGKNDSNVSFSGERIKRGLYRSKNGTVINADLNGAANILRKAMPFAFAGITDFSFLQNIRVMNFKNFHDCMA

SEQ ID NO: 19632 - protein, 238 aa, unknown
  TnpB Polypeptide
MDMAENRIPKDCKYVNPKVSFDGVKFWLSITCIVEDEENNLPKTEPIGIDMGIKTLMTCSNGMNFNRVSTKKEKKKLKRLQKKASRHYDKMMKTKSSDKSKNLLKLETLIRKQYQRISNVRLNNIHQATTKLVKLNPKAIIVEDLNVRGMMKNKHLSEKIADCSFYEIYRQLKYKCQNKGIEFIVADRFYPSSKICSNCGYKKEKLSLSERTYICECCGNVIDRDFNASLNLKNLAYN

SEQ ID NO: 19633 - protein, 376 aa, Streptomyces sp.
LLAVQRRPARAPGRLPSQLEDHRAVRGSVRADEGDPGVRPGASGPLVVLLPAGHPAPPRQGVRRVLPPRQGRADAGLPPLQGCRALRHCCVPQGRRWLSLGLRPHDPHTRVRFQGVGHVRVHQHRPVRGRVKTISVKREGKRWYVVLACDQVLAEPLPPTGAVVGIDMGATHFLTTSDGEHVANPRFLDAAAEELAEAQRHLAAFPKRTRQRTKAHRAAARKVAKLHAKIRRQRLDFHHKTARALVRDHDVIAHERLNTAGMTKTPAPKPDPATPGAFLPNGAAAKAGLNRSILDADWGQFLGILANKAESAGRLVIPVDPRNTSRTCPTCGHVAKENRATQAKFACVRCRFTANADHVGATNVLNRAGPALCDVA

SEQ ID NO: 19634 - protein, 365 aa, Photobacterium sp.
MTLVAYKYRFKPSKEQAEMLEHTFGCVRFVYNNALAFSKEQYEQGNKTNFSDWNKNLTTIKKDADFSWLKNVSSVPLQQSLRHLDKAFKAFFKSGFGYPKFKNKRGKQSACYMANAFKFNAETKQITLAKMKNPLKVKLSRPFNGSPSSVYVSKTKTGKYFISMLVETEIQPLPIASKTVGVDVGIKSLAACSDGVVFNNPKYTKKYEKKLAKAQRKLSKKTKGSNNFNKQRIIVAKIHEKIANCRVDFTHKMTTKLINENQVICTESLRVKNMVKNKKLAKAISDANFGEIVRQIEYKAAWYGRTVSKIDQWFPSSKLCACCGAVYQGKWSLAIREWRCDCGSVNDRDLNAANNIHIEGLRLAA

SEQ ID NO: 19635 - protein, 334 aa, unknown
  TnpB Polypeptide
VSFCSPKASDEDRYPETEDEIRARLRMKTPEELLERTVGCDRGVVTPLQTQTQGFRLTRTQKARMRHKGKRIKKCQKKLARQVLHSSGWRKTRIKINDANTYGRNVRENLAHQTSHALVSLPNVDVIAFEDLKVEAMMAAPKPKFNEAGKSQHNGRAAKAGLNRAIQFEAAWGRTLAYTQYKALKHGKLVVTVPAAYSSQQCPKCGHTHRSNRPDQAHFACTNPDCRFNEDHQLTADQVAAMNIAARAVKQIFDDQQKSKERKRLLRMRKKGESKGQGRGGTPRTVMRSGDVGAAKPVEPMPDTGNLPVSTLAVKPESLDKRVALAGECSSTSL

SEQ ID NO: 19636 - protein, 374 aa, Streptomyces sp.
MYMQLRYKFRLYPTQDQRKALANAFGCARTVYNDALRVRREAMEKGDPLPRSGDLAKLLITQAKKTPERAWLAETSNVVLQQALRDLDVAYSNFFRSLNGARKGGRVGKPKFRSRKDRHQAIRLCRNAFVLRPNGRLYVAKIGDVAVRWSRSLPSDPSSVTVIMDASGRYFASFVVETDPAEVLPEAAQDVGIDLGLTHFAVLSDGRKISSPKFMRRAERKLRKAQQAVSRKRQGSANRRKATNRVARLHAHVADARRDFHHKLSTTIIRENQAVYVEDLAVKGLARTRLAKSVHDAGWSQFTAMLEYKAVRYGRTFDRVDRWLPSSQTCHMCLVIDGPKPLSVRQWTCEACGAVHDRDVNAARIILAAGRAER

SEQ ID NO: 19637 - protein, 416 aa, Synechococcus sp.
MGYGCQQVLVRDRELLPVLEYLCQQSNKVYNCALYYARQVYFKTKRWASYGELCAEMVRTKNKHFIAMYVSAAQQTCKSVAEALSSFKTKLKLFLQEEISLRPNLPRYRKKGMFTVAYPKKWLKFQEGRVRVPLGNQVKAWFGIDAFWIRFPTNLDWKNIKELRILPRHGVFYLEWIYAKPAQPQSLDPKKVLAIDHGVNNWLTCVSNLGHSFIIDGRKVKSFNQWYNKEVARLKTDKPQGFWSQKLERITEKRSRRMRDAIHKAARKVIDFCLHHSIGRIIFGWNKEQKQECGLGKVNNQNFVLIPTGWLKERIAELCQHYGIEFIEAEEAYSSQASFLDGDELPNYGEKPDGWRPSGKRVKRGLYQTAKGWLVNAEANAAANLLKKVSRTLGLCLKELSRGALTTPLRVLLWTA

SEQ ID NO: 19638 - protein, 164 aa, Synechococcus sp.
ATKVACLQLHVARQRKAFHYQVAHWLVGQYDLLVVEDLNVRGLARTRLAKSILDAAWGRFLDILTAVAVKRGKQVLRVDPPGTSQNCCVCEERVPKALSERVHDCPRCGSWDRDLNAAIEILKRGLRAVGLPLSGCGGSWFTSPLKQQLREVILGSSRLQPVRA

SEQ ID NO: 19639 - protein, 407 aa, Synechococcus sp.
  misc_feature (70)..(106): Xaa can be any naturally occurring amino acid
LLQQSALRTQKIPGCNRERYGFIRSQRWLKFGSSGKRRAGTATTKRLPISVSMVPQKRPESCGTSSCAPXXXXXXXXXXXXXXXXXXXXXXXXXXXXXXXXXXXXXDRSHTLQFNAGNFRNGTWYPKLTRGLAFRASEEMPREWARGTELMRVKDRWYAIFPEPVNEQCSLAKGVVALDPGVRSFLTGFDGSGFVDIAKGDFGRIVRLCYHLDDLQSRLSKAPRPKRRRMRQAAFRLRERIRNLVDECHRKVAAFLTDNYRLIFLPTFESAKMVAKAGRKFGSKTARAMLTWAHYRFKQLLKFQAKKKNVVVVEVSEAYTSKTCTKCGHIHTKLGGAKVFRCPKCNHRLPRDWQGALGVMLRALRDTAFLFGLRPGSAVASASRSDNGNGQNAIASPLSSNAQQCSA

SEQ ID NO: 19640 - protein, 451 aa, Bacillus sp.
MAKKKAVKVLRKQKKRETLQRFTQKQNIGRACLTAKEFRLLQRMSHSSKALRNVGLYTMKQSYLNNNRMATVKEVDTAMQADMNYWGMQSNSVQAIRRALYAEVKSFFKAMEQWKKHPEKFTGRPKFPNYSRSTDKRIIEIYQVPKVDENGFWMIPMSVAFRKKFGSIKIRMPKNLRHKKISYIEIVPKQKGRFFEVHYTYEMHVSQMKQQSTTTSNALSCDLGVDRLVSCVTNTGDAFLIDGKKLKSINQYFNKMIRHLQLTNMENGLSKRVVTNKMAALWHKRERQINGYISQTVGLLFKKVKAFGIDTIVVGYNAGWKQKSDMGKKNNQKFVQIPFHKLIAAIENKCIKEGIRFLKQEESYTSKASFLDKDPVPVWSKDDKTHYYFSGKRITRGLYQSKSEKCIHADINGALNTLEKSRVVEWEDNLKVKTPILLEVQKRKVVASRIA

SEQ ID NO: 19641 - protein, 295 aa, Rhizobium sp.
VSLAANGWHIAFACEIDHAVAANDLPAVGIDRGVANTLTLSTGEHWWMPAGLAEIERRKRRAQRVLARRKRGSRRHAKAPAAALQPCRPALPASGRIGGTRPILISPVASQRSLEDLATRNMTRSARKTVDAPGTLNRAILAQGWHGFETVLAYKLEERGGYRCKVDPRHTSQSCSACGAVDRESREGQASFRCCQCGLRAHADHNAAINILRRNTASMIVEEGQPLSVEVVFPARRSRTTRGREVSYPRSFSHYGYIITSWHLKKASVSARLSGQLSRERQSFMLLAMPRISVK

SEQ ID NO: 19642 - protein, 378 aa, unknown
  TnpB Polypeptide
VGTIKKSVKVRLYPTKEQEILIDKTTGCCRFVYNHTLEVCNKSYKQTQHFPSKNERIKNLVPLKESNDFLKEVDSKALQQSVRDLDSAICNFFKNRSHFSFPKFKSKHNLRQSYRTPWDNGRADVLDNKHIKLPKLGRVRTKRFDMPDVYKIFNITVEKTSTGKYYASICIETEVKPLPKTGKQVGFDLGLIDLLIDSDGTRFEGPRYAYEYKDKLAKEQKKLSKMRTKLERANLNLDECKNYQKQKRKVAKLHEHISNCAKDFNHKLSRKLVEEYDFLAFEKLNVEDMRKNSHLAYAISDVRWSQLVNFIKYKCLWYDKRFAQVDQFYASSKICSCCGTYHKNIVNSLSVREWVCPDCGTHHDRDVNAAKNILDKAY

SEQ ID NO: 19643 - protein, 421 aa, unknown
  TnpB Polypeptide
MLEEKKLKIKETLRATKERHSKMNCRVFCVKIQENRLSHAKEEKLNRCFLEAKWLYNATVATDTLSLEDTSMVQVKVKDKFEIREITCLSSQMITSVVDSAKQNVFNLSKAKKKGLKVGKLRYKKECNEINLKQFNNTYSIKGKNKIRVQRIGILVVNGLEQISLDEVEFANAKLIKKPSGFYIHLTIYTKKQPKTTTEKEVLGLDMGIKEQLTFSNGVKVNFYLEESEQLKGLMRKLSRQVKGSNQYKQTLHRIKKIYEYETNKKNDVANKLNSVLKSNYIVCFQDEMLNLWKYKNSKQKFSFGKQIQHGILGRVKGELKKNTSNYMLGSSVPTTQTCPVCGCLTKHSLDKRQYHCDNCGFENVDRDIHSAKNMILLSGYGTYRSLNTDAVSIEKMISLLDSLSSLGVVVSTNSMEAHCL

SEQ ID NO: 19644 - protein, 372 aa, unknown
  TnpB Polypeptide
MLEEKNLKIKDTLRVTKERRSQMDCRVFCVKVQENRLSKAKLEKLYRCFLEGKWLYNAVLSSTGDFPRSGIKTVLVKVKDSFEEREIKCLSSQMKQSVVDSVKQNIFSLSKAKNKGLKVGRLRFKKECNEINLQQFGITYRIKSHNKISVQNIGVLVVNGLEQINLDEVEFANAKLIKKPSGFYIHLTVYTKKQPQPETSKEVLGLDMGIKDQLTFSNGVKVNFYLEESEQLKGLMRKLSRQHKGSNQYKQTLSRIKKIFKHMDNKKSDVVNKLNYVLKRNYIICFQDELLNSWKRKKSKQKFSFGKQVQHGILGRVKDKLKKNTSNVMLESSVPTTQTCPECGCLTKHSLDRRKYRCSHCGYENPEGYSLC

SEQ ID NO: 19645 - protein, 382 aa, unknown
  TnpB Polypeptide
MTTVQKGIRVRLYPTEEQEVLFSKTFGCVRFVHNQTLADCKQSYEQTQHFPSKNERITNLVSLKEENEFLKEVDSKALQQGVRDLNSAFDNFFRNRGHFGFPKFKTKHSQKQSYRTPWNNGSADVVDNKHIKLPKLGKIKTERFDMPEAYRIFNFTVEKTPTGKYYASICIETEVQPLSKTGKHVGFDLGLLDLLIGSDGTRYERPKFAYAFKDKLAEEQNKLSKMRTKLERANLNLDECKNYQKQQHKVAKLHEHVSNCAKDFNHKLSRKLVEEYDLIAMEDLNVSSLLKNHYMAYSIADVRWTQLVNFIQYKCLWYDKKFVQVDRFYASSKICSCCGTVHKDIVNSLSVREWICPDCGTHHDRDVNASMNILNHALSAGC

SEQ ID NO: 19646 - protein, 356 aa, unknown
  TnpB Polypeptide
LPGGYRSTKEAITEQNKVLAARGKPQKSLTELSFREHGGICYDARVLSIGRNRVSIWTLDGRIKLRYSKSDHFPAVAAVKQTDLVYRDGAFWLYATVETPDVEPADPTEYLGVDLGVVTIATTSDGAPFSSEATEKVRRRYGRLRGVLQKTGTKSARRRLRQISGRERRFKTDTNHVISKRIVCAAEGTKRGIALEDLKGILLRTTVTKGQRERHHKWPPPQLRSFIEYKARRAGVRVTVIDGAYTSQQCSACGFVHPGNRPSQAAFCCLACGYTENADLNAARNIAARAAVNRPTRVCSPDTGERLNRKPAKSMIPPTVSCPRLQLGVVDYKRTMRRDGILLRGWREPSIPGGRA

SEQ ID NO: 19647 - protein, 398 aa, Kribbella sp.
MSRFRMYPSPAQQAALLELCRDARYLWNLALEQWAMWTRDKGATPGFAEQCRQLTEARAAFEWLRAGSQTVQQQALRDFDQAVKNFHAGTHRRPTWRKAGRHEGFRIDGSQAARVEKLSRKWARVLVPKVGWVRFRLSRAIPDAKSYRVTCDRMGRWYLAFAAIPEPIPAPGTGELVGVDRGVTVSAALSTGELLSCPGLSDREQARLKQLQRRLARCRRGSKRRGRVQVAIAKLYARAGDRRKDWVEKTSTDLARRFDVIRVEDLRVAPLTRRPKPKPDPERPGRYLPNRRRAKAGLNRGILANGWGLLVQRLEHKAPGRVEKVNPAYTSQTCSVCGHCAPGSRENQAVFWCVACGHRANADVNAAVNIAAGRAVSARRETPPRVSSKREPQLAASG

SEQ ID NO: 19648 - protein, 392 aa, Thaumarchaeota sp.
MRPVKAIQFRYRASEEFSSLFEEFRLMCNDAIRIALQKKPKNRFRLIELAYPRLKEYGLHTHYILSACEVAFGVYRNRNRKSCPYIRSAFLKLDNQTYSLNHLLLRIPTTPRHFIYLTLQGSDYHLSFMDDPTLKRGSITITGHAVIVSFSKGISEVEPLGYVGIDLNERNVTVSDSLGNTTVHHTSEVAEIKERYREIRAKIGRRTRRDNRVSQLLYAKYGQRERNRTLQRLHGVSKAIVERSKAKGFGIVMENLKGLRKLYRRGNGQGASFRGRMNSWTFHEIQRQIEYKARWEGIPITYVNPRGTSSKCPNCGSRLVELEGRRLMCPSCRQAGDRDEIASKNILAAAFPAAQPSKRSREGERDDDSNPSSRWMEVDSSVIDRRVNGTTA

SEQ ID NO: 19649 - protein, 418 aa, Lactobacillus sp.
MKSMAQLEYHYGLKIRCYPSDQQKQIIKVNSDASRFIYNEMVAIGKELWQLSRVKLPIDTVQDRIKQLTMRQNAKQMSNHYQFLEDKRIDSLTKANAIQNYRKAWNSFRKVHTAGVPKFHRKSYRWRYQTNCQYPGQKTALLTNGTVCFLDNSHVKVPKIGQLRVAGSQARLLKRMCETRIGTVTLTKDPADHFFLSMQLASDESFVKVSKANHEHIGIDLNTDNFLTDSEGNTVPNPRYYRTIKGKLAKEQRILSRRQRRIKKEHRSLRDSKNYQKQRLLVAKLHVKVMNQRHNFLQQISTALIKNHDLVVAEELRSKNMLKNHALAMSIADVGWRSFLNMLAYKADLYGRQFITVSPKNTTQTCHDCGFVMGSGGTKKLTLADRKWTCPQCHTHHIRDHNAALNILEKGFQKQQKS

SEQ ID NO: 19650 - protein, 269 aa, unknown
  TnpB Polypeptide
MEQGIKIANRHKNLDCKCFRIYNKNDKFICELIYEKEIEEVEKNNKVASIDIGLENLFTIAFNYNKKGISIKGSRLKAINQYFNKIKSKIQSLLPSKQYVCKRINLLLYKRTEQLRNYIGYCTNKLIEILKVEKISKLVVGYNKKWKQEINIGKKNNQNFVSIPFRKILDILKYKLEDNGIEYKEQEASYTSKASYLDNDDIPIYKENDDTNYIFSGKRIKKGIYKSKQGKIINADLNGALNILKKSGEKLIEELEYLRFDNIFTSKLV

SEQ ID NO: 19651 - protein, 373 aa, unknown
  TnpB Polypeptide
MISKKIRLLPTQQQKQQLNSWINGFRFVYNQSLEYAQKQTTTPSWFKTKKQLLDQLPSWTKQIPYQIKSIAIKEAFDNLRQRKKQAKFKHTKFKMHFKSKKEPQQSCYLPKSAVLTKGIYPRLLGKLKYTESLPSNIGDSRLVYVYGKFYLTIPTTKQRSLTENQGRIVALDPGIRKFITFVSHDSAGCLATHDIGRIYRLCFYLDQLVSKTSKAKSKQKHNLRKAANRIREKIKNLIDELHNKVAYFLVNNFDLILLPTFETQQMVSKAHRKIGSKSARAMMTFSHYKFKQKLKHKAFEYGKVVVDVCEAYTSKTNNFTGVVDKKLGGKEYVLVGGKKVDRDINGALGILLMALGDTPYLDNSVHNCTANHY

SEQ ID NO: 19652 - protein, 388 aa, unknown
  TnpB Polypeptide
MFKSTKTTLRFANTGKRNHLDSFLDEYRRVLAVFVDLLWSQEKVPVLLPASVTKPIQTTSWLSARILQAAGKQASGIVRGTRKKQQQRKWVYDKLQTEGKFKQARKLKRIIDKVIITKPNINQVEPELDSRFVKQDWTNSTTFDGFVTLSSLGNHLKIVLPVKRNKHFNKLLTAGTLKTGVRISRNALTFCFELPDVKPRSTGTTLGIDLGVKNTISTSQGFSSKPDNHGHTLDSINTRLTRKTKGSKNFKQTQTLRTNYINWSVNQLNLDQVKTVKLENLKHFRKGVKTSRKLTHFTYTEIQSKVVNCCNLLGVQVEYVNPTYTSQRCSCCGWVRSSNRKGKQFKCKACGFAVDADLNAALNIATNLRPIGREERLLHKNRKGFYWK

SEQ ID NO: 19653 - protein, 303 aa, unknown
  TnpB Polypeptide
LCPLQQSLRHQQAAFANFFAGRAAYPAFKSKRHKQAAEFTASAFKYRDGKLYMAKSKSPLDVRWSRKLPSAPSTITISKDSAGRYFVSCLCEFEPVSMPVIAKTVGIDVGLKDLFVTDTGFKTGNPRHTAKYAKRLTLQQRRLSRKKKGSKNRAKARLKVARLHAKIADCRMDNLHKLSRKLINENQVVCVESLKVKNMIHNPKLSKAIADAGWSELVRQLQYKGEWAGRSVIAIDQYFPSSRRCSCCGFTMKTMPLDVRKWTCSECGAIHDRDINAARNIKAAGLAVLAHGEPVNPEPHKAA

SEQ ID NO: 19654 - protein, 378 aa, Exiguobacterium sp.
MIRANKVRLRPTKEQEIQLWRSAGTARWIFNWTLRMQELNHRFGGKFIRDNDLRKHITKMKKRRQYAWLNQVSNNIAKQAVKDACDAYKKWFMGMSGKSRLKVEKPRFKSRKRSRPAFYNDNVKLKVKPKSVLLEKIGWVKTSEPLPMNTKYSNPRISFDGKYWYISVGVEMERPVQNLTGETLGVDLGIKDLATVSNGRVYKNINRTGNVKQIEKRLRRLQRRVSRKYEMNKKGNRFIKTCNIHKLEQKIRHIHRRLANIRQNHLHQTTTEIVKTKPSKIVVETLNVKGMMKNKHLAKSVAQQKFYEFKRQLQYKCEDYGIELVEADPFYPSSKLCHGCGHKKVDLRLSDRTYHCDRCGYTADRDYNASLNLAGYSA

SEQ ID NO: 19655 - protein, 351 aa, Paenibacillus sp.
VQTVTIQIRIFPTNPVLLRELGKEYIEIVNQLTAQAKAEGTFPKISTKDVEANLPSAVKNQAIRDARSIHNKSKKKEIRPVLKRRAYYLNNQNYSIGDNAVAFPVMMDGKVQRLSISARTTERDQRLLSSGKLGLLKVVEKSGKWYVQIAIELLTEQVIGDVTMGIDLGLKVPAVVVTSTGKTKFVGNGRQNKYIRRKCKEHRKKMGKLKKLSAIRKQENKEHRYMKDQNHKISRKIVNMAIEELVSVIKIEKLTNIRQTTRTSRKNAKNLHNWSFYQLQMFIAYKSALVGIKVIKVNPAYTSQTCPICEKRNKAIDRTYQCSCGFHAHRDRVGAINIMRQPVIDDKSLSA

SEQ ID NO: 19656 - protein, 381 aa, unknown
  TnpB Polypeptide
VNSNSVKLHKAFCFHKAFCFRLYPTRAQKTALNATLDTLRLVYNNLLNERKFLYETTGKSISQYSQEKHFAGWRRDFPELAEVHSHLLQNVALRVNLAFTAFFRRVKNGETPGFPRFKGVGQYDSIGFKEFGNGISFKHGNLYVSKIGEIKGKFHRKVEGMLKTATLRRQAGKWFVCIACEVASELLPPSSEKVGLDAGLNSFLALSNGEFVDNPRFFRRDEKALAKAGRRQAKTKKRSKERRKANKVLSRIHERIRNRRHDFVHQTARRLVNRFGVIAVEKLNVKNMLGNHCLAKSISDAAWSMFRSVLTSKAESANREVIPVNPAYTSQDCSACGYRPDGLEGRTKKKLSERWHFCPNCSASLDRDTNAAINILRLALG

SEQ ID NO: 19657 - protein, 288 aa, Bacillus sp.
MMINKAYKFRIFPNKAQAILINKTIGCSRFVFNHFLSLWDHAYKETGKGLTYGTCSAKLPAMKKEFVWLKEVDSIAIQSSVRNLADAYTRFFKKQNSAPRFKSKKNNVQSYTTKQTNENIAVIENKMKLPKLGLVRFAKSREVKGRIVTATVRRNPSGRYFVSLLVETEVQELPKTHSYIGIDVGLKDFAILSDGRPYKNPKFFRSLEAKLAKAQRVLSRRMKGSSRWNKQRVKVARIHEYISNARKDYLDKISTEIIKNHDVIAIEDLQVSNMLKNHKLAKAISEVS

SEQ ID NO: 19658 - protein, 380 aa, Microbispora sp.
MMWGMARIVKRAYRYRFYPTPEQACELARTFGCVRLVYNKALEERTRAYTVEGRRVSYVESSASLTAWKRSEELAFLNEVSSVPLQQALRHLQAAFANFFARRARYPTFKSRKRSRASAEYTRSAFRWRDGRLTLAKMHDPLEIAWSRPLPEGTEPSTVTVCRDAAGRWFVSLLVEETIRSLDPSESMVGVDAGITNLLALSRQIPGLTDKDGRVANPRHERDSRRRLAKAQRSLGRKAKGSANRAKARLKVARIHARITDRRRDFLHKLSTRLVRENQVVVIEDLTVRNMVKNHALARSISDASWRELRSMLEYKANWYGRELLVVNRWFPSSKLCSACGALAESMQLHVRTWQCFCGAVHDRDVNAARNILAAGLAER

SEQ ID NO: 19659 - protein, 489 aa, Micromonospora sp.
VGRSDEHGKRPASVTRVAYSVRLNPGKYAALLEQARRLGRVRSEVWQRYGSTSGVGSGLRDRQVRDRWLADGTHVRFGVLANAWKETVRDAMADIAGNLASAKVEVRRAIFRRRGDPAERRRMLTALKADRWAGDPFLARQMRKHWKRGRNRTHDQIVVRSDKHNIVADGRGRLWLAVPGLERRRMVRIPLSTTVAPAGTLRLILRGGRVEVHYQIDASQMRSSQRPCGDRTIGVDKGYTEALIDSDGGHHGSRLGQLLSSESDRLKERNRRRAKLRSIANTAAGRGDHAKAHRIKANNLGTVKRDRQAARHRATVRTEIFTAVHRVVDKAATVVAEDLTRSFAGRKTLGKNMNRRLAGWTKGVTAEALRNVSERRGSALVHVNAAYTSQACHRCGRLGRRNGDRLHCTSCGVVWQADVNAAINILHRAGDPNIALHTPHHRVKQILRDRTDRHRTRLPVQDSSPATAERRANHPNRSAMSTLGSRRQP

SEQ ID NO: 19660 - protein, 467 aa, Moorea sp.
MVTAKGRGDQMFKTIPVKANFSDEEKVFWEFQCRQSNSLFNCAIYYAKQKHYQWLEEQEAYTTYWRNDELRAGWKTYKCSTKYPELDKALKMSPHYKGMAAQSAQQTLKTVGEAIASYNKLVSLYYQGKVDRPRFPRYRKSGGFAAVTFPRQALTYKEGLFYPSVSKESKPELLTQITLTPPDFIDPDWVKEVTVRPCYGQLWIDWIIEDGKQPLTDNPKLDYSQAIGIDHGGDNWLTCVSTLGKSFIIDGRKLKSMNQGYCRLVAKHKSGKPEKYWDSRLDRIQLKRNNQMRDAINKSARFLINRCLKDGIGNLVFGWNEGQKSRSNMGKRGNQQFVAIPTKRLIERLKQLCPEYGINLMVTEESYTSIASFLDRDSLPTHGEKPNGWKPSGKRVRRGLYRTASGKLINADLNGAANILRKVTTQPIDLAKVGSGILTVPHRYDLFTNLSKSYRNKSEAVRVHPTA

SEQ ID NO: 19661 - protein, 373 aa, Moorea sp.
  misc_feature (324)..(324): Xaa can be any naturally occurring amino acid
VSTDSESTVQKSKKIRIFLNAEQRGIVRKWFGVSRYVFNKTVKILENGEVKANWFAIKTSILNDLPEWCKAVPYQIKSIAIKDACTAVREAKKKYNLTGIINRVRFRSRKNPVQSCYIPKSAVSTKGVYHKNLGELTFAETLPDNIGDCRLTSTNGDYYLTVPHKTTQTKTENQGRVVALDPGVRTFLTFFSQDSVGKIANGDFSRIQRICSHLDNLLSKISKARGKQKRRMRKAARRIIIKIQNLINELHHKAARFLVDNFDVILLPTFETKEMTKRGSRKIRSKTVRNLLSFAHYRFKQFLKHKAQETGKVVVDVCEAYTSXALVIATVVWIWHYTRLRKPNHPTSVYGEIFRQNVWIGFVLLAGMIIGSN

SEQ ID NO: 19662 - protein, 447 aa, Nocardia sp.
VCHPSDVARHTTFKFCLDPTTEQQVALARHAGAARFAFNQCLRTVKTSLAARRHNPDVSVPWTGFDLINAFNAWKKSEDAGRVFAVGHDGVTELVVTGLAWRTEVRQQVFEEAAVDCGRALATWSASRSGERKGRRVGFPKFKKKTGSVPSFRLRNNHPRTGKPPIRIGEASPRSVTLPGVGRIAVRGDTRRLRRMIAKQRAKILFATISHRAGRWWVTLNVEAVELHPGHRHARRDTAGHGGWVGVDRGLNTFLVAADDHGHQLARVDDAPRALATQLGKQRRLARALSRKKKGSNNQRQSAARLSRHHHHIANMRRHFLHKVSNELVQTHDRIVIEDLNVAGMLRNRRLARAISDAAWAEFARMLGYKSRWRGGTVVEADRWYPSSQICSVCEDRNTDLTLADRVFTCSNGHQIDRDTNAAVNLARWATLRATPQNPGPPSRRPG

SEQ ID NO: 19663 - protein, 389 aa, Streptomyces sp.
MITPVKIVVQVKLIPEADQATALSATLHTVNEAANWVSAVAFERGVPREYELRKHTYAELKARGLGSQAAQHVIKKVRDAYTTLKANIRAGNLGESGSKRRMKAETKPIAFRPEAAQPYDDRCLSWQYDARTVSIWTTAGRIKNVRFACSADMLQTLREYRKGESDLIERDGVFYLVAVCDVPEAEQYEPDGFTGVDLGIANIATTSTGYKAAGRGLNRHRKKQAGLRRKLQKKGTKSARRRLKSRARKEQRHAANTNHIIAKTIVTEAERTSNGISLEELKGIRQRVRLRKPQRVALHSWAFAQLADFIVYKARRAGVPVVFVDPAYTSQQCYECGHIDKKNRASQARFTCRNCGVVAHADRNASRNLARKGEAAWTAGRESRVPATP

SEQ ID NO: 19664 - protein, 189 aa, Desulfotomaculum sp.
VRSPRYDRLVSKLRSYLKNDICRIVNRIVKLYCPKEIVIEKLNFQNPNLSRRLNRLLSRFGKAVITAKLDAAAEEYGIKVTYVNPAYTSQTCNSCGYVDKSNRSTQAEFVCRYCGYKTHADVNGARNICVRSSDEIGSVYKNKKLILQVLVKRFISRLERTSRPNSWAKDLILRNPYFKDYWDKFKEIS

SEQ ID NO: 19665 - protein, 300 aa, Escherichia sp.
  misc_feature (237)..(237): Xaa can be any naturally occurring amino acid
MKQQVSFKFRLKPDGQQERQMRRFAGACRFVFNRALALQNENHEAGKKYIPYTKMASWLVEWKKDTETEWLKDSPSQPLQQSLKDLERAYKNFFQNRAAFPRFKKRGQNDAFRYPQGVKLDQENSRIFLPKLGWMRYRNSRQVTGIVKNVTVSQSCGKWYISIQTEREVSTPVHPSASMVGLDAGVAKLATLSDGTVFEPVNSFQKNQKKLARLQRQLSRKVKFSNNWQKQKRKIQXFSEKPEEAGETSATVKPQGQIQQQLAEAETQNTATAFPYRKYPQGLPSQSHNDRQQKPRNDCH

SEQ ID NO: 19666 - protein, 253 aa, Geitlerinema sp.
VFVLEYKVKPKPHQVGVIDKAIRTAQFVQNKVLRYWMDNRGVGKAELFRYNTRLKKEFKFVEELNSHACQTAVEPTLRAITRFYENRKNQVKWKKGYPRFKKNTRSVEYKISGWKLSEDRKHIVFMDKKGIEHLRLISSRDLNFYQPEQIKRVRILKRADGYYVQFCIKLDPKLIVSNSLTPSQKAVRIDVGLKYFLADSQGNVEPIPQFYRKAEKRLKRFNRQKSKKFRKGQKPSQNYRKVRQRYARQHLSS

SEQ ID NO: 19667 - protein, 303 aa, Microcystis sp.
MEKAYSFRFYPTPKQESLLRRTLGCVRLVYNKALHERTQAWYEKQERVGYAQTSSMLTDWKKQEELDFLNEVSCVPLQQGLRHLQTAFTNFFAGRTKYPNFKKKHQGGSAEFTKSAFKFKDRQIYLAKCTEPLPIRWSRQIPESCEPSTVTVRLHPSGRWHISIRFDDPTIKPLPVTDKAIGIDLGISSLVITSNGDKVSNPKHFKKHYRRLRKAQKSLPRKQKGSKNREKARIKVAKIHAQITDSRKDHLHKLTTQLVRENQTIVVENLAVKNMVKNPKLSQAISDVSWGEITRQLAYKCRN

SEQ ID NO: 19668 - protein, 401 aa, unknown
  TnpB Polypeptide
MAYKGYKFAILPNKTQERELYSCAGAARFAYNWGIDEIKRELDLANQDKNYKPSFSHYELRKKFNVIKHEICKDSFGNEWWQYNSKEVYSNAIKNLSVAFKNFADSKNGNRAGMRVGFPKYKNKNLDRDNSFSYTTGIDNSIIDSHHISLPKISGKIYVNENIFKRITKHTKINRITVSIKNERWYVSFLVESEAVQKVNASKKHVGVDLGVKEFVTLSNGAHITGFKSYLEYENAISKEQQKLSRMKYGSKRFLKHRKRIRKIYSHILGISNNELNHITKMLALSFYLVTIEDLNIRNMFKNRGISKHIQNSKFGDFKRMLKHKCVDYGTTLVLADRWFPSSKLCHCCGNINKNLTIKDRVYNCENCGISIDRDINAAINLDKYGMNRVDSRAEDTINAR

SEQ ID NO: 19669 - protein, 372 aa, unknown
  TnpB Polypeptide
MRTVVKTYKFKLYKNKKNKHLDDGINIAASVWNYCIAMHRRYYRLYGKCLSANKLKKHITKVKRTLHPEWQALGSQSIQDVVERVDRSYKAFFDHVKQKRHGRKSPPHFCKRERYKSFTLKQAGYAFNRNSNRVTIMGREYKYCKSRPIEGEIKTLTVKRNFLGEIYLFVVTKQECNDILPRAGKAVGMDFGLKHFLNLDNGSVIDSPQWHKASLNELRAAHRAVSRRQRDSNNRKRAVHNLGRVYQHISNRRRDWFFKLANRLVGEYAVICIENLNLDGMKRLWGRKVSDLAFAEFVSILEWVASNAGSTVVKIDRWVPSSKACHVCGTVNTNLMLRQRSWECECCHAILDRDTNAAINIKRMGLAQLKSA

SEQ ID NO: 19670 - protein, 291 aa, Lactobacillus sp.
MITKRAYKYRIYPNREQRNFFAKTFGCVRLFYNMSLDDMIKIYKEKKEYKDITPASYKEQFQFLKEVDSLALSNAQLNRNKAFKAFFRKQNKFPKYKTKRNKQSYSTNNQNGTVYLSEDYKYISLPKIKNVRIKMHRKFKGVIKTVTVSKECDNTYYVSILVEENIETKSKTNKSVGIDLGIKSYIVDSDSNKINNPKYLSKSLVRLEVEQRKLSHMKKDSKNRDKQRIKVARLHHHIRNQRNDFLHKLSSKYINENQVISLEDLDIKQMEQDSTLSFLCLNIKANGMEEI

SEQ ID NO: 19671 - protein, 490 aa, Vulcanisaeta sp.
MLRRAVAVKLEVTKELNKLLHSVETAYLNIVREVVEYAVKHNVTSANQLQRLFYSKYRDEYPGLHAHLVIQAIRQAVQIAKSFIERRRKGLVNKPYPEVKAVSIRFTEKAWSYGQFVKSIAPVRLSLSLLGERRETWLRPHKRFWQYWWRVLIGEARLASTLIIKRKTNKWYAIFIFKLKPKEEEPKSIVAFDINENTVAVGRVDLPSTVGKVVDWNRQYMIPELYVIRTDFGRLARRYERIRNAIIERLKPEFALPNGKYVNIANTREYRKRVKRLREEERKVGRVRHVANELTKAPAIIITEELGNNPQESMIDGIEKDELRHRIKQTPFKALEKAVGDKALERGSKIFRVSAYRNSRECPVHFTKLESTNDWHILQCPKGHYVDRDYASVMNMMWKTTPEAWIKAFWWNMKNLSKNMDWRKHENKSNPIIPYEIVILLQFTMKRIKASEESPAMPARGKPMNPAGGADEGWARKPPTPFQGREEVGQ

SEQ ID NO: 19672 - protein, 410 aa, Streptomyces sp.
MQLRYAFRLDPGPGQRAALARAFGCARVVYNDAVAARERARREGAPYPGAAVLSKTLITEAKSTPGRTWLSEVSAVVLQQALRDVERAYTNFFASLKGARQGARVGAPRYKSKRDARQAIRFTANARWKITEAGRLLLPKVGEVKVRWSRTLPSVPSSVTVIRDAAGRYFASFVIETNPDADLARMPEADDLPSVGIDLGLTHFAVLSDGTKIDSPRFLRRAEKKLKKAQRELSRKQKGSRNREKARLKVARAHAQVADARREFHHQLSTKLIRENQGIGVEDLEVKGLARTQLGKAVHDAGWASFLAMLEYKAQRYGRTLVKIGRFEPTSQVCSACGVKDGPKPLHVRTWTCSACGTVHDRDHNAAKNVKQAAGLAVTACRAQVRPEPSVPAQREEAGSHGIRPGARAA

SEQ ID NO: 19673 - protein, 391 aa, Oscillatoriales sp.
MLVLEAKLKGKIEQYSLIDEAIRTALFCRNKALRYWMDHHGTDKYALNKHMPSLAKEFEFANKLNSQARQASAERAWSGISKFLDNCKKKVSGKKGFPKFKKRGHSVEYKITGWKLSGDRKYLTLTDGFKIGRLKLIGSRDLNFYQIEQIKRIRLVRRADGYYAQFCVDVERREEVKPTQTTIGLDVGLNHFYTDSKGQVVENPRYLRKSESQLKKLQRQVSKRKKGSANRRKAIKRLAKKHLQVSRQRKDFAVKTARCVVRSNDLIAYEDLQIRSMVKNHKLAKSISDASWSMFRQWVEYFGKVFGKVTIAVLPHYTSQNCSSCGKQVVKTLSQRTHCCGHCGTVLDRDHNAALNILAKGLNRVGHTQIHACGEFDLCQVDVSLLGKLSR

SEQ ID NO: 19674 - protein, 398 aa, Streptomyces sp.
VAANHVKRAFKYRFSPTDAQAAELSRTFGCVRKVYNLALAARTQAWTRQERVNYNATSAMLTAWKKTEELAFLNDVSSVPLQQCLRHLQTAFTNFFGKRAKYPRFKSRKKSRKSAEYTTSGFRFRDGKLTLAKMREPLDICWSRPLPEGMSPSTVTVSQDAAGRWFVSMLCDDPIVKPLPATDTAVGVDVGLDHLLILSTGEKIANPRHERKDRARLAKAQRVLAKKAKGDGANRAKARRKVAKVYARIADRRRDHLHKLTTRLVRENQTIVIEDLTVRNMVKNRSLARAISDAAWSQFRSMLKYKAQWYGREVIAVDRWFPSSKLCSVCGTLQDKMPLNVRTWTCACGTTHDRDVNAAKNLLAAGRAASACGAGVRPQRSSPGGQSAMKQEVSRREP

SEQ ID NO: 19675 - protein, 528 aa, Nocardia sp.
MRADWGDSRPISTTLERVFDPIDIVGTMMRAYRLPTTANREKLDAVAAILPCWQRGLVHVQYIQVRKLKAGVTQLGWLSPEEAKALPPYLSQRHWRSVVNQVNGALASWRGKAKTGLREVIRSLHLQDEVVREELYRINTYQAWWAVDNVLDIKRGLVVSDQAIRESARIADEWLRKNPFPNLSEVRTMAMDGPIAGVSVSNNSGADYWVKVSTLDKGRPVSVPLQGYDYFNKAAGRVRNFCQVTVSPAGQVTFALVKESVSVRPRRTGETVGLDWGLKNIFTSSSGELLGRRLYGWLCLRDRELSDLVATLQRQKIRPRDSKRFVRLNRRIREYVRNEVGRVLNRLADRDIRELVVEELDFRIGGLSTRLNRILRRAGRAVVRAKLDSLVETHGIIVTEVNSAYTSRRCSGCGYVDKRNRTSQERFACRFCGRKLLADTNAARNILGRSEDENGLRGLGKERVLAEMDRMFRASWRFDPTLLRERPTRGRSTATSETTSTGAESIPTLRILPARHGYSVGLMTTAVP

SEQ ID NO: 19676 - protein, 392 aa, unknown
  TnpB Polypeptide
MILAHKIQLDPTYAQARDFRRACGVARYTWNWALEQMQTSYKETGKSPKISDLKKRWNQEKPDWVYESPRDANSQPFANLQKAYSNFFAKRAKLPTFKSKHKNRSSFYVANDRFKLEGKKVSLPKIGWVRLTEELRFEGKILSGVVSERAGRWYISIQVDTPPKPQGNPGKEILGIDFGLKTFMTLSTGEKIEAPLPLKKGLKLLKRRSKQHSRKKKGGKNREKSRQRLARTHKRIADQRQDFIHKTTSRLVARTKLLVIEDLTLSGMTKLWGRKVSDLGISETCRQLAYKCQANDVGLLQADRWYPSTQLCCCCGGRQKLELDERTYACPDCGNTADRDQNAAMNLKQIYTGGLPGIDAWGHEGSDYQHTLVVKPSWMNQELNPCTLVCTH

SEQ ID NO: 19677 - protein, 365 aa, Symploca sp.
VFPCKELHKIWKQWLNAYRWIYNWTIATLKSGSKSSTYDLQKQARGWDKPDWVNQLPGHQLQEAVADAWDAYKQAMANKGYAKFKSCRQTSQVIKFKAGNFKKGTWYASKTSCTSFKSPQGFPQECIYGTQLVWVKNAWYGIFPEYIEPTKTHQNNVVAIDPGVRTFATCYDGYRIVEVGKNDIGRIQKLCSYLDKLMSKIDLSASKKQRRAMRKAAHNLRTRIQNLIKELHNQLASFLVNNYKLIYLPVFETSNMVLKSQRKLVKKTARNLLTWSHYKFQKRLIQMAQRQSVLVVLCNESYTSKTCPECGHIHDKLGGNKKFQCPNCGYTAPRDWNGARNIMIRALSATTIDINDAIQVLPAHE

SEQ ID NO: 19678 - protein, 448 aa, unknown
  TnpB Polypeptide
MLVRQGFQYALRLKAQREAVLKRWVGCRRFVFNEALAHQRAEVAAGRKRPGYAALCARLPALKAQHPWLSEPPAQALQQALKDLCAAWDRKYTSRFGAPRFKKRGDGDTLRLPQDCKYDAVAGTVTLPKLGVVRLRHSRVAEGALKNVTLRQERGRWLASLQTERELEVLTPAATAAVGLDFGAATTIMPSNPALSPIELPARIGRYERRMKRLQQAVSRKKKGSANRKKAVARLNTCHGRIAAMRRDFLHQRTTELVRGHALIAIEDLAVKSMTASAAGTVEAPGKNVRAKAGLTRVILRNGWSMARSMLEYKTARSGGSLVAVPPAFTSQACSACGFTDAANRPSQSLFACLACGHTEHADRNAAKNILRKAQEQLSDSERETQPDGCPASTAGYAGTYACEGVTRTSSPRRRPRAAARDGSSVSSAEPSLAGTVSELSLSENLHP

SEQ ID NO: 19679 - protein, 337 aa, unknown
  TnpB Polypeptide
VPTVKLNRAIKYRAYPTEEQTVLLAKTFGCVRFVWNHMLTDAQTFLNEAGIFFIPTPAKYKKEFPFLKEIDSGALCNTQLDLKDANKRHRENKTGAPQLKSKHKSKMSYTTNIHSYKTKDGRTVKTIALGHDTILLPKIGKVKINKHCSPKADWALKAATVSCTRTGKYFISLLYEFEKDIQPVAATKEKSLGLDYSSHDFYVDSNGDAANYPRFYRRAEAKLAKEQRKLSHMKFGSNNYNQQLHKVRLLQEHTANQRKNFCHTLSTAIAKQYDAVFVEDINLRGMAGSLKLGKSTNDNGLACSARCLSISSHRKERLLPKSISGIHPVKLAAFVVS

SEQ ID NO: 19680 - protein, 549 aa, Sutterellaceae sp.
  misc_feature (399)..(501): Xaa can be any naturally occurring amino acid
MNKVQAQCLPRLISLLFLIHGPSIISVGNTRNTMLIRTAFKFELKPNGRQARQISQFCGCARYVYNRTLSLEKSLYAKDNKHSFRYTEAANRLPEWKSKHPFLKECHSQVLQQSLKDLDRAYTNFFEKRANFPKYKKKFRHDSIRFPQGVELDEVKQKIRLPKLGWVGYRKSQDIIGTIKNVTVIRRGDKWDVSIQTEYEDNPPAPTPSEIGIDMGVKRFATLSNGEFFEPISPFKREREKLAKLQRKLSRQKKGSRNSRKTKIKIARLHHHIVDSRRDFLHKTSTQIAQNHSTVYVEDLKVSNMSASAAGTIENPGKKVKQKSSLNRSILDQGWYGFFRMLSNKLERRGGKLIKVDPKNTSRTCPLCGLVSAENRKTQASFACVACGYRANADLVGAXXXXXXXXXXXXXXXXXXXXXXXXXXXXXXXXXXXXXXXXXXXXXXXXXXXXXXXXXXXXXXXXXXXXXXXXXXXXXXXXXXXXXXXXXXXXXXXXXXXXXXXGPVSLWYERRSKAAVSRNPERPTAALGYGRCRGGMKSSLFMTRRTSRK

SEQ ID NO: 19681 - protein, 409 aa, Hapalosiphonaceae sp.
MYRAVKVRIYPTHEQESYLAQCFGNTRWLWNYMLNATTTAYKETGKGLSKAAMDRLLPGLKKEYEWLGLAYSQILQRVTFNLSSAFVNFFEGRAKFPNFKSKHGKQSIQYPQNVKLLPQDSVIKFPGRLGLMKTVFHKQLPDAKVQTVTISKNADGRYYASVLFNQEDNAVVAIREAIGVDLGLKNFAITSEGSKYDLPKKQLAKLEKNRKRKQRKLAKKTAYTSLKRRKAKRLVAKVSSKIARVREDFLHKLSRKIAYENQVICVEDLAVKNMVKNPNLAKSISDQGWGMFLTMLKYKAERFGHTYIEIGRFFPSSQLCSETLLPIPILQKGYDSLGVRFVDCPYCQKQHDRDINAAINIKNEGLRLWALGTSASAHRGDVRPKSSGRKKSMAAEAIPRELGSPHRTR

SEQ ID NO: 19682 - protein, 386 aa, unknown
  TnpB Polypeptide
MKQTRTIKLKIGQSKDFDDVCGRFLFACNWLSDIVFSTRETNSINLHKGNYSVIRKRFGLPSQLTCSSFRHVTAAFLSQRSQGRWHPVNFRRLVMPVVWNRDFSFTKTKGLCFWGKPIKISDKRMPPVETWKDSVLQKKGDCWYLILCHRITVPEPKTEGCIVGVDSGIKRIFTATNSANSRTFTFSGGELNGRRRSIRRTKAKVQSKGTRSSKRLLQRMSGHEAKVTTHLMHIASKKLVQYAESVGARRIVMEKLSNIREASLAKGKEMRDRICRWPYAQGQFFVQYKAEAKSITFELVSPKNTSRGCPKCGHIDSRNRNGLKFRCLLCGHKGDADRVASANIRNRSVVSRHNLVTEGSRNTPGSPEPFEISSEDAVHNASLVLV

SEQ ID NO: 19683 - protein, 386 aa, unknown
  TnpB Polypeptide
MELNGNLHLRITTGNREFIYAKVLREPSNSKDKWLTFMAMLLESWQTKNYFAYTVELKLRDGEVYGSVSFEVPTPEVKYTREKGVLAIDTNASPIHLAIAEVSKTGELVSYQTISLHHLLGLSQNSKDHQEWILAHKIVDIAIQKGKAIAIENLKKLKKGKRGNGKATLRKILHNWNAKKFLQKLKRVAMIKGVEVIEVNPAYTSVIGMLKYAPQLNIDKDIAGAYVIGRRALGFKEDTPENYEKLLKDKAYLEFALKRYEERKKELRELMEKETNEYKRNAIKSELRSVEDAKKLLTNLLQSLQSEPSGCEGANGRNPEQGRVAKTTLQSAWQVLKVALLFPILGRVLPRDLSPLKPVLVEGAWDRVRSRLVPLSAGGTVPIRDF

SEQ ID NO: 19684 - protein, 498 aa, Bacillus sp.
MTKPKKDCFIVELKLMLDTWQTDILCKRFEIARKLYNTTLSYATKQYRLMKESKAYRKQIRCYQKAKKANHPKEWKEISKELDSIRQSFGLSEYQLHAYIKKHQHNYKKHIDSYTSQKIASTVWKAMEDVIFKGAKAHFKSYGMLHSVEGKSNKTGIRFKENRVYWNGLLLPVHFRKNDLFIKESLALHTIKYCRFVKKVIRGKVTFYVQLVMGGIPPAKRINKTGAFRHSYQKKKRVGIDIGPSTIAIVSEETVSIQKIAPDVPLFENQKRRLLRKLDRSRRRTNPNNFNTNGTIKRGIKLHWICSKNYQKTKKLLNELYRKKASYIKEKHGALANHILSLGDEVYIETMHFKGLAKRTKETKTNQQGRFQSKKRFGKSIGNHAPAMLVNIINQKLKYGKQEIQKVNTITFRASQYNHVTNSYEKKKLHQRWSQIGNHLVQRDLYSAFLLMNSDANLKQTNQERCIETFDTFVHLHNQHIEALQQTKKKYPLSMGIL

SEQ ID NO: 19685 - protein, 237 aa, Bacillus sp.
MFISREVNGRILNATVRRNPSGRYFASLLVETEVQELPKTHSYIGIDVGLKDFAILSDGKTYKNPKFFRSLEEKLAKAQRVLSRRTKGSSRWNKQRIKVARIHEYMTNARKDYLDKISTEIIKNHDVIGIEDLQVSNMLKNHKLAKAISEVSWSQFRTMLEYKATWYGKQVIVVSKTFASSQLCSCCGYQNKDVKNLNLRKWDCPSCSTHHDRDINASINLKNEAIRLLTARTAEIA

SEQ ID NO: 19686 - protein, 257 aa, Arthrospira sp.
MVSEAIPKTCGQGTQLVFTKGRWLAIFPEPVAVTPTDATGVIALDPGVRTFITGFDGSRFLELGSGDIGGITRLCQHLDDLMSRIAKEPCRSRRRRMRQAAQRMRTKIRNLVDEAHKQIAHYLTHNYSIIFLPTFETSNMVAKVKRLIKSKTARTMLTWAHYRFKLTLRHQGEITGTTVVDVTEEYTSKTCTHCGHVHSQLGGSKVFRCPECGFTLPRDWNGAFGIFLKALRDTASVTLTGNSAIVALSGNSRINVA

SEQ ID NO: 19687 - protein, 219 aa, Moorea sp.
MNTKNGSAIKKLPYGLTEWKKQDDLFFLNEVSCVPLQQGLRHLQTAFTNFFAGCTKYPNFKKKRNGGSAEFTKSAFKWKDGQIYLAKCKEPLPIRWSRQLPANCNPSTVTISLDPSNRWHISIRFHDHRDLSLPPTDKRVGFDLGITSLITTSDGDKIANPKHFKKLKKKLAKYQKALSRKQKGSNNRHKARLKVARVHAKIKDARRDFTHKLTTQLVC

SEQ ID NO: 19688 - protein, 400 aa, Microbispora sp.
MRTAYKVRVYPTTEQAAVLNRTFGCVRLVWNTVLAWRQARYRNESETTSYAQSDRYLTELKRDGGHDFLYEVSSVPLQQALRHQHTAFANFFAGRAKYPRFKSRHGRQSATYTRSAFRWRDGRLFLAKMDHPLEFVWSWPAVDPATINPTMVTITRDVDGRWYASLAMEEAAEPEPLPTGGASAGIDLGVTDFAVLSTGQKVTNPRHLERKARNLARYQRRMARKQRGSNNRAKAKAKVARAHTKVRDARADFLHRTSTRLVRDHDLIVIEDLNVKGMVRNRHLARAISDAGWGEFRRQLEYKTQRYGRRLVVIDRWYPSSKTCSACGHLLAALSLSTRHWSCPDCGTRHDRDVNAAKNILAAGRAVSACGADVSPQGSSLRRSAVKQETQPARGGIPRP

SEQ ID NO: 19689 - protein, 389 aa, unknown
  TnpB Polypeptide
MKITSTYSVRLRNFNRVFDDTVEVYRHAVDYFIELVIANWNTHFANLSRANDCIRVAEGLSVRTKKRLMTPYNFCHDFMKFPSYLRRAAIKAAYGQVSSYQTRLAQWKAKPGQKGRQPGLPKAGRSFPVMYRDNTFIRAGRNSVKLKVRIRNTWDWVDVELDKHDVDYIALHCAARNELSPALRKRGKKWYLDFSFEEKVILKKVSLDTQLVLGVDLGINNACVCSVMDSRALSSADVLRSCRYSKTLWNVPCGASGKLKATAQNACRGFGRERMVSTRTLPSRRPTSSQELRTNSRSTSLSWNTLISRAVNAARNVSDSITGEPSLSRRWWSTRRTGAESAFVASVLGTRRSLPLTAPVSLQETRTTTACVRFRQASAIRATCLLRTT

SEQ ID NO: 19690 - protein, 380 aa, unknown
  TnpB Polypeptide
MNKAIKYRTYPTTEQKILFAKTFGCCRKVYNLMLSDKINSYQVSKSFGKQTPAMYKEEFPYLREVDSLALANVQLNLQSAFKSYFSKSRKRKNGFPKYKSGKHSRKSYTTNNQHGTVSLTDKSIRLPKIGCVKAVIHRKPDSNWIIKSATVSQDTDGKYYVSVLFEFDDPIITYVADRTNAVGLDYASDGLYIDSNGNVGTNHKYYRESHDKLARAQRRLSRMQGSKKYEAKSSNYLKQLRKVNRIHRHIANQRLDNLHKLSTEIANQYDVVCVESLNMKSMANRGFGNGKATLDNGYGMFLLMLEYKLSDRNKYLIRVDKWFPSSQICHCCGALHPEMKNLAIRTMKCDCGLTISRDQNAAINILREGLRMLNGSFDAA

SEQ ID NO: 19691 - protein, 412 aa, Hungatella sp.
  misc_feature (233)..(236): Xaa can be any naturally occurring amino acid
MNTLSLLKISVIIVSERRQSMEKAFKYRIYPNKRQKQIIAETFGCVRFIYNHYLDKRIKLYKSDKESFGYSKCSHDLTQLKKQEEYEWLRDVDSIALQSSLKNLEAAFKNYFEQPGGGFPKFKSKKCRKQSYTTRSTNGNIAVLDRHIKLPKLGNVRTKVSRPIDGRILSATVSRTPAGRYYVSICCTEVEMPAFPGTGKRVGIDVGLESFCVFSDDSHHIENPRYLKTGLKXXXXFSDDSHHIENPRYLKTGLKKLASLQKTLSRKTKGSARYEKARLRVARKHEEIHNMRMDFLQKLSTDIVRKYDIICIEDLDIKKMLKTKNRARAISDASWREFIRMIKYKADWYGKTVVEIDRYYPSSQTCSCCGSVNKTVKSLSVRKWTCPTCGAVHDRDENAAVNILNEGLRKVS

SEQ ID NO: 19692 - protein, 671 aa, unknown
  TnpB Polypeptide
MEGGGGQEGQEGQEGQIAAGGPVHRTVYAIRKAHQATREFQVWKCGLLSICRDPNMVACVEECAQSCSIIAVEASLLASMHIMRLLDPDHNEGGEALPVMDDTFFNQCVSSIANLNGQQHGNNNNPSLTATLYYYYENIKPQGYVNVGRTPAMAQMLVIIAHQARQNFVVSTEQTICKRLSKWLKLRIRQHSVQGDYFSINGPYNGKSIAGLMMRCCLQDIQVAGIMNQYKRIRERPIPQHQIVWMQDLCNDVRHDLEITPQAPLEVSKHPEVYMRFLRRMLLDLENSGEPLRLFSLLPQKKIQPLYITINSTILKHLHKYLQSFEDDPLEVDEEVISLWDYYFDMKRFTRGNNQFENIVSTDGTSASVTVSRPKSAPVPAVLSARQSAANAFTDADRVVAVDPGRNPILSGVVYDREAMQTLPHPDNIHHEKVQWSKKEHYHEAGFNNRSYKTTMWMSKSPEVVQYNIDAISSKTSILLSYMDHAHHVLSNLHDRMAFFSSKRFKRLKFKTHIRTQKAYEKVVKKLKGGVKKTLVVWGDAQFPSAGRGSPAVPTKTMRKKVGARVKVIDQDEFRSSKLSCCCHTVLSNLLIDGERSYHVRVCQNVLCPRSVWDRNVSAAINILYLFINYNVHDQETPAAFRRGGHDPPPVPVAEVVAPGDEELGMDLDEE

SEQ ID NO: 19693 - protein, 560 aa, Streptomyces sp.
LRAIAPPFTVAAPSGARIRDRLRVDVADEQVLTLVGQHLGRHQRADLAERVAVGLVPVKDNRRAERKKKLTAVSSSRWAGAMTRVSEDQYQLSMRCLYDERAGLRRAIGQIALRLAVPCGERKGKVRGYQDRGERFQKQRRLQALKARLAMVEQRIATERPSVVVGGRRLAKIRHNLADARLTAGEWRKRWDAVRLFLTADGESGAPHGNYTITVDPADGSVTIVLPEPLRHLANAPRGRYRLACAVSFHHRRAEWLDRVTAHQAVRYDIVRDPVRGRWYLDASWSATKAILPSPQEIRAAGGRMLAVDMNADHLAACVLDPHGNPVGDPVTLPLELTGDVSRRDGKLRAAVTSLIKIARLRGCAGIVVENLGFTDARHTGRETMGCGGRGKAFRRAVAGIPTAKFRERLRGMACHQGLVVVAVDPAYTSRWGAQHWRAPLDDQSTTTVTRHHAAAVAIGRRGLGQRIRRRPGVTASDPRIGQRRATGQTVSAPRSCGTTSSPRTTGTPHEGGKTCWSRSDQLVLSPAPRTVRGAPGVRPLPPGPERVDPADTGQQRQEW

SEQ ID NO: 19694 - protein, 162 aa, unknown
  TnpB Polypeptide
MEPRLMREQRRLSHMVKGSGNWVKQKRRIAKLAAKVGNQRADFLHKTANRLAARYDCVGVEDLDMKNMSQSLTLGKSTMDNGYGMFRTMLAYKLERQGKQLVTVDRFYPSSQLCSDCGYRNKDTKDLHIREWTCPDCGVWHDRDVNAATNIMHETRRLMQER

SEQ ID NO: 19695 - protein, 444 aa, unknown
  TnpB Polypeptide
MRIHSSYKIKLTGDLKALEASINIYRQTLSYIIPIINNNWTRVKGCQHTNQKYNMIDKWIHSTINRQALFDFDQQFPKLPSYLRRSAIANALGIVSSYRNNLKNWEKEPVGQSPKLSLTHYDYPAYYKNNLFRKFDPINHTIELKVFKNGDWIYEIYRLKTSDCRYYQKYLANKRQNVPFIQKKGRRFYATFSYEEKTELIPEESIHKICAVDLGLGTDATCSIMNEDGTIYARKFISFSEEHDQLHTQIRRIKRNQKRGSRHNKTRWRKVSGLSQNIADKTVQAIFDFGKKHGADAFVLEYLEFKGKNIVKRAHFWRYKRIYKVLTQRAHQHGLRIARVNARNTSHLAFDGSGWAKRGHEITPETPYALIQFTTGKTYNADLNASYNIGARYFLRRISKTITATQWLALEAKVPQVAKRSTCTLSHLISLRNELTVLTARTQA

SEQ ID NO: 19696 - protein, 359 aa, unknown
  TnpB Polypeptide
MIASTKLSLKFASVSKVAKIVAVLDRYRATVNAYIQHIWSYGGSLNKATADVVPLGHLTFRMRGHALQQALGIVAATRRSAAQTGNLATCPAFSGAMVLSKQLAAITEATETSEFDLWMRFSTLSRRHCINVPLKATRHLRKLLIMPGAKLKGGCAIGCRAGVYFVTLWVELPDLALKEQGTVLGIDVGLNKLIATSDGKIYGADMSKYVRRVCRCKNGSKGKFRARRARDQYIDETLNQLPWDKLQLVAVEKLTNLKKGKKPNRGKSFRRALAPWTYAYVLRRIEWKARLNRVRRVEVNPAYTSQICPSCTHRARSNRVNEKFVCVRCGYAADADFVGSVNILARAVGESMVPRSCTT

SEQ ID NO: 19697 - protein, 373 aa, unknown
  TnpB Polypeptide
MIVLKAFRYRLKPTKKQARMLDEHCEECRWLYNELLSQRILAYEELNISLSKYQQLMFLPELKLERPGLEKVHSQVLQNVADRLDKSFQAFFRRCKNGEKPGFPRFRGKHRYNSFCYPQSGFSIEGNILRLSKIGCIQIKMHRPITGRIKTCTLRKNASGDWDVSISCEVAVQPLKPTEEAIGIDVGIEHFATLSNGKEIANPHFFKQGEKALAKAQRQLAKLKKGTPERRKKGKAAAKIHERISNQRKDFCHKEAKKIISEYQYICIEDLDIKKMIEGSYLAKNITDVSWNQFRQFLTYKAAEAGRKLGLANPAYTTQTCAKCGNRESKKLSEREHCCRRCGYRTTRDCNAAQNILAIGLDGVGESPRSPRL

SEQ ID NO: 19698 - protein, 393 aa, Roseiflexaceae sp.
MRIVQITYRYRLEPGSGQTAVLARSAGARRWVWNWALSRKRAYYTLTGKGLTYHALAAALTELKQQPATAWLRDIDSQLLQQALRDLETAFGNFFAKRARFPRFRSIKRDTPRFRIPQRVAIAGQTIRVPKIGLIPARIHRPLAGTPKSATFKREADGHWYVAIVAEQEVSAHTNRTPRTHVGVDLGLKSFAVLSTGETVDNPRVFRTQQRKLARAGRAMSRKQRGSANRAKARAQVARLHAKIRQQRSDFLHKLTSRLVKSFDLISIEDLSVRGLARTKLAKSVYDAAWGQFRTFLTYKADRVDGYVQVIGRFYPSSRRCGACGAANHALTLADRVWMCAQCGSTHDRDVNAAGNIDREGVRLFMHHVAAGHAETQNACRASVSPANAGKAR

SEQ ID NO: 19699 - protein, 404 aa, unknown
  TnpB Polypeptide
MKKCYSIRLFPTNKQINQLTELSVIRKDIWNKLLEIEQNEYKTNKLILNKFDLNNLLPKLKEKYPEWKKLNSKAIQTIATELYGSYRSFFNLIKKDKNARPPREISIEDYHTIAWNQSGWMIKENNKIIINKIPFNYKSKIDIKELNIKEIRVKYVRNKWLCDLIVEEPIKYEDKLNIKTRVLAVDLGLIKLGTGVSNDGEVVVLKNKSKKINDYYQKQIAKIQNKRSKTKKESNRNKKLRKVLNKCYHKKNQQIKQTLHIQSKKLSNMNYNTIVIGDLTVKKLMSKEGVNKKKKGIRKSFHKSNITMFLQFLGYKCQSKNINLTKIDEKWTTQLNCLTGKLFKEKIKLGDRKVKLSDTIIIDRDLNSAINIMKRWFGNHIASMNEPLDFSSVIKKNNLFNETY

SEQ ID NO: 19700 - protein, 375 aa, unknown
  TnpB Polypeptide
MLQTVTAKLKIVVSDSQKQILLDTMKAYSNACNMVSEFVFEHHDLKRYHIHEELYPLIRERYQLKSQMAESCIRTVVAAFQSILTNQKEWIKPDFQRPQLNLVWNRDYSLKRNADIFSVNTLKGRIKLPFCKKGFERYFTEECRFGTAKLVTKHGKFFLYVPVTYEVQELKKEEITNVVGIDRGIRFLAVTYDSQGKTGFYDGRSVKQKRAHYKALRKELQQIGTPSSRRRIRAIGQRETRWMHDVNHCISKALTDHYPEGTLFVLEDLTGIRSATERVRTKDRYVSVSWSYYDLEQKLSYKALRNHQLVEKVSPKYTSQTCPKCNHTEKQNRNKHLHLFCCRKCGYRSNDDRIAALNLHRLGIELTVPDAVAEE

SEQ ID NO: 19701 - protein, 333 aa, unknown
  TnpB Polypeptide
MKAKQIAEFAIKTKSNTSKDVKHFGLKSVIANQILRKYGRNKKAKNVSNIKLVVPSQGINVEKQSQIIHIPCLKLILHYQFPEFEKVNQIEIGEQYACIPVSVATPELVDNGRYIGVDLNTTGHVAVASNAETGKVWKLGNGALHIHRKYREIRRHLQKQGKYKKVKQIKDRQSRIIRNLNHNISKKIVEIAKSSYCGIRLERLTNIRKAGKYGKTFRYALNSWSFYQLQQFVEYKAKLQGIVVAYIDPRYTSKTCSRCGHIGERYDKSFNCPSCGHVDHADTNASFNIGKPVSHCIVGIGQSNTDRDVLEGITDTPKAATLVMIATTEPHML

SEQ ID NO: 19702 - protein, 381 aa, unknown
  TnpB Polypeptide
MKTAYKFRMYPNRQQEVQLELTLDTCRHLYNTALADRKNAYEVDGISRSYEDQAAMLVARKKDGNFKGVFSQVLQDVLRRLDKSFKAFFRRVKAGEKPGYPRFKGEGWYKSFTYPQVGFKIEGSKLTLSKIGSIRIFKHREVEGKIKTCTIKKDLMGHWYAILVSEMEDVPQLGPKVAIGVDVGLNSLVALSTGETIQYPKYYVQAEKKLAVAQRALSRKKKGSVNRQKAKAKVARISNRIRNLRDEFLHQVSRKLVDSADLIVFENLNISGMLKNHHLAKHIQDHAWSKLIQFTQSKAAKAGKVVELVDARYTSQKCSQCGIIVPKTLADRVHLCPNCGLEMDRDINASLNIRTLGLRERAYRDTTPTLNRISKQVRSMT

SEQ ID NO: 19703 - protein, 554 aa, Acidimicrobiaceae sp.
MATGLSPSGEVTDPAARKVRNSALNALRCEFRLTEYDFKKRILELRRDSYWIGDHVPSQSALAHAAQVWESFAAHLFRSAGRPEVPRPWQNQLIEGASRDEGRGPATQQEVERAEAKGKRPPKARKASWSGVSLRVSGARGITVHLHPSHDWQRHLAIPVVFEAEVPTAREAWYLDDPATWRRVKIVKREVRRHFVYEAHLLCAKDPYRDPARYRQAPDSVVGIDLGVSTLAAVGVGANGVITDALLVRPSIEEMEQRRLAARQRRRAQRALERSRRSINPDAYGPDRHGRPGRGSRLPGTRLRTSKSYHEKRRQLRDERRRERGARIITTNMTATSVIARCGKHVITEDVSVKGWQVNWGKSLSYFAPSELLGAIEREARLAGGSFTKVPCRLGLTQSCHCGAVQEKSLAERWHRCSVCQAGFETPPVDRDVHSAYLAAFVTSSPLAVTLDTDRALAAWSGAEAPLVAVSGDPQSRRTIRPHSHGTSRWSRRKSSDRAGRAIASDVDPHSLGRAQESVLCDVGVGKAHAARLRYEEPISETGRPLGRQLRLDG

SEQ ID NO: 19704 - protein, 383 aa, Bacilli sp.
MLVNKAYKFRLYPNQTQQTLINKTFGCSRFVFNHFLEMWNETYKETGKGLTYNLCSKQLPALKQEYEWLKEVDSIAVQSSVKNLSDAFSRFFNKQTSTPRFKSKRNPTQSYTTKYTNGNIALFGSKIKLPKLGLVKFAKSRMVDGRIINATIRRNPSGKYFISILVETEVDSLPKTKQTTGIDVGINTFAMLSNGTTYENPRFLRTLENKLAKEQRKLSRRYQQAKQDKKPLHEAKNYQKQRTKVARIHEKIKNVRTDYLHKISTEIVQSHDIIGIEDLQVANMLKNKRLSKAISDVSWSEFRTMLEYKAKWYGKQVVSIAKNFPSSQLCSNCDYQHQAVKNLALRNWQCPSCHTEHDRDLNASENIEVEAIRLLTVGATGIA

SEQ ID NO: 19705 - protein, 129 aa, unknown
  TnpB Polypeptide
MSNGTIKKNINKTEEVKKIEKKLKREQRSLSRKYENYKKRSKKKGEATRQNIQKQVIKVQRLYQRIDNIRTDYINQCVNEIVKTKPSYVTIEDLNVSGMMKNRHLSKVVASQNFYDLHKAKKQVQAKWN

SEQ ID NO: 19706 - protein, 484 aa, Caldivirga sp.
VPRVVPLEGGFLALDEPVGRSPTLFTTLGTPYSSPPKQKDGNVRTVRLRLLPSGAQERRLRKLADATARLWNELNYARLIQFRVSGKIDFKGTEREFYHRYKSVLGVNAGQVVRLNHSAWKSYFETLKLYRQGKLPKFNGKPSPPGFWKDRLLGKRRLIILVRNDRYYLEQVNGGEGYLVLKDWGLRIKYAGRIKWSGKQGMLVIKYEDGRWFAYVPVSVGEKPARSNPKGYVKGTYEKIRIENPKGGNKAFIDVGLNNLFAVVFNHTDTAILIKGSTIKAEYYWWKRETKTYQAIRDWLRNHSFNAWRKYHAFYLHAVYKKRERLRHYYRTAVRFLARAMHEMGVDEVFIGYPYLVSQDDGNEYNTNVWWFNKIIKWLGDVLEEYGIRLNVVNEYGTSRQCSICDMKHENGRVKRGLYVCQTTGIGINADLNAARNIAKRVGYRTPMPRRILSYIVTTNGVKPLTPKEGVTIETPKINPTSPR

SEQ ID NO: 19707 - protein, 371 aa, Halorubrum sp.
VEVVFFSLKKKGEANGKPGFWGNSEAGRELRTYIRNTSYSVEWGEYSRLEILVGQDLKDEYGLGYRERLRLEVRGEPNWKEYEKQGRLELFYDEQAQTFRAFQPVTISEDHSRLAHPLASEEAALDIGANNLVACTTTTGQQLLYEGRGLFERFRETTREIARLQSLLEDGRYSSHRIRCLYDRRTKRRDHAQDALARELIERLYDEGVSTVYVGALTDVLDTHWSVETNAKTHNFWAFRTFVNRLACTAEEYGISVEIRSEAWTSQECPNCGSTEDTTRHRDTLTCPCGFEGHADLSASETFLRRQTTVTRSMARPVCLKWDDHSWSESSRSLRPNEEHTNPQVASWSESSRSLRPNEEHTNPQVASVGR

SEQ ID NO: 19708 - protein, 371 aa, Methanomicrobiales sp.
MLQAYKYRMYPSEEQVPLLMQHIHACRFVYNYSLEQKIRAYKQNDRKLSCFDLNNRLPDLKEGHPWLTEVNSQSLQSANKNLDNAFTRFFREKKGFPRFKSKKNPVQSFQIPQHYRADFDRGKIRFPKIGEVRTVFHRVFTGKMKYATISVTSTGKWFVSILVDDRNPDPEPVPFSRDTTLGIDVGLIDFATFSNGEKVANPRYLKNSQQRLKVLQRRVSRKKKGSMNRQKAIKKLATCHEKIANQRNDFLHNLSFRVVSENQAIAVESLNVSGMQKNHGLAQSISDVSWSLFFTMLEYKCRRYGKPLLKIGRFDPSSKICNRCGYINRDLKLSDREWVCPDCGVHHDRDINAAINIKKFALQEQNLVGIV

SEQ ID NO: 19709 - protein, 370 aa, unknown
  TnpB Polypeptide
VRNLVKALKVRVYPNKAQEELLQKTFGCTRYVYNHFLGRRISVYEESKETLTNNMCSKELTQLKKELVWLKEVDKWALQNALRDLDDSYKRFFGGLSKFPKFKSKKNNRKSYRTTFTNNSIEFGTKIKLPKLGRLKYRDKKHTIEGRILNATISQEPNGNYYCSICYTDVEEPVFVRTDKYVGIDLGLKEFAITSDGVKYNNPKYLSKSLKRLARLQKSLSRKTSGSNNRNKARVKLAKCYAHITNQRKNFLHKLSSILVHKYDVICVEDLKIANMVKNHKLARSISDVSWSKFIEMLTYKCKWYGKELVKIDTYYPSSQLCSKCGYQNKQVKDLSIREWKCPSCHTIHDRDINASINILKEGKRILGIE

SEQ ID NO: 19710 - protein, 221 aa, unknown
  TnpB Polypeptide
MLYLARGGDIVAEKSYKYRIYPNKKQQELIRKTFGCTRYVYNHYLDKRKTDKTNYTYVKCVKDLTQLKKELEWLKEVDSVGLQTSLKDLDVAYKNFFSGRSGYPKFKSRKNRHQSYRTSFTNNNIAFMDKHIKLPKLGLVKVRDKQVPQGRILNATISQEPDGQFYCSLCCTDVSFKQLPKTNQFVGIDLGLVDFAIFSDGIKIENPRFFEKSEKKLAKLQ

SEQ ID NO: 19711 - protein, 391 aa, unknown
  TnpB Polypeptide
MIKTVKVMLLPNNKQRTVMFKFASVARYAYNWALEKERVNYKLGGKFISDSELRKQFTQFKHMEENLWLNKISNNVTKQAIKDACDAYKRFFKKLSSLPRFKSRKYTKPSFYQDTAKIKFTSTHVKLESISSSKKRNRQRLNWVRLAEHNRIPIDAKYINPRITYDGLNWWVSVSIEYPDTSYVSNGEGIGIDLGIKNFAICSDSVIYKNINKTERIRKIKKKQRRLQRKISKKYLKNKKGGNYCKTKNVIKLEKLLLKINHKLSNIRKNYLHQVSTEIIKREPSFICLETLNVSGMMKNKCLSRAVQEQNFYSFRQMIEYKSKEYNINVVFADRFYPSSKTCSCCGYIKKDLKLSDRVYVCPECGNTIDRDFQAAINLKKYGENNLHMNT

SEQ ID NO: 19712 - protein, 402 aa, Streptomyces sp.
MIRAYKFLLRPTVRQMVALSEMLRDHCSLYNGALQERRDAYRHASRTSIKYGEQSAQLKAIRAFDPGRQGRWSFSSQQATLRRLDKAFTAFFRRVKSGRTPGYPRFKGVGHFDTAIFPKDGDGCRWDSTPHDPQTRVRLQGVGHVRVHQHRPVKGRVKTIAVKREGNRWYIVLSCDDVPSEPLPATGAVVGIDMGTTHFLTTSGGRHVANPKFLDQGAEELAEAQQYLSTFPRRTKHRTKCHRAAARHVAKLHAKIRRQRADFHHKTARALVRDHDAIAHERLNTAGMTRTPRPKPDPEAPGSFLPNGAAAKAGLNRSILDAGWGQFLSILANKAESASRTVIEVTARNTSRTCLSCSHVAKENRASQARFECVRCGFAANADLVGATNVLTRAGLVRCDVA

SEQ ID NO: 19713 - protein, 406 aa, unknown
  TnpB Polypeptide
MFVATRIRLYPNVTQVHALARQFGCARWAWNDALAETRRLYQETGKGLGYESMSGRLPALKQEHEWLKEANAQALQQSLRHLSRAFVNFFERRGQYPRFKTRFGPQSVQFPQGVKVNEKRVFLPKVGWFKAVIHRPIVGKIKTVTVTREPCGHYYASILTDDGLPMPMPSFDGLVLGVDVGIKDFVVTSDGSHFANPKHLKQDEKNLKRKQQKLARKVKGSKGRDKARKLVARVHERVKNTRQDFVHKVSTRLVNENQVIAVEDLHIKGMLRNHSLAKAIADVGWGMFTQFLTYKTARAGKGLIKVNRFYPSSKACNACGCIREKLDLSVRFWTCEHCGTRHDRDENAARNIRDEAQRMIWAGILPASASGTGAAAAGGNVSRGRGRKSSVTQIPVKAETGMFTCQ

SEQ ID NO: 19714 - protein, 148 aa, Blautia sp.
  misc_feature (17)..(17): Xaa can be any naturally occurring amino acid
VGACHDFFIKFRFLLEXLCHEKIRNQRKDFQHKLSAGLAENYDAVCVEDLDLKGMAGGLHFGKGIYDNGYGLFLSMLEYKLEERGKYLIKVNRYFASSKICSVCGKKKAELSLSERIYYCECGSRMDRDVNAAVNIMNEGKRIFAECA

SEQ ID NO: 19715 - protein, 368 aa, unknown
  TnpB Polypeptide
MNNMLIRTISIKLDIGEHEAALRETQQRFNEAASWIASICWYEHITNTNTAHHRVYGETRTRFALGAQLAVCARAKAVESIKATKSKKSETCPQFGPRGSIRYDARTYRLLSLDRVSLNTIQGRVICRMILGKRQYDMLVDQTWKIGAADLIWRRGTYYLNMTQSQEAPEQVETDETLGVDLGIVNLATDSEGETFTGSKVHEVRMRYHNRRQILQKVGTCSAKRRLKKMSGREHRFQQDTNHRIAKTLVDKAVQSRKALALEDLTGIRERVTVRRENRYERQSWAFSQLRMFITYKAAWASVPVRFVDPRNTSKTCSQCGHCDKANRQSQASFLCKQCGFCLNADYNAAINISRAAVKQPMVSASNG

SEQ ID NO: 19716 - protein, 380 aa, unknown
  TnpB Polypeptide
MVNFAIREALRMGKYSIRKLHEVCYPHFKQKYNYSTYYYSRAYRIASQIIRSYRRRDKEPRVKKLFVRLHKAQFKLEAGKLKVSIRPREFINLEFELGKYQRKVIGKILAGELKVGEITVNENHVYIPFIEEVDVTEGSGKIALDLNENEVVGVTDKGEVKRWSCSYIGKTREKYEAIRAKIQQNVANHTRKFKRLMAKYGRIERNKVRDFIHKLTRRIVNETVGLDLILEDLKGLRNSTNKRIKMFNVFSGKVQLCSINSAGFKGRWNSFPFRRIQFYLEYKKHLQGFHVHYVDRMNTSRVCSRCGGIIRSSDRACPRCGIDRDVNACINLLIKSGLTSPTLPPRNDLMNQTLTNQKMWTSLGRRTWEVEKGGVNIHPL

SEQ ID NO: 19717 - protein, 344 aa, Pseudobacteriovorax sp.
MATKTIKIRIKDSTSAKTLKNMSRSVNFVWNYCNETSFKAIRYNSEWLSGYDLQKLTTGSGKELGINSTTVQEVCSEYALRRKQFKKRKLRWRGKKSLGWIPFKKTGITFKCGFVKYAGHSFKVFQPDRLPGKGEYGSGELCEDASGRWYLCIAVEYEPEYQAGKGEVGIDLGLKDLASLSNGEKVVNGRYYRMMERKLKRAQRYGKKKQARHLHRKIRNKRMDALHKASTAIVKKNALVVVGKIGAKKLAKTKMAKSVNDAGMSMFKTMLKYKASAQQHCIFVEVPENFSTQICSNCLAVSGPKGPKDLGVREWVCSSCGAVHDRDVNAALNILRFGRESLVS

SEQ ID NO: 19718 - protein, 321 aa, Pseudobacteriovorax sp.
MQLDRAFKSFFKKQADFPKPKKKAKREAGIRFPTLKVGAIEYDKHSRRKAWVTLPKIGRLRFVSSRPFSGKVKNVTVTKQGGDIFVSFGVEEDLTGVGNTSASAVGIDRGVVHTLAISNGEFLDLPTERIKLLEDKIARLQARLAKKKKFSANWMKQNKKINRVHHRITNIRKDFLWKSAHNLTKNHGMIGIEDLGIQRMTKSAKGSIDNPGRKVAQKSGLNRAILRQGWYDFSVKLKWQAEKHDARVIEVAPYNTSIICSAALINLRLIVSVRSCFAALNVDMKTMPIPMRQKKSTLERAAGATVHNALMDLGLDKNPPL

SEQ ID NO: 19719 - protein, 404 aa, Streptomyces sp.
LATSEKDAFTFSVAVLRSDAMKLVIQVKLLPTPEQASALESTLRACNRAATYASQIGFAQDIKDRNGLQKEVYADLKATFGLSAQPVVRTVKKVVDAYASLKANLRAGRFGPPTSKRYRKAVSTPIVFRPEAAQPFDDRCLSWQYDARTVSIWTVDGRTKGIRFACSPDRLKTLVTCRKGESDLVRRGGKWFLVATCEIPDPHVYEPVDWIGVDRGIVNLATTSDGTNHQGRRLTRYRRWQARKRAELQRKQTRSATRRLARRRQKEQRHATHVNHRISKEIVSVAQRTGRGIAVEELGGIRERVRLRRDQRGTLSAWPFHRLGQHLAYKAKKAGVPFLEVDARHTSQRCPRCGHTERANRPDRDLFRCRRCGLAGPADVVAGVNVRDRARSAWVLVTAPASSP

SEQ ID NO: 19720 - protein, 649 aa, Saccharothrix sp.
VSRKPPLAEGVISRTACARTLVRSGVDEKSGEILTAVAVAERVGWCLDLTGGMVGSLLGGHWNTADVDTLASGVDAGGRRLPSNAWMALRRLGWAVVAGAKVNDRIVRAAQEQAGRALRSVKWRSDVVAGILTTWPADPDKRTAEEWDAARAAIPGGEHLPSSVIRARTRQITRFLREHGRLPADVFELEPTPRVARMLLLAACDSQQASIERSPTEPTKILLRVRLPTRSDPLSFRDWTWVACTVTLPPTVPASAVPHLPTLRIVGGKVRADLAYTHPVPAARRSGHTIALGVDWGLNTLLSAGAARLHDDGHITALGAGARFQAAGVLAKQHRLRRLAERLQTKTDQYTRLADPALADKLATLGEEIRRVCERRCNLNDALARSAARWAVDQAVAAGATVIYLEDLRSMEARGMGRTHNTRMSQTVRGRIADHMRHLAAESGIAVATVPPANTSKHCPHCLTPLRHRKAPDRPTTPGWKWAICPSCRWQGDRDQGAWRRIAARGLAHQTKTVADRTIGTLAIRAVVPEMENKAVITATRKTCRTDRSKTGPTRPRSTRSAPRRRGVPSPARPIDGAGQRPEGHAPTDRRLPRAAHRHQDVTTTSTPTGRHRPRGAALGAGFHLHARTTPPRWEEPTPNPTVRAESPS

SEQ ID NO: 19721 - protein, 367 aa, unknown
  TnpB Polypeptide
MNVIRTITFNLQLPDGGSSALLDTMRAYSTAFSASAQWGFENHTWNKVENHKATYKAVRESVPDLPSSLVQGARDCACEALKAGKCASPPERKPLAAMRYNQRVITVNLIHGIATIASVRGRIKATFPISEYHRQYLSWTVTSSTISFDKRKKVFYLHISMEHPDVEPVQEVKVLGIDRGIVNVAVCSDNTFFNSKQVKRVRSKYAHLRRELQSKGTRSAKRKLRRMAGRERRFVTDTNHCISKQIVESEYTVFALEDLSKIRVQKRRGVEFNRKLNNWSFYELEQFLRYKAEDLGKQVVLADARYTSQKCSVCGHAYKGNREGSSFRCRKCGFQLHADLNAARNIAQAGISCLSRLSVNQPNVAHS

SEQ ID NO: 19722 - protein, 395 aa, unknown
  TnpB Polypeptide
MERLQAFKYEIMPDGDQQRDMRRFAGSCRFVFNKALALQTANHEAGGKFIRYESMANLLPAWKSEDPWLKDSPSQALQQALKNQDRAFVNFFAKRTDFPQKRKKGKHDSFRFPQGFKLDQSNSRIYLPKLGWLRYRTSREVLGTVRNVTVSLRNGKWFISIQTAREVEQPVAQGDAVGIDLGVVRFATLSDGAVVPSLNSFKGHAPALRKAQQALSRKKKFSHNWKRAKARVQSIHVRIANARRDYLHKTSTAISKNHAMVVVEDLQVLNMSRSAAGTVEQPGRKVRQKAGLNRSILDQGWAEFRRQLEYKMLWSGGVFLAVPPQNTSRTCPRCGHVSKDNRRSQAEFACVACGFTENADLVGAINILRAGHSRLACVVNDEVSRQQQEPSERAA

SEQ ID NO: 19723 - protein, 395 aa, unknown; identical to SEQ ID NO: 19722
  TnpB Polypeptide

SEQ ID NO: 19724 - protein, 522 aa, unknown
  TnpB Polypeptide
MRKKPARKKKSKIIKLDEDKIPCKFIVSRLINNIKYGRTCGDLVLKDKNYCSKHCNEEQPSFDKHALYLCKHIISQKSRNKDRKGMICNDFVTENNNYCTHHINQHNEEINGTKTLRSFKVRIYPTNAQKLKLEKYFGSARYTYNKCVEDKINKIKFDELRNKYVTKLPLTYKFLKDCPKEIRAFSAKEYLTGLNNSNDAYKSKLNREHYLREKYPKRKNKNIQKPEMNFRKKKNQQSITINKNSIKCNGESIIIYPDHFGKEPLKLKKKCIKNDNKLIKLLKSPIYHDIKIIKTPTKKYYLCFSEDVSVKDNVLLNQTLINSTNVCSIDPGIRTFMTSYNENKIEEIGTNAGEMMIKMIKKLDNDKKEYIKSIKQHQINKTEKTLKEKNRLKNLHKLAQEKIKNRVNDIHNKAITKLIEYDLILIPKLNLKRSLISKIVKRASIALRHCKFADKVAEKAYLNGKVVRFVKEHLTTKQCSNCLTINEVGSSKDYNCKKCNLFCDRDHNASKNILLNHLTNIK

SEQ ID NO: 19725 - protein, 387 aa, Actinopolymorpha sp.
LLVKIVTQVKLIPDAAQASALSATLRTVNDAANWVSEVAFVNDVPREYELRKHTYAQLKEQGLGAQAAQHVIKKVRDAYTTLHANLRAGNLGRKGSKRRVKAESKPITFRPEAAQPYDDRCLSWQYDTQTVSIWTTAGRIKDLSFACAADALKVLQLHRKGESDLIERNGVFYLIATCEVPEAEQYEPGGFIGVDLGIVNIATTSTGYQAAGRRLNRYRKRQLALRTKLQKRRTKSAKRRLKERSRRERRHVKNSNHIIAKTIVTEAERTGGGLSLEELKGIRTRVRLRKPQRVALHSWAFAQLADFIVYKARRAGVPLVFVDPAYSSKECAECGHVDRLNRISQARFACRSCGVVAHADRNASHVLARRGATAWAAGRESRVPSIP

SEQ ID NO: 19726 - protein, 425 aa, Corynebacterium sp.
MDIVKRRQTFRAYPTGQQAKELSRLFGCTRVVRNHFIATMQQAHQQGVALSLVEAEKAATTTLKRTEGYDFLNEVSAVALQQAARNTTRSFREFFRACAGSRSRVGFPRYASKRSRQTASFTKAANFRIRHPQGCRWGFVRLPKLTGELKFRACRDLDWDTVGTVTVTRSPSGVYEVSVTHEVEPVILPDTVTACGVDLGLVSLAAVVSSNGARHVVDNPRFYRQAQRKLASAQRLLSRKTAGSANRKKAAVRVAKLGRKVACQRKDHLDKLSRQLVNDNQVIGIEDLSVAALSRCLRLSTSVYDAGWAMFRDMLTYKAADAGRTLVVADRFYPSSQTCSVCGRRDGNKPLSVRSWVCAGCHSTLDRDFNAATNLMLCASEAAGHADSLNACGGRVRLRLAGAVSHEAGTHRSCRNTGAVGIPAL

SEQ ID NO: 19727 - protein, 531 aa, unknown
  TnpB Polypeptide
MKATYQTRIMAYSEGTRTAGDAALSAYAELYGRVEHKLFAEMAAGASAASLKSEYLERYGILARMFNAVRVSLGGKARSVREGQKLRVDDLRWRIARAKKRVTKARKDGRLDQAHHKGRRLANLEHRLKVLETELKAGLVRLCFGSRKLWRKRHHLEANGYASHGAWLADWREARSDEFFVLGSRDETAGCQLCVADIAEDGSLTLRLRMPGSLAERHGKYVTVTGVRFAYGREQVLAALGSNADYVAFRREHGEKAAPTTGPGQALSYRFKRDGKGWRVFLTTEMQDVSVVTDKRRGAVGVDLNADHLAVCGTDASGNYVHTFRVPLVTYGKSNQQAAALIGDAVAHVVEYARCVRKPIVLERLDFRQKKAALEGESRKYSRMLSSLNYARTLACFLSRGHREGVGIQQVNPAFSSVIGRVKFMERYGLSVHQAAALVLARRLLRCSERIPRRWEAPVGNGVRVAFHVPARKRVKHVWTYWGAVLGQLKPALTARHRLGKCRDGPNPIQAFVRVGARRACLGGDPIGVPG

SEQ ID NO: 19728 - protein, 385 aa, Bacillus sp.
MKRAYLIEIKPTNEQIVKINQTIGVCRYVYNLYLSKNKEMYESEGKFLSGYDFSKWLNNVYTKECSQWIKEVSSKAVKQAIMNGDKAFKRFFKGLSGFPRYKKKKNQDVKCYFPKNNKTDWTIERHRVKVPTIGWMRVKEYGYIPKNGIVKSGTIFKKAGRYFVSVLCELEESVTRVILNQTGLGIDLGVKDFAIRSDGIVHANINKTIQVTKIEKRFKREQRSLSRKFENEKKRGEKSVTNKRANIEKNILRVQKLYARLANIRLEYVKSIVNDVVKTKPTFITVEDLNVKGMMKNKHLAKTIAKQCFYAFKMWLLTKCKEYRIELRQVDTFYPSSKLCSCCGQKKLDLKLSDRVYTCECGNTMDRDLNAAINLLQAKEYIILT

SEQ ID NO: 19729 - protein, 414 aa, Thaumarchaeota sp.
MALARKAIKQCYRPSAQMLSVMESFRQMTNDCIRIGMDFEKSGESMTPSMKKLSLLAYRELRTRYGGYSHYALCAISKAAGILSARRKSIRRGIQTRTPYSSAPFLVSCYGFKIEEGNLIIHLDVDKFESIPLNSHTRALLSDSSLRVRSFTLNERCLSLCVSQDVVEISKEDVAGVVGIDRNLRNLTVGNAAQVTYYDMTKLVQIAENTRSIIRSFRRADARIGSTIASKYGKRKSGRRKQLLNLVSKKIVQNAKAGKQAIVFEEIKGIQKMYRKGNGQGRSFRGRMNSWPYCEIKRQIEYKAAWEGVPVITLTRGETRGTTMDCPRCGERLQVPIRGDMEHYRQLWCEVCKRWWDRDVAAVLNISRRGWLRFDHSSKEGEAEEAVKGNAEHEREPLILRVDVSKLRLTRETK

SEQ ID NO: 19730 - protein, 372 aa, Clostridium sp.
VNIVYRFRIYPNKSQKELFARTFGCVRFVYNRMLAEKNEYYEKTGKVLKVTPAKYKAEFPWLKEVDSLALCNAQLHLQAAYKNFFRDSSVGFPNFKSKKNPVRSYTTNCVNGNITLQNGKLKLPKAGWIRIKQHRSIDDRYILKGATVSQEADDKYYVSLLYVAEEPEHEIRSVKTAIGLDFSMRELYVDSHGAHADYPHFFRKSQEKLAREQRRLSHCEKGSSRYMKQKKKIARLHAHIAHQRKDYLHKESRKITNFYDLVCIESLNMKEMSQDSRFGTSVHDNGWGMFTEFLSYKLERAGKKLVRIDKWYPSSKICSCCGKLKKELKLEDRIYSCTCGNQMNRDENAAINICREGLRILGVELETERKIS

SEQ ID NO: 19731 - protein, 227 aa, Marinithermofilum sp.
MKASVGQGGLPPLNRPTIFSPKDWNIRFFSPFVPVDKSKAVGIDLGLKHFAILSSGEVIPNPKHHRKYEKQLIRWQRILSRRRKGSQNRNKARLKVARLYEKIRNGRQDFLYKLSTRLIRENQTVCLEDLQVRNMVKNRRLARGISESAWSEFRSMLEYKARWYGRRIRLVGKTFPSSQLCLQCGFRNKEVKKLNVREWTCPACGVHHDRDLNAAKNILKEGLKPAG

SEQ ID NO: 19732 - protein, 520 aa, Iningainema sp.
MASKKQRKTEETYTQVIPVVSCSDEAQVDQIMHLCGIPRSLTYNKLGSLQGWDLDWKKADSIIRTILKPDDIGLPGKIWEWAVNDTMKAISAQQEAAKVYLVREIWRKYPMQSVQQQRLKWLAENKGKKKGEELKALKLVSLEMFPTCAIETARNRLIELLETDPTKDKWLHRKFRTQYKRGRTFVRNQIVYQGQGYTCKRINRHSVELQIQGLERGKKITLNLRCRHIIKGQIRVIRNIDGQLEVHCVHQRTKTLPEGKPTQSIGLDKGYTEGFYTSDGQAIASGLGKMMTEKTERIAKTNRNRYRIRAFANGITKHDPAKAARILEKNLGYKVKTRKLQSEKETIKNFIRFDLRRVITSPIDIICEDLSIPIKGKSQAKHLTRKLNQWMKGELQASIEKISLETGSTISVVNPAYTSQLDSLTGTLLGCRKGDLFIRYTGDVIQADWNAAINVRVRGQDNQITRYMRSSEVEAILVGRTVQYLHSIGYSVAAALLLGWLPSKFKTTALKYESKYYPQG

SEQ ID NO: 19733 - protein, 365 aa, Photorhabdus sp.
MLRATKVRIYPTPEQAEYLNGQFGAVRFAYNKALHIKKHAYKRHGVNLNPRKDLKPLLAVAKQSRKYAWLKAYDAIALQQAVINLHTAFDNFFNPKLRAQFPTFKRKQGKQSSYHCVGVKVLEGAVKIPKLSPIEARIHRKIEGKVKSITLSRTATGKYFAAILCDDGKDVLEKPGVITRVTGCDMGLSHYLIQSTGEKVNNPCHLINARLRLASVHERVTHARADFQHKLSRTMVDENQVVIVETLKSANMMKNHHLARAIGDAGWNSFLMKLEYKAAVAGVHLVKLDQWFASSKTCHGCGHKMPELPLRKRIWPCPCCYVEHDRDINAALNIQRKGITELQAAGLVVSAHGGQRQSVIKTVAA

SEQ ID NO: 19734 - protein, 394 aa, unknown
  TnpB Polypeptide
MKKLLKSYKTEINPTSEQEQIINRTIGVCRYVYNFYLAYNQEIYKTEKRFVSGMDFSKWLNNEFIPNNSEFQWIKEVSSKSVKQSIMNAERAFKNFFKGKSYFPKFKKKNKSDVKMYFVKTDAKTIIRCERHRIKIPVLGWVRLKEKGYIPTNPNAHIIKNGTVSYRAGKYYVSVLVEEREQRQPILNDFGIGVDLGIKDFAICSNGKTYSNINKNSQIKKLEKKLRREQRTLSRKYESCKKFNNDLKGEDTQQNIKKQKLKVQKLYQRLDNIRTDYINKVISELVKTKPMWITIEDLNVSGMMKNRHLSKAITQQKFFEFRTKLFVKCKENGIELRIVDRFYPSSKTCHRCGCVKSDLKLSDRIYHCDECGYTEDRDYNASLNLRDCQTYSMA

SEQ ID NO: 19735 - protein, 384 aa, unknown
  TnpB Polypeptide
VITFNTKLLGDTTELKKLLEYQQFVFNFASKEQFTEKKNSLVVLHSKVYTAVRKLNPEIPSQVIIRGEHDCLASYRSIKSNKHKIKKPIEKKNLSMRLDKRLYSKDKTDKYAIRLTTTGKRQSFKFVVYPKLKELLDKYQYCDPLIYVDNKEVYISFSFENKQPQQKPRLAIGVDLGIRRSAATSEGKLIIDKCFNERKRRLRHQKDILKSKGTKSARKKLRYSLRRKEHNQNKNQTHLISNEILKTEADIICLENLKSIKVKKNKYQNKRSISQVPLYELRRVITYKAQNQGKTVLLVCPYNTSKTDSVTGKVEGERRGCRFYSKVNGMIYDADINAAINIAKLSKHPISQTTNLTYGQATVNSPNEYKSSLIGVVQAPTALA

SEQ ID NO: 19736 - protein, 392 aa, unknown
  TnpB Polypeptide
MSNYQIHRVKIGKTEQLDALARECARLYSETLVFFWRTVRRKGIWLKPKHLMRLYTSHKLHAHTADACVQAFFAALNSWRERRKSDPDARPPHKCKWYFRIEYKRTAMHHQNGTLTLSNGKGNVPLVLSWPWETPKTVVIHWTGTQYEAIATYLQERPAALPHGELAAGIDLGEIHMAVSYDGTKSHILNGRLLRSKVQYRNKLQAKLNSRIDRRMKKGSKQRKRLIRSKKKQLKKIEHQIRDIEHQQTTKLITTLLQAGVRTVVIGDVRDIRQDLDVGSKTNQKLHQWSAGSVRHKLTYKAEWRGMEVALQEESYTSRTCPMCGHRRKSKVSGRMFRCTNKRCGFSFHRDAVGAVNIRQKYLGCGPVVGPMARPIGLRYTPCAGVAHSEKG

SEQ ID NO: 19737 - protein, 415 aa, Moorea sp.
VVRGGKKMRHQAIKVRIYPSDEQKQILAQHFGCARWWWNYALNQCIETYQTTGKGLTRSALNAMLPKLKKAEETEWLKDCYSQVFQTTTLNLVTAYKNFFQGRSKFPRFKSKKRKQSIQYPQNVKIIDGCLKFPGKVGIVETKLHREITGNIKTVTISMTPSGKYFASILTELEGDNHKPCHDGKIAGLDLGIKDFAIVNDGYKTSKFANPRYYYKHEKNLARKQKKLSKKQKGSKSRNKARKKVARVHEHISNIRQDYLHKLSRKLVDDNQVIVVENLNTKGMVRNHNLAKAISDTGWGMFVNFLSYKLEKEGKVLIEIDRWFPSSKTCSNCFYQVSEMPLDIRFWKCPNCGAHHDRDENAAKNIRAEGIRILQSSGTGDSASGGDVRPKRGRKPTLRQSPVKLEAYTVPNGSV

SEQ ID NO: 19738 - protein, 366 aa, unknown
  TnpB Polypeptide
MMLSFRFRLYPTKQQAALLDETLSGCCELYNAALQERRDAWRINRESINFAGQSAQLVEIKQVRPELNGIYSQVLQDTLRRVDKTFKSFFGRVQRKAKAGFPRFRSCSRYDSFTYPQLGFSVQGSHLCLSKIGKVKIKLHREIEGKIKTLTIKREAGRWFACFSVEVEGQPLPVRTESVGVDVGLLSFATLSDGTEIDNPRYYREGQKHLRIVQRKVARRKKGSHRRRKAVQLLQRAHAHVSNQRTDFHHKISRWLVNEYGLIVVEELNVKGLASGMLAKSVNDAGWSAFIAKLLYKAENAGRELMRVDPRGTSQTCLCGASTPKTLSQRWHQCSACGLSANRDHVSAQIILARGLRVQNATCSTS

SEQ ID NO: 19739 - protein, 451 aa, Bifidobacterium sp.
MSQKVRINGVKHTGASVFLGVDRCGNPCWTRNPERVMVWLCDGWRARFNQRREQRTRNVPVKDDATGEVVDWVKEPLGGPDVPELISDREARLQCSWMTGIPAPILSSTDRIENTEWFAGLKRRKTIGGRIPGFKSRHRGLGFVCWRNASRSGNAIFHKTGRKSGVVIITGMNPKRWVKPGEKAHWRIIVHVRVGQEIRPYTSVHVDWTHRTLVFVNMPLPLPRTGDGVIGLDRGCVHTLASSDGTFEDMPKPSKAELKRLKYLQRRMARQDRVNEARGGKTAKFVSKRRQKTLSRFNALQSRIVRRRNDWIEKTTTTLAKANILIALEDLDVQAMTRRPKPKLDPANPGQCLHNGAKAKAGLDRSILSNNWSRISKRLQDKMDANGGRLVIVPAAYTSQACHECGHVAKGNRDSQAVFHCVECGYEANADVNAAKNILGRALIQTGGGTA

SEQ ID NO: 19740 - protein, 428 aa, unknown
  TnpB Polypeptide
MSNYKPKEFAEMIGASVKILQRWGRENIKIKGRERKKLRKSYKTEIFPTPEQKQIIHRTIGVCRFIYNFYLAYNKERYEKEERFVSGYDFSKWLNQEYLPQNPEFSWMKEVSSKSVKQSIMNADKAFKNFFQHKTGFPNWKKKSNSDVKMYFVKNGTKQIISCERHRIKIPTLDWVKLKEKGYIRTNPETHIIKSGTVSMKAGRYYISVLVEEPKTEKPILNDFGIGIDLGIKDFAICSHEKSYKNINKTARIRKLEKSLKRQQRTLSRKYESQKKLPNNRKGEATRRNIQKQKLKVQKLHHKLDCIRTDYINKVISELVKTKPDWITLENLNIRGMMKNRHLSKAIAQQKFFEFRTKITAKCKEYGMELRIADRFYPSSKICHRCGCIKSDLKLSDRVYVCSECGYTADRDFNASLNLRDCRTYQIE

SEQ ID NO: 19741 - protein, 388 aa, unknown
  TnpB Polypeptide
MSIKTTQYPVIKVRLYPSAEQAALMEKTFGCCRYLWNQMLSDVQEFYAATDIHYIPTPAKYKKSAPFLAEVDSQALCTVHQNLRKAFLSFFRAPQRFGYPQFKRKKSEKDSFTVYCRPYRTGPSIYLTDDGIQMPKLGALKAIIHRKPNPDWQLTYVTVTRNKSGKYFASIVFRAEVEEPTPVRPTPERTIGLNHSLSHFYTDSEGNAVDLPRPMLQSVQKLSQMQKKLSRMQRGSQNYEKQQQKIKLLHERLSNQRKDFAHQQSRQIANVWDAVCVRETDLIKLSQRIKGVNVMESGFGLFRQCLKYKLERQGKQYIEINPYAPTAKTCHNCGFVNEGLSRRDKVWRCPSCGGEIHREVNVARNIRDWGLQQFREQTQETGASRAVS

SEQ ID NO: 19742 - protein, 423 aa, Thermosphaera sp.
VSELARTVVVPSVGLTGKKLAVFKELEELYRQVLVELVDYGSRNNIDSFTRLKRDKYRELRGRHPHLPSHYIHTACQDASTRIKSFNKLKRRGLAKSERPEVSRVSIWLDDHLWKRVGYTTILIYTHKGWMPVELVPHKLYWRYVNSGWALRTQPKIRIDYRRRRLLVYFVFAKAVDVDENSVKRVISVDVNEDNVAVKVLNRVFILETGVKRITIGYARYREAVQSVKGNGYVGRAIHGRERKRKRDIRSKIANIVSNTAKSLNAVVVLEELPKQCPRNMIRDVRDPALRHRIYQAGFRGMVKAIEEKCLERGVLVVKVDPRDTSSTCPFCNSKLVRGNAPRQLKCPRCGFRAGRDVVAVLNLEKKYLTPKGLVPLTPMPSDPTPEVAVLPVKKWARRKSLEGTTKHPETPTNTLQGQTVFH

SEQ ID NO: 19743 - protein, 400 aa, Azospirillum sp.
MQNRGYKFRLYATAEQETMFGQYAGVCRLVYNLGLEQRRDWWRQFKANTGIAISYPSQARELTALRAEFDWIAAVSIICQQQALRDLDKAFGNFFAGRADYPTPRKRGMNDAFRFSGRDCQWRKLNAKWAVVKLPKIGEVKFRLTRDIPGTVKNVTVTSDALGWHVVFSTEVEHTAPPNFGPAIGIDRGVVHTIALSDGTFRNMPKEQLNLLDRRARKQARKLARCKRGSNRRHAARKILARTKAKIARIRLHWNHERTTEIAAMHSVVVLEALKTKSMTASAAGTVDEPGRKVRQKAGLNRAILNNAWHQFETLLSYKIAERGGELRKVNPAYTSQCCAECGTIDKVSRENQATFRCGHCGHTAHADTNAARNILRAGTQPALRSSVRKPLRRELKRAA

SEQ ID NO: 19744 - protein, 384 aa, unknown
  TnpB Polypeptide
MTLKAFKFRLEPNQQQRVLINKTLGCTRFLYNRMLDEKQTKYKSKDKSKCKTEKDYKIDFDWLKEVDSIALQQARIDLKTAYDSFFRKLKAGQPTNLKFKSKHNPKNSYRTINVNNSIRTEDSYIRLPKLGFVRFKKSREVQGKIKSVTISRNILNRYYISVLCEVEIDSLPKLDTQVGIDLGLKEFCITSDGEFVSNPKYLRKSEDKLTKAQRKLSKRVKSSKNRFKQQKVVFKIHQKIRNQRLDFLHKLSTRLINENQVICLEDLQVKNMVKNRCLAKSISDVSWSKFVELLRYKAEWYGRELVQIDKFFPSSKTCSSCGGIKKDLTLKDREYQCSSCGITLDRDYNASLNILKEGLRILTKNCRDDRDSLLNIQMKLVCSS

SEQ ID NO: 19745 - protein, 403 aa, Lyngbya sp.
MIVYEFKVKGKLNQYRAIDEAIRAGQFVRNSCLRYWIDNRGLGRKELYRYNTELRAMYPFVKDLNSHACQTSVERCWSAIVKFFENCKKNLPGKKGYPRFKKRSRSVEYKTSGWKLLDPKHIEFTDKKGIGKLKLIGTWDLAFYLVKQIKRVRLVRRADGYYCQFCIQVDVKVDVEPTKHNVGLDVGLKEFYTDSDGNTEPNPRFYRKSEKRMKFYQRRVSRKKKGSANRKRAINKLGRVHLKISRQREEHAKRVARCVVLSNDMVAYEDLRIKNLVKNHCLAKSINDAGWYQFRKWLEYFGKKLGRVTVVVNPAYTNQNCSSCGTTVKKSLSTRTHVCRCGCVLDRDQNAAINILNSALSTMGHIGTWIDKDPNASGDLSTTGTGEILSQQLGSLNEESPGF

SEQ ID NO: 19746 - protein, 538 aa, Bacillus sp.
MVDVLAETIETFNQAKRFAFQTIVREKRWNRKLYTDSLHLVLKRKYQLNDYYANSAAQEAKALFTGLMALQKLYEKQTQEKLKKLKKKLKQERTKLTNLRKIKQSCVKGALTFPKNTRFEKHNNLISLSRKKYTLIWLNEYLFEHQYLDVQIKRIQAKIGHLTHRQSRLTQKLSSDQTNIPSAVFGSKKLFRSQFTIREFVRNHDKWKTVFSRARNKQLILSGRKDAKHGNFVFQYVPATKELWMTTSSGKTLMFPAVMFPHGQEKIEEVITTQLQCKNKKKHGKPIAWSVEDYGSYYIVKCLVDVPENPHTNYSTSDGVISVDCNLEHFAWANVTKDGNYKGSGSLRFATMGKSTGQITKIIEVEAIRLVDLAERYNKPIVLEKLDTTQSKTGDRYGNKRANQMKSMFAYEKMTSAIRSRADKRGVAVFQVNPAYTSISGKMKYMRKFGISIHQSAAFTIGRRGLGYKEKVPKVLQPYIPNKEAHHWSHWHQLNNRLDIRTHHFYQLYDVDQPTEVLQIERLHLFENEKKKLAKIFA

SEQ ID NO: 19747 - protein, 400 aa, Oscillochloris sp.
MMHLVEQHIIKQTDSRFGAIDAAAFAAKNLYNAANYRVRQAFIHDGVYLNYHDMHRQMQTTEQYQALPCKVSQHVLLLLDRSWKSFFAAIKAYTEKPDAFTGKPGLPKYLDKTKGRFVLVYTTQALSRSALAQQVLKPSGLAIEVTTKQTRIAQVRIVPRSGFYVVEVIYARDVEPAAVDPTFVAGIDVGLNNLAAITSNKPGFVPVLVNGRPLKHINQFYNKRTAQLQSKLGRKGTTRLMERLTNRRNRQITHYLHTHSRRIIDVLVHEGIGTLVIGKNDGWKQQIAIGRRNNQNFVQVPHARFIQMLQYKAELVGIEVHTINESHTSRCSFLDAEPIGHRDCYLGKRVTRGMFRSANGRRINADVNGAYNIIRKAIPNAFGNGIGGVVVHPVGIAPTN

SEQ ID NO: 19748 - protein, 370 aa, Oscillochloris sp.
VKLTAQIKLNPSPEQADALRRTLEAANAACDAISRTAWATQTFRQFALHKLVYYDIRDAFGLAAQLTVRCIAKVADAYKLDTDTLRTFAPLGAVAYDSRILAIYPASSTISMWTLDGLQVIPFVCGERQRALLASQKGESDVVYRDGSWYLSATCEAKEAAPQVATEALGIDLGVTHIAVDSDGDIHSGKAIKNVRYRHRRLRTKLQRKGTLGSRRRLRKLAGQERRFATWVNHNLSKQIVTKAERTKRAIALEDLTHIRTRIRARRPQRVTLHSWAFLQLRACIVYKAALVGVAVHLVDPRNTSRTCPTCGHCVKENRKTQASFVCTSCGFAGLADAIAAVNIGRRAPVNVPYCSETGSPVAPEQSPRL

SEQ ID NO: 19749 - protein, 291 aa, Oscillochloris sp.
MKFIAQVKLTPTAAQADALLRTLEAANAACDAVSELAWNTRTFKKFDLQKLCYLSIRETYGLSSQLAIRVIAKVGDAYKLDTTTVRTFRRHGSIAYDDRILSWALPGRKVSIWTLDGRLSIPFLTGERQLAFLAYQHGESDLVYRKGEWYLLATCDIPEPTEQEVDDVLGVDLGIVNLATDSDGESYTGKDVERKRQWYAGRKKALQAVGTKSAKRRLRQLSGRQRRYQKDVNHGISKNLVAKAKRTKRAIGLEELTHIRQRARVTRPTQRARHSNWGFAPVSPTRRRWPA

SEQ ID NO: 19750 - protein, 372 aa, Oscillochloris sp.
VIRAHTIRLNPTPEQANLFRQAAGTARFCYNWGLRAIKDALDQGMPVPTHRALRDTFKRIRAVAYPWTFQVGKSAIDGAFVNLGRAVKNFLDSRSGRRKGKKVGFPAFKSRRRGYGSFYVANDRFSVDGHTLKAQKIGTVNMTEPLRFVGKILGATIRYQAGWWRISIQVEVAHTPPTHTGPAIGVDLGITSLAVTSEGAVFENQKHLKRALATVKRLQRSVSRKVKGSANRRKAVVKLAKAHFRVACQRKDGLHKLTTALVRHASLVGIEDLNVAGMLRNHRLAQAIADGAWAELRRQLEYKAPAFGSRVIAIGRFVASSKTCNHCGHVNDDLTLAMREWACSNPDCRLLLDRDLNAARNIRDEALRLASA

SEQ ID NO: 19751 - protein, 399 aa, Oscillochloris sp.
MQLVEQHVITPTDSRFGVIDAAAFAAKNLYNAANYRVRQSFIHDGVYLNYHEIHRQMRATAPYQALPRKVSQQVLMLLDRSWKSFFAAIAAYRNNPSACTGRPGLPRYLDKTKGRYALVYTVQALSRPALAQQVIKPSGLPIEVKTNQRRIAQVRIVPRSGFYVVEVIYERPVEPAAGDPALVAGIDVGLNNLAAITSNKPGFVPVLVNGRPLKHINQFYNKQRAHLQSKLGRKGSTHLMERITNRRNRQITHYLHTHSRRIIDMLVREGIGVLIIGKNDGWKQQITIGRRNNQNFVQVPHARFIQMLQYKAELVGIAVRTINESHTSTCSFLDGEPIGHRERYVGTRVTRGMFRAADGRWLNADVNGAYNIIRKAIPNAFGNGIGGVVVHPVGIAPTN

SEQ ID NO: 19752 - protein, 407 aa, Oscillatoriales sp.
LKISYESSRLTIADSTPSVKTNLLSKKIRVYPETKLAQKWRTWIAASRWCYNQAIAILKNEKIGKYELRKRIMDSAPEWVSQQPYNPRQLAVFQACEAHKAACKSQGTAKFRSCQEPTQTIRFQTANWKSNTFYPRETKGLSFKASEAIVEVMQHEPTLSIINDQWFICYAVDTVAPPPTQSELAIALDPGIRTFMTGFDGHNILKLGKSDIGRIYRLARHLDKLMSRLGKSKGSQFKRLRYRLRKVAARIRVKIKNLVSELHNKAANYLVSKYKLIFLPTFETQQMVKKGKRKLATKTARAMVTLSHYRFKQTLKHQASKYGCVVVDVTEEYTSKTCSKCGHIHSKLGGLKTFKCPECGHTLDRDLNGAFNILLKALRDTSMSGKLQAFQIMPYTVDLGGFLDLPG

SEQ ID NO: 19753 - protein, 554 aa, unknown
  TnpB Polypeptide
VSRVLREIAAPFVAAAPAGARVRTRLRVSLRDAEVLRAVGRHLGSLAGRDLAARCTEGRLDATGRAESRRDRKRALTAESSSRWAGAITRTSEDAWQLAFRNLAAEQGTLRARVRTIEARLAVPAGTREGRLSGYATPAERHGKTLRLKALKARLARAEQRLTAGTVLVARGGRRLMRARLNLGKAGLTEAQWRDAWESSRLFLTADGEKDKAWGNETIRWHPDEGWLELKLPAPLAHLANRPHGRYRLSCEVRFGYRGDEVAAQAATGAVRYDLSFDAARCRWYADASWKTPPRPAPPLDEVRTSPVVAVDVNAGHLAAAVLAPDGNITGTPFTIPLELARLPATGRDGRIRAVVSQLIATAREHGARAIVTENLDFAEARTEGREHTGNRPSRGKRGRAFRRLIAGIPTARFRDRLVQMAANADLSVVVVDPAYSSRWGAIHWLAPLREHHPEATGHHAAALVLGRRSQGHRARNRATRNRTAPEDAARPAQARTRKPPKAKAANRKPAAPRGNRPPPGSKTGLPHRTTTGNQAPEHRSRAPAEPILNIAQC

SEQ ID NO: 19754 - protein, 406 aa, unknown
  TnpB Polypeptide
MKRLQAYKFELRPNGEQQRDMRRFSGSCRFVFNKALALQKDIYERGEKKLGYAGLCKALTQWRNGSDTLWLGDAPVHPLQQTLKDLERAYTNFFAKRADFPRFKKKGSGESFRYPDQKQFKIDQTNSRIFLPKLGWLRYRNSRAILGAAKNVTVSQSCGKWFVSIQTEREVELSAPTATSAIGIDVGIARFATMSDGEFIEPLNSFRKHEQRLAKYQRRMSRKVKFSSNWKKAKARVAKLHGSIANARKDYLHKCSTTISKNHAMVCIEDLQISNMSKAAKGSTDKPGKMVKQKSGLNKAILDQGWFEFRRQLAYKLDWNGGMLLAVPPHNTSRTCPCCGHVSKDNRTTQAKFACVSCGYENHADVVGAINVLERGYRLLACQASDAVSRRQQEPTEATVRELVHA

SEQ ID NO: 19755 - protein, 313 aa, Bacillus sp.
MPQELPSKKRIKTAKYPYKQKKHYNTKWKKDGFSVKENGTIHLSMGIHNGKREQLIVVSVNPATLPEGKLKEIELAWDNGLYLAISYESGEFPMKHAYTNSAGVDMGEIHSIAAFCETDEALIVTGRKTRSIHQLRNKKLGELQRLMSKCNKYSRQWKKYNRAKQFVLSKSTKQLQDALHKTTKNFVDWCLENEVKQVFVGNPEGVQRRKQKKRTKHVNQKLSNWSFGTLRAYLEYKLHAKGILLFLVDEVYTSQTCPCCQRRKKVRTRNYVCACGYEEHRDIHGARNILAKELYGKMCHIPEETKRKYLRIA

SEQ ID NO: 19756 - protein, 401 aa, unknown
  TnpB Polypeptide
MVHKQKLTVILVLILHIYQKLYMLVKHIIPCMMKAFKFRLYPTEAQAGKLNQHIGSCRFVYNWALDQKVKTYEQTGKSISRFDLNKLIPVLKLSNKWLREVNSQSLQGMTKQVESAFTRFFREKTGFPKFKSKKNPIQSFPVPQHYSVDFENNTVKLPKIGEIKAVLHRHFEGALKTATISKTCKGDYYISILVENGAELPAKQPFTEVTTIGVDVGIKDFAVLSTGEKIENPRYLKSSLKRLKVLQKRVSRKQKGSKNREKAKQRLAVLHEKISNQRNDFQHKLSSKLISENQAIALETLNVKGMIKNHHLAQAISDSAWSSFVTKLEYKAEWAGKTILRIGRFEPSSKLCSDCGYHKSDLTLKDREWTCPACKTKHDRDINAAINIKKFSLIDQNLIGV

SEQ ID NO: 19757 - protein, 364 aa, Ruminococcus sp.
MNKAYKFRIYPDEEQKILIAKTFGCVRFIYNKMLGDKIEYYHHTQKKLNNTPAQYKTEFEWLKEVDSLALANAQINLQNAYNNFFRDKRVGFPKFKSKKDSKRSYTTNCVNGNIIVRDGRIRLPKLGFVKMKQHRNIPDDYKLKAVTVSQTASGKYYVSILFEYENQVQKTEPQKFLGLDFSMHELYVDSNGNCPQFPRYYRLSEKKLKKEQRKLSKMEKGSKNREKQRIRVAKLHEKVANQRKDFLHKQSRQIANAYDCVCIENLNMQAMAQSLNFGKSVSDNGWGMFTAFLQYKLEETGKWLVKVDKFFASSQFCSVCGYQNSGTKDLSVREWTCPCCQTYHDRDINAAVNIRNEGMRIMLA

SEQ ID NO: 19758 - protein, 250 aa, Kyrpidia sp.
VAKSLTVYGKRDKRYPGGVRYALHIPMEKSVDKPRKAEEQRRANPQMPVVAVDLGVGRLAVMGAFVEGRLAATRFVDGRALNHRRHRLLTVIHRKRAQSGRLQPGVQDNANLWNKIRNLDENAAKQTAVTIVRFAREHGARVIVFEHLRRYRPPKEKMSKSGRKNHKRAYWLRGKIMEWVRDLAFREGILTVERNPAYTSQVCPHCKVLGQLAVHMQEPEPSVQRGRGFCGDDEPVPEMDEDIRVSPQRG

SEQ ID NO: 19759 - protein, 550 aa, Kyrpidia sp.
VGNRARSRRGRGGDGGRIGDERETSKAPAYFGGCAGDDHHCGTPGSTGEVWRGVPGICTGCSGPSHRSGGFRGDPRRSGPRHDRGLDIVLHPIVRPTGSTESGFAGCDRRKKGWERIMKVLQAYRFALDPSPHQERMLASHSGARRFAFNWGLALVKERLEARGRGEDVEVPWTLAALRREWNRQKEQVAPWWWENSKEAYSAGLNGLARGLKAFFDSRSGKRKGRRVGFPKFRKKGRGRESVRFTTGAIRVDDKSHVVLPRIGRVRTHEMTTALLERVQSDRARILSATVSREGGRWFVSFTCEVERDAGRPKRPRDVVGVDAGLKHLAVLSTGEKVPNPQPLRKALRKIARLNRELVRRKRRSRHWEDTRRRLNRAHARVARIRLDAMHKLTHRLATTFGTVVVEDLNVAGMGRNRRLSRAIYDAGLAELRRQLQYKCEWYGSRLVQAPRMYPSSKTCSRCGAIKEILPLWERVYRCDVCGTVMDRDENAARNLAALAAAVAGSGPETKNARGEDVRPDLAGRSSMKREAGTGQLGKTGAPAPQGTGT

SEQ ID NO: 19760 - protein, 255 aa, Kyrpidia sp.
VVLLPDEQAVEIHMSREPKTYPAGEEEAGIDLGVTEVLTDDSGKKYRPEYGQALQEMSDHVLDKGRKRQKLWALYRKNRERDPGKARRIRRHNLGLVKQHKRHRRYRAWCENEINRAFRAFFRERRPRVIAYEDLSHLRGKARNKGLSRKVSQWQRQAIRGRLEYLCHVYSITDPGPVNAAYTSQTCPCPGCGWVDGKNRNGDLFRCQKCGYEGDADHVAATNVKGRLRDQEITKYTPHKEVKRILLKRYWENHA

SEQ ID NO: 19761 - protein, 449 aa, Kyrpidia sp.
MHARRRCFRDFGYLTHRRAQFFGIGGQLLQGRRNSLNLFDDPMYRSLDLGKGFSDLVYRVKARAHRRGCILHGLDRQTAFLLDILDEFDDLFCRITRAFGQLSNFFRHHGKTSPAFPGSRRFDGRIERQEIRLLGDVCNHLYNSPNLAGSLAQAFDNRGQGINRFLNGVHLHAHMLDGLAPQFGQIGGFSRRCGYNPRVVGDLLHCIGHVVDSRAASIHRFHLFLGADGDLLCNLSHLFSRFRVLFCAGRKLFGGCRKLFRVDAPGWFRRYETKLVWEMRKLSRKKRFSRNWQKQKARIQRLHAHIANARRDFLHKTSTAISKTHAMVFVEELRIQKMSKSAKGTKENPGKNVRAKSGLNKAILDQGWFTFQTFLGYKLHWSGGWLGTVPAPYTSQTCPVPECGHVSQANRPTQSKFRCEQCRYEGNADTVGAMNILRAGLARIACSPV

SEQ ID NO: 19762 - protein, 293 aa, unknown
  TnpB Polypeptide
VGCTLDAADKRVVVSKIGRIKVLLHRPLEGRPKTATIRRTATGKWFVSIACEWEPTPLPPAGREVGIDVGLKVFAMPSTGKEIANPHFFRTEEHALAKAQRKHQRALDTHNATRAAVTVRVKQAHPDLDAWQVWQLVSQDPEEHTAWRERQRRRRVVARTHERIRWRRDNFTHQESRRLVNQFDFLAVEDLSVRNLVANHQLAKSIHDAAWTQFADLVHTKAVWAGRAYVAVIPAYTSQTCSGCGWRNTALTLADRTFRCANPDRPDCGLVLDRDRNAALNIVALGRQCLASA

SEQ ID NO: 19763 - protein, 460 aa, unknown
  TnpB Polypeptide
VHNVSVRIRSDQGVTQVVKLRLNPSRAQVELLLGYCGTARAAYNTLLFAVKANIGQRDAEKTYAIPDADFTPAVSRHKYGLEKLLRANRDTWLPWHAQVPYMVLDHQAHQLAAGLAKWKSGTAKFPRYRKKRGNGAGLVPVTFKEKDAAWLTGGGRALALPISMATRRELGSAVSVQLSSVPVVKDNRGRRAAKLITSGRGQVQEVTFSFSGGYWWASLRMRVLPSAKTQPTRHLVATRAGAVGVDAGMGRHFATLDKPLPGVSDDAGHIGAPLFLRRALHDLAVAQRAFKGTIPDSKRHAKALLRVQKLHGRVAARRQTWQQRLAIALVEHAYVVGVETLNLRGMARRKKGYRFGKSVGDNGYGLFVEILTAQAAKRGSAVVKAGRFYPSSKTCSGCGAVKAKLPLSEREYTCTTCGLRLDRDVNAARNLAALARTELTRPAGPGIPPGPEVRDLVLAA

SEQ ID NO: 19764 - protein, 483 aa, unknown
  TnpB Polypeptide
MKKSKKKLNIMEGDIGSSFASIKIPLTLSSEQEKIIDSQSLLANKLYNLLIEEVANEYIIYCEAIKNTRPEYWKDLTHPINAYNIRNKVPVLKEKHQVLKSVYSDILKNIGFNVAENWKSYFSKRKLDFSAKPPTFIDWKEKFCNLVYLYDKSAEPSSNGFHYDNTTKSFTIKLGYKEVNGKKEKLNLTIPAEHLFLKKYNQYLKKITIGKNKQGYYIDAVFNLPQENYEKKYKIKSVSKISGLDLNHKNLAHVTTSSGKSYEIKAPTKLKWFRKQISLIEKKLQDKEKKDSRSSKRLEKAKRKLNYKMREQMKHFIGFASNTLIRENDNIVIGDYVPSPTDIQKINRSIINDSNLAQFRMKLKSKCIRYAKGFEIVNEKNTTRECSYCNFNNGKIEVKIREFRCKSCGEELNRDENSSFNIMKKSEIYKSLTSKHILPLSIKDFQERGYCLRFNNQGYEVIRYQEKYYQKVVGNVDDEEVKS

SEQ ID NO: 19765 - protein, 418 aa, unknown
  TnpB Polypeptide
MFLTQTNVIRGLTKSEYAMLGEMCRYANNLYNVGLYNIRQHYFNTKTFLRYESNYHECKTNENYGLLQAGISQQILRVVDRSFKSYFNLINKAKSGEYRFQDIEIPHYRKKGGMFVLILSTNAIAVKNGYFVIPVSREFTKLHGKTNIRIPFPERLVGKTIKEVRILPVHDGQYFKIQYVFEQDAEPLGLDKSKALGIDLGVDNFATCVPSSGTPFIIDGRKLKSYNRYWNKQKAYYQSIADHQKLNGITNRISTLNFKRNNKIKDYFRKSARYIINYCIDHNIGTIVVGYNEDFKRNTNLGKTNNQNFTQIPFGDLREYLSLLCERYDIQYIQQEESYTSKSSYLDKDELPVYKAEQPYTGSFSGKRIYRGLYKSADGSFLNADVNGAANILRKVNGCSYELPCSGCLAHPLRINFS

SEQ ID NO: 19766 - protein, 296 aa, Symploca sp.
VFLPGIGIVKMHNSRDLGLIEKVRTTTIKRTGGYWFISMLVEIPDELLEPRPLENALSVVGIDVGINKLVSLSDGSFVENIHPGTNSRTARRLAMRQRAASRKVKGSSNKAKAYQRLGRMQHKIAQKREAHLWKAASKIVKTADVVGREELNIRGMIKRANPKHDGNGGYLKNGAAAKSGLNKQIVDASWGTLFQMLGWLALKAGKHVVAVNPKNTSRECPCCGHRVPTRSKIWETKRRGFIIIVSCHICLNPRVSKRGEANNSSSLKNEFSPAPKASKNTAWSIDPSNTDSSSKS

SEQ ID NO: 19767 - protein, 413 aa, Limnoraphis sp.
MVEKALKFRFYPTPEQEDLLRRTLGCVRLVYNKALAARTEAWYKQKERVGYSQTSSMLTKWKKEEELDFLNEVSSVPLQQSLRHLQTAFTNFFAGRTKYPNFKKKRNGGSAEFSKAAFNWKNGQVYIAKCKEPLSIRWSRQLPTGCSPSTITVKLDPSGRWFVSLRIDDSVDHKLKPVDKKVGIDLGITSLFTTSDGVKVYNPKHFDKLYKKLRLAQKSLSRKIKGSLNREKARVKVARISAKIADTRRDYTHKLTTQLIRENQTIVVEDLAVKNMVKNHKLARAISDANWGELVRQLTYKAEWYGRELIKIDRWFPSSKRCSNCGYIAEKMPLNIREWDCPKCNSHHDRDINASINILAAGLAVSAPLALLGETPRPQWLVCGATVRAEQNKSVKPGAKSSSSKRKKQKPKL

SEQ ID NO: 19768 - protein, 370 aa, Bacillus sp.
MAKQNKAYKFRLYPTEEQELVIRKTFGCVRFVYNKMLDERKATYELLKEDKEVLKKVKHPTPAKYKREFEWLKEVDSLSLANAQLNLDKAYKAFFKGNGKFPKFKSKRHKQSYTTNVVNGNIQLLDSHIKLPKLKMVKIKQHRTIPSECIIKSCTISLSSSGKYYISILTEYEKEIESKRIESVVGLDFAMNGLFVDSEGKKANYPKFYRQMLDKLAQEQRKLSRKKKGSSNWNKQRIRVARIQEKVANQRKNFLHHKSKELVSNYDAVIIEDLDMKGMSQALKFGKSVADNGWGMFTSFLKYKLNEQGKQLVKIDKWFPSTKTCSCCGNTQPMPMNLRSYICSCGLHLDRDVNAAINIKKEGIRLLAIA

SEQ ID NO: 19769 - protein, 479 aa, Bacillus sp.
MVHYKTMQIQVKKGHRLYSYYKEMCQNAKNLHNTTNFYIRQVFTGLTQDKGLQPLQQEVLQNIQTHLPKINDNQLAAYLKKVEKEKSKPVENRKEIKCNLFKEPSKEKPYVDYNFLDALFKSMIQRDYRSLPTQSSQGIIKSVFQNWKSFYASLREFKVNPGKFKARPKIPGYGRSFEKEVTFSNQDCVIKERKYLKFPKTKERLNIGKLGCVEGKLKQVRILPKYGHYVVELIFQVPSEHEMKVSKNRYMSVDLGIDNLATIVTNTGRRPVLVKGKNIKSINQRYNQLRAYYMGILRQGKNPKEGPFTSKRLEKINHKRFLKIKDLFHKASSQIERIILEEDIDTLIIGHNKDWKQHSNMGKKNNQSFVSIPHSLLIRMITYKAERHGIKVIVTEESYTSKASFLDVDAIPVYGVDDLKKSFSGKRIKRGVYRSKNGTLFNADVNGAGNIMRKVFKDAFQEPFLIGNSMSKPVSIVLK

SEQ ID NO: 19770 - protein, 374 aa, unknown
  TnpB Polypeptide
MILRAAKYRLYPNRSQEEFFSKCFGCSRFIWNKMLEDKEEYYRQNGKTLNVTPAKYKEEYPFLKEADSLALANVQLDLKSAYNAWFNGNARKPRFKSKKKCRASYTTNNQKGTVAVKEDHIRLPKAGLVKARIHRPVPEGATLKSATVSRSASGRYYCSVLFEMPEKEKQPRGAVEKYRVIGLDYSSPHFYVDQDGHACDEPHCLRQKEKKLARLSRQLSRKKRGSSNSSRARKKLAILHEQIANSREDFCHQLSRKTANSCDAVIVEDLSMKAMAGSLHLGKATNDNGFGMFRRFLKYKLEEQGKYMITVDRYYASTQTCSVCGTKNPETKDLKVRKWTCPVCGTVHDRDRNSAVNLKQEGIRILEEKNVMVL

SEQ ID NO: 19771 - protein, 402 aa, Escherichia sp.
VKRLQAFKFRLRPGGQQEREMRRFAGACRFVFNRALARQNENHEVGNKYIPYGKMASWLVEWKNATETQWLKDSPSQPLQQSLKDLERAYKNFFRKRAAFPRFKKRGQNDAFRYPQGVKLDQENSRIFLPKLGWMRYRNSRQVTGVVKNVTVSQSCGKWYISIQTESEVSTPVHPSASMIGLDAGVAKLATLSDGTVFGPVNSFQKNQKTLARLQRQLSRKVKFSNNWQKQKRKIQRLHSRIANIRRDYLHKVTTTVSKNHAMIVIEDLKVSNMSKSAAGTVSQPGRNVRAKSGLNRSILDQGWYEMRRQLEYKQLWSGGQVLAVPPAYTSQRCACCGHTAKENRLSQSQFRCQVCGYTANADVNGARNILAAGHAVLACGEMVQSGRSLKQEPTEMIQATA

SEQ ID NO: 19772 - protein, 393 aa, unknown
  TnpB Polypeptide
MKTFKTEISPTSNQIALINQTCGNVRYIYNQFIQYNFERLEKKEPIVSGYDYSKMINRDPNTPSWLKIVSSKALKQAIMNAHHAFQAYLKGEKGKPRFKKKSGDNNSFYLIGTIKVERHRIFLPTLKWMRLKEYGYIPKDISSVTVSIKNGRYYISCLSKTETDERIATSGEGIGIDFGLKDQFITKVQTVPSINKSKKVRQLEKKLRQKQRSLSRRYESNMANKVYYKSGAKKGQLKSFEWKRPLHECKNLQKQQLIVNKLYERLSRIRTDYNQKALQSILKRKPSFIVIEDLNVKGLMKNKHLSKVISQAQWYQSRVFLQQQCEKLGIELRLAPRFYSSSKLCSNCGFKNKDLKLKDRSWECPDCHVIHNRDKNASINLEKCVDYTVLTTV

SEQ ID NO: 19773 - protein, 241 aa, Sulfolobus sp.
  misc_feature (241)..(241): Xaa can be any naturally occurring amino acid
LWKFSLSEVRIVTRKGWVSLKPFFTKLFWRYYNDGWALASESSFKLCKGNVVKLYLVFKRPLPKPFEAKGYIPVDLNEDNVSVLLDGKPLLVETSVKKITLGYAYKRKRISEGRSTKDRVVRRALKSLKERFKKLDIRRKLAKLIVTEALREGKGIILEDLPKNTPEKMVQDIKDKQLRDRIYKSAFASLKNAIVEKAKEFGVPVLLVNPAYTSSVCPIHECKIIYPPDGSSAPRVGVCEX

SEQ ID NO: 19774 - protein, 386 aa, unknown
  TnpB Polypeptide
MLKAFKYRLYPTKEQATLINKHIGATRFLYNLGLETKQIAYSTRKINLDCFTLIKQIPDLKTECEWLKEINSQTLQMALRNLDNAFTRFFKGQGKYPNFKKKHSGGSFNIPQNVKLTNDKLIIPKFKEGISIELHRPTKGTIKQATISRTPTGKYFVSVLCDTGEKLPTKAPIKEQTTIGIDMGIKAFITTSAGESYDNPKYLKKSLSQLKFVQRKFSKHKGKRTKQKLAKLHEKVANQRRDFLHKTSTALIRESQTICIEDLNIKGMMKNHRLAQAVGDVGWHTFVSMLAYKAEWNGVNILQIGRFEPSSKLCNVCGHSFKELSLSDREWTCSHCGTHHDRDENAAINIKKFALRNKLSGTESQTRDELPALVGVLTPEASIPLG

SEQ ID NO: 19775 - protein, 364 aa, unknown
  TnpB Polypeptide
MKTLKCRIKDKHANQLNKLAGAVNFVWNYVNDLSFKHLQRTNHFFSAYDIAAYVKGSGEFLNLHSQTLQAITETHTKSRKQFKKAKLNWRTNNPKSKRKSLGWIPFKKAAIKYLGVKKVGKKALKSTIQFSLAKGKKLTIDVWDSYNLALYTINTCELVQDSRGHWYACITIKEYPKIECGTGETGIDLGCRDSATTSNGEVLKTKVTQQYAKKLGIAQRAKNKQRVKAIHAKIKNTRQDLIHKFTTNLTKTNKIIIIGKLQSKSFTRGKLAKSVYDAGWFEIKRQLTYKCENAGCYYDEVNESYTTQTCSCCGSRQNSPKGRTGLGIREWLCECGVTHDRDINAAKNILALGLERLVVGIPSL

SEQ ID NO: 19776 - protein, 164 aa, Salmonella sp.
LFAPSKKQKGSRNRAKARLKVARLHAKIADCRMDNLHKLSRRLINENQVVCVESLKVKNMLRNPQLSEAIADAGWSELVRQLQYKGEWAGSSVVAIDQCFPSSKRCSCCGFTMKNMPLDVRKWHCPECGADHDRDINAARNIKAAGLAVLADREPVNPESQHAA

SEQ ID NO: 19777 - protein, 502 aa, unknown
  TnpB Polypeptide
MAKATTTIKQVLNYGPDHAAWFAENAALYNRVCAFYFDVIQAHVKVLDLSHKEALTALEKLTHTTQSNPTPVMPLSEIGEDLPALFRRAAIHAALGSARSFHSHLQKWQKRKEKALAKGKKFHERPPVPPRTWNKSATLYAGMWKERGSSSIVLKVWTGTCWSWIKVRVTGRELPTDAELGSPQLIRKGNQWWVHTPLEKQFKSPGKIEKQVTTNAPTKICAVDLNINENIAVCTIQTVEGSILATTFIGGGREIAGFRKKQLGRIARNRRKTGMIAPGEQDNVDLWNKIRHGDEQVAHLISARIVQFAQTHEATILVFEHLGNLRPERGKYSKRSNEKRAYWMKGRIFKDAKYKAYNEGILTSRVNPRNTSRECARCRSLVARYEEGKEAQGYTYGAPLVSCPECGMRGNADRNASLVIGHRLVLRYQKSVQGKPLAPLHAERVSRDTGVEVCQDAESVGPRPSTGNARHADFNEHGTAQDMSLEMEKHILDIACQLRFSF

SEQ ID NO: 19778 - protein, 217 aa, unknown
  TnpB Polypeptide
MGLTDLLVTSEGETFKNNRYTRRYKYKLAKAQRHISRKKKGSRGFENQRLKVARLHEKIANSRADYLHKCSISIVRRYDTICIEDLNVKGMVKNHHLSKSISDASWGKFVSMLTYKAEWNDKKVVKVDRYFPSSQTCNVCGHVNKDIKDLSVREWECPVCHTHHDRDVNAAINILRFGLNNTSAGTVDYTGGGEVRADQSESHSSEKPEANEFLTQG

SEQ ID NO: 19779 - protein, 378 aa, unknown
  TnpB Polypeptide
MLRAIKVRLYPNKVQEQTLNKVLGCYRFVYNHMLALKQKEYNDNKQSLDLTELSKYFHGTLLKDEQYAWLKEQNTKVMKQSIRQMLSAYDKFFKQHNGFPKFKTKKDKQSALFPLEAISRENKFNDRKITLTKPLKDIKFRCSDLYFKRLQTYKEGIRSATLSKTKSGNYFLSILIELPQEEIIKFGRTNKHVGIDLGVKDFVITSDGEVFENKHFFKKQENKIVKLQRQLSKKQKGSNNRNRQRVRIAKTFERLTNQKIAYIHSVVNELLTYYDTVFMEDLNVQGMLKNHKLAKAIQEVGFYRFKSVLQSKALVNDKQVVFIDRFYPSSKTCSCCGYKKRDLKLSDRFWTCPNCREYHDRDLNAAVNILHEGERLIS

SEQ ID NO: 19780 - protein, 404 aa, Streptomyces sp.
VIRAYKFLMRPTARQGQALAEILRDHCSLYNGAPQERRDAYRHSSKTSVKYGTQSAQLKEIRAFDPEHQGRWSFSSQQATLRRLDKAFAAFFRRVKSGDAPGYPRFRGVNWFDTVDFPKDGDGCRWDSTPHDPVTRVRFQGVGHVKVNQHRPVLGKVKTVSVKREGKRWYVVLTADQERPEPLPATGNVVGIDLGVANFLADSSGVFVPNPGHGRSAAAKLEAAQRAFARFPRVRRDKRSANHRRAVEKVAKLHGKVRRQRLDHAHKTALVLVREHDFIAHEDLKISNMRKAPAPNPDPNKPGAFLPNRAAAKAGLNHAINDAGWGVFLQILTAKAESAGREVMAVDPRNTSRRCPECGHTAKENRPTQEKFHCVSCGHIAHADTVAALNVLRAGLARREARSA

SEQ ID NO: 19781 - protein, 397 aa, Actinomadura sp.
MLTGRKYRLELTTEQAVMCEEFGNICRAVWNTALDQRREYRRRGAWMNYVPQAAELAEAKQDHPWLKAAPSHVLQQVLKDLDKACRDHGTFAVRWRSKVRWSPSFRFPAGNLITVERLGRKRGRAKLPKLGWVVFRWSRPLGGRVRSATVRRKGAHWFVSFLVEDGITTPKRHVMPDTAVGIDRGVKVAAVTSDGDFHDRKFITEGEQTRYRRLQQRLARTKKGSSNRRKTVVAMNNIMGRVTDRRADFCAWTANRITARNALVVLEDLKTTKMTATAKGTVADPGERVAQKRGLNRAILDKGWHRLELALTDAARYTGTTVVKVNPAYTSQRCSACGLVTEGNRESQAVFRCKAEGCGHAENADVNAAKNIRHAGGRPVSACRDLGAARSAKQEPP

SEQ ID NO: 19782 - protein, 493 aa, Actinomadura sp.
VDNPAIGDVTFRCELITHCHMLNRQNAWKRGGTMLTGRKYRLELTTEQAVMCEEFGNICRAVWNTALDQRREYRRRGAWMNYVPQAAELAEAKQDHPWLKAAPSHVLQQVLKDLDKACRDHGTFAVRWRSKVRWSPSFRFPAGNLITVERLGRKRGRAKLPKLGWVVFRWSRPLGGRVRSATVRRKGAHWFVSFLVEDGITTPKRHVMPDTAVGIDRGVKVAAVTSDGDFHDRKFITEGEQTRYRRLQQRLARTKKGSSNRRKTVVAMNNIMGRVTDRRADFCAWTANRITARNALVVLEDLKTTKMTATAKGTVADPGERVAQKRGLNRAILDKGWHRLELALTDAARYTGTTVVKVNPAYTSQRCSACGLVTEGNRESQAVFRCKAEGCGHAENADVNAAKNIRHAGGRPVSACRDLGAARSAKQEPPGPREAVPVRPAIPLVGIPGFGHGEDANLPRCHRPPKTNPHLNTIAQAATACTAHASGAWGGSF

SEQ ID NO: 19783 - protein, 202 aa, Pseudomonas sp.
VGIDLGLKTTATCSDGRQLENGRFYKQLDEKLHKAQRAGRRDKSKAIHRKIANRRADALHKFSREIVNSYGTVVVGDISPTKLANGKLAMSVYDAGWSMLRTMLTYKCAHAGIVFKIVKERYTTRTCSSCGSLYGPKGVNGLRIREWTCMECSVIHDRDINAAKNILALGHERPLEEILYENMRKMPISMPAINELTGKKSG

SEQ ID NO: 19784 - protein, 276 aa, unknown
  TnpB Polypeptide
MRRTYRYRLYPTRQQAAALGTQVDEACRLYNAALDERRSAWRMHGISIRYLDQAGRWDVGFVVEIPEPELLPACEVAVGIDVGLTTFAVLSDGSEIANPRHFRAAERRLRVAQRKLARRRRRSRRRLKARQGVARLHAHVRNQRRDVHHKTARALVERYGLVAVEDLNTRALAGSLLAKSVDDAGWGQFLSILADKAACAGRRLVRANPAGTTQACSACGVVVPKTLAERWRDCPTCGLSLGRDHNAALNILRRALDQTPGWGVQAATVEDAHAVA

SEQ ID NO: 19785 - protein, 372 aa, Actinomadura sp.
VHLRYVFRVYPTRGQQQSLARAFGCARVVFNDGLRARQTAREAGLPFPKAAELSAAMTAAKKTPGRCWLGEVSSVVLQQSLRDLEAAYRAFFDGLAGKRPRVGAPRFKSRKDRRQAIRFTANARWSITEGGKLALPKIGEVKVKWSRALPSVPATVTVIKDAAGRYFCSFVVETGGPLPGAGAGDGVGIDLGLDCFAVLSDGRKIDSPRFLRRAAKKLRRAQQALSRKQKGSNNRDKARLNVARAHAKVADARRDFHHRLSTELARDNQAVYVETLNVKGLARTRLAKSVHDAGWSAFTAMLEYKTARYGRTFARVGRAFPSSQLCSGCGHRDGPKPLHVRAWTCTECGAGHDRDVNAARNILNEGRRIASG

SEQ ID NO: 19786 - protein, 407 aa, unknown
  TnpB Polypeptide
VKIIKVYRVEQHQIKKDHPLYKIIDEFSFKSKNLYNYANYIIRQEFINNGVYIKYKDMDKMLQKTEPYKLLMSQSSQCTLQVLDRSWKSFFVTIKDWSKHPEKYLGKPKIPKYKKKDGRFTWFLKNNQTWIQNGYLGFQLRVMNGYKFKTNVNGRLISVRFVPKGTIYVMEIVYEIEVLKSKIENKNICSIDLGIDNFATITNNIGLQPIIINGKGIKSINQFYNKQKSKIQSELKIRNDKHWSNKLDKLNQKRFNRVKNFIHNTSKYIIGYCLNNYIDTIIVGLNKGWKQESNMSKQTNQKFINIPYEMFIGQLEYKCQDNNINLILTEESYTSGTSFLDNELPIKENYNKTRRIARGLFKSNNNILINADVNGSYQIMRKVFPEIEYGIEGRLTPVIINVVKFAI

SEQ ID NO: 19787 - protein, 369 aa, unknown
  TnpB Polypeptide
MHSPNLFVGRAENGFKKQMIIRTLKLKLTSDQETQLNQWLWNLTGVYNWAIKKIEHDANDKIYHSSFAFVNMIAEHSKRMKIPSHTLQGILKQAHTAWQRCFKKLAKKPRLKGQRNKLTSIPFPDPLKSPKDNRIGIQGIGKVRYYKQELPEAKIKCGRIVKRASGWYLCLWLDTEHKFPVKQTDKAVGIDPGFDTLLTLSDGTKIANPRELRKGAKRLAQAQRSCKKNLVARIQERQANRRRDRNHKISRWLVEDYKTIYYSDDNFKAMAKRFGKSISEAALNQLIGMMSYKCRIGGRKIVPINSFRTTMTCSTCGALTGPTGLAGLKVRYWICSACGAHHDRDVNSAKVVFNIGAGTAHERRLGNVA

SEQ ID NO: 19788 - protein, 378 aa, unknown
  TnpB Polypeptide
MYKGIEGKIYPNKDQQVLINQTFGHSRFVWNQMLGMLNARYENNPDLNILSFNKLSSLLTQMKKEYLWLKDVDSKALQNSVKTLRETFDRFFKKQSNYPRFKSGKIHKQSYKTLERTIRFNSNQRYIKLPKLGWVKCRMSLNHINNDGIKSATITRKSNNNCYISVLVEVENQDLSKTDKAVGIDLGLTDLAITSDGVKYPSLYLHKKYKKQLYYWERRLARRRIQAKKEGKDLRRAKNYQKARIQVAKLHQKIKDTRKDYLHKITTELVENYDVICIEELKTSNMIKNHNLAQSIASQSWRMFRTLLEYKNLAYGKELVIVNPYKTSQICSSCGAETGKKPLHIREFTCPKCNIRHDRDINASKNIRNIGLGTSLSQ

SEQ ID NO: 19789 - protein, 482 aa, Mimivirus sp.
MVYNQDLSISNKTCGISDWLPPIRNKKTSDIKSNSWFDIRRCLNPNIKTKFVPVNNKQIVLKEPNCIYLKYDLITLNPSSDHIRILREWFSMYAKIYNHAINLIRKMFYVNNKLIKSKLQHEIYDEIIVRKLSNDKTKLNESLKLSDRPPEFLLDYAISHACTYCNSQVKKYLKDSKNPYNKKTLRFRLWSLHKSRRVMHIFPPKLCDKAVCNGLFLKLNPSKNIHDIYMFCVMSWDRLTGKFFVYKPVLKRLYNIPKKQFMRCGIDPGVRTFLTLYSSERTYDVCDSTFYNNKIKRMWRKIDRINFLLHNRKKRKKRKNDRRLRKSLAKYYRKIRQRIKDLHTKTAKYLVSRYKEIYIGIYDTSKNLSDPRISFYEKRRIATLNHELFLTRLQQVADRFGSSVFAINEHMTTKTCSKCGRINEIGSSKVHKCACGMYAGRDENAAKNILKKGIKEHYLSAQSDKNVTEYNNKKSNKTNKET

SEQ ID NO: 19790 - protein, 653 aa, Mimivirus sp.
MDDPDDPNDRPFLSCIKNSLKTITKDVNGFQQVVFDSVERTSKIVSQIYFFLKLYMIHLDNIGCDFPKINEQLIRDITNLITSKNETKGKKPSVNILLEHFYNGFFKNLLKKEDIVCRDKLKYILNYEEKDIIKNIETNIKEHYIKHLIFFLKVKFGVFKVIDRINNNKDLAKDEKKKRRAYVYHQLNCIIHDIVSKPLTQFKSRDKFHDSILFLREFLIPKKDKYVKDNIAYDVKMYPQDYLKSMFRINSLLEDINDKIISKHTDPTTNPPLYKLFNPIPLRKSFIPKYITIDTPTLIGFQITKGLSKYITKTGQSAVQKLIWSQYFKTNTKHFKRNGYTFNHIIKTDGVGVSIVFHKIDINGNKVKIPPKYVLNNMTFEAKIPYIENTIINNDLLNKEIVVCDPGKNDLGNFMKKDIDGNPVYFKYTQKERNHHTKKRKYQSIEQQLSQTVFNGKTVKEIESELCDYSSKSSDFDRFQDYVVAKLKINRLLQNHYKKFIYRKLNWNRFINRNRNEDITLNKFQNRMGTPSEVSVVFGDWSDKEGFKGREPSISKRLKRLFVKRGYKCFLINEYNTSKLCSHCHNETSSLVVNGQDIWKLKECKTCGSIHDRDHNATKNMMFIVDELLEGRQRPVIFKKPVIELNPPLICEV

SEQ ID NO: 19791 - protein, 471 aa, Micromonospora sp.
VKVTRIAYSARMNPGKYAALVEQARRLGWVRSEVWQRYGSINGVGAGLRDRQVRDRWLADGRHVQFAVLANAWKETVRDVMADIAANLEAAKVDVRRAIIRRTSDPAERKRLFTALKADQWADDPFLSRQMRKHWKRGHNRTHDQIVVRADNYNALVDGRGRLWLAIPGLEPRKMVKIPPSTTVAPTGTLRLILRGGRVQVHYQIDASQMRSSQRPCGEATIGVDKGYTEALTDSDGQPHGEQLGDLLTRESDRLKERNRRRAKLRSIANNAALRGDYAKAHRIKANNLGTIKRDRQAARHRARVRTEIFTAVHEVVDKAATVIAEDLTKRFAGRKTLGKNINRRLAAWTKGVTAEALKSVSERRGSALVPVNAAYTSQTCHQCGRFSRRSGDRFHCTRCGVVWQADVNAAINILHRAGDPDIALHTPHHVVKQILQDRTDRHRTRLPVQDSSPATAERRANHPNRSTMSK

SEQ ID NO: 19792 - protein, 462 aa, Saccharopolyspora sp.
MMSTVLQAYRFALDPNPDQESALRSHCGAQRFAFNWGLARIKANRDQRKAEASYGLDWDELTPSVSRSAYSLRKDWNQAKDMVAPWWQENSKEAYSSGLANLAAALKNWGDSNTGKRKGRKLAFPKFKGRRAGLSCRFTTGSFGLVDGDRRHVKLPRIGVVRTHESTRKLARHVERGRARIRSATVSYRAGRWCVSFSVEITRDDPAPAQPDVTVGVDLGIKSLAVLSTGEVIANPKHLEVAQRELRRLQRQASRRQGPDRRPGQKPSNRWRKTQARIAKLHTTVANARHDGLHKLTTRLVRTFGAIVLEDLNVAGMVKNRRLARQVAGVGMAELRRQVEYKASWAGVCVHVADRWYPSSKTCSDCGVVKAKLRLSDRVFTCSSCGMSLDRDLNAAHNLAKLAETTTSSPSCGATVNEPDGNPHKPRSTRAAGIATGRPAPNSAGQRRHRKAPAHDTLSHVS

SEQ ID NO: 19793 - protein, 391 aa, unknown
  TnpB Polypeptide
MRLTYKYRLFPTNQQRTSLQEVLELCRWTYNQTLAMRKNAWEQEQRHVSYYDTKKMLPIWKVEKPELSQVHSQVLQNVTERVELAYQAFFRRIKAGEEPGYPRFKAYGVYDSFTFTQSGFAINGDRLKLSKIGDVRIKLHRPICDTIKTLTIQRDNVGNFYACFSCAPSGHPETTPLEPSHKVVGIDLGLTAFAYFSNGQKIERQRWMKRDTADIARLQRKKEKFAKGSAERRKVIKALCHAYDRAANRRRNFAHQESRKLVNEYQFIAFEDLDIQDMVASRGSASAGFKSITRGIADVAWGQFVQCATYKAANAGRVVVRVNPRGTTQMCSGCHAVVPKDLTVRIHDCPHCGLVLNRDHNAALNILARGLASINPGYPLGASEIVEAHQL

SEQ ID NO: 19794 - protein, 413 aa, unknown
  TnpB Polypeptide
MSTSRVQRAYRFRFYPTAEQENLLRRTLGCARLVYNKALALRSQAWTAEQRNVTYRDTSKALTEWKRSEELRFLNDVSCVPLQQALRHLQQAYSAFFDHTGDFPAFKRKSRGGAATFTRYAFTWDSGKRSLKLAKMREPLAIVWSRTLPAKAIPSSVTVTLDAAQRWHVSILVEDEVRTLEHRDETVGIDMGLNDYAILSTGEKIDNPRHLERQLKRLKKAQHDLTRKRKGSNNRRKAALKVARIHARIKDARTDFLHKLSTRLVRENQTICIEDLNVQGMSRRAKPIQDPDHDGAYLRNGQSRKRGLNRSIMDASWGEFRRMLEYKCDWYGRQLVIIDRWYPSSQTCSTCGRSTGRKPLRVREWICPYCGAHHDRDVNAAKNIQAAGLAVLACGDGRTVERRNMRSTDPIRP

SEQ ID NO: 19795 - protein, 334 aa, unknown
  TnpB Polypeptide
LAQGGVHLAPCTGQESARVELAPEGEQRTWFSRSPTTPLRPRARAFRAPLVSQAGELFLDFTAWVAVVPAKATSGLIAGVDPGIIHPLAVACGSRALRVSGRGVPAPRGLQSPRDQELDQARPASGKARVRPPSGLACVAQAARPPEVAESKSRRVVKLASNRAARLAAGFLEQAKASSVVIGEPGGVRDNDAGAVQNRRTHRWLVVHTTRALCYRLEEVGIAAELTEVSGTSSHCPRLRGCGRVLVCTDPARGTVHHRDVAGAQNMVRKLGRAPSLIAHIEHRRVGTPARRDQRRVSYELSSRTTPEVPARTRATTVASAGVESLVAWRRGLA

SEQ ID NO: 19796 - protein, 334 aa, unknown; identical to SEQ ID NO: 19795
  TnpB Polypeptide

SEQ ID NO: 19797 - protein, 517 aa, Lactobacillus sp.
MSLILGGIFLVFKKFQNINEIKRLINRQNSLQKRALTLLQKGEPNKGALLQQLNKNIGQRRRMTQEMINVMLDIFKTEKITSVPTGSFYLFSRTTLNPHDRETNELLLQLNKQDTYVVTLTAGKSDQLFASPRRAWLFTLAGDHISLRLPTQNDADALHLELPDSVKSTKDSSNSQKKIVKKPALQKQISKKAITKQPSSQATKLPHQRKQVKHSAKPQISNTSSEPQTTSSAAARPQSIATNSINSIAQSNAPVASAAKLITAPIATSTAPNSPAKSDDIAAQPAKKATISTSRDPKELITELVGAGQAYRVIGLDYGKINMITATDGMDHLLQVPGSVISNHILEYQHAIRQLQLGSIDLDDDVELARLTYMLKRYVLKSCRKIVSRLVEFYGNNVIYVTEMHPSLKTGRPQNIILSPDYFYKALFTVLFEMVGDRAAVIQVPNNETSIICPWCGFTNADNRQKEVHQFKCLNCGHTINDDQVAAINIRQRGLRQISELTKHLSVTPTKINVSEN

SEQ ID NO: 19798 - protein, 396 aa, Nostoc sp.
MLVFEFKAYGKSAQIVAINDAIRTAKFIRNSCIRRWMDVKGTGKNDLQKYCAVLAANFPFANELNSMARQAAAERAWSSISRFYDNCKKKISGKKGFPQFQKDCRSVEYKSSGWKLADNRKSIIFTDKKGIGRLKLKGTRDLHFYQINQIKRVRLVKRAMGVYVQFCIDVNRSENIEPTGNTVGLDVGLKEYYTDSDGVMIENPKFLLRSEKVLKRLGRRVSRRLKGSKNRDKAKTFLGKRHLRISRQRKDHAVKLARCVVQSNDLIAYEDLRIKNMVKNHCLAKSINDASWYQFRIWVEYFGRVFKRVTVAVNPQYSSQECSSCGEIVKKTLSTRTHVCSCGCVMDRDENAARNILSRGLGTVGHTGTFALDASNAWGDESSTLVGVILHEQVMS

SEQ ID NO: 19799 - protein, 351 aa, Nostoc sp.
MWNKHLSCAKLQSHIAKLRKRKEFWQSVGSQAVQDICQRIDKAYQLFFKHHKKGVRPPNFKKVKKYKSFTLKQAGYKLLGGNRIKIGSRVYQYWNSREIEGKVKTLTIKRTPLGELFLVVVVDSIDEPGIKLTTGKIAGFDFGLKTFLTCSDGSCLEKSLLLGEPQDRVFRKIESPQFFKQSFNVIKKANRHHSRKLKGSSNRERARKNLARAHEDIANRRSDWFWKLALSLTNRFDVLCFETLNLKGMKRLWGRKVSDLALRDFLDILEWQALKKGKLVVYIDQWYPSSKTCSCCGHVLETLDLSVREWRCPSCQSVNGRDENAAKNIQAVGASTVSLGDVRQSQTAIAV

SEQ ID NO: 19800 - protein, 375 aa, unknown
  TnpB Polypeptide
VEYSYKFRLYPNWAQENQILRTFGCCRFVYNHYLALRKQVYTESKATINYNQCSADMTQLKKSLEWLREVDATALQSSLKGLDFGFQNFFRRVKQGKKPGYPRFKSKHDNRQSYKSKCVGTNIKVLDGAIQLPKLGAVKCRVSKEVRGRILSATVSRAQSGKYYVALCCTDVDIPSLPSTGETVGVDLGIKSLAILSDGTTYPNSKHLAKNLKKLARLQRQLSRKTKGSKRWEKAKLQVARLHEHITNQRTDMLHKLSTALVRDYDLISIEDLAPKNMVKNHKLARSIADASWGELRRQLEYKAAWYVKEVVSVDRFFPSSQLCSVCGTKNPVTKDLDVRDWVCTSCGAYHDRDLNAAINIHREGLRLLGAELST

SEQ ID NO: 19801 - protein, 280 aa, Allochromatium sp.
MLRAHKIKLDPTQEQATYLAKACGVARHAYNWALAKWKEQYEAGLQPNEAALRKQYNAIKPVEFPWALEVTKNAPQQAIKNAGTAFNNVFRKVKEGKKGRECGYPQFKKKGLRDSFRADNGSPKKGVSAVQVDGKRVKLPIIGWVKMREEQRFCGCIQSATVSRLADGWYISILVETDERLHQKSTGVVGVDFGLKALATLSTGESIPGPKPHRRLDGRLRRLNRSLARKRKGSANWKKAKTKLSRLHKRLADIREDALHKLSHHLTTPFDVIGDEAGRK

SEQ ID NO: 19802 - protein, 346 aa, unknown
  TnpB Polypeptide
MAQQILKEVDGAFKSFFDLLKLAKQGKYPFSSCRLPKYLPKDGYASLIVGFVRLNGNRFVLPYSAAYKKHHKPVTVTIPPILADKTIKEIRIIPKADARFFEIQYTYQVEAAQRNLNPTHALTIDFGIDNLMTAVSNRGESFLIDGRRLKSINQWFNKRNAYLQSVKDKQHYGKKTTRRQTALQRKRNNQVRDYMGKAAKQVVTYCIRNDIGTLIVGYNTTFQRSSDLGRRMNQVFVGIPFGILRRKLKYLCEMNGIRYVEQEESYTSMASFWDLDEMRVYGEAGLVPPLFSGRRICRGLYQDRSGRRINADVNGALNIMRKCNIVSLRALYARGDVDTPVRIRIA

SEQ ID NO: 19803 - protein, 536 aa, unknown
  TnpB Polypeptide
MIDKEYNKILKQYHKLSDRHILVVETDMPYSDVFKVVLLSDKIRKAGNELVRLMRKNYDQLLRTKRYRKLLFLYGTTEDKSKRKILANQLNEMQKSYNVTWDYCRTSMIPIGKKYSIDAVFALTKAEDIWRGVEKCLYGNGNTIHFSKYGELPCIRAKQKNRGIPVSVKDDKLQFKLGKTAFGIQVNDRFQQDEINAVLTYLAEPEIVDHKAVNTLIEDTCCIDTYRPCYATLVPKMIRGKYRVYLHLTVEGKAKPKYDKHGNPRHKYGKGMIGADIGTQTVAYTSDTEVGLKNLSERGNSMQTSERKERLLYRAMDRSRRATNSYNYNYDGTIKKGRKAWIYSNHYKKLKAKHTELCRINAVNRQLAINEDANHLRSLGDIFVTEPKNASKLMRQNKKKKKNDKGKFNKKKRFGKSIKNRCPSGFQTTVEKKFKITGGTYIEVPNSYRASQYDHTVDDYIKKKLSDRLYKLQNGTEVQRDWYSSFLLYCYDHKIQNIDKHKCITEFDDCYKKEKALITWIKAHKIKVLNSGIKIA

SEQ ID NO: 19804 - protein, 346 aa, unknown
  TnpB Polypeptide
MAQQILKEVDGAFKSFFGLLKLAKQGKYPFSSCRLPKYLPKDGYATLIVGFVRLNGNRFVLPYSAAYKKHHKPVTITIPPVLADKTIKEIRIIPKADARFFEIQYTYQVEAAQRNLNPTHALAIDFGIDNLMTAVSNRGESFLIDGKRLKSINQWFNKQNACLQSIKDKQHYGKKTTGRQATLQRKRNNQVRDYMGKAAKQVVTYCIRNDIGTLIVGYNTTFQRSSDLGRQMNQVFVGIPFGILRRKLKYLCEMNGIRYVEQEESYTSMASFWDLDEMPVYGEAGFVPPVFSGRRICRGLYQDRSGRRINADVNGALNIMRKCNIVSLRALYARGDVDTPVRIRIA

SEQ ID NO: 19805 - protein, 487 aa, unknown
  TnpB Polypeptide
LTCRTLNRRRPTPTYRFGLLLSTTPTAGSTRRRRQPQGPSSVKRSAMRCSSGPEETSAQCAASGRQGATPIGPLVGYNQVVRWMHRVRLYPTAAQERRLGFMLHATRHLYNAALQERRDAYRMRGVSVMGRMQYAELTALRAEEPGIAAVYRECQDAVLHRLDLAMQAFFRRCKRGETPGYPRFRAAARWKQLEFPHGDRALKFDAAQKGVRVPGVGTLPLRKGRAVPAFGRAFVVEKNGRWYAVFECEREPEALSANGKVLGVDRGVHVLAATSDGELIANGRFADRHRRVVSGHARALDAATEKDVRGRCLNRRDPKRIAAAQRLARAKEREANARLDALHKAANRIVVSADTIALEVLNVRGMTRSAKGTIEKPGRNVAAKRGLNRAMLDAGFGKLRTLIVEKAARAVRQVVSVDARYSSQTCAACGGVDSKSRRRRRFVCVSCGWQCHADVAAALEVRRRAQLALMSEVSAGVALRLASPCAA

SEQ ID NO: 19806 - protein, 389 aa, unknown
  TnpB Polypeptide
VKLCYRYRIYPTDEQIKHLAHEFGAARYAYNWALRLRSDSFRDGVRLNDLKTSAAWTKERRSLPWASETSCVPPQQALRHLQTAFVNFFDKRLGYPSFKKKAQKQSAEYTRSAFQYDPTTRKLSFAKLGAVKVRWSRAFVSDPTTATITKSPSGRYHVTLCLDEPEPHSLPKTGKVVGIDLGLHRLATLSTGERISNPRHQGQRLRELAHAQRDLARRKKGSGRRNLARLKVARIQEKIADTRADHLHKLTLDLVRRFDFLAIEDLHVRGMVQMRSLARSISDVSFGMFRSLLEYKAKWYGKQVVVIDRFYPSSKTCSACGWVNQDQLTLATRDWLCKCGVKHDRDENAARNILAVGQTVTARGGGVRLKRTPVRKSTRRRSVKQQGAA

SEQ ID NO: 19807 - protein, 221 aa, Dolichospermum sp.
  misc_feature (186)..(199): Xaa can be any naturally occurring amino acid
LVKRADGIYVQFCINVNRQEDIALSGNTIGLDVGLKEYYTDSEGVMIENPKFLRIGEKVLKRSQRRVSRKVKGSKNRGKARQILGKRHLKISRQRKDHAVKLARCVVQSNDLIAYEDLRIKNLVKNHCLAKSINDASWYQFRVWLEYFGKVFKRVTVAVNPQYTSLECSSCGEVVKKTLSTRTHVXXXXXXXXXXXXXXTTKLEFKIKKYCISLKILWLQK

SEQ ID NO: 19808 - protein, 384 aa, Lactobacillus sp.
MLKGIKLRLYPSKKQKIQLWQMFGNNRFVWNQMLAMAQQRYRNNPSSRFVDGYQMDALLKPLKEEYPFLKLSDSTSLQVSNHNLAQAFKMLFSHRGGYPRFKSRHAIKQSYTGKSTIKVVAKRYLKVPKLGYVKSSKTGVLTSTKIKRYTVSYDPTGRYYLSLQVEVPESVSLPKTGRAVGLDVGIADLAISSDGVKYGTFYTKWLEKQATKWQSKYSKRKHQATIAIRQWNHNHKDTKMGLNDYQNWQRAQQQKARYQQKIANQRKDYLHKLTTSLVNNYDVIVIEDLKIKNLQKNHHLAKSIANASWYQFRTMLEYKCAWYGKRLITVKPNYTSQICSQCGYHSSSKPLEIREWTCPQCGAHHDRDINAAVNILHKGLKAIG

SEQ ID NO: 19809 - protein, 496 aa, unknown
  TnpB Polypeptide
MTNLTLLEEVDITLSKLRGKVSGYDPPFWSEEIQKLSRKLWIPTEAMVGANVPTNSWFDHKLFPPVSKSTKFLKENLKPDLDGFKTIKIRIFPDQDQRSLFQSWTHASRWVYNYTVDILDLYFKGKVSDTKVRDFIRTTERLEELVEGQARLLFTEYIITKKNEFPIPEWMEELKFNKRAYRGAIKNCVANWNSATSNKAAGNISKFKLKYRTKKDKNYFLSFENWCCSKNPFPEKLGHFRGWYKKGRVKFDLDHILEVIQHKNATLHWERVTNRYYMILPMSLDFNPILNGLFKGSQIETTLTKSTPSENQALVRKSMVALDPGVRTFQTCYSPTGLYEIGTGARVKLLKLFDRADQVYGKKKLKILLKVRNMVNDLHWKTIKFLCSSHSAIFLPTFNTSQMVKKKNSRPEVNRILLAFQHYKFQEKLVWKSKQWGVNVHIVNESYTSMTCTSCGELDRDHHGESIFDCPSCLVKIGHDHQGSRNIFLKSHNLLY

SEQ ID NO: 19810 - protein, 398 aa, unknown
  TnpB Polypeptide
MNLVESHIVNKTRELDELTFKTKNLYNKVNYMIRQEFIKNGNWLRKFYLFNICKDLDEYRALPTRVSRCVIRTLDANWKGFFEANKAYKLNKSSFKGRPHLPKYLDKNGKFTAIFIDGGVLRKNKKDGFIGLSSLNQQIKVKNIDKKIIEVHVKPYYGKYKIDIRYEEPNVVLKENNNNYCSIDLGVNNLMTITSNKMGINPIIINGRPLKSINQYYNKKLIKLKSLNARKQIERLCLKRNNKINTYLHQSSRYLIDYCSKNDINTIIIGHNINWKQKTNMSKKNNQNFVSIPFDNLIKMIQYKGLLKGITVLYQEESYTSKASFLNQDYMPVYGDTYKGCFSGYRYRRGLYKIRGKKIFINADVNGSYNILRKAVPNVFNNGIEGVAVHPNLMVTLN

SEQ ID NO: 19811 - protein, 447 aa, unknown
  TnpB Polypeptide
MISSRAKAPRHGGALLVVDGAGGRVHRKATFALYPTRAQEEKLHRLLRTLAEVYNAGLAERREAWRLRRVTVTLFDQYGQIKDLKGVRDDALAFGIQPVRTTLKRLDEAYAAFFQRIKAGQRPGFPRFRSHRRHNTAYWDEPISWKVRETDGRPVLYVQGVGDVPLSKHAGKQLARLQRRGGVAGTLTVTRRCAGTGHVWRAAVGFKNVETDALPATGRMVGVDRGVTVTAATSDGALSTYPAEARALRHRADRLGETLAGKKRGSRAWRKTIRQICRTRRRAANLVDNWARETAADITATADVIVLEDLQLKNMTKSAKGTVDEPGRNVAAKSGLNREMQAAALGKLATRIRVKAEEAGRRCWLVDPRNTSRTCPTCGHCAKANRPSQAVFRCQCCGHTANADVNAAVNIAAAGAQAEAAWRAAGSPQVPGSTPRMRRRKQQPAAA

SEQ ID NO: 19812 - protein, 468 aa, unknown
  TnpB Polypeptide
MKPWQVKKMPVLKNVISSKQRIKRFITGTPEMIRQTEEIYRAVLGFYLNVIHDNLDKLPEWNRNSGTRALEKLTVRTEPRTNRKTGEKFGGNPNPPYPIDTVWPKFPAYLRRAIIAKAIGMAQSWYSNYRRWLRKKERMQARNERRVAEGKKPIPFDEHPPKYPTAGNVGMTFYKGDFKNLSLKTNTIQLKVWDGYDWRFITVEVEPTSHSRKLHLDDSWEMTVPSIYEKEGLFCLVTAFEKKSNVIKFADYYLSKNPKVLAVDLNLGRRNRAVCALVGKGGTVHKVRHISLAACNTTDVHRLLGLIARDVSGLGIVPKGHRPCKRLWRKVRAVNDNYAHHLSKQLVDLAVEWGARVIVFENLKRFRPDRDKHGSARMRRRIGYWLHRRVIKHTAYKAKVRGILVALIPPKDTSNRCSLCGSLDTSRDGNVLKCRNCSIVHNSHINAAINTGTAWFVREEKRLRQKTA

SEQ ID NO: 19813 - protein, 381 aa, unknown
  TnpB Polypeptide
MRVIRGYKFKLKTTPELQRAFATMAGHARFVWNKALRLNLDRLERKAPIMWYSDLCGLLRLWKQSEEYGFLAEAHSQVLQQKLKDLDRAFADTFDKNQPLKKQPRFKKKGRDDSFRFPQGVKIDNRRVCLPKIGWVGFFKSQEVPGTIKQATVTREADGWYVSFQVEIELPDPVSHTESMIGLDRGVDVFAATSEGELVTPVNALKNALDKLARLQRKLARQKKFSENWRKTRNRIAKLHQKIARTRHDFLHKLSSKISKSHAVVALEDLPVGNMTRSAKGTLENPGRNVRAKSGLNRAILDQGWSMFERMLEYKLNEHGGKVVPVPAPGTSHTCSACGHTDPESRTSRNLFRCVKCGHTEHADVNAAKVILQRAKVKLAA

SEQ ID NO: 19814 - protein, 477 aa, unknown
  TnpB Polypeptide
VQQTVKQKSLPLNKKKWSEIAKTAEACASQKDAFLVKYGHVKYLHYLGEKRRLRDELVSAGFASPFGLQARQWKLVLDDALFTLGRQWEAAVVGVKERLYRHEGLTDEEKHYAFWLLYKHEKYGRDWKRLQAIFTGEDVINEEIKLDAKGCAKVRKYLKRTFRRVLGRKPRVKKARGFVVDQQMYRVFAAGNRQYIAVATLTPGERVIIPLAGVHAMEGNLRVVLIPEENCVEIHLTREPRTYPPGEGEAGIDLGVTEVFTDDTGRKYRPEYGEALQEMSDHILDKSKKRQKLWVLRRKFLEQDPGKARRILKHNLGLIKQAKRNKKYRTRCENEINRAFNEFYRERRPKIIAYEDLAHLRGKAKSKGLSRKVGNWQRSIIKERLGYRNYIYSVVDPGPQNAAYSSQTCPMCGWLDTKNRSGDNFKCRKCGFDADVDHVAAMNLKRRLRDAEISRYTPHEKVKGVLLRRYYQKQQAN

SEQ ID NO: 19815 - protein, 411 aa, Nitrospiraceae sp.
MSIVIRKGYKFRLNTSPVGEALMRQFAGCNRFLWIRALALQKERLDSKQSCLSYNKLANMLPMWKKEHPFLADAPSQPLQQTLKALDKAIKEAFDKANPKRFPVFKKRGQCKDSFRYPQGFEISNNRIFLPKIGWVGFCKSQYIKGKPKNVTVSREIDHWYVSVQTEIKVSNPVHPSVKAVGIDLGIKKMVALSDGTHIEPINAFMNAQKKLAKLQRCIAKKVKFSSNRYKLVKKIQKLHWHIANIRKDYLHKASCTLSKNHAIVCMEDLQVRNMSKSSKGSIEKPGGNVKAKSGLNKAILDQGWGELTRQLSYKQYWRGGVIVLVPPQYTSQKCSECGHIEADNRPSQAVFHCQACGNTENADTNGAKNILREGLSRLACPEKGAAFIGHREMVQSGRSLKQEIRSRLVA

SEQ ID NO: 19816 - protein, 413 aa, Halorubrum sp.
MEVRRTVPVTLDVDSPDAVLLEETIDEFLWAAQYVTDHAFQEEYVTTSKATLNDDTYDDVREATNLHSNHVQSARNKAAEACESVVERWKQGKKASKPHFTSPHLVYESRTATFHDGYVSLATIDGRIEADYVLPENPEDTPHQQYLFNDDFEITSAELHRQHGEWQLHICCTADVESDTSAQATTENGTVLGVDLGVNQLAVASTGRFWSGDEFDHWRREYEKRRGDLHEHGTRWAHENIQSVGRKEEGRFTQTLHRISNELVEEARENECTVIAFEDLTDIRERTGASWGHKWAFNRLYEYVEYKAEAYEVAVEQVPPEHTSRRCSECGFTHPDNRNGTHFECLKCSYQNGADYNAAKNIGLRYLRRNQTGDDGGAPVGVRLNSGTLNVNGGYSPAEESARTGVHAESPPL

SEQ ID NO: 19817 - protein, 259 aa, Halorubrum sp.
VTLKKETTGEWYVTFGLEVEDTTLPEKPAVDDVDAEDCVGLDLGIQNYIYTSDGNSVDWLDRSDEYERLRREQRNLSRKEHGSNNWEKQRRGVAKSKRRIKRRVEDFQHKLTTWLVTTYDAVFVEDLNVSGMLQQRGNARNKQDAAWRGVIEMLEYKSDLYGTHVVQVDPAGTTKECAECGVETDKPLWVREHSCPSCGFEADRDANASYNVLSRGLQELGLGQAESTPVETATAVETDGGQSSSVPVSRVVETGSLGA

SEQ ID NO: 19818 - protein, 477 aa, unknown
  TnpB Polypeptide
MFDVRPLSHRGKLAFIELLDASAACFNELNYDRRQAYFSARYDADDHHTVSELTDIVCDAASQEEYRNKYIQQLSSSIPQQLERKNWQTWIGFFELLRKYRNPEDDEVTDEPSPPGYWKEDDTRQLHTVIRNDTYSLELGERSRLEIPLGKELKEKYGFGYHEKLRLEVSGRPHWDGPNGSLELVYDRTVETFTARQSVGRTHTDPVRRGTETPALATTAGEDNGVVAAVDIGANNLAAVVTSEGDHVVFHGRPCFERFHDLTVEIADVQSRLPDGQYSTEQIERLYRRRREQRDHAQDALVRHLARWLVERSVTDLHVGKLDDVREQHWSAVVNEKTDLFWAHGRFRDRLEDVLEDECGITVHEESEAGTSSTCPACGGENVHRSGDDLQCLSCDFEGHSDLVGAVNFLVEQAELEGGSMARPAARGQNSPRDAIACLEWDDHRWQHGDQSTKEEPADRSTTREGGNLASGVSGRA

SEQ ID NO: 19819 - protein, 433 aa, unknown
  TnpB Polypeptide
MTRVVRTVIVKSIRLPRRTFKVFVELEGMYRNIVEQLVMYATKNSIRSFTKLKALKYREMRSLYPHLPSHYVYTACQDASTRAKSFLRLKKLGLAEREYPEVRRVSIWLDDHLWKPNGLTSIRIATHKGWVMIEFEPHKQYWKHINRGWKLASEAKIKLDKRNRQLIIYLTFIKEVEEYKPKGYLPVDVNENNTTILVDGVALLFETNTGKLVLGYYYRRKRIQEKYDKLYGKKSRIKRKVMGKLKERKKKSDTKWKIANIIVRVAYEKRYAIVLEELGKLVANNMIKKIKDKQLRLRIFQASFRGIQRAIEEKAKEYGVPVIYVDPRNTSKLCPIHNALVIYINGSRTGRCSKGGEVWHRDVVACWNLLLKARLGDGSYAPSLGGLIPLDVSPIPLGMNATHDPIGIPKSLWARWKSLPQIQSATILNRMKR

SEQ ID NO: 19820 - protein, 421 aa, Streptomyces sp.
MGRRYRLYPTQEQGTVLTGWGHTARALWNVALEQRKYLWEQRRYTLRSAEQCKQLTAARADLEWIRELPAQAGQQTLRILDRAYDNFWNPNHPADFPARKKRGHRLSVPLPGQAVEVRKLNRRWAEVRLPKLGWVRFRLSRALGGTIRNATVSQDGNGWHISFGIHTGRKPAAPNGKPGCGVDFGIASSAYVSTEDKPRQMPPTLTKNERKRLEYLEHKKARQQTYAKKHNGGKYSNRLRRTITAIGKLRTRQANRRSDFTHKLTTDLAKNHGFVGIEDLRVKNMTKSANGTVEEPGRQVRQKAGLNRSILDNTPGERRRQLEYKSGLYGSELRPVPAFHTSQTCAACGKVDPESRKGCGRLFACVHCGHEDDADHNASVEIEARARRTGGTVTNSTRSTTVRVPAPGRRRTRETQPATYG

SEQ ID NO: 19821 - protein, 569 aa, Bacillus sp.
MKKAYFSKRIYKNMLPKIYVDAISNSLLLFNRAKHFAFQTQVVEKRSGKSKRDNSLHLMVKKRFDMNDYYTNSVVQEANALMTSQSELKQMYISTKEEQIKSVKRKIKTTKGRVTTLTKIKRSFIKGKPSFNKTSREQQKGNFFVVQFKKKTDIYYHAYQFEHHYLDIQLKVLKNRLGRLEFRLDRLQKQLKTLRNQIKSVVFGGKKLFEGQHTLHHYRNNHRLWLENWEQSRYSKMTISGRKDAKYGNFVFTYVSETKNLHFITLNGVAIDIPNLVFPYGQENVEKAIQTQVDMPSRLKMKHGNAVAWSVEDHGDYYIFKCIIDFPEEKNINHSKSAGVFGVDLNVDHIAWSNINVKGQLIKSGVLEFDLDGKSSGQATKIIEVEAIRLVDLASKLNKPLVIEKLNTTKSKSSNPYGNKKANKKMSMFAYRKLISAIKNRADKMNVAVFEVNPAYTSQIGKIKYMKRLGISIHQAASYVIARRAMGFQEKLPPVLHSLLLEKIVGLHHWTQWKWISSRLSNVHTHCLYQIELSIPSKHYSMSDLFPSGALSDLVAKGLSKKESRKPIA

SEQ ID NO: 19822 - protein, 358 aa, Bacillus sp.
LGKQKIDVKIKENDEYIQEALSDIENNLEFEYTTKKDELKNASHKVKYVRVLKRVIRGNVRYYAQLIVQGFPPAKRKKDGSFKHKMGTGRVGGDLGTSSIAVVGENGVLLTNLAENVINLSRRIRLIQREMDRSKRSMNPNYFNKNGTIIKGKKTWIFSKRYMRLKSELKELHRKQADKRKQSHTILSNKLLSFGDEHYWEEMNIKGLQKRSKKTEISEKTGKFKRKKRFGKSIGHRAPAMFLRILEHKVKTNGGTFKKVNTRTFKASQYDHKTNDYKKKELKERWHTFEDGTKIQRDLYSAFLLQNSNREGTKASKKRCNKTFETFKTYHDKEINRIEKQDLFVLNSGIRLKSKTAY

SEQ ID NO: 19823 - protein, 407 aa, unknown
  TnpB Polypeptide
VKLIKYTYKFRINPTRIQIELLDKHFGSVRWVYNYFLNQRKEEYLANKKSINYYQQSKELTQLKKHEKTSWLKEINSQTLQFSINCLESAYEGFFSGRSKFPNFKSKRSRNSFTVPQFTKVKNGKLIIPKFQEGIEMIMERKIEGAIKKTTISRTPTGKYFVSILAEKEYNSVPTTGKKVGIDLGLKDFLVLSTGSKIKNGRLLKQLEHQLKLNQKHLSRKTKGTNRYNRQRLKVARIHEKITNSRMDLIHKTSLDLVKNFDVIFLEDLNIKGMIKNHKLAKSISDASWGKFIEVLTYKANWNDKEIIHIDRFFPSSKTCNECGWINNSLTLNERSWKCKCGRELDRDLNAAKNILNEGLRCKDISVGTTDHGRGAQIRPEKSGKSVETSKKKIPSGSETQRSLVVV

SEQ ID NO: 19824 - protein, 490 aa, unknown
  TnpB Polypeptide
MSEIYGSDFRPKIIQEGLCMARRKVKITDFIQTCETNSRLQYLADSFVPSCSLYDVIDGNYVPPQKEKTRKKSSSRRMADADTMFIAYRFRGYPTEEQESYLKQNIGAARFMWNRMLSDYELMWRELWKTIPMTPADYKGTSGLEWLSDVDSYALLNVQLNLEKARSDYFSGDKGKPRYKKKHCCRNTYTTNYCKNNIRFEGDGIRLPKIADPIRLSMHIPVRPGGQLKNVTVIHEPDGKWYFSIVLEYPAEEAEPSFGLQQFFKAGDRDAVSAIGLDMSVPFLYVDNTGKKPSYEINGNEIRFMKQYRKLESRIAKEQRRLSHMVKDSCNYAKQCQKIARLHAKAKHRRDDFLHQIAVRLVRKYDLIAIEDLDMAAMKKGLKLGKSVSDVGWGKFTQILEELCNKFGKLLIRVGRWYPSSKTCSHCGSIDKDLKLNDRVYECRECGHTMNRDKNAAVNIMEEAFRILEENMFRPSAEGYKKPALISTIA

SEQ ID NO: 19825 - protein, 429 aa, unknown
  TnpB Polypeptide
MYSISLEDARVRELISWYIRTLQKAIDTIWDNITWKYDIKNYKRRRHAKVKVPVIPKSSKFKRELRNELMKDNPYARHWVDAVIRTAYSIMDSWRKRYVKGKAKKCKPRVKRRFARCKVTLMKVDYGRKVIRITLRPYEYLEVSYANAWFSSRIKGYKVGEVILKDDKVLIPFKREEFYTVEDAIGWDCNELELTGFSPKIGFIHVDLRPLISARIVYQEKRRKAQEIDSKKLKSGKKLLEKYSHRERNKCRDIERKITIQLTRLFPNTMHGFERLNKENMIRRDKNKYKKLRKRAARVSWRNIVREIKQRAIVKEVNPKDTTKTCSRCGFKVKDLRGQVFRCPRCGLVIDRQKNASINIYLRMRGFPHSYEWWERFVKPLLNHELWVGVALRGRMPMIWSPMKGGLKAVKPKGLVDQRLLLPMKVYQT

SEQ ID NO: 19826 - protein, 368 aa, Dethiobacter sp.
MHKAYNFRLYPNKSQQTVINQTLGSCRFVYNYYLDRRIEAYKTVKETLNYTKCAANLKELKKELPWLKAVDSIALQQSLRDLDVSYKNFFQKRAGFPKFKSRRNNKQSYRTQMVNNNIKVMGDKLVLPKIGAVSFAKSREIEGNITSVTVKKTASGKYFASVLADVHTPKSLKVSSQKVGIDLGLRDLAVLSTGEAIKNPKTLAEAERKLQKMQRELSRKQKGSKNRNKARIKLAIQHEKVANIRKDFLHKLSTRLIHENQVICLETLSPKGMMKNRRLSKAIGDASWGTFKQMLLYKADWYGRTVHFVDRFFPSSQICSACGCRNKEIKDMTIRQWQCPHCQALHQRDINASINILQQGLVELGMIA

SEQ ID NO: 19827 - protein, 295 aa, Sequence sp.
MVLQPTLPSVPLPEQQAFSKSRSASAVQYARQASTTTPASSPSEKPTSAVVWKTRQGDYYIGIHINVETPPPEDEHGWIGVDLGIASIATLSDGTVFSGDQIERVRARYERTRRSLQRKGTRGAKRVLKRLSGRERRFQQAINHTISRRIVDRAIAEGKGVRLEDLSGIRKSVRVRKSQRRRIHRWAFYDLRIKIAYKCALAGVPFELIDPRYTSQRCPVCGHTERANRKSQSKFVCRSCGLEANADVVGAINIALGGVVNRPEVAPDDVEAVLHGQRRTETEGSYKPTTEVVGS

SEQ ID NO: 19828 - protein, 233 aa, unknown
  TnpB Polypeptide
MEDAVGDWYLCLPVAYEVVAIDAPQESVGLDLGLKTTVATSDGEKLEAAQFHRQIEQKIAQAQRRGHKRQAKRLHRRAARRRKDALHKFSRKIVSQYQTIVVGDISSTQLVKTRMAKAVLDAGWGLLKTQLLYKGQSAGRCVMIVNERNTTRACSNCGALTGPTGLGMLDVRAWVCGECGGTHDRDVNAAKNIRLAARCSPSVYGNESSPSTAPPSQAFRLREAEISSVKAAA

SEQ ID NO: 19829 - protein, 419 aa, Chlorogloea sp.
MLTLTYCYRIYPDTAQQHWLSEWMDICRNTYNYGLRQIKDWCNSRKCLIDRCSITREYIMAAGEKFPTEVNQLNALPDAKKDFPRLVLVPSQVLQQAIKQLHRSWEGFQKLGHGFPRFKKYGQFKSLLFPQFKQSPVQGNNLLLPKLGLVKVNLHRPLPDGFTVKQVRIIKKADRWYASIALQCDVNVPNSIPHGHPIGVDIGLEKFLATSDGILVKPPKFFKSLQSKLKLLQRRLSRKQKRSKNYEKARIKVALLHHQIDNTRKDFHFKQAHALCDAGDMVFMEDLDYTVMAKGMFGKHMLDGGFGQFRTIVKYVCWKRDKFFGVVNARGTSQECPECGAVVKKDLSVRVHNCPECGFTTDRDVAAGLVIRNRGIASISTVGQTGIEMACADGLPGAEETKPRSKSKTRKGKTKKSKL

SEQ ID NO: 19830 - protein, 404 aa, Streptomyces sp.
MIRSYKFLMRPTVGQVAALTAMLADHCSLYNGALQERRDAYRHVSRASIKYGDQSAQLKQIRAFDPERQGRWSFSSQQATLRRLDKAFAAFFRRVRSGDIPGYPRFRGVSWFDTVEFPKDGDGCRWDSTPHNPATRVRFQGVGHVKVNQHRVVTGKVKTVSVKREGKRWYVVLTAEQAEPEPLPATGSVVGIDLGITNFLADSSGGFVENPRHGRKAAVRLEAAQQALSRFPRRKAKDRMKNHQRAVEKVAALHGKVRRQRLDHAHKTALDLVRQHDFIAHEDLKIRNMSRAPAPKPDPDGPGRFLANGTTAKAGLNKSINDAGWGVFLTILHAKAESAGREVIAVDPRNTSRRCPECGHTTKENRPTQDKFHCVSCGHTAHADTVGAVNVLRAGLVRREAQSA

SEQ ID NO: 19831 - protein, 379 aa, unknown
  TnpB Polypeptide
MIKSFKIRLFPTKEQELLMWRHVGSCRFIWNYMLDLQIKRKECEEKHLSSFDMINLLPSLKSEENLAWLKDISSTTLQRVCSDLEFSYSNFFNKKSGFPKFKSKKRSKNSFPIRSDAFYFINEDILQIPTIRRVKYKSDFHFKFGKNNKFLNARISNVNGKWMLSFGMECENQAPILTDKPMGIDLGIKETMVVAYGNESIIFHNINKSKKVRELKKRIRNLQRVISRKYEANRVGKKYIKTNNIIKLENKLRKLYARLSGIRHNYIHQCTHKIISLLPCRVVMEDLNVMGMMKNKHLSKAIQEQCFYEIIRQMKYKCEWNGIPFIQADRFYPSSKTCSCCGAINKRLTLSDRTFICPECGFTIDRDYQAALNLMRYEV

SEQ ID NO: 19832 - protein, 394 aa, unknown
  TnpB Polypeptide
MKKLLKSYKTEINPTPEQKQIINRTIGVCRYVYNFYLAHNQEIYKIEGCFVSGINFSKWLNNEFVPNNPEFQWIKEVSSKSVKQSIMNAERAFKNFFKGKSKFPKFKKKNKSDVKMYFVKTDAKVIIQCERHRIKIPTLGWVRLKEKGYIPTNPNTHIIKSGTVSYKAGRYYVSILVEEQEQERPVLNNFGIGIDLGVKDFATCSNGKVYKNINKGSRIIKLEKKLRREQRSLSRKYESCKKLNKNLKGETTRQNIQKQKLKVQKLHQRLDNIRTNYINNVISELVKTKPMWITIEDLNVSGMMKNKHLSKAIAQQKFFEFRTKLLAKCKEYGIELRIVNRFYPSSKTCHCCGCVKSDLKLSDRTYHCDECGYTEDRDYNASLNLRDCQTYNIA

SEQ ID NO: 19833 - protein, 286 aa, Aeromicrobium sp.
MKRENAKKVLCPSLILRGKKVVLSCPVELRRTACMKNKHIDRVCSVDVGINTAATAAIVDTTGTVIARKFFDSGRHNDQRDNLHMHIAAKQKASHGGIGRRLGAGFCKTLYRRIAGISLDCARSMASELIAFALKHGAHALAVEDLKGWKPKGRGKTQRKRFHRFQHRMLVKYLTFRCEELGIRLMSVFARGTSYFAYDGSGPVKRDKTNATQATFSNGRRYNADLNGAYNIAARALALLLKIPDVKVKGTESSPERTDKSFGRSSRIPTVLAHVWAFHARKCAVA

SEQ ID NO: 19834 - protein, 450 aa, Deinococcus sp.
VKITLTAKLKLNHTREQKAALDAVTLSFRDALNFTSQKAFEMEKSSNAAKIQKEVYATLRERFGLGAQMACSVPRQVGATYKTLWTKVKQSAAKRAVNPKARRYKGLDQAPKFVSRTLSYQYQRDYSFKKGQQVSISTLQGRLVLPYEGYAKHLEYIAQGAEIGAGKLWYDKRKKQYFLLVPLSIELPDPDPMTHKQVVGVDVGMRYFAVASSTSNQAFFKSGKATLRKAERYAKARKSLQQKGTRSAVRRLVALSGRERRFIADTNSSLASEILKTYPHAFIGVEELTGVHERTERRSRPNSSEKQRKANRRRARWSYAELLGFLAYKAPLHGSFVVKVDAHYTSQTCTRCGHCSKGNRPNSGLMFVCESCGYHLHSDLMGARNVGLRALLVRQDWASTGCLSCTPGRPQSADPQAGSAGRDVSDAEAKAARLSRYAELRWSPDTSPRL

SEQ ID NO: 19835 - protein, 312 aa, Geobacter sp.
VADLDKAFKSFFRRIKTGKKPGYPRFKGRHRFDSFGLKEYGNGFKIDGRRLKISGIGRIAVRWHRELPAEPSTLRIIRKADGWYACFACKIAAENLPVTGKVIGLDVGIKNLLTDSDGAEIENPKWYRTGQKKLRVLQRAVSRKKKGGSNRKKAVALLQRHHLKIQRQRQDFLNKLATRLISQNDLIVLEDLQIRNMVRNPHLSKSIHDAGWHYLVQRLTSKAAEAGRVVIQVNPSYTSKCCSCCGHIFEGQKLSHRWITCPECGLSLNRDHNAAINILNRGIAALTRGDGQSLWAPSSLMSEGFAQEAAGF

SEQ ID NO: 19836 - protein, 507 aa, Photobacterium sp.
MVLNCEGMMSKSKTASFIHNFPLITSYKNRKELEARFNAAQQLKNVVLQEALKRADRYLQDETVKEAKRLYSKAHRTKDKNEKQQLKEKAIPLFNAARKKYQLEKYSLDSIGGQHRSNAPHLYTHIDSQTTKSICQRVMKSINGYLLGKNGRPHFAYKESIQSIESPTNGQGIIVNLEKGIVNWNACRKHLGHKSSNLILHVKFDNRNNRAADVEAHALAHRVKYCRILKKQHGRFTNYTLQVVFEGTPYERSELKEKQQQRLDCYGVDMNMHHIDLASNNDAISLPYCRSAVAHVEMEKEVKRLQRKMSRTLFLNNLDCYTTREKTKGRQTITTHQRKKGIKFPNISHNYLKLKCRKANLQRKLAAGRTDSHGYTVNQLLKVCGDLKIEKVWYRAWQCSRYGRAIGLNAPATLEAKLVRRAEQFDNNVMFVDPFKTALSQYCHRCGNKTQKKLSNRVHTCCDLNLDRDLYTALLVANTDFIGGEWLVDNDMVEQAIIEHPEKYKRK

SEQ ID NO: 19837 - protein, 394 aa, Methanomassiliicoccus sp.
MLAYKFRLYPNKEEERKLLWTLEVCRRVYNRFLELYNEGEHDRFKLQAMLPVWKESDADLRGVHSKVLQYELHQLFANLTSHRGLKERGRKAGKLRFKPSNRFRTITYNQTGYWLEPKNDKFSFLHLSKIGDIPIRMHRTVDGKIKGVTIKHMPSGKWFTYLLVDDGRGLRDFAVIDSAVGIDVGLEHYAVDSDGNEVENPRHLKNALKKLRREQRRLSKKQKGSKNWDKQRMIVARTYERVCNQRDDFQHKLSRHYVDSFDLVVTEKLGTREMIENGHLARSISDAAWNSFDYKLAYKAERAGKLFVQVDPRGTSQECSCCGKLVPKDLRDRWHDCPHCGLSTSRDHNASINILNRGIEKVGQELPELACGHWTATPPSMVVQARWMKQEALS

SEQ ID NO: 19838 - protein, 486 aa, Streptomyces sp.
MCVTNAGNKERSHPHEWGGPLALTDEELDAQVRNVARFRMYPTKEQAGIMLDHCAHARYVWNLAVEQHAHWSKGRQTAPGFVEQCRQLTEARRENEWLGAGNADVQQQALKDFAKAKSARFTSGFGEPTWRRKYVHEGFRVIGTRRVPERNEDGSAKLNAKGGQVLARSVVVQRLNRRWAQVQVPGCGWVRFRLSATGKGAKLPSAKTFRVTFRNGQWHIAFAVIPEPIGAADTDAVIGIDRGVTITAALSDGRKLNCPQLTVKERAQIRKHQRRGARASKGSKVKAEAYAKVAKLKAREASRRKDWCEKTSTMLARTYRLVRFEKLNIKNMTRSAEGTPEQPGKRVRQKAGLNRAILAQGWGLLRRRTEQKAPGRVQDVPASYTSTSLRCSACGWIDKKSRKSQADFICVSCGFTWNADENASNNVAAGQGGIPRPRQTAGAGGVTAVIGRSNAREPQSTRIGIPLFPRKRGRMSIEAELGNSPR

SEQ ID NO: 19839 - protein, 444 aa, Galliscardovia sp.
MTVRLIGSPRTTSETARLAKNQQIKQSIKATKARRKTQVCSTFDLKIVTNKLSRTQREALTRVFLEAKWLWNECIASGNPFTYQPASSVTVKTHSGTIEQREYHVLGSQMKQALVKTIRANIKTLATLKQQGKKVGAVGFTKAVTALGLPQPDTTYKIRGQKARIQNIPGWVRVRGVRQLEGWEQAKANLTSEADGWHLHVTCYMNKEEYAQRREAKNLAPQANTIIGIDMGVKTSITCSDGTEYNVMIGETDRLKRKQRTLRHKHKGSNNYRRTKHAINRVYQRQQHKLNNAANQIVAKLLRNQIVFMQDEQIKQWQRRYGKTIQHSVLGRVKTRLIRHHEQTVVLSKWEATTQLCPICHEKTRTPLTQHTYRCEYCNYTAPRDIKAAQSMVWIGQTEYAQQIPLERGEYKPAENASESYATNLRMFSTRSVKQETVAVSTQR

SEQ ID NO: 19840 - protein, 312 aa, unknown
  TnpB Polypeptide
LRSGTPWVLKLFKISPKGLTGPINYFFRNLKHGLKTAPPNFRAIKKYRSFTLKQAGWKLLPGNRVVIMGKEYKYFKSREVAGKVKTVTVKRDAVGDLWLFFVVDEGQVPVEVRSGEIVGLDFGLKTFLTTSKGEYIQSPLFFKRNAKLLKILSQKLSRKKPGSSQSRKTRLALARGHRRTANQRRDFHFKTALALAKGYAAVIVEDLNLKAMQRLWGQKISDLGHAAFLDVLSWECFKNGSRLLEIDRFYPSSKTCSKCGYVLAELPLSVRSWQCPTCSAVHDRDINAAKNIQRVGARPKNGANFPLLREKT

SEQ ID NO: 19841 - protein, 494 aa, unknown
  TnpB Polypeptide
MCNEKKEDSALIGAKGKKAVMTAIEADPFMSKFPKNIRDKVWKSGIESLSIGEERNQLRYTGVIHYPNEGIQVALNVLERWLCRRCNNVGENQNYRKYWRNLLKFLNIEEPDSRRLPLLTVYYQGKELYEDSDIEVICNILPAIEGYDRELRLFAAWCAEDVLSMFTDNYQGENWPKQAIEAAEKFANWEIEEEGLRSAWKMAKNCATKLQEGNLSLDTNHINGAKEAAWAASASTVPTSAAIAARNAALWAWRAYGWTTGKDKIYKTSPKYKNFQKELENLLGRKERYASCVGIDLGIIRFATLFDGTTGSHNFEFLPDEIKVMETHVKDMKSKKNMSTRFFEEVVDEMQNPVLSEDEIEKKIQSLTQEIENVKEGFLRGLSARIVERYSRICIEELSYKDMTYATDDDKKMWEKFKKLLEEEVEKNPENVKIVFIDPRNTSRTCSMCGCIDEESRPIRSQFICIFCGHTEDADVNAAKNILRLGNKKANEEM

SEQ ID NO: 19842 - protein, 220 aa, unknown
  TnpB Polypeptide
MQKLLYHDVRNRFGLSANLAIQAIRRVCDNRKAAHTNKSKVVEFDATSIPYDARIFSLREADWTVSLTLLYGRERLALMAGSYQRDKLAGRAPKAAQLCLHRDGSYTIHIQIEVPTEPPVLTDKAIGVDLGRTDLAYTSRGKSWSGEQIRRVRDRYSRLRAALERKATKGTRSTRRRCRGLLRRLSGRERSDSSGKPTTRSATTLWRPPKAKVPWWYSKT

SEQ ID NO: 19843 - protein, 406 aa, Frankia sp.
  misc_feature (3)..(3): Xaa can be any naturally occurring amino acid
VAXGACAVRRTFRFQLRPTVRQAVALTAMVEDHQALYNAALQERRDAYRHPSATTVRYGDQSAQLTEIRAADPDHARWSFSSQQATLRRLDKAFAAFFRRVRAGEKPGYPRFKGAHWFDTVEWPKDGDGCRWDSQPGHPTQTRVRLQGVGHVKVNQHRPVQGTVKTIGVKREGGRWYVVLSCDDVPARPLAPTGVVTGVDMGVASLATTSEGRHVGNPRYLAAAAGRLARAQRELARRKRGSARRRKAVAKVAALHGTVRRQRLDLAHKTALDLVRDHDLIAVEALRVANMTRRVAARPDPERPGTFLPNGQTAKAGLNKSILDAGWGVFLAVLRAKAESAGRTVVEVPPANTSRTCAVCGHCHADNRRAQAVFTCGGCGHTAHADVNAAVNILRVGLALQAAQAA

SEQ ID NO: 19844 - protein, 446 aa, Natronorubrum sp.
VQSSKLTQTLSFGLDIDTGSADDLQDSCLEARRIRNETNRLDKQGWDWKELKSVVVDNADHVKNTSQLIVDKALGEIETYHDNKDNNWGRPYPYIDGLYPMVMNHKEGYRLFLEDDDTIRFRISAAPRNHVKGELRGNPEHFDRVRTALTYDDWRVGTAEVIYKHDEWRLHVTVTHEYHKVASKTDADTIVGVDVNEDCVALAAMNRNGSVMDSVVIEYPEIKEQRHEFFTKRKRMQKVGQTAFDLVVQTEERDYVHDCLHKVSRQVVNWVSQFTDPIIVFEDLKDMRDSIDYGTRMNRRLHSLPFAALRDMVSYKAAWNGIPSDDVDPEYTSQQCPRTECQHTSRSNRYKKRFKCGECGFQDHADRKAAVCVVQEWFGKQDGNVPSLETLPRVWKVRWAASGRGGATDSHGPVLGSGVHRHGTSAQDSQSRVREELKSVAPAVQD

SEQ ID NO: 19845 - protein, 360 aa, Deinococcus sp.
MPYTTTDHHWMKILRPSYSTISDLIDQNHLIACRANQCGPRGDLTYQLSPASRIQVINDELLTIAGQEIMAQLNHQPTTAYRAMVLASPGFEQYPDIDVLLKAARHPEPDWSPERFVALLESRVSRGRQPDPRPRLVKEPTTYKSIWRPEQTYLRQNLKGDWLLGLTCQSQYRSGRTGQNKVAVGLDVGLDPVAYAYTAAGQSQEFKPTSLSHLNAVKVMSLTPGARKLHEHLTYASGRLDTEAVIAWLNYHASHVFSEKLSHKGMNRNFIFDARDRAIHDYHFSSLSQYMHTAQHLFKRLPARFTSTYCPCCRERERVLYKGQRRGDSFHCDRCGHRGNAHQVGARNVLLAGIERYGAG

SEQ ID NO: 19846 - protein, 425 aa, Nonomuraea sp.
MKAGTVGHVGLRVLSVLIGRLIGVSRYRLSPTPAQERALAEHCGHARFVWNLAVEQHAHWRPGRRSGPGFAEQCRQLTQARAEFGWLRGGSIVVQQQALKDFAQAVANFFGNTHRKPTWRKRGHGEGFRIVAVKAGDVRRLSRTVGEVKVPKVGWVRFRWSRAVPGGVKSYRITLDRAGRWHVTFAVIPESIPVPGTGEVVGVDRGVAVSAALSTGELLCAPTLREAEKARLVRLLRKLARAKRGSNRRAKVKAAVAKLKAREADRRRDWVEKTSTDLARRFDVIAVEDLKIGNMTRSAKGTVEAPGRNVRQKAGLNRSILAAGWGRLVRRLEHKACGRVRKIDPRYTSQTCNACKHMARESRESQALFLCVACGWRDNADINAAKNIRDTIKDTAVGHTVAARGGAPSGGPANREPQRDLLLVM

SEQ ID NO: 19847 - protein, 379 aa, Methylobacterium sp.
VSIVCAHQYRIYPTKEQADLLTRTFGCARLVYNMALEHWRDAHKAEQRLIPFRELSAMLPTWKGKLPFLKEVSSVPLQQAIRHLNEAIGNFFQKRGKYPSFKSKSGHQSATFMRNAFKIADGDLTLAKMPHPLRVVWSRPLLGHPSTVTITKDPAGRWFASLQFECAHKVVPAPSNAAIGVDVGLIDIAVTSCGKRYKAPRYLSQRLHSLKRAQRALARKKNGSRNREKAKQRVARLHSKVADQRRDFTHKLSTNLIRDNQAIYVEDLDVGPLGRTFLARAIYDAGWGMLRRQLKYKASWYGRSLIKVPKHYPSTRKCSNCGIIGQKKPLPVRTWTCHGCGAEHDRDMNAAINILAAGHAVSACGEVLSPVPEMDRQPS

SEQ ID NO: 19848 - protein, 348 aa, Methanosarcina sp.
MLKNTEQYRALPAQTAQQVLKIRDKSWKSFFKALKVYAKSPELFLGRPKPPKYKHKDGEHILVFTNQQCKIVDGLLKFPKTVNLELKTRLVAVDLREVQVIPNANNYTCEIVYDKTVSDNEINSSRVLGIDLGVRNIATIANNFGAKPIVVKGNTANNINQFYNMKKAILQHVYDLAKIKWGSKLAKLDFKRNNMIKDYFHKLSRRIVNYAIKNNVKSIIIGKNENWKQDVNMGRKNNQKFVQLPLAKLIEMIQYKAQEVNIEVVLQEENHTSKCSFLDNEPVEHRAKYVGRRIKRGLFKSANGIIINADVNGALNIIRKATPKAFADGVEGVGLHPKRCLITSFEDT

SEQ ID NO: 19849 - protein, 187 aa, Methanosarcina sp.
MKKARIQHIYDLTKIKWGSKLAKLDFKRNNMIKDYFHKLSRRIVNYAIENNVKSIIIGKNENWKQDVNMGRKTNQMFVQLPLAKLIEIIEMIQYKAQEVNIEVILQEESHTSKCSFLDNEPVEHRAKYVGRRVKRGLFKSATGIIINADVNGALNIIRKATPKAFADEVEGVGLHPKRCLITSFEDT

SEQ ID NO: 19850 - protein, 169 aa, Methanosarcina sp.
MHREISKGSLKTITISRTPTGKYDISFLTNDGEKLPEKQDFSHATLIGIDVGVTTFATLSTGEKIDNPKFLKNSLERLKCLQRRVSKKVKGSKNRRKAVYKLTKIHEKISNQRHDFQHKVSNRLISENQAIAVETLNIKGLKKNHKLAQVISDSAWYSFVLKLTYKADG

SEQ ID NO: 19851 - protein, 158 aa, Methanosarcina sp.
MHIKTTTINNELIVEKDLNSEFLRTATVSRTLVGRYHISILTEDLKKYPVTQQYSESTLVGVDVGIKPFAAISTGENIDNPRFLNKSIKKLKMLQQRVSRKVKASINRKKAVNKLAKQHQLVSNQINNFQHKVSLSLIRENQAVAIETLNLKCMIITN

SEQ ID NO: 19852 - protein, 306 aa, Methanosarcina sp.
MALVTRTEQIQFKSETISGLAHASKNLFNTANYIIKQRFFENDKLYQETGEKGEGIWYKQLYSMLKNTEQYRALPAQTAQQVLKRLDKSWKSFLKALKVYAKSPKLFLGRPKPPKYKHKDGEHILVFTNQQCKIVDGLLQFPNVVNLELKTRLVDVDLREVRVIPNANKYTCEIVYDKTVSDNEINSSRVLGIDPGVRNIATIANNFGAKPIVVKGNTANNINQFYNMKKARIQHIYDLAKIKWGSKLAKLDFKRNNMIKDYENLICSNLCNLLRHVPVIVEKFLSPSKGAFFKAHHFMVIVPSVF

SEQ ID NO: 19853 - protein, 427 aa, Methanosarcina sp.
MQLAKKIRIYPTEEQVNVLWELSDKCRVVYNFALADRKDAYNKEKRSVKYTEQQNKLPDFKKRNPEYNVVYSKTLQGILKKLDSSYHSFFTHIKNGDKKARPPNFKGRNYLMTIPYNQSGFKIEDGIITFSHKVNNVPLSFEIGNLAEGLNVKQVEIVNDNPYKARGKFFLCIAYDVDIEDTYFDNGIYQAIDLGITKIVTAINTEGKFFEVKTPRPDNYWNQKIDAAKSRRDHCIGVKKGSAKSRRFLRIARAVTKMSKKKANQVKDFQHKLSKTMVENTRANTIIVGDLDVKQMAQPKVKDGIKQKKTKQKKGLNRSTQGLGNLGRFVQFLTYKAEIIGKRIIRIDEKNTTKRCCYCGKKHDMPSWKRVMLCDCGNNIDRDRNSAINIMIRYLLQNALWTGYQQFVDNLRQYRLPDGIEVHTEAK

SEQ ID NO: 19854 - protein, 420 aa, Methanosarcina sp.
MLCITNVLRLNKTQYEALKTLSHASKNLYNLGLYNTRQYFFQNSKFLKYPENYHICKEDENYKLMQAATAQQSLKFVERGMRSWFGLLKLYKNGQLEDKPNIPHYLDKEGYFPIVYPKNAFSFKNGKVRLGISNEFSKQYSKKLLMFPIPKILKNKLSYIQEVHVLPMYDGKYFKIKYCYKEKNQPSNLDYSEYLSIDLGVSNFATFVDTVGTATIIDGKYVKSLNQQYNKENARLQSIKDKQKIDGITNRQIYLLSKRANKISEFMNRTVNYLVKHCLENNIGNILIGELTGIKQNINHGKRNNQNFVQIPFGKFKAKLESKCNFYGIKYHLVNEAYTSKVDALALDPIEKPSYGGSRRIKRGLYKSITGQLLNADINGAINILRKVADDSVLQQIISTGLVNRPRRIRLAFETPKLNC

SEQ ID NO: 19855 - protein, 418 aa, Methanosarcina sp.
MRKGSLYRIYPEQDQKQMLEQHFGGVRFLYNKLLYVRSVLYSQCGCSISRSELDKHILVLKNIYPWLKKVNSQSLQQANKNLDNAYQRFFKGLGDYPAEKLKKKQHFSFQVPQYYKINLTTSEIFLPIIGWIKINIHRPLFEPEFFETHLKTTTINSEIIVEKDLNSEFLRTATVSRTSAGRYHISILTEDLNKYPVTQQYSESTLVGVDVGIKTFAAISTGEKIENPRFLKKSIKKLKMLQKRVRRKVKGSQNRKKAVNKLAKQHQLVSNQRNNFQHKVSLSLIRENQAVAIETLNIKGMIKNHKLAQDVADSAWSSFVTKLEYKAQWFGKTILKIGMFEPSSKNCHVCGYHNSELTLKDREWLCPSCNTNHDRDINAAINIKQFAINNLITSGTEGRACGVILKRESREAGCPSFQ

SEQ ID NO: 19856 - protein, 382 aa, Methanosarcina sp.
MLRGNRCRIYPNKEQKALMEKHFGSCRFVYNKLLEIKSLMYKKFRISLSEFDLNNYLLVLKEVYPWLKEVNAGVLQQASRNLNSAFNHFFKDELRYPQKKHKKDHHFSFQIPQHYSINFATSKILLPKLGWIKVKMHRPLFKEMELESDIIKHDNNAEFLRTLTVSRTPTGKYYVSILTEDGEKLPEKQEYSHATMVGVDVGINTFAACSNGEKIDNPRFLKASLQRLKFLQREVSRKVIGSNNRRKAVRKLALIHEKISNQRHDFQHKVSTKLISENQAIAVETLNISGMKKNHKLAQAISDSAWYSFVQKLMYKAEWVGKTIIKIGQWEPSSKNCNVCGYHNSELSLDIREWQCPECGTFHDRDINAAINIKKITVGTTV

SEQ ID NO: 19857 - protein, 349 aa, Methanosarcina sp.
MALVTRTEQIQFKSNSVSGLAHASKNLFNSANYIIRQRFFENDKLYQETGEKGEGIWYKQLYSMLKNTEQYRALPAQTAQQVHKLLEKSWKSFLKALKVYAKSPELFLGRPKSPKYKHKDGEHILVFTNQQCKIANGILKFPKTVNLELKTRLVDVDLREVRVIPNANKYTCEIVYDKTVSDNEINSSWVLGIDPGVRNIATIANNFGANPIVFKGNTANNINHFYNMKKAILQHVYDLAKIKWGSKLAKLDFKRNNMIKDYFHKLSRGIVNYTIENNVKSIIIGKNGNWKQDVNMGRKNNQKFVQLPLAKLIEMIEMIQSKAQEVNIEVILQEESHTSKCSFLENDPV

SEQ ID NO: 19858 - protein, 367 aa, Methanosarcina sp.
MLRGNRYRIYPNKEQKALMEKHFGSCRFVYNKLLEIKSLMYNKFRISLSEFDLNNHLLVLKEVYPWLKEVNAGALQQASRNLNKAFTNFFNFGFGYPQNKKKKDHHFSFQIPQHYSLDTSISKVLLPKFGWIKVKMHREISKGSLKTITISRTPTGKYYISFLTNDGEKLPEKQEFSPATLIGIDVGVTTFATLSTGEKIDNPKFLKNSLERLKCLQIRVSKKVKGSKNRRKAVYKLTKIHEKISNQRHDFQHKVSNRLINENQAIAVETLNIKGLKKNHKLAQVISDLAWYSFVLKLTYKAEWVGKTILKIGMFEPSSKTCNVCGYKLKELSLDIREWQCPDCKNTHDRDINAAINIKKIAVGTTV

SEQ ID NO: 19859 - protein, 279 aa, Methanosarcina sp.
LDLGILKIKRKRITIFPFRFLNTVEHCSLDTSISKVLLPKFGWIKVKMHREISKGSLKTITISRTPTGKYYISFLTNDGEKLPEKQEFSHATLIGIDVGVTTFATLSTGEKIDNPKFLKNSLERLKCLQRRVSKKVKGSKNRRKAVYKLTKIHEKISNQRHDFQHKVSNRLINENQAIAVETLNIKGLKKNHKLAQVISDSAWYSFVLKLTYKAEWVGKTILKIGMFEPSSKICNVCGYKLKELSLDIREWQCPDCKNTHDRDINAAINIKKIAVGTTV

SEQ ID NO: 19860 - protein, 382 aa, Methanosarcina sp.
MLQGNRFRIYPNKEQKALMEKHFGSCRFVYNKLLELKSLMYKKFRINLSEFELNNYLLVLKEIYPFLKEVNTQSLQQASRNLNSAFNHFFKDEFKYPQKKYKKDHHFSFQVPQHYSINFAAFQILLPKLGWIKVKMHRQLFKEMELENDIIEHDNNAEFLRTVTVSRTPTGKYYISILTEDGKKLPEKQEYTHATMVGVDVGINTFAACSNGEKIDNPRFLKASLQRLKFLQREVSRKIKGSNNWKKAVRKLALIHEKISNQRNDFQHKVSNRLISENQAIAVETLNVKGMIKNHKLAQAISDSAWYSFVQKLMYKAEWVGKTIIKIGMFEPSSKNCNVCGYHNSELTLDIREWQCPECGTLHDRDINAAINIKKIAVGTTV

SEQ ID NO: 19861 - protein, 411 aa, Methanosarcina sp.
VALVTRTEQIQFKSETISGLAHASKNLFNSANYIIRQKFFENDKLYQETGEKGEGIWYKQLYSMLKNTEQYRALPAQTAQQVLKLLEKSWKSFFKALKVYAKSPELFLCRPKPPKYKHKDGEHILVFTNQQCKIVDGLLKFPKAVNLELKTRLVAVDLREVRVIPNANKYTCEIVYNKIVSDNEINSSRVLGIDPGVRNIATIANNFGAKPIVVKGNTANNINQFYNMKKARIQHIYDLAKIKWGSKLAKLDFKRNNMIKDYFHKLSRRIVNYAIKNNVKSIIIGKNENWKQDVNMGRKNNQKFVQLPLAKLIEMIQYKAQEVNIEVVLQEESHTSKCSFLDNEPVEHRAKYVGRRIKRGLFKSATGIIINADVNGALNIIRKATPKAFADGVEGVGLHPKRCLITSFEDI

SEQ ID NO: 19862 - protein, 118 aa, Methanosarcina sp.
MYDYHKLAQAVADSAWSSFVTKLEYKAQWFGKTILKIGMFEPSSKNCHVCGYYNSELTLKDREWLCPFCNTNHDRDINAAINIKQFAINNLITSGTEVRACGVILKRESSKAGCPSFK

SEQ ID NO: 19863 - protein, 373 aa, Methanosarcina sp.
MLKVFHYRLYPTKAQKKELNKTLELCKWTYNETLAIRKNAWESEQKRISYYDSKKMIPIWKKDKPELKEVHSQVLQEVVKRVDLAFQAFFRRVKSGEKPGYPRFKGYGRYDSITYTQSGFSLDFNMLSLSKIGDIKIKLHRPVEGEIKRLNVRKMPTGKWFASFLVETEFPLILQKTRLSIGVDVGISSFLTLSDGQHVPNPRFFVNEEKNLAKAQRKLSKAEKGTALRNKALKVVQHVHERITNKRNDFAQKVSLNLVKTYDLIIFEDLNIKGMIQNHCLAKHIADVAWNQLITLTTYKAEWAGKRVELVNPYNTSQMCSGCGQIVQKDLSERTHSCPFCGLIIDRDHNAAINILRLGLQSLRIPDRCPSFQ

SEQ ID NO: 19864 - protein, 367 aa, Methanosarcina sp.
MKRGNIYRIYPNKEQKALMEKHFGSCRFVYNKLLEIKSLMYKKFRISLSEFELNNHLLVLKETYPWLKEVNAGALQQASRNLNSAFNHFFKDGFGYPQRKLKKDNHFSFQLPQHYELNTTISQILLPKLGWIKVKMHREISKGTLRTLTVSRTPTGKYYISILTDDGEKLPEKQEFSHDTMVGIDVGINTYAALSTGEKIDNPRFLKASLQRLKFLQREVSRKVIGSKNRKKASKKLALINEKIANQRHDFQHKVSNRLISENQAIAVETLNIEGMKKNHKLAQAVSDSAWYSFVLKLTYKAQWVGKTIIKIGMFEPSSKNCNVCGYHNSELTLDIREWQCPECGTLHDRDINAAINIKKIAVGTTV

SEQ ID NO: 19865 - protein, 394 aa, unknown
  TnpB Polypeptide
VSILLYTVSLKAYKFRIYPTKSQETLLESAFETCRYVYNRTLALRKDTYDHEREYVSLYETARELTKWKLFKPELKRVHSQVLQNAQVRVDLAFNSFYRRAKEVKAGKLDPKKIGFPRFKGKERYDSITYPQYGSSAQIIGNCIHLSKIGDVRLKQHRDIKGVPKTVTISKRGNGKWYCSIACEVKKVVRKGKPRSPKVVGIDVGVRKLATLSDGTIIEPPRYLMEYEATLDKANRRLDKAPKGTPLRAKMRKQLGRVYELISNKRTDFTEKLSLKLVKDYTFIAFENLQIDEMVEAADCYCEKHIMDASWRKLMDRTKCKAEEAGTTVVFVDPRNTSQRCSQCGKIVKKSRSETVHKCNICGLIMDRDLNAAKNILALGLQCRDCNKSQMPTF

SEQ ID NO: 19866 - protein, 382 aa, Lachnospiraceae sp.
MFLKGYMANRAFEFRIYPNRAQKELLAKTFGCVRLVYNHYLDRKKQFWEESKQSMSYNACAKDLTSLKKEKEFLKEVDSIALQQSLRHLDTAYSNFFKRKDNGYPRFKSKRRGKQSYTTMNVNHNIRIEKGRIRLPKLGEVKIRQHREIPEEWTLKSVTVKRVPSGKYYVSILFEYESQICEREINNVLGLDFSMSELYVTSEGERCGYPKYFRQAEQRLARAQRRLTKMQKGSANYLKQKVKVAKIHEKIANQRKDFLHKRSHQIAETYDAVSIEDLNMQGMSKALHFGKSVHDDGWGMFTRMLEYKLADRGGKLVKIDRWYPSSQMCSGCGHIVPEVKDLGVRVWFCDWCLEYHERDENAATNIRDEGHRLLRMKQKKTA

SEQ ID NO: 19867 - protein, 337 aa, unknown
  TnpB Polypeptide
MSSNKFRVWLNNEYLPEHPECSWIKEAYSKAVTQSVNNGQAAFTRFFNHQSAFPNFKKKGISDVKMYFVKNNPKDCRCERHRINIPSLGWVRIKEKGYIPTTKDGYVIKSGTVSKKADRYYVSVLVEIPDNKIADTFNGGIGIDLGLKDFAITSSGKTYKNINKSVRLKKIEKKLIREQRSLSRKYENLKKGEVTQRTNIQKQKLKVQKLHHKIDSIRTDYINKTIAEIVKTKPSYITIEDLNVKGMMKNKHISKAVASQKFYEFRTKLQNKCNENGIELRIVDRWYPSSKTCHCCKAIKKDLKLSDRIFQCDCGYIEDRDFNAALNLRDAITYEIA

SEQ ID NO: 19868 - protein, 293 aa, unknown
  TnpB Polypeptide
VEIHWNSGTSKPRKQRKGVNVKQVSFRISHRPEIEYERVRELSIAYDKVSGRIEARLVVEVKTRENDGTGKAAVDLGETVLMACTFDDGNVILYSGRLIKCIRRYWQKVRANLKQNSRSWKQIAHREKKQIEHLLHVATSHFIEECVRHGVKEIVIGNLNGIRENIDYGEQLNQRLHVWPYRKLINMLKYKGELAGILVRDNVDEGSTSITCHACGKIMASNRRHRGLYVCSCGFKAQADVNGALNIYERAYKVSPVKGSSGRVARPAVVSYRLGWHGVAEPKHRDKTLCASA

SEQ ID NO: 19869 - protein, 660 aa, unknown
  TnpB Polypeptide
MAVQTHKTIACRLSKLIPDERTVSDVRMAVSLVHEVTIQATSLLNLHIRSCIANANLISSKLFERNWILKAFQEVTVCKTGKVCARDLELAQTMTHMPDFTAVDRSGLTQLFLSNATLIASNAKNNIWMHFNRRLLAYVKRQLEIPKQEYDALTKAEKTARMIQLNRIATDIRRMPSDAITSSIEYHAFVELQREILRIDISVGNWNDKPLLYHLKTKPHAFLKATSLMSHCNEDSGRSGFSLYPLRRSMVPGFIRFDADSLNKALQLLQNRRLGRKRRPKAEEEFTFTNTVDYRAAGIKQRWRIDDGFSTDGMSVRVQQFLGDAATVQKLRCKKREVAEKKAEGRKRKRNDEPMAENSQKEKPSKSNSNPVLTKMPERGIWAIDELKRISRLDSLHIVGVDPGKRELIAATDSDDPKSCTIRYTIAQRQKDMRSRQYAYEGRRDKPNGVHDAERILSDYNSRTADFETFKGYIRARQAHLMECLKFYGEMHHRHRRWKTFIKRQKSEELLYKRLKSFKTDERPLVLAYGSWGTIAGTKSACNKGNPSCIGVGLMRKIAKRFVVAITPEAYTSKTCHECLGTCGPHPTMRSMRNKREIRGLRVCQDPNCNRLLNRDANASRNIGLQFKLLFEDKGTIRSLSALELEMTKHRMCLECVMEN

SEQ ID NO: 19870 - protein, 449 aa, Micromonospora sp.
VLEVNAWRRRRNDAPLVGYQELCRELAASGPGTFGDLDTTGARSVLRRFSDAWFAAAKRRKSGDLSAGFPRRRRRLLPVRWYHGTFAVDGRRVRLPTARGGRPLWMRLVRDLPYPLEQVRSVTLLCEGGRLFLDVTAEVPVASYPPGEGPDPERVAGVDLGVIHPYAVVGPGGEALLVSGRAIRAEHRMHLADTKARRRAAARRAPQPGQRGSRRWRHYRRRARRVEARHGRRVRQAQHEAAATVVSWAVRQRVGVLKVGDPRGVLNLPAGRRHNLRLRQWQIGRLLQVLTDKATLAGITIRLVDERGTSSTCPACHRRVPKPRGRSLSCPHCHFSGHRDLVAAASIATRNPGGGPTTPTAVVLPEVVTHRRAGRHLPGAGRSRRDPRRPPRTARGSVGPRRPAPPPGGESLARKARIHDNRRAPGERSWTPHYVVDVQATAESGQGER

SEQ ID NO: 19871 - protein, 385 aa, Ktedonobacter sp.
RLLRHQAERKKAFELVAPILSDGFIRPKTEKRPVGKNRPAIKEAITALQKSLEEDETSFVALQNVVEQRCTFFFQHDRFPIDYKELQPVPLLKVGMLTYAGDDGREKGQAYRMAVDLEAGVARFRFRAPSEAGPWRWRTVDTIISLPECLKERLPHGELMAPTLREERRADGERFAVLDFIIEVEKEALPEWRSVERVLGADWGVHSLLTATAVDEHSEQVGGPFFLDTGSFDGRQARTRRQIDEVKKKVARYEQERDALPEDHAKRSWYTQRLALYRREIELCWRKYERRNRALAHLARNVLLLLCQIHGCSLLSMESLKTLKTTGRGRGVRGRWRNYCNTSTIRGEIWRLLRYKCHLLGLRFHTEQPRGTSHTCPHCGVPAKT

SEQ ID NO: 19872 - protein, 282 aa, Desulfurococcaceae sp.
MKTLRRVNSSLKPRELLLHSRKALAQALNTPEEKLEKALNRVFSNLEEHNVVFPDVLPAVTIVTNFSKIVLGYAYRRAKIQQKWSKVYGVSGNRRLRCVLRMLRERNVKRDIKLKLVRNVLDVVKDGLVVLEKLPKRFQDRVIEKNKVLNSIDAHRLKQSSIRGIHKVVIEKLAEHGIPYVLVNPSHTSSACPICGSKLSPMTGCAQRNGWKPRMMRCPRCGFTHDRDVIGAMNLVRKYLLDVEGRAVDLPKGTHDPCMEWSVTIVKRGVEVQPVLARPTTT

SEQ ID NO: 19873 - protein, 404 aa, Nostoc sp.
VFNLTYEFKLKPTQSQIALFANWLEQCRRVYNYGLAERKDWIKSRSCQINACSLRSEYIIPVETPRPNYFNQCKGLTQARAKYPELKAVAVHVLQQTLKRLEQAFVAMWERKHGFPRFKKPGRMRSFLFPQLGVNPIQKGKIKLPKIGWVKFHQSRKIPDSAIVKQAHIVKRASGWYVLLILQWNVSVPQLIPHGEAIGIDVGLTSFIATSKGLTVKRPRFFVDAECKLKLLQQRVSRKHIGSNNWHKAQKKVALLYEYIVNCRKDWHRKLSHQICNNAGMVFVEDLNLVGLSRGMLGKHCLDAGFGQFFNILQQTCFKRGVYFQKVDSRKTSQICPSCGVETGKKELSVRTHVCSNCGYITDRDVAAAQVVLKRGLAAVGHTVKMLAEGKFTGIPVKQESSYV

SEQ ID NO: 19874 - protein, 353 aa, unknown
  TnpB Polypeptide
MRWEVYPLTKPDWVCGKKTSQIEGKPRLVYESHAMSVFYRDVMYREDEAGKDAAYLKLYDGHDWKWFRVWLSHTDMEYLRKNWAGKKASAPTLEKRRRKYFLRFSYTEDVILTKTPIKEQIICSVDLGINTDAVCTIMRSDGTVLGRKFINFPSEKDRMYRVLGRIKRFQREHGSAQVKSRWAYVKRLNIELDRKIAGAVTKYAKENHADIIVFEYLETKGKISGRKKQKLHLWRKRDIQKRCEHQAHRNGMRISRICAWNTSRLAYDGTGTVIRDPGNHSLCVFQTGKRYNCDLSASYNIGARYFIRELLKSLPVTERSLLEAKVPAVKRRTSCVYADLKELHIQMEILKAA

SEQ ID NO: 19875 - protein, 288 aa, Mycobacterium sp.
VGPVIRGGLLRAAHPDHQITAHPADCARRNGPGSPDPGHGRHPRHRHRRADHHRIPKPGPAQGDTRRPSQGRPRTFPPHPGSHGHRAVKAKLARLDRRCVHLRREAAHQLTTELAGTYGQVVIEDLDVAAMKRSMRRRAFRRSVSDAAMGLVAPQLAYKTAKCSGVLTVADRWFASSQIHHGCTSPDGTPCRLQGKGRIDKHLLCPVTGEVVDRDRNAALNLRDWPDNASRGPVGTTAPSAPGPTTTVGTGHGADTGSSGAGGASVRPRPRRAGRGEAKTQTPQGDAA

SEQ ID NO: 19876 - protein, 244 aa, unknown
  TnpB Polypeptide
MEFTRSAFDYQWPYTLRLAKMMDTRLNVKWSRTLPKGAEPTTVTVSLDPAGRWFVSLLVRDDAVEHLPAVDRAIGIDMGLDAFAILSDGTKIENPRYGKRQCKRLRKAQRALARKQKGSCNYEKQRQRIARIHAHEADQRRDFLHKLSTRIIRENQTVCVETLNVKGLSARCKPKPDGNGGYAKNGQSRKRAMNRSIRDAAWGMFLTMLRYKAECTDAYFSPSTAGTPAARSAPNAGTIQDASR

SEQ ID NO: 19877 - protein, 526 aa, unknown
  TnpB Polypeptide
MPKARRRKDSGFQTAITKSVFLYGNPNKEKLAVLKRIQLSFTALVNQDIKILEQEKSVFLQIVKNDKKDPDMRQLEKSMRPVGMNSAFCQNAFDIAVTHLSNRLNNIRQDLLSEGMGVFAKSKVLFAMAVMGKSQEVMISSLRAIGKTFYNECADMVEKMEGREFACFMTEFFDRYYSKCMEYKLPVLKNISVPLDSRLMKLEESTSTCMPYVITITDPENKGRRFSVPINSSAHSLHKIKSHVMAGTVMMQIHNGKLQIGWSYKNIRKQPNTKTYIGVDTGIVDAFYTSDGKGIGTMSDVIQFYHEQVEPAFAELSKLRNKKRAIQHYVRHHQLPDDVRRSLIAKIDGLEHMICTMSAPYKKKRHYYNMLNHEIKQSISVYIKELTPDTMTVLEKLDIREFRKSRKTNGQFSMFARGKLQQRLMETLNWKGYDFMEVAPDFTSQVCPVCNHLDSANRNHKEFRCTCCGYTEDADYVGAVNIKKRATDIEIMELCEKYKYNHYLLQNSIKIVYADRFKTYRQVASL

SEQ ID NO: 19878 - protein, 323 aa, Nocardia sp.
LPREYYRALDPFATLGAIAAVTERLILGTGVTLLVQRDVIHTAKEVATRCLSWQLDASTVSIWTVNGRVRNIPFACSPQQAKMLTDHRRGESDLVYRGGNWYLYATRDVPEPEPTHPTGGFFGVDLGIANIATTSDGAVHAGKHLNQVRHRNRRLRKRLQQKGTKSAKRLLRKVSGREKRFAADTNHRVSKTIVTEAQRTSRGIALEDLGGIRERVRLRKPQRVTLHSWSFAQLGTYIAYKAKRAGIPVTYVDPGYTSQQCSGCGHTSRKNRPDQATFVCTSCGFAEHADVNAARNIAARAVAGWAVSHAADDATEPTPARCG

SEQ ID NO: 19879 - protein, 431 aa, unknown
  TnpB Polypeptide
MAKFEQLRYNLSWKGGEIKMQRAVKIRLLPTKEQEMLFWKSAGTARWAYNYFLDANEQAYREGRRITEGEVRKYINNVLKKTTHTWLKEVGSNVMKQGVKDAALALQRYIKGISGKPRFKSRRKSKISFYVNYESLKRAANGFQGEKIGFVKTAVALPKISKDKKYANPHISFDGKHWYLSIGYEIEPEQAELTGESIGIDLGVKGLAIVSNQDASRTKFYKNINKSAKVRRLEKKLRREQRKVSRKLEANIKSHGKNRRPIWKRPLRECRNIQRQNHRIRLLHKRLTDIRNNYLHQTTAEIVKTKPSQIVMEDLNVKGMMKNKHLAEAIAKQKFYEFKRQIQYKAEKYGIKVVEVDRFYASSKTCSQCGHVKKDLKLSDRIYVCPVCGAKLDRDLNAAINLANYNAVVQVLPKAKYPNGVSTGNACHKTA

SEQ ID NO: 19880 - protein, 342 aa, Oscillatoriales sp.
MIVLEYKCKGKPNQYKAIDQAIRTTQFIRNKAIRYWMDAPRELKIDKFALNKYSTTLRNQFPFVADLNSMAVQSAAERGWTAISRFYDNCKKKISGKKGYPQFQKDCRSVEYKTSGWSLHPTKRQITFTDKNGAPPTPRARGAGGGNLKLLGKWDIHTYNVKDIKREGSSGRRKARKVYARKHLKVSRQRNEHAKITARNVCTSNDVVAYEDLSVRNLVKNHCLAKSISDASWYLFRQWIEYFAAKFDKLAIPVAPHYTSQKCSNCGVIVKKSLSTRTHICNCGCELHRDTNAAINILNLGKQARDGQSRSNANGLETSTLLGETLVEQVSRTKLESQCLQT

SEQ ID NO: 19881 - protein, 411 aa, unknown
  TnpB Polypeptide
MVEDSATRTVPIKLDVDESAAGLLHQTTDYFLDAANYVVNVAWEPDWKITSKTKLHDLTYYDVRDDSPLPANLVQAARNRAAEAVKGVVERWKDGKKASKPYFTSRFASYDARTVTVNADHCTLATIDGRVTADFVLPDEQRDTPHSAYLFNDDYDVKGATLHYDTVEDCFYLHVRTKPTVENDNAGTGDAKHVSVLGVDLGITNIATTSTGRFWSGGELNHWHREYEKPWRSPTNWDSMGTRERSASRSQANRTFRTDTSHDLERTGGGALENDCTHMVFEQLNGIRERLPHAKAVHKWAFHRLYEYVTYKAESEGLVVRQINPAYTSQRCSKCGFTHEDNRPHNNGQDEFGCLKCGYDVHADYNAAKNIGLKYLRDQQKSGRGGAPVGVRLNSRTLNVNGEYSPTVING

SEQ ID NO: 19882 - protein, 415 aa, Acidilobales sp.
MLRLLPDEGVKARLKILCDISSKVWKEINYAMRRQFFETKKVDLKQTYKEFYERYKKLIGSATTQQVLSKNDEAWRSLFSSLKARKEGRLPPFITRVNPPGYMKRGRIRVLWAVLRKDQYRIGGGYIVIKGLGAIGSIRVRYSGKIHIAGRQSKAEIHYDLNDKKWYILYISYEVEEKVIKNNSFRISLKPLGDRETCIDIGINNLLAIYVEDRSALLVNGRPLKSVSFYWRNKTSEYQSMLNRYGLKSSKRLRGMFKRWEKQVKYYIDWAVRNSIEWLYQRGVKRVIVGYPKYVSQGPGKGSKVNFEIVHICSNGYLLRKLKEVAEEYGVVVEYVDEDHTSRTCPICRAIENHERIARGLFKCYKHNKVFNADLVGACSILSKRKSITPSPALCRIGVTCLRLGVTLNRGKPGM

SEQ ID NO: 19883 - protein, 364 aa, Succinispira sp.
MHKAYKFRLYPTKEQETIIAKSIGCNRFVYNHFLAKRKEAYEEYDTTINYNGCSALLTKLKKEFPWLKEPDSTSLQTTLKDLDSAYQKFFKEKKGYPKFKSKKNPVQSYTSKCNNSSIRIVDNIIKLPKLGLVKFAKSREVDGQIISATIRRNPSGKYFVSVLVDVEIDQLPVVGQSIGVDLGVKDFAILSTGEKIHNPKYYRKLERKLTKLQRSLSRKTKGSNNRNKARIKLARHHEKIANCRRDFLQKLSTRLIRDNQTICLEDLQTSNMIKNHKLAKSIADVGWSEFRSMLDYKANWYGRTISVIGKSFPSSQNCSVCGYRNREVKNLNLREWECPNCHTVHDRDVNAANNILAEGLRLLA

SEQ ID NO: 19884 - protein, 442 aa, Helicobacter sp.
MKVNKGFKFRLYPTKEQQDKLQHCFFVYNQAYNIGLNLLQEQYETNKDLPPKERKWKKSSELDHAIKHHLNAMGLSFSSVIAQQARMNVERALKDAFKVKNRGFSKFKNSKFAKQSFLWNNQGFSIKESDDERFKTFTLMKMPLLMRMHRDFPPNFKVKQISISCSHRKYFVSFSVEYEQDIVTIKNPKDCVGIDLNVFDIACSCGVNNPEKLTDFKRYLLDMEELLGIKLDAKTHATQLIPTYSKLYSLKKYSKKFKRLQRKQSRRVLKSKQNKTKLGGNFYKTQKKLNQAFDKSSHQKTDRYHKITSELSKQFELIVVEDLQVKNMTKRAKLKNVKQKSGLNQSINNTSFYQIISFLDYKQQHNGKLLVKVPPQYTSKTCHCCGNINHKLKLNHRQYWCLECGYREHRDINAANNILSKGLSLFGVGNIHADLKEQSLSC

SEQ ID NO: 19885 - protein, 361 aa, unknown
  TnpB Polypeptide
VKADQENRKINNKSLTRSELQFMMKKSVPYILANSINIVIFKYITARDAMFRSIKAKHENSNKVKLPYKEKKFYNTIWNYQNIKVYKEEGILTLSKPLLSNNHKQKPMKLHTKNIPDNIVEIELVYRNGLYLLIKTKNINDNVLIQSDNESAIDLGEIHSITSIDNNENAIIITGRKLREIKQLRNKHLSKLRSRISKCTKYSKQYKKYSRAIYNLKHKTDKKILDIVHKTTKYYLDYCIKNNVRKVYYGDLDNCTRNTKIENRTSKKVRQKLSQWNYGLLILQLTNKLTRYGIELVKVKEYYTSKKCPVCRSLNTPKGRNYTCECGYVMHRDVNGAINILNDNSQFNVNKYKKLKYLQIT

SEQ ID NO: 19886 - protein, 309 aa, unknown
  TnpB Polypeptide
MPGYCKADKKTFKVTNQDAALYPTKDGNGCLLKLPKMDHNRIPLSYLKDTSNLREIVFKPYYGKYIMTFIIEDMVPPFYPDLPNMAGMDLGTDNIAAIACTDGSSVVYKGGAILSANQFFAKQKASAVSILTKGKKHRHASSAFLSNLSLKHDCFLKDQMHKLSTAIVRYCIAHRIGILVVGTNRLWKQHASMSKENNQKFVSIPHEKLRWMISYKALVAGIEVIWQEESYTSKADCTAGDLIPVYGKEKTHPVFSGRRIERGLYLCREGYCINADCNGAANIPSKSVSACMGCMQRFPIFVNTCFCRI

SEQ ID NO: 19887 - protein, 466 aa, unknown
  TnpB Polypeptide
VDAGVVVYRSARVGLRLSGAQRQRCFGLLAAAGDVWACLLEINWWRWRRGVAPLVGYQALCRELAAAGPGTFGELDSTGARSVLRRYSEAWFSAAKRRRAGHEQVRFPRRRRRLMPVRWYHGTFSIDGRRVRVPTALGCAPLWLRLDRDLPYPVEAVRSVTLLADGGRLWLDVTAEVAVAAYPPGQGPDPGRVAGVDLGVIHPYAVAGPGGQALLVSGRAIRAEHRMHLADTKHRHRAVAARAPKPGQKGSRRWRKTRRRARLVEARHRRRVRQAQHEAAKQVVAWAVAHRVGTLTVGDPRGVLEINTGRRHNLRLRQWQIGRAITILVDKATLAGITVHLVDERGTSSTCPTCRQRISKPRGRVLSCPHCHTTGHRDLLAAATIATRTPGGAPITCGTITLPQVITHRRAGRHLPGTSRARRDPRRPHPGPAPGSVGQRWPAHPTGRESLDRTRGRGSTTPPATR

SEQ ID NO: 19888 - protein, 254 aa, unknown
  TnpB Polypeptide
LAYKIVNLAIEKGKAIVIENLKKLKKGVRGDRKAELRKRLHQWNLKKFLQKLKRVAMLKGVEVIEVNPAYTSVIGMLKYAPQLNIDKDIAGAYVIGRKALGFKEDMPENYERLLKDKAYLEFALKRYEEREEELKELLEEETNQYKRNALESELRIVENAKKVLTHLIQSLQSEPSGCEGAYGRNPEQGETKKVSQSAWQVLKVAFLFPILGKVLPRDLSPLKPVLVEGVWDRVRHSNGLVPLSAGGTVPTKDF

SEQ ID NO: 19889 - protein, 365 aa, unknown
  TnpB Polypeptide
VWARVIRSAKRKTDKWVGFISDIEHAEKTGEWFPYTVRLKLRDGKIYAQFSREEKLPEVTITKDNGVIGIDINAYPFHLALVHTTKDGNLKKYEKISLDKLLEGSSDKREYLSWQVAHQVVEIAKREKKALVVENLEKLPKGKRGDGLPKLRQKLQKWVYKGLLQKIEIVARRNGIQVIKVNPAYTSIIGKLKYAPLYNIDKDTAGAYVIARRGLGFKERLPKNYRKLLEDKEFLSYSVARVEDRIAKLRKEIETEKNEYKRNKLRSDLKRLKGKLKLLLGSLSDSGESESAAQQTVNRKMERVRGLTHVRQKSWQVLSVALALSCLESLRDFSPLKRPLISRDWVGVAKQKGLVPPYLVRGRLC

SEQ ID NO: 19890 - protein, 369 aa, unknown
  TnpB Polypeptide
MLKAYKYRIYPNKDQEMQIQKTFGCCRFVYNHTLFYRKELYESKKESMNKIACNNYVNQILKKEYEWLKEVDKFALTNSVYNMDSAYQKFFKEHTGYPKFKSKRDNKKSYITNCTNNNIEVSFENHKIKLPKLKWVKAKTHREFVGKIKSATILQTPSCKYFVSVLVETEHIPMESTGCMIGIDLGVKDLLITSNREKFDNIRATKKYEDKLTKEQRQLSHKVKDSKNWNKQRIKVARLHEKIHNTRIDNLHKISHKLISENQVIVSENLAVSNMVKNHNLAKSISDCGWYELTRQLAYKAKWNGRKYLKVDRFFASSQICNCCGYQNKQTKNLLVREWICPKCGSVHDRDINAAINILNEGLRLLNVA

SEQ ID NO: 19891 - protein, 398 aa, Streptomyces sp.
MTTTHVKRAFKYRFRPTDAQAAELSRTFGCVRKVYNLALAARTEAWARGERVSYNQTSAMLTVWKKAGELAYLSEVSSVPLQQTLRHLQMAFTHFFGKRAKYPCFKSRKKSRKSAEYTTSAFRYRDGKLTLAKMAQPLDIVWSRPLPEGVSPSTVTVSQDAAGRWFVSMLCEDPTVVPLPATGAAVGIDVGLTHLLTLSTGEKIANPRHERRDRARLALAQRRLAKKAKGDGANRHKARREVARIHARIADRRRDHLHKLTTRLVRENQTLVIEDLTVRNMVRNRSLARAISDAAWSEFRNMLEYKAVWYGRDVIAVDRWFPSSKLCSACGRLAGSMPLTVRTWTCDCGTAHDRDVNAAKNLLAAGLAVTVCGAGVRPQRSTPGGQSAMKQKTPRREP

SEQ ID NO: 19892 - protein, 295 aa, Haloferacaceae sp.
LELYYDQSSNQFRAFQPVTVDDSRLDIPLASEEAALDIGANNLVACTTTTGQQYLYHGRDLFDQFHDTTREIARLQSKLPERRNLSESRKTSSSGRLREGRYSSKRIRQLYHGRTRRRDHAQNALVRDLLERLYEEGVSTVYVGDLTDVLETHWSVRANEKTHNFWAFRAFLDRLACTAEEYGITVEVRSEAWTSQTCPNCGSTTDTIRHQDTLTCSCGFEGHADLVASESFLRRHQNSSRSDWRTRHGVSRQRHTDVPRPMARPVRFEWDSHEWLESPRSHRPKEVRTNRSIRG

SEQ ID NO: 19893 - protein, 462 aa, Rhodovibrio sp.
MCLQAVNYMPSTSEVVHFRFPREYRPSIIAAMATLKATRLRIYPTPEQEQAMLRIAGCCRLVYNLALEQRRDFWRQHRRKTGTAISWFSQKRELPALKAAAPFLSEAPAHCLQMALKDLDTAYDRFFSGLGGYPRPRRKGEGDSFTFPDPGQIRIDVAKKRLILPKFGRRATDAGALRIRLHRGLYGALRRVTISREGRHWYASVLMRTKRNPPRLAAPVAASDVIGLDRNVAAPVVASDGRRFGCVIEGPRERSRQRRLARSLSRKCRGSKRRQKARLRLLAHKSRMARRRRDMIHKITTDIAKNHRVVVIEKLRVLAMTASAHGTAEAPGRNVAQKAGLNRAILDVGWGEIRRQLAYKLAWRGGLLLEVAARDTSRSCAACGHVDAASRASRDMFRCTACGHEDDADVNAAIEIRRRGLIALGLPPAGTVGAARGALCDSMARNREKKNDGINLPAPAGR

SEQ ID NO: 19894 - protein, 387 aa, unknown
  TnpB Polypeptide
MLKVKTYKYRLYPTKKQVEKLQWTLDICRMLYNSCLLDRKNHYEQTGRGLNRIEQQVMLKESKEKFAFLNDIHSQVLQDVLFRVDKAFQGFFRRVKRGEKVGYPRFKGEGRYDSITYPQEPAFKITEKGLKLSKIGTIKIKMHRDMQGKVKTCIVKKENDKWYACFSVEYEPVKRPVSCKTIGIDVGVDSFATLSDGTKIENPKYLVKSEQRLIRKQRQLSRKKRGSSNRKKAKKALAKLHCKVRNQRSDFHHKLSHKLVDTYGLIVVEDLNIKGMVKNHYLAKHISDAGWGQFLNYLTYKAEEAGVSVVRVTPHHTSIICSRCGNHVPKTLAVRIHRCSFCGLVIDRDYNSAINILNRAGTVRINAWGEDWLQFSLNQEAPSVREG

SEQ ID NO: 19895 - protein, 247 aa, Shigella sp.
  misc_feature (3)..(3): Xaa can be any naturally occurring amino acid
MSXWYISIQTESEVSTPVHPSASMVGLDAGVAKLATLSDGTVFEPVNSFQKNQKKLARLQRQLSRKVKFSNNWQKQKRKIQRLHSCIANIRRDYLHKVTTTVSKNHAMIVIEDLKVSNMSKSAAGTVSQPGRNVRAKSGLNRSILDQGWYEMRRQLEYKQLWRGGQVLAVPPAYTSQRCACCGHTAKENRLSQSKFRCQVCGYTVNADVNGARNILAAGHAVLACGEMVQSGRPLKQEPTEMIQATA

SEQ ID NO: 19896 - protein, 508 aa, unknown
  TnpB Polypeptide
MRASTPSFVVSVKVHLPEQIENHLEKSFNITNSAYNEALGLGLRRLKAMRNNPRYQELLEARRSIAESIERLKKSKGLAWQLKLYDKALSSLRLDYGLSEFSLSKHLTNRRNEPNSPYRHLNSGELQVIAKDVYQTLEKVIFYKVKLHKVRFRSKYGLNASFRNKVNSAGTRIVPSEKMGVAYILFIHKKSTFVEISTKVFNEYQQKSLMRAEKIKYVQIVRKTIRGKKMYYLQIVCQGYPLTKVVKGDGVVGIDPGVSTVAYASSDEVSLVDLVPENVTSREKLIKSLDRMIERSRRVNNPDCYHPNGKIKRGVRFKRPTNRAKRLILRRQKAYRSLTEERRKLQGELVNRIVSQASIIRMEDLNVKGLQKRSKDIRINPKTNRPYSKKRFGKAILKAAPSYFREALKTRANTLGITFELINPQKVKPSQYNHITESFEKKTLSTRVFDLSSDWTVVQRDLYSAFLIGHIENGQYDQTISKEFPNFYQKMQEFLAKQKPSRLDWYLK

SEQ ID NO: 19897 - protein, 230 aa, Okeania sp.
VVWNDSLAYCQQRYKSGEKKSDLSELQKLFITQAKKTEEREWLSEVSNIPLQQSLNDLNQAYQNFFKSTKGQRKGKPVKPPKFKSRKSKQTARFRKGGFKIGQHKVYLAKIGKLKIVWSRELPAAPSSVTVIKDSAHRYFLSFVVEIQPEILPKTDNSVGIDLGIKTFATFSDGTKVDAPKPLKERIKKLRKLSKSLSHKTKGSKRYEKARVRVAKFHAKLKDTLDRFST

SEQ ID NO: 19898 - protein, 224 aa, Okeania sp.
LLVKAIEAEQLPVHPLLDERQYETFGIDVGVKQFASIAKQEKRDSEVVSLPDSIKLEQLKMAKFQWRNRKKQLGGKGKQPSKNAIKYYKKLAKYHDRVKNVRRDFIEKTTTKLVGKVKHVCLESLNVKGMMQNGKLAASIARLGFYEFRQRLTTKIVSSGGTVVLADQWFPSSKTCHNCGCINQELKLKDRTFNCPHCGMRIDRDLNAALVLSQYGEVNENARG

SEQ ID NO: 19899 - protein, 341 aa, unknown
  TnpB Polypeptide
MDLWEKSGEKAGKPRLAYENYAMPVFYRDVMYREEKEGKDEAYLKLYDGHDWKWFCVRLNHTDMEYLRRNWSGKKASAPTLEKRHHKYFLRFSYTEEVTLTKTPVKEQIICSVDLGINTDAVCTIMRADGTVLGRKFIDHPSEKDRMYRTLGRIRRFQREHGSAQSRGRWAYTKRLNTEMGRKIAGAIVKYAEENHADVIVFEYLEMQGKISGKKKQKLHLWRKRDIQKRCEHQAHRKGMRISRVCAWNTSRLAYDGSGNVSRNPKNHSICVFQTGKQYNCDLSASYNIGARYFIRELLKPLPVTERSLLEAKVPPVKRRTSCVYADLKELHLQMEILKAA

SEQ ID NO: 19900 - protein, 513 aa, unknown
  TnpB Polypeptide
VVKTIRKEGALANQTYRAFVARPSHVLDLDGEVLDTELIMAELASEVRSLSAYATYVVRNDTKLKGELARATATAPAEAGRQAGVVMPDFLVPDKIDEDGNPLTDKSGEPVKLKTGRSRKERLFRYNVVAEHRSWQERIDAANGESSQYISQGWKRTVDASAPSYGEGTVNLGAVDHSYAAIENNPFADGPVVKVENSQPVFIFTVVTDNPVVQFSSDYVVGVDVGINDYATVVVRNSATGRIVHETTLSQRVHSLWNSVRASERQVRTLNKKADKLLYDRQAHMCAIDEGQLHREAASRKKRELAILAAQEIAYLSHAYGNAVVAVEDLGWVANTMQNGRWNRGALVQWLTHYVAQNGGWVVAVNSANTSQVCHLCNEQVTHPTHQLSVCRKHGEMDRDVNAAANIAARAVPKVEKARKTRAKNRKLQKKASLKTPVARETLKYPGRDRTKNVPTPQRKNHTSKEVNLPLSPARVVMTSVLADCGTYGAVETSQAAINQGNVTHECRLYSLN

SEQ ID NO: 19901 - protein, 278 aa, Thiothrix sp.
VRQAAGYSLESKPSLKPFNCYCFKRPSRPVLAIHWSQSLPSNPSTVTVSKDPADRYFVSCLCEFEPTLLPVTNKKVGVDVGIKDLFVTSDGFKSGNPRHTAKYAAKLAKYQRRLAKKKLGSKNRLKAKHKVARIHAKITDCRSDNLHQLSRRLVNENQVICVENLAVKNMVKNPNLARHIADAGWGEFTRQLEYKSAWAGRTYVEIGRFFPSSKRCSCCGFVKDTMPLDVREWECPECGATHDRDVNAAHNILAAGLAVLAFGENVSGDSISVLSSSS

SEQ ID NO: 19902 - protein, 205 aa, Thiothrix sp.
MKVKRAYKFRFYPDQQQEKLLAQTFGCVRFVYNSILRYRMDAYYQAKEKVNYVGANARLTAIKQMPEFAFLNDVSSVPLQQCLRNQQTAFKNFFEGRAKYPVFKSKKHRQSAEFTYRAFTYKDGALKLAKCDKPLAIHWSQSLPSNPSTVTVSKDPADRYWLFTGVKAFPQTLQLLLFQKTQQTGTLYRACVSSSQPCFPLPTKR

SEQ ID NO: 19903 - protein, 473 aa, unknown
  TnpB Polypeptide
LRLGGFVRGFSQGSGHVARFTRGTQRVRCLRTKDVRVDGSMDKRMHACARLNCGDLAQLVFRSGKIAQKLLAHLCALCYTCKRNRIRIRLSTMQRKAFLYRLYPSRAQARRLAAILETCRFFYNDCLAERKTAYQERGETVGTYAQLRRVKERKATNPWAKDVHSHVLQTVVQDLAKAFDAFFRRVKAGETPGYPRVKGRNRWRSFGFKQHGNGFRVDGRRVKLSGIGRVAVRWHRPIEGQIKTLRISKQAGKWYASFSCVVDTPLPLPPTGTDSGIDVGLSSLITTSDGAHVAHPRFYRTAQRQLRVAQRRVARRVKGSHNRRKAIVLLQRQHARIGNQRKDYLNKLAHTLIGRYDRIALEDLSITRMVHGKLAKSILDAGWGYLVQRLHDKAASAGRVVVLVDARYTSKTCSGCGARFAGLTLKDRWVDCVCGLSLDRDHNAARNILNRGGQLRWSSSSPRGGLGQEAAGL

SEQ ID NO: 19904 - protein, 388 aa, unknown
  TnpB Polypeptide
MQQLVKARYRIRIKPNKKQLQQILQFAGCSRFVYNHLLSIQNGLYESNSKLMNTKEMEAEIKALKEEFSWLTDSSSAAIQQSRIDLQRAFTNFFKGLKGEYKQKYGYPKFKSRRNQISFRLPSNDEKVVVIKGNKLKIPKIGLVKIKTRHIPEFLKLTSATIVVEPSGKVYTSLTVDKCVTQKAKTGNDVGIDLGLESFIALSNGIKIPPFNYAKSNRDKITSMDRKLSKMRDKLKKAGINLYEAKNYQAYKKKVAKCKTHIANKRKDALNKLTIQLVTKYDFIVVEDLNVKGMSKNHKLAYTIQDASWSTFVSMLEYKCRWYGKVFHKINRFKPTSTVCSSCGTKHKEIVNSLSVREWVCPDCGVYHDRDINAAVNILNIGISELFC

SEQ ID NO: 19905 - protein, 379 aa, Moorea sp.
LYNSIVILTYCYKIKPSPEQIAIMERWLELLRRHWNYALGQRLDWLNRTRSPIDRCSLISEPIGEIPEPVNYYTQQAALKETKRLFPEYKQIYAETQQVNLQRLNKAWDRWRKPDANGKRGGRPRFKKAGELRSRSVTKGQSFVFPRINSSKAGAHLADGILKLSRIGSIPVVMHRSLPIGFTLKQCTIVKKADGWYCCISMKDDTVPELLPIGSVKSAVGIDVGLEKFLTTSDGEAVPIPQFYRKAQDKLAQAQKAMSRRVLGSNNWKKAKHKVALMHLYLTRCRKEFHYQVAHWLCGKYDLISHENLNIKGLARTRLAKSINDAAWGAFLEILQAVAVKRGLLVQEVNPRGTSIECFNCGSRALEKFKRSRSLLFEL

SEQ ID NO: 19906 - protein, 467 aa, unknown
  TnpB Polypeptide
MPWNNKNKKDKIIIALKFKLLITSKNQKDQLDDLMREFGSVYNQYLEHWSKSGRYSKTFLEKHQIKANILANNRQCSRDVANESIKSYLARRKIDPRARPPSPVKGLMTARLNYKEGYKILACNRVRISVRKGVRLVLEFIGSKRHMTLVELGLAEALKFGSANLKKIGKKYYLFVNVDLGKKPIFNDSKGYTFIGIDNNTTNLALSAVNLNGEVLGSFIIDFSPLVHQRYKFFKIRKRLQKVNKTSMIKKIGRKQQKITTHVLHLASKLAVRWISKFQNPVVIFEDLKNILDNINWGKKNNLKYHNWGFKKLQDFITYKAFIRGHPIYSVNPHYTSQNCVLCQTKKESHKRKRLFKCSHCGHVDHRDRNASLNIALKGFIDLYSGSHKMNNGLKTIIGYVNLLSKFKKVPSVKNFPMIRKVRLLAADNVDLSASAMLNGAIHTAQSGVKSLDNSRTLTQCLTSRGL

SEQ ID NO: 19907 - protein, 411 aa, Streptacidiphilus sp.
MAQQVKRAFRYRFYPTYEQAVELSRTFGCVRLVYNMALEARSQAWHNEQRSIGYVESSAMLTAWKKTEELAFLAEVSSVPLQQGLRHLQHAFSNFFGKRAEYPTFKSKKKSRASAEYTASAFRLRNGQLTLAKMREPLSIVWSRPLPVGVEPTTVTVSKDAAGRWHVSMLCVDTVESLPVTDAVVGADAGIASLLTLSTGEKITNPKFEYRDRERLTKAQRQLTKKQKGSKNRDKARLKLAKIYARITDRRRNHLHTVTTRLVRENQTIVIEDLAVRSMVKNRPLARAISDASWAEMRFMLEYKARWYGRELVVVDRWYPSSKLCSHCEHRSAKMPLNIREWTCGNCGTMHDRDVNAAINIKQEGQKIVAAGLAETQNACGADVGPQRRTPGGQSATKQEGRRATAGIPAQ

SEQ ID NO: 19908 - protein, 209 aa, unknown
  TnpB Polypeptide
MEYYVSLCYTDVEEVLFPLTYNETGIDLGIKDFIVLSNGEKVENPKYLKKSIEKLKKLQKQQSRKTKGGRNWIKNRIKIARLHEKIANQRMDFINKLSTRIIREYDIICIEDLEVDNMLKNHNLAQSISDVSWSKFTTQLEYKAKWYGKVIKKVDTFYASSQTCHCCGYKNEETKDLKVREWTCPKCHSNHDRDINASINILMQGMLAI

SEQ ID NO: 19909 - protein, 316 aa, unknown
  TnpB Polypeptide
MRVSPEPKAYQELLDLMKRYRDALNYSVRVIIESRALTLGKAHKLLYNTLKERFDLPSRVAQDCYREAIAIAKSWLSNPNRGRVPTAKAPRTWLMHRCSYRVRGNYVELLDGLKMRIIGWDRRYDSYPSGDARLILKDGKFVLEISKRVPRAAKYNPRGVLAVDINEKHIAVGNSVFEYRFETAIGKALRYRCLAESLQKKYSSTRYMAWLRRRGIRKRIRYFHRKARSIVEDWAKKTSHKIAVLAKQYQYAVAREDLTGLVESLRKLPKDYRVALLILSYRRLELWIDWQAEKHGVPLIAVEPRGNINHVPEVQC

SEQ ID NO: 19910 - protein, 419 aa, unknown
  TnpB Polypeptide
MIRLVLVHQAFRYELAPSAEQHAALANHAGAARWAWNWGLAVRRKAWQRRRQTLDAVELHRLLNRLKRTPLLAWLYEVSKCAPQEALRDLDRAYANYWRGQKNGQRVGVPRFKKRGRCPERFRLTGAIRVEHGGVVLPRIGRVATKEATDKFRGRILSATCRREADRWYVAVNVEVERRDPAPVDGPVIGVDRGVAVFAVCSDATNIDGPRALSRSLRRLQQRSRAVSRKQPGSTNRRKSALALARLHRRIRNQRLDALHKATTALAKTKSVIVVEDLHIAGMVRNRHLARAISDQGWAEFHRQLAYKCQWHGSRLLVAPRFYPSSKACSSCGLVKAELPLNVRTFRCEACGLVLDRDQNAARNLAALAASGSITNGVVGSSLETENACGGESAGPAVTGRVELASAKQERANQRLANA

SEQ ID NO: 19911 - protein, 296 aa, unknown
  TnpB Polypeptide
VLTNQNFKLKDGVIRFPRTFQGFTVKAIFASQPEAVFKQARIIPHGGEIDLELVYELPKVEEKGDNGKYAAIDIGVDNLAALAWNTGEQPVLLKGTPLKSVNQYYNKQMAKRRSICELMNGRHSSKRIARLTAKRNRKDEDYLHKASRKVIDLCAEQDVSVLVVGKNKGWKQEAKLGRRVNQSFVQLPFARFIQMLQYKAEAIGMKVVLTEESYTSGTSFLDGEAPTKDHYDKSRRIHRGLFQANAGRKINADINGAYQIMRKVFPNVNADGIEGVALRPVVVALSMSARRSFGCA

SEQ ID NO: 19912 - protein, 386 aa, Lactobacillus sp.
VKIVIRVQKVRLYPNQTMKKVIDDLCDYRRYCWNRGLALWNDMYDSSLVLDDKKLKPSKRKVRDELVANKEDWQYQLSARCLQLAISDLGKAWSNFFNKAMPDWGKPKFKSKKASRQGFKTDRAKIINGKLRLDKPRGKTWYDIKFKGAKSLAGDLKVVSVYRENGKYWASLPFEVEIAKKNKTSNKTAVDINVGHFNYTEGKVNTLPNHLKKLYKRIKYYQRQLARKRIVNGRKATQSHNYVKTRAKLQRDYRKVANIQHDIIHKFTTKLVSDYDKIAIEDLDVKKMQMTHVASKGLQRSLFGYFRQVLTYKAEWYSRYLKLADKYYPSTQRCSNCDHIKTGEDKIGLDGNQKYKTKHNEYICYACGFEMDRDENAVKNLLALLD

SEQ ID NO: 19913 - protein, 425 aa, Acidilobales sp.
VSYPVRGEEPVVETLKVRAVPEGSCELLLEFLRLYRDAVQLVVNELWNLDGKLSKKKLHEAFYEELRKLGLRAHHVKQVYTYAKSIVDSAKSNGGKKPVLRKLTARVDRYDYKLDLDSMTLALKLHNNHEVRLKLLAPRERVEKFGGWGNYELVVKYDGEEFWVSVYFKRVVKPVKPRTVMAVDVNFDNLTLATFTLDGRVVKLKRYKTPLRKILTHRIWVERIQRRYPRSWRYVKGVRRAIEKHGERIRNISWDYSHKIGDLIADLALRYRSVVVLEDLEKLRDNAKKGREFNKKLTHWFYRRIQFCVEYEAKERGLEVARISPKGTSSKCPRCGYKLADNSYRTLKCSKCSFIGDRDVVAVVNLYKKFTSKYSRCGALGVPPNAPKPDEAPSGMRGNKDEAMKITSTHINLMRAEPLIHTYIM

SEQ ID NO: 19914 - protein, 368 aa, Streptosporangium sp.
VAQIVKRAYKYRFHPTPGQAEELARTFGCVRLVYNKALEMRTRAYTLEGRKVSYVQSSAALTEWKRTEELTFLAEVSSVPLQQALRHLQAAFANFYAKRARYPTFKSRKKSRASAEYTRSAFRWRDGRLTLAKMDAPLNIVWSRPLPKGAEPSTVTVSRDAAGRWFVSLLVEESIRPLDLVESTVGVDAGITSLVTLSTGEKIVNPRHERRDRRKLAKAQRSLARKEKGSANRAKARLKVARVHARITDRRRDHLHKLTTRLVRENQVIAVEDLTVRNMVKNHSLARAISDASWRELRSMLEYKTAWYGRELLVVDRWFPSSKLCSACGTLQGVMPLGVRDWTCACGAAHDRDVNAAKNILAAGLAER

SEQ ID NO: 19915 - protein, 428 aa, unknown
  TnpB Polypeptide
VATRAPRLRTYTVNHGVDPEALLPLLQAYRDTVNTTLEELWGQVEWEQRIIPGKKQWRLLPKFKVDIHSNEYKRELRAKLLDGWPYAAHWVDSAIKTGYSIFKSWRKNYVRGDRKRRMPVARRLFARVKQTLVKLEGDKLRLTLKPGEYVYLDLSHRYFKLPSEVSSTGIGEPVITAEKVHIPIHFEDWAQSGGKPQVAWDFNLHSLDGYSPETGWVRIDTSRLASVHISSFEKRRSVQRKASRSKKARRILAKYSGRERNRARKHQIEVARVITSVSGAVGLEELSKQGMFTRSRVWNRRITRSDWRSIARILEEKLGEDKVVELDPYNSSTFCSRCGWYNNRDLNGADVFVCGGGCGLRIDRQLNAAINLYMRLRFGYTVSWVDGRKHIELRMGGWRSPEGVVGPSCFSLLTGWVRPDGGGAEGEQ

SEQ ID NO: 19916 - protein, 492 aa, unknown
  TnpB Polypeptide
MPDFSLILDQDLAKIDEDIEPFWNSLSTAIHCSLWQPLKYESPEPDSLSSKNYQEVESNFWKKQIVPNNSTLKPLSPSERRLSIPTMENETQSVITSKKIRIYPKHENLWFEALNLFRRAYNLSIEFMRKGRKPSSEFRTQICDWCIIECEENETNYNSNLVQAAYRKACETRTAVLKKRVKGEKAEMSFMSRNAPQQYFVVPRLSSNKQIFPRILKGCKWTEEAPKEAVGQTVIVTYTNSQWKACVKLNQSVEQTKTQSLSIVALDPGVRTFQTALSFDSAVSYGEGFVNDRLVPLMLELDALLSARDKLHREDKSKQWVKDRLKNINRRIAKVRARQQNLVDDLHRRVAYDLVSNHDVILLPTFETKQMVSRRDETRKRFLRRKTVRGMLGLAHYKFKQTLKWMAKKYGKTVIDANESYTSKTLWDGSILKCLGGKASILFQGSIVNRDIHGARNILIRFLTKVIDGLSPQGAYPLNITKAGFCGFGVFK

SEQ ID NO: 19917 - protein, 408 aa, unknown
  TnpB Polypeptide
MQRSEQHIFKDDHFKPWCIKAKDLYNKVLYYYRQSIFGNIEKFTEYELSGLFARYNEETFRALPANTSQQIIKAVFKNIKSWQRAKREYDVNPNKFVSKPKMPKYKKILSEIYFTNRQAKLKNGYVHFPKVININPIKTNITNINQCRVIPKSNHFVVEFIYTIKETPIKEYDGNWMGIDVGLNNLATCVTKDAAFIINGKPIKAINNFFNKRKKQLQSSLCENYVTSKRLNRITFRRNQKIKDYIHKASKKVVEIANSKNITKIIIGKNDNWKQNINIGRKNNRDFTSIPHATLIEQIKYKAMVLGIETIVTQEAYTSKCSALDMEKICKHETYLGKRKKRGLFVTANGKLINADCNGALNIARLGLSVTGNEIVISDSVMSCVVQPSKIKKINKVIQNTTPWQGKV

SEQ ID NO: 19918 - protein, 331 aa, Pelotomaculum sp.
VQERYLDARTNANRAKQAGHGHVRYPWRQKKNYPTRWKKDGFTIQPNGKIELSMGIHNGKREKPIIVHVHRIPPRKVKEIELVWDRKLTLAISYDDGTQPRENLNRGIAAIDMGEIHGIAAVADTGEALVVTSRKLRSVKRLRNKKFKEIYQKRSRCKKGSRKWKKYTCAIARIGSKTDNQQRDILHKMSHKFVAWANDQGVKTAVVGNVEGVQRNTSRRNKKNLKQKRHSRGLNQKMSQWPFGLLLAYLTYKLAALGIDLIKIDESYTTQTCPVCGRKKKPSGRTYQCHCGYICHRDVHGARNIYAKHKYGEIRTLDWSVENIKYLRPAS

SEQ ID NO: 19919 - protein, 413 aa, unknown
  TnpB Polypeptide
MHILVLQMLVKGVVFRLEDELPPEAKFLLEDFRLAVNNAMRAGLQARVTSRNALSKLAYKDFRKEHPKMYAQHLVSAFEAAGGILKNYRRRVRKGEVGNVPYVRRLFMKAESQAYRLDREKGIIDLPTRAGCHVMLKLVLSNYHRAHLGDRSYSLGSLTLLPDRVIVAFRKEAPRPYVPESALSLDTNERSLDGVFVKDDGVKAVKAEFPEIAVIQQRRHDRRKRLQKKKAHDRRTSRRLCKREGAREHHRIDYRLHQVANAVLSFAEDKRSIVVLEDLKGIRPRRNKELNRRLSMWPRRKLHQIIEYKAQWNGIPVSMVDPRYSSRTCPTCGRIQDSRMGAEFKCECGWHINAAMNLLQTAISKGMAGGLRFNPGAFQHDVMMTLYDPEKGARSEPNGTSCAGEAPSEVITR

SEQ ID NO: 19920 - protein, 411 aa, unknown
  TnpB Polypeptide
MIVQRVEKHMIEKNHSHYDMFCEFTHQSKNLYNHANYLVRKEFTENNKWLRYQDLDKILKRDIDYPDYKNMPTAQCAQQTLQLLEKNWKSFFVSIRDWSKNKNKYSGRPKLPKYKSKEGRFALILTNQQVKQTRSLLEFPKSFQCFTIKPRCVHLSNFEKLNQVRVIPHNQSFCIEIVYSVSIDDNTLSDNGRYMSIDLGLDNLATVVTNTGLQPILVNGKGLKASNQYYNKQKAHYQSIAKQMNNKRYTNRLSRLTRKRNFKIEDALHKISKFIVDTALENKITMIVIGNNKNWKQSISLGRRTNQSFVSIPHQKLIEKIMYKAQTHGINVVLTEESYTSGTSFLDGEQPKKEYYNNSRRKYRGLFVSNNRKRINADVNAAYQIMKKVFPNEFSDGTEGVVLHPVRVNVM

SEQ ID NO: 19921 - protein, 405 aa, unknown
  TnpB Polypeptide
MRKEALITKLVEKHKIYKSHPSYSKLDEMSRKANNLYNQCVYFAKHSDNLSEDLKNLDKVMKSFPDEHDNYRSFGHAQCAQQILRLFQQNLRSYFASIKDYKKNPSKYTGRPCFPKFRKSGERFQVIFTNQSAKLDDQVVNIASKAFENKLFIKLRTNSIKKICQVVFAPRNDYFLVYVIYDTEDSTISQRSNKVAAIDIGLSNLATVTFSEEDDPILYRSDLMKINHDFNQITSKYVSILKKTQNQYTSKRRNRLSEKRSSLIEDRLHKLSREIINDLSHRGVSTMIVGKNTGQKINNKLKNFVQVPLFRLIKMIKYKAELAGITFIQVNESYTSGTSFLDNELPTKEFYDKSRRKYRGLFLSNDSRRINADVNASFQIMKKVYREFTYTNSVKYANPTVKTIC

SEQ ID NO: 19922 - protein, 398 aa, unknown
  TnpB Polypeptide
MKLVEKHKIYKAHPSYSKLDEMSRKANNLYNQCVYFAKNSENLSEDLKNLDKAMKSFPDEHDNYRSLGYAKCAQQVLKLFVQNLRSYFALIRSYKKRRTKHAGRPGFPKFRKSGDRLQVIFTNQAMKLTSQTITIAPRTFENKLSITLRASHVTKLCQVVFAPRNNYFLVYVIYETIDSTISQTSNKVAAIDIGLNNLATITFSEQHKPILYRSDLVKINKEFNRLTAEYMSILKKTQNKYTSKRRKRLSEKRSGLMEDRLHKISRAIINDLSQRGVSTVVVGKNTGQKIGNKFKNFVQVPLFRLIEMLKYKAESVGITFIQVNESYTSGTSFLDNELPAKEHYDKSRRNYRGLFISNDSKRINADVNASFQIMKKIYTEFTYKDSVKYANPIVKTIC

SEQ ID NO: 19923 - protein, 398 aa, unknown
  TnpB Polypeptide
MLRATKVRIYPTPEQAEFLTAQFGAVRFAYNKALHIKTHAYRLHGINLSPKKDLKPLLAVAKKSRKYHWLKLYDSIALQQAVINLHTAFDRFFDPKVKAHYPKFKRRHGKQSSYHCVGIKVLDGAIKLPKMQPIKAKLHREISGTVKSITVTLSATGKYYASILVDDGLEAPQPIHSVEKVVGIDLGIAHFAIESRGKKKTNPRFLKRAARNLRRKQRQLSRKKKGSANRAKARLIVAKAHEKVTNARSDFQHKYSRTLVDENQAVIVETLKSANMMKNRKLAKHIADASWHSFVVKLQYKAKEQGKHVIKLDQWYASSKTCNGCKHKVKDMPLSVRIWDCPSCGRVGIDRDINAALNILEEGILALKAAGQAVTACGGVRHSWSYQVAACETRSIAL

SEQ ID NO: 19924 - protein, 420 aa, Ignavibacteria sp.
VLKVVDGKIREFLKKKVYFCAMLRAFKYRLYPTEPQQILLAQHFGCVRWVYNWGLSKRKEVFEQRGESLSCNALIIELPILKKSEETAWLGEVYSQTLQSSLRNLDSAYKRFFKAKSHGKHGGFPRFKSKHDRQSCQFPQGVSVSWEANTLEFPKIGAVNAVLHRAFEGKIKTVTISKTPTNKYFASVLVETTEEIPAKVPREESSTIGIDVGLKDFATLSTGEKIANPKHLKKSLKRLKYLQYKHSKKAKGGKNREKARKRLAKRYEKVTNQRNDFLHKVSNRIVRENQTVCVENLNIAGMMKNHTLAQAIGDVSWSKFLTMVEYKCAWSGKNFVKIGRFEPSSKQCPCGKRNDGLTLSDRTWRCECGLEHDRDILAACNIKAFGLKNLITNVGQELPERTLGESATSRGDVEPRNPRL

SEQ ID NO: 19925 - protein, 279 aa, unknown
  TnpB Polypeptide
MDVRRTAVVKLTVSDEQRDALHRTAEQYLYCANRTADYCWSDTSYTECKTNKREVRDALYSKLREETDLQAQLVQAAIKRAVEAVKACVERWKNGQRVSQPTFTAETMDYDTRSATFYRNKVSLATVEGRVEPSFVLPADSPTPYERYVLSENYEFRESTLRYDAATDEFFYLNISMRRTDGDDEVSEDTGHPDQTVLGIDLGVNSLAVSSTGTFWQGDDYDHWCREFEKRRGEMQHCGTQAAHKALLRLGKREEAWRKQYIHTIANELVSKPSNTTAM

SEQ ID NO: 19926 - protein, 228 aa, unknown
  TnpB Polypeptide
VETRLENHQQTETPDQTYYDVRDESPLPANLVQAARNRAAEAVKGCVERWKKGKASKPHFTSRFASYDARTGTVNDDHATLATIDGRVTADFILLMNGVTPHSAYLFNDDYDVNGATLHYDEVEDCFYLHVRTKPAVENDEAEQGDAKHVSVLGVDLGITNIATTSTGRFWVAANSTTGIESTRSAGATSTNRDSMGTRECSAGRSQTNWALRAVSSHDLERTCEGSS

SEQ ID NO: 19927 - protein, 406 aa, Nonomuraea sp.
MTDRQGFRVELAPTLEQRARLGQHAGLSRVVENFCLEKVKAALEQREAEKTYGIADSDLTPVPWSAPALERLWRLEHRDRYRWFTEEGLSSRVPKEACRVRAAGFKNFFDSRSGTRKGRKVGFPDWRKRKHGSRFRYDADRARPLSARVVALPGVGKVSTFEDMSWLTDRIPDGRARVIGSTVREQAGRWWVSFQLEIDRTDINERRAVSSDAPACGIDVGVKTFATIVDDDGVVTEIHAPKPLKAALRKLRRAGKAVSRKRLGSSNRAKAVQRLAKVHLEVANRRADFLHKTTTMLARSKRAIAVETLNVAGMVTNRRLARPISDLGFGEFFRQLEYKARWYDSSVWAADRWFPSSRLCGGCGAINRDLTLADRVWTCGCGIEHDRDVNAARNLLNAMTLEQQAA

SEQ ID NO: 19928 - protein, 363 aa, unknown
  TnpB Polypeptide
MKLATKTLKVRVKDKHAKRLSAMSRSVNFVWNYINELSERSIRERGKFLSGYDLQGYTKGAGKELNLNSATLQMIGHEYVTRRKQFKKRKLNWRSSNGARRSLGWIPVRSDCVSYKSGQIFHNGQYYKIWDSYGLSGYKFKSGSFNEDARGRWYFNVVVEVEAERSKGTASVGVDLGCKETATDSNGDGVKGREYRKLEKQLGIAQRARNKRQVKTLHAKIKNRRADALHKYSRKLVNENAAIFVGNVSSKKLVKTKMAKSVLDAGWSELKRMLEYKCDHAGIHFEEVNESYTSVTCSCCNKRTGPSGLEGLRIREWTCAQCGTMHNRDVNAAVNIKNIGLNILALGHERLAAGIPDYSRSAA

SEQ ID NO: 19929 - protein, 451 aa, Leptolyngbya sp.
MITKKPTKIIRTDKWTLNPTAAQRVLIGQTVEVYRRLCRHLVGVIMTHWADLGALSNNELVPAVERLIHQTAKNPNPKYAPIDETFHKFPSYYRRAAIMFAAGQVSSYLTRYRDWQCGQSRNRRDAKPPMFNPSAGCYPALYKGQCYKLHGYDQIEIKVFTGSDWVWTTVQITGLRDRHEVAGNLMLSPSLILNSHSCHLSVPFHCTPAKRKPDGNVTAIDLGINTTATVAVVTHDGTVIHREFIHPGRDIDRRDKRLKSVSMRASKTMGKGGKLHKGFCANTYRKCRNINQQISHIVSKRIVQIAAEFNSEAIVFENLKGWKATGGRRRSNLRQRFHGWLKAMIREFTEMKWREVGGKVIDIVAAYTSKLAYDGSGVVKRDSKNYALAKFSSGKRYSADLNGAQNIAARGIIKLTDRKDREFRSSQSSRRKPRSWACLCDLWTLDSSRLA

SEQ ID NO: 19930 - protein, 402 aa, Okeania sp.
LYRAIKVRIYPSLEQSQKLTQVMGSARWWSNYALNLCNETYQQTGKGLSQVAFNQVLPKLKKSQKTAWLKECYSQVLQSTTLNLTKAYKNFFEKRANYPRFKSYHGKQSCQYPQNTQVVDNGVKIPQVGVIKASIHRLFDGQLKTVTITKTTTRKYYASLLFDTEQQTPELVLTGKIIGIDLGLKDFCITHNGSKTAKYANPKYHQKHQRNLVRKLALLACKKKGSKSRKKARQLVARIHERINNARQDFLHKLSRKIVNDNQVVVLEKLNVKGMVCNHKLAKAISDVGWGMFVNFVEYKLQQKGGLLIEIDRWFPSSKTWCNCLYKMSEMPLDVREWTCPSCGTHHNRDENASKNIRTEGIRQLSVLGTRTAAEGGEVRPKGGQKSVLRHSPVSSEVPTSA

SEQ ID NO: 19931 - protein, 382 aa, Staphylococcus sp.
MGKHRAYKFRLYPNKEQEILINKTIGSSRFVFNYFLSLWKEEYKKTGKGLTYNKCATMIPALKKSNEYSWLKEVDSIALQSSVKNLEDSFNRFFKKQNKAPRFKSKKNPTQSYTTKNVSSSIQIQGNRIKLPKLKMVKFANSRDINGSILRATISRKASGKYFVSLLVEEHIQELDKSNNSVGIDLGVKDFAILDDGTVYNNNRYTTKMAKQLAREQRKLSRRYEQAKKDGKKLEDAKNYQKQKIKVARLHEKVANQREDFLNKVSTIIVKNHDVICIEDLNTKGMLRNHKLAKSLSDVSWSMFVDKLQYKADWYGKQVVKIDRWYPSSQICSTCGVNSGKKTLDIRNWTCECGAKHDRDINASKNIKNEGLRQIQSFDKVR

SEQ ID NO: 19932 - protein, 408 aa, unknown
  TnpB Polypeptide
MEISLTSKLRIVFQSEEDRNSAYDTLIAYRDACNYVSEYIFNHDFVLKQSDLQSALYHELRNRFGLKSQMTQSVFKTVIARYKAVQTQLRKQRVWDGYKKDNHGKDVPNYINKDLTFLWEPIEFKRPQLDLVRNRDYNFKNDGLSMNTINGRIFVKVYGLDGNSYFDGSWKLGTGKVVRSGKHWFFHVSVSQEVPDFEMPNLKHVVGIDRGLRQILTSYDEKGQTRFVNGAFISKKRKHYAELRARLQAKGTKSAKRRLRALSGRESRWMSDVNHQLSKTLVQTYGKQTLFVLEDLTGVTFETVHSRKKENRYEHHSWAFYDLEQKLRYKAHLNKSEVVLVDAHYTSQRCPKCGTIDKSNRDKNIHQYTCSNCGYSSNDDRVGAMNIYELGKWFVSGIEEPAFSITNK

SEQ ID NO: 19933 - protein, 372 aa, Clostridiales sp.
MNLVQRSHKIRLKPTKAQEIQLSKTAGTARYAYNWGIDACERSYRAGDKHPSGYDLRKQWVSNHPEWADEVAASCVYSSFLHVDAAYKRFFRERKGHPHFHKKGVHDSFNVAGDKGKVVGKRVRIPGVGYVKMTEELRFENAKINSYSISRRADQWFVSIQCVVEDTRIETPEVVGVDVGCKNWAVTSDGAVLKAPEKLAKLRKRLQRQQRSLSKKRKGSNNRSKAKLKVAKTYLRIDNIKKDALHKFTTTVTKSHGTVVVEDLDVRGMRERGVKSVRKGVQNSDISELLRQLEYKAIRLVKVDRYFPSSKTCSNCGNVKKDLTLSDRTYHCDSCHTTIDRDLNAAKNILAEGLRKLNITVGHTGSVCGCTC

SEQ ID NO: 19934 - protein, 383 aa, unknown
  TnpB Polypeptide
MDAEAYEKLKATQDSFRKACNFLAGIVRQDEKREKRLWQRYNLHHEAYYQVREAVPELGAQLTCNAVRAVSAMYKSLLSNNPKLAMNKGEPLPEIVFKNIGIHLDARTLTFSADRQSASVFTTQKRVSVRLCPGAFQKEILDSGKWAECELVFKKDGNGRRWCQLHIAVERKLDVPNLSRLKEEEVLGVDVGENNLAATSDGHLFKAGKLKNDRDKFLSHRTRLQRNGSRNAKRTLKRISGRERRHVEQVNHVVSKQIVKEAKAKGKRLIVLEDLTHIRERIRATLRVRARLHRWPFRELQQMIVDKACRVGIRVMFVDPKYTSQTCSACGAIGKRKKHRFECNCGYRAHSDLNAGRNLQGLGYRLVTQGPDVNRPDATLSRQ

SEQ ID NO: 19935 - protein, 380 aa, unknown
  TnpB Polypeptide
VKTFAYRLYPSKPQERLLASTVETCRHVYNDCLAERKEAWEGEQRSVTKFQQMRRVKEVKATNPYAKDVHSHILQMAVSDLDKAFQSFFRRVKAGEKPGYPRFKGRHRLDSFGLKEYGNGWKVDGRRLKLSGIGRLAVRWHRPMEGKPKTVRVIRKPDGWYVCITCETGAHPLPETGKAVGIDVGLSSLITTSDGEKVAHPRWYRDEQRKLRVLQRTVARRTKGGKNRRKSVVALKRQHQRIGNRRADFLNKLAHSLIQRYDVIAVEDLRIANMVRNRHLAKSILDAGWGYFAQRLHAKAEDAGRTIYEVNPAYTSQTCSACGERFAEHLNLSVRWVSCGCGLAMDRDENAAINIRTRAGHVRWESTSALVGVSQEAAPL

SEQ ID NO: 19936 - protein, 399 aa, unknown
  TnpB Polypeptide
MEVRKVYRFQMRPTAEQEQMLARFAGARRWVWNWGLARTKAYYAERGTGIGRVALSAELTALKAQPDTAWLKEADSQLLQQTLVDLYRAYENFFERRTRYPRFKAKKRDTARFRIPQRVTVLDGAVSIPKVGRVRIRQSQPLDGTTKSATFKRDATGTWFVSLNVAVEMPDTPLSPVEAEGVVGIDLGLKDFAVLSNGERIAAPKFYRRRERKLRRASKAFSRTRNGSNGRAKARKRIALVHRKTSNQRRDFLHKLSTRLVKEHAGLCIEDLSLKGMVRTKLSKSVSDAGMGGFRRMLEYKSVWHRKPIATISRWYPSSKTCPVCGTINDALTLGDRIWTCECCETTHDRDLTAAVNIRREGLKQMVAVGHTETRNAGRHAVRLPHRERAWLTPESHRL

SEQ ID NO: 19937 - protein, 513 aa, Gracilibacillus sp.
MVNGFDRSFVLVYNNKKEHMCVCLLSATKKGEVKNVYRTQQIRIKKGHRLYPYCDQLTFLAKNLYNATNFHIRQIFTAFGEGKNLQPLQQEVFYLIDQHLPQMNAIKRKTVEKKRQKELKKPVDERQEIQDAVLFEYPSAQQKWPSYAFLDSLFKVSENVDYLALPGQVNQQVMRRVFQNWKAYFASLKEYQVHPHKYTGRPKIPKYAPKNGRIACVFSNQVCKVKDDKYVRFPHTKERLNIGKLGLKGPLQQVRMIPTYGEYTIELVIRKEEEKPLVELDEQHIMGIDLGVDCLATIVDNTGSSPVIIKGQAVKSINQYYNKQRAHYSRVLRHGKGPKEGSFQSKRLQRLDQKRFFKLKDAFHKASFHIVQLALARKVSTIVIGVNKGWKQKVSLRKQDKQHFQTLPHAMLIRMIAYKAEAYGIHVHQQEESYTSKASLVDMDELPLYEKGVPAKVRFSGQRVKRGLYRTKENTCIHADVNAAGNIIRKVVPNAFAKGIEGVVSRPLMLSIV

SEQ ID NO: 19938 - protein, 562 aa, Clostridia sp.
VPQEKTENQGLKFTIQGEWFPESAPALAVCRWGRGKEDPLATEMRLFCACLRWAFNRLLEGRTREELKKEGQELFGLNSRYVDDAILRAKEVINSHKELLALEIKETQAKLARAKKKLGWAEKDLEKAVKAGDSGRIERAKRVVHGRRARVRILSAKLAAFKAHQANGTLPKVVFGGKSLWRRVCKGRATREEWRDARRNRLYARGDETKGGNPNIKIAYRDGQFTLAVNISHLAGPGRVDAKGVQHTKHAPRVEGLLWLPPKHRLKAWDLLLSGAPYSVELIRGRDNRYRAHITFTVEAPQLITDPNLGYLGVDANPDGAALANVGHTGQPEPWPEGFAVPYPKALAKFAGEFQVTVQPNGFLYIKIPELAYSRGYRRAYLIGVLAQVVVNIAKALGKLLAVENLDFGKDGLDTNKKFNRMAANFPYRKIIEAVMRKAFKEGVGVKPVWPAHTSTIGYWKYMQRYGIIVHHAAALVIARRAICFRENITKELKQKIQATREELSQKVKSLPGEGKGMTRKVKRLFKRVDEKIPVHNGLTRFQQESFHSVWRDLNKLALSSR

SEQ ID NO: 19939 - protein, 425 aa, Atopobiaceae sp.
MIEAVKVALDPTPRQVRMLLSHAGAARFAYNAGLAHVKGQLEAGERPDLSHYALRRWWNANKDALAPWWAENSKEAYSYGLECLSRALKAFFDARRGRRRGRAVGFPRFKGKAKATPRFAYTTGSFGLISDDPKALRLPRIGRIHCMEDVARRVGGAHVTRMTVSCRAGRWSASLTVERPDAAPPQPKGPSVGVDLGIAHLATLSDGTVVENQRSYQRGLDRLRKAQRDLSRRQRGSRRRARARRRVQRIHARVANQRRDNLEKLTTRLARGYSEISVEDLCVAGMVANHNLAQAIEDASFGEFRRELEYKCARAGVALHVVDRFYPSSKTCSACGAVKAKLPLSVRTYRCDVCGLAIDRDLNAAINIMVAGSAPETLNARGGDVRPEGPVVPRQSPAKREPGGHGGAARPGAGGGNPAMQTRTS

SEQ ID NO: 19940 - protein, 426 aa, unknown
  TnpB Polypeptide
MKRTNEFEVVPQSDEDEELFRRLLDASAALWNEINYQRRTNFDDPDGDVWEIDEYRGRYGSTLGSSTVQQIERKNREAWRSFFALREKGEANGKPGFWGNQDEGRELRAYIRNTSYSVEWGEHSRLEILVGQDLKDEYGLGHRERLRLELRGDPNWKEYDKQGRLELFYDEQAQSFRAFQPVTISEDHSRLAQPLASEEAALDIGANNLVACTTTTGQQYLYEGRELFDRFRETTREIARLQSLLEDGQYSSHRIRRLYDRRTKRRDHAQDALVRDLIERLHDEGVETVYVGALTDVLETHWSVETNAKTHNFWAFRAFVNRLACTGEEYGMSVEIRSEAWTSQECPNCGSTKDTTRHRDTLTCPCGFEGHADLTASKTFLKRQTTVGRPMARPVCLKWDDHNWSESPRSVLNEEHTNPQVASVDR

SEQ ID NO: 19941 - protein, 440 aa, Lachnospiraceae sp.
MILTETHSIKRKNKDLYEKVDRYCFASKNLRNYTNYIIKQCSRISYKLKDGEILDSWEKGFIYRINCAIYEYNHTGKEKHTKYIDNTNGFVADAYFLCWYLKRLDVYKEMPSATSAQVCIQMICRDWKAFYQGMKQWKKNPASMLGRPRPPRYYDKETGRNWLVLTYQNIKVDSNRNVELPKAFEGIRIRARHDNITQVRIITTGSRIKIQILYKVADAQSVDSNEIMGIDLNIDNLVVAVFSNTHNPVIIDGKPLKANNQWYNKETARLQELAKTLNNRYATKRMCRLTDRRNNKVKDYLHKVSRMVVDIAVSNNIGIIVIGNNQGWKQQVKMGKKTNQVFVGIPYLMLIQMIEYKANLVGITVKVVNEAYTSGTSYLDGELPTENYYNKKRRKTRGCFVSNTGEIINADVNGAYQIIKKYQNTVPIKHREKVTKLKVA

SEQ ID NO: 19942 - protein, 384 aa, unknown
  TnpB Polypeptide
MKRVQAYQYELIPNGEQKRNMRRFAGSCRYVYNKALAVKKEAYEKEGKTIGYYGPEGTAKLLTKWRNDPETQWLSEIPNHPLQQKLMDLQRAYTNFFKKRAQFPRFRAKGVSDSFRFPTRTQFTIDQPNSRIKLSKLGWIRYRNSREILGTAKNITISIKADKFYASIQTERDVEDPVAEATTATGIDRGITRFATLSDGTFYSPLNSFRTHQKTMAKLQRAMSRKKKFSSNWKKTKAKVTKLHIKIGNCRNDYLHKTSTEISQNHRTVFIEDLKVVNMSSSAKGTIEKPGRNVKAKSGLNKSILDQGWGEFNRQLTYKLEWNGGRLETVPPEYTSQRCPSCNHVSQENRKTQATFRCVECDYKENADTVAALNIERAGRAQLA

SEQ ID NO: 19943 - protein, 409 aa, Cyanobacteria sp.
MTQRLTAYRYRFYPTEEQEQLLLRTLGCVRLVYNKALHTRTEAWYERQERVDYKQTSGMLTQWKKQEDLQFLNEVSSVPLQQGLRNLQKAFVNFWTGRARYPNFKKKRSGGSAEFTRAAFKWKDGQLWLAKCSEPLPIRWSRILPRGSEPSTVTVRLDAAGRWFVSLLIDDHTVKSLPQVDKAIGIDAGITSLIATSDGEKVTNPKHFKRLRYKLRLFSKALSRKVKGSNNREKARIQVARIHVAIADSRTDFLPFGTLREHKLTTRLVRENQTIAVEDLAVKNMMSNHKLAGAIADASWSELVRQLEYKCQWYGRTLVKIDRWFPSSKRCGNCTHVVDKLPLDVREWDCPECGTHHDRDINAANNILAAGLAVIVCGANVRPDGHKFKGQLRKSPLGSRRGKKQKPKS

SEQ ID NO: 19944 - protein, 212 aa, unknown
  TnpB Polypeptide
VAVSAALSTGDLLKCPGLRPGERDRLRRLERKPARQRVRGRKTSNRLRRTYAATAELKAREADIRKDRAEQVSTSLARRFNVIRIEDLSIRGMTRPARGTIAGPGRNVRQKAGLNRGVLAASWGQLARRLEHKAGDHVQKVRAAYTSMTCNARGHCEPGNRESQAAFLCLRCGHRSHADVNAARNIAAGHAVTARGGGAPARPASREPLVAA

SEQ ID NO: 19945 - protein, 402 aa, Escherichia sp.
VERLQAFKFQLRPGGQQEREMRRFAGACRFVFNRALARQNENHEAGNKYIPYGKMASWLVEWKNATETQWLKDSPSQPLQQSLKDLERAYKNFFQNRAAFPRFKKRGQNDAFRYPQGVKLDQENSRIFLPKLGWMRYRNSRQVTGVVKNVTVSQSCGKWYISIQTESEVSTPVHPSASMVGLDAGVAKLATLSDGTVFEPVNSFQKNQKTLARLQRQLSRRVKFSNNWQKQKRKIQRLHSCIANIRRDYLHKVTTTVSKNHAMIVIEDLKVSNMSKSAAGTVSQPGRNVRAKSGLNRSILDQGWYEMRRQLEYKQLWRGGQVLAVPPAYTSQRCACCGHTAKENRLSQSKFRCQVCGYTANADVNGARNILAAGHAVLACGEMVQSGRSLKQEPTEMIQATA

SEQ ID NO: 19946 - protein, 395 aa, unknown
  TnpB Polypeptide
MILAQKIRLKPTEKQEIIFWKSAGVARWSYNYYVSERNRLYNEWVQNGKQGKFIFKENELRKYINNVLKPTTHKWLSEVGSNVMKQGVKDADTAFIKYFQGLSGKPKLKSKHKSKISFYVNYESIVRKQGGFQGEKLVFVKTCSPLPKLPKGKKYSNPRISYDGKYWYISVGYEVAERNEELTDESLGIDLGIKDLAICSNGKKYKNINKIKEVKRLEKKLCREQRKLSRKITANIKAYKVVGKKRYPIWIRPLKECKNIQKQNQVIRLLNKRLTDIRNNYLHQTTAEIVKTKPSRIVMENLNVRGMMKNKHLAKSIAQQKFFEFKRQIKYKSKLIGIPVIEVDKFYPSSKMCSCCGNVKKELKLSDRIYKCSICGLVIDRDYNASINLANYKLV

SEQ ID NO: 19947 - protein, 331 aa, Blautia sp.
  misc_feature (298)..(301): Xaa can be any naturally occurring amino acid
MKIISSYGVELRKQNIPIRQTLEIYRSAVRYLVEVYESVWEELAQIEESKKRFNAAEHLVHTTKRNPARFDFDFCFPKMPSYFRRAAVQHALGSVSSYRTRLEQWKAEGQKTGKPYLKSEQYAMPVFYHDVMYRENTEEKDAAFLKLYDGHDWKWFAVRLKHTDMEYLRKHWSSKKASAPTLEKKHDKYFLRFTYAEEVALNRTPVKEQTICSVDLGINTDAVCTIMRPDGTILGRKFINFPSDKDRMYRVLGRIRRFQREHGSRQVQGRWAYAKRLNTELGKKIAREIVFYASENRXXXXGTDPKISAGTWIASGAGKMGICKTSEYRAW

SEQ ID NO: 19948 - protein, 568 aa, Streptomyces sp.
MGDLLWWWSLGGVTDFCDTGPGGVKRVGGLREVAAPFVVPGPSGVTVRTRLKGLTVVDETVLYLVGDLLGSLASRDLRARCSAGLEHDSGQWAERKRVLTAESSSRWAGSVTKAIHDQWALARRGQLAHVHSLQAGVRTIRHRLSLPVGEKGSRHAPGGYRSRKEWFAKSRRLRVLEDRLRAARADWQAGAVRVVRGGKRLLNTRHHLEAAHLTHEQWRARWQAGRRFLEADGESGKRFGNETIRVTPDGEVSLKLPAPLAHLANAPHGRYVLAAKASFAHRGEQWADRVTSNRAVAYHIHEDADRGRWYLTASWTIPPTRTVPLETARANGLIGVDTNADHLAAWRLDRHGNPLGEPLRFGYDLTGTASHRDAQVRHALIRLLHWARRHGLAIAVEDLDFTGETSREKHGGRKRFRKLISGMPVSRLRARLVSMTAELGIPVIAVDPAYTSRWGAQHWQKPLTGKTRKTTRHDAAAVAIGRRALGHPIRRRTAPPRTHQSDGCGHRTVQAEPVAPGREGNRPRVPGPRTRSVGAGRGANAVDQNAQHRPGRSAEHESWQQDSLPLSL

SEQ ID NO: 19949 - protein, 542 aa, Streptomyces sp.
VGGLREVATPFMVPGPSGVAIRSRLKHLTGRDEEALRLVGDHLGSLASRDLKARCAAELDHDGEQWARRKQVLTGESSSRWAGSITKASHDQWALARRGRLAHIHSLQAGVRTITHRLSLPPGEKGSKHAPGGYRSKQEWFAKSRRLHVLEDRLQAAQADWQTGVVHVVRGGKQLLNSRHHLEQAQLTEEEWRRRWRAGRRFLQADGESGKRYGNETLRVSPDGEVSIKLPAPLAHLANAPHGRYVLAARVSFAHRGEQWADRVTANRAVAYRIHEDVGRGRWYLTASWTLPTVRTIPLEAARARGLVGVDTNADHLAAWRLDVHGNPVGAPLRFGYDLTGTAGHRDAQVRHALIRLLHWARRHGLAIAVEDLDFTAEKTREKHGRKKWFRKLISGMPVARLRARLVSMAAELGIPVIAVDPAYTSRWGAQHWQKPLTTTTRKTTRHDAAAVAIGRRALGHPIRRRTAPPRTHQSDGCGHRTVQARPSTPGREGHRPRIPGPRTRSVPPGRGANAVDQNAQHRPGRSAEHESWQQDSLPLSL

SEQ ID NO: 19950 - protein, 536 aa, Streptomyces sp.
MVASFVVPGPSGVAVRTRLKGLTAGDEKVLGMVGDLLGTLASRDLKARCAAGLQHDSEQWAQHKRVLTGESSSRWAGSITKATHDQWALARRGRLAHIHSLQAGVRTIRHRLSLPIGEKGSKRAPGGYHSRQEWFAKSRRLHVLEDRLRSAQADWQAGVVHVVRGGKRLLKTRHQLETAHLTHEQWRHRWHAERRFLEADGESGKRHGNETIRVTPDGEVSLKLPAPLAHLANAPHGRYVLAGKVSFAHRAEQWADRVTAHRAVAYRIHEDVQRGRWYLTASWTIPPTSTVPLEAARANGLIGVDTNADHLAAWRLDAHGNPTGQPLRFAHELTGTASHRDAQVRHALIRLLHWARRHSLAIAVEDLDFQAEKTREKHGRRKKFRKLISGMPVARLRARLVSMAAEPGIPVIAVDPAYTSRWGAQHWQKPLITKTRKTTRHDAAAVAIGRRALGHPVRRRTAPPRAHQSDVHGHRTVQAGAGTPEREGNRPRIPGPRTRSVGAGRGANAVDQNAQHRPGRSAEHESWQQDSLPLSL

SEQ ID NO: 19951 - protein, 378 aa, unknown
  TnpB Polypeptide
MKLIAQVKLQTTPEQADALRRTMLAYNDAANYISGEAWMRKSFRKYDLHHATYYSVREKFGLAAQLTIRVIANVADAYKLDTKTKRTFRRMGSVTYDSRVLRWHLDKSEINIWTMDGRQRMPFVCGERQREMIETLQGEADLVYRNGEFYLHQPCNILEDDGFDPDAWLGVDMGIVNIATTSDGATFTGADVLGVRKRRRRQRKRLQAKTTSSARRVLRRLSGKEARFARDVNHTISKRIVEEAKRTERGIAVEDLTGIRGRGRLRRSQRDNLHSWSFYQLRQFIEYKAQLHGVPVVSVDPRYTSQTCACCGHVAKANRKSQSSFLCVVCGYSCNADHNAAINIGRRAAVRPPNVSGADVDFYTRNPGTSSPASAGSI

SEQ ID NO: 19952 - protein, 394 aa, Bacillus sp.
VNYLLVNKAYKFRIYPNKRQIELINKTIGCSRFVFNFFLGKQKEKDAYWYIAEELKQNGQLPTNNWKGTFLNKYETVKSLPDLKKHYSFLKEVDSIALQKSVEILADSYDRYYKKQNKQPKFKSRKNPVQSYTTKFTNGNIAVLENYIKLPKLGNVRFAKSREVNGRIISATIRRNPTGKYFVSVATESEVIELPKTNSAIGIDVGLKDFAILSDGTIYPNPKFFRSLEEKLAHAQKVMSRRTIGGSNWYKAKRKVSRIHERITNVRKDYLDKISSGIVKNHDIIGMEDLLVSNMLKNQHLAKAISEVSWSQFKSMIEYKAKWYGKQVVTVSINFASSQLCSCCGYKNKDVKNLGLREWECPKCHTQHNRDINAGINLKNEALKLLTAGIAGIA

SEQ ID NO: 19953 - protein, 355 aa, unknown
  TnpB Polypeptide
VYEVSKYATQQPFIHLNRAFQKFFRDLEKGKVSYPKFKKKKANSGSYYIGGDLVSIQNEKYLNVPKLGLVKMREKLRFEGKINSVTISQRGDKFFASFSMQISREEYIRTHPQAKKNQLGLGIDLGLKSFLSLSNGLEVKAPKPLDRLERLLVRRSRQLSKKQHAKTKQEALQGVKRSNNYQKASIKLNKLHRRIANIRGDFLHKTTSCLVKNVQYFSLEDLNVQGMMRNHRLAKAISDVSFYEFKRQLAYKAEYNGREIHQVDRFYPSSKLCSNCGALKEDLTLKDRVYCCDKCGTRLDRDYNASRNLLSQLKKHIGEVRPEFTPADLTALQDNFVKNCLVTSKYETGIQPKSN

SEQ ID NO: 19954 - protein, 236 aa, Bordetella sp.
LHMGIARFATFSDGSFLAPLSSFQKHEMRLRRYQRAMSRKQKFSNNWHRARRRVQATHTCIGNARRDYLHKATSAISQNHAMVSIEDLQVRNMSHSARGNADQHGRNVKAKSGLNKAILDQGWFEFRRQLEYKLAWNGGILVAVPPQNTSRTCPCCGQVAKDNRSTQALFLCVACGYEENADVVGAMNILRAGHARLACEEDVSRARPEAARTKARRAASAKQEPAEATHSSPLPL

SEQ ID NO: 19955 - protein, 410 aa, Sulfuriferula sp.
MKRLQAYKFELMPNGEQSRAMRQYAGCCRVVYNKALAWQNAQYQADNTFKFSYTKTANLLPQWKTELTWLKDAPSQTLQQSLKNLESSFRNFFAKRTEFPKYKKKGMSDSFKFPQGFKIEQQNNRIFLPKLGWLRYRNSQAMLGTPKNITVSLKCGKWYASIQTEREIEQPRHLSTSMVGVDVGIARFATLSNGQVFTAINSFKQKQAKLARYQRALARKVKFSSNWKKQKGKITKLHSTIANIRKDNLHKTTTRISQNHAMIVIEDLQVSNMSKSAKGTMETEGSNVKAKSGLNRSILDQGWFEFRRQLEYKQAWKGGEVIAVNPRNTSRTCPCCKHVAKENRLTQAKFECVECGYSDNADLVGAINILAAGHAVLARGVTVQQDRTMKHEPTEGIRKSSREPVGIPRI

SEQ ID NO: 19956 - protein, 450 aa, Cyanothece sp.
MVTQNHKIIRTDKWSLNPSATQRNFCTVTVSVYQRACKFLTSIVYTHWNLIGSLSTKEAVPIVEQLMHKTKKNTNPKYSIFGKVFYKMPSYYRRAAIAFALGQVSSFVTRYRDWQSRQSRNKRTAKPPKLTIGSNCYPALYKGQCYRLDSLQEVDVKLFNGKKWIWETIKISTVRNRHEVSENKQLSPYLIEKNGKWNLAVPFHCKPEKKEGVNRVVSVDQGINTTAVVSVVDSIGTVIYREFIHPGRDIDRRDKRLKSIAKKASRTMGKGGKLHKGFCSNTYRKCRNINRQIAHQVSKRIVEIAINFDCAVIAFEYLKNWKPKGGKKRSNLKQKFHGWLKSLIRNYTEEKWLELGGKVKDVISRGTSSNAYDGSGKVKRDKSNYALATFSNGKRYNCDLSASYNIAARAIQELTRRNDSQGRSSRSSSRSHRSRAVLCDLWVHSNSTIA

SEQ ID NO: 19957 - protein, 458 aa, unknown
  TnpB Polypeptide
MPFSGQFNGSEEREPISPAMPEEGIYEVEHKNKRTNVVRILPNCFQERKLRRLANISAKLYNEINYERRQQFFKQHEVDFKSTYDKYYQKYKDKLGSASAQQVINKNNEAWDSFFKLLKLKKEGKLPLFIKRVSPPGYWKDKDTKKKKLILVVREDNYVVDEKNNKLILKYFDMEIDFVGKLRWYGKQGRLEIFYDETRNAWYASIPVEVGVETTRRGNKAKHIVNGERKVIQVESPKGNKVASIDLGINILASVVINDGTWLLYKGVRTKEDYFYLKKKISEVQLLASKTKNLGEYEAYEELLMEMKRLYKKLNRRLLHLYRTFASHLLEQLHELGVPTIYLGYPFNIAQEKGNKFTVNLWSYRKLMDAIELKAQEYGMRVYEVVEYNTSKYCAYHNVEVTRKPRGVISCPLDHKLHSDLNGALNILKMATNIVVSTVKKPLSFIIDHNGVAPVKGV

SEQ ID NO: 19958 - protein, 396 aa, unknown
  TnpB Polypeptide
MTRRANAIRATVSMNIAISETLLVFSKNYLEALRYVLYWLKEKRINPNKNNVISIVHKKLYSILKSFNLPSKIAQDCYRNAISIYKGWYNNPKKGRFPIVFKPTVWLTPKLSYMVDFDRMIVKISKLGEFKIIGYPRNLKEYLSWKMKEARQVIRNGKTFLKITFEKIAQKTEPKDSIAVDINMKTIVVGKDENNYAKINTRINEIYHYKSLAERLQIKYPKIWKENRNIKQRILSFHSKAKRIAEDFARKVSKKVVNEAIRMNANVIKLENLRNMIKKVKKLPKKFRNKLYLMQYRRIQYWIDWQSKKHGLLVKYVNAAYSSIKCPRCNNKMKEVSYRWFKCNCGYQNDRDAVAIINLNGRGSLSLSTAPHMRYVAPNQLRGTLAIHGGEEVSFR

SEQ ID NO: 19959 - protein, 387 aa, unknown
  TnpB Polypeptide
MTRRNNAIRATVSMNIAISESLLVFSKNYLESLRYVLYWLKEKRINPNKRNVISIVHKELYCILRSFNLPSKIAQDCYRNAISIYKGWYNNPKKGRFPRIYKPTVWLTPKLSYTVDFERMIVKISKLGEFKILGYPRNIKEYLSWKMKEARQVIRNGKAFIKITFEKFIQKIEPKDSIAVDINMKTIVVGKDENNFVKINTRINEIHRYKSLAERLQIKYPKIWKSNRNIKQRILSFHSKAKRIAEDFARKVSKRVIDEAIKMNANVIKLENLKYMIKKVKKLPKKFRNKLYLMQYRKIQYWIDWQAKKHCLLVKYVYAAYSSIKCPRCNNKMNEISYRWFKCNCGYENDRDIIAIINLNGRGSLSLSTAPHMRYVAPNQLRGTLAL

SEQ ID NO: 19960 - protein, 459 aa, unknown
  TnpB Polypeptide
MSSSGQLLWNEGREPTSLAIPEEGVYEVEYTNKRTNVVRLLPSGFQERKLRRIADLSAKLFNELNYERSQQFFRQHEVDLKGTWNKYYEKYKEKLGVNAQAVMQKNNEAWSSFFSLLRLKKEGRLPLYTKHIRIPGYWKDKETKKRKLLLIIRQDRYIVNEENHKLILKDFKMELEFAGRLRWYGKQGRMEIHYDEAKNAWYASIPVEVGVETTKKGNKSKHIIQGERKTIQVKTPKGNRVASIDLGINVLASVLVNDGTWLLYKGVRTKEDYFYFEKRIAEVQSLADKIKNIGEHDAYLELLRERRRLFGKLQRRLLQLYRNFAFHLLETLHELGVKTIYLGYPFRIAQEKGNKFTSNMWSYRELTDAIELKAQEYGMKVYEVVEYNTSKYCAYHEVKVERQSRGVVSCPLGHKLHSDLNGALNILKKAINLVVSAIKKPLSFIVEHNRVAPVKGCNP

SEQ ID NO: 19961 - protein, 448 aa, unknown
  TnpB Polypeptide
MRRANVVKLVVDKETNEKLKELGIITAKCWNEVNWLRMQQFKKGERVDFTKTEKEVYEKYKHVLKVNAQQVARKNAEDWRSFFSLIEEKKEGKLPKRFKPRPPGYWKSEDGKYKLMIIIRNDRYEVNECERTIYLKDFKLSLKFKGKLKWHGKHGRLEIIYDEAKRSWYVYIPVEVEDNMEVDGKLKASVDLGIVNLTTVFVEDGNWYIFKGGSVLSQYEYYSEKISKVQKVLARHGQRRSRKLKLLYDKRRSFLRHALNSMVRKIMEELKDKGMGEIVVGYPKEISRNHGNKLTINFWNYSYIIKRFEVVGEELGIKVVNVDEAWTSKTCSLCGEAHESGRIKRGLFKCPRVGKVINADLNGAINILHTPESLRSKRRGQILVRDRGNGLKTQPVVYRWTNGAGWLLATSYEVMKMKAVNHKPMIRPKGTLALQGREEVSIKLQGKL

SEQ ID NO: 19962 - protein, 387 aa, Agathobacter sp.
MIKTVKVMLIPNNVQRTKMFQYAGAARFAYNWALAKEKENYEKGGKFISDSELRKEFTRLRNSDEYAWLQSISNNVTKQAIKDACTAYKNFFKGLQRYPRFKLKKKSTPRFYQDNVKIQFSDTHVKFEGFSSSRKVNKQKLNWVRLAEHGRIPTDAKYMNPRISFDGLNWWISVCIEFPDCKKSLNTDGIGIDLGVKDLAICSDTNKYKNINKSQSVKELEKRKRRLQRSVSRKYEQNKEKGKYCKTHNIVKNEILLLKVNHRLTNIRKNYLNQTTSEIVNRKPRFICIEDLNVSGMMKNRHLSKAVQNQGFFEFRKQLEYKCNAEGIQLIVADRFYPSSKLCNCCGRIKKDLKLSDRTYRCECGNVIDRDFQAALNLKDYGEQFAS

SEQ ID NO: 19963 - protein, 380 aa, Alicyclobacillus sp.
MLKKRAYRYRFYPTEEQKQILAKTFGCVRYVYNWGLRLKTDAYYNEGKRLYYKDLSAQLTVLKRQPETVWLNEVSSVALQQELRHLDRAFLNFFEGRTKYPKFHKKRGKQSATFASSAFKWDGQNLWIAKMSDPLDIRWSRRFVGKPSTVTITKDAAERYFVSILVEEEIEPKAPVQSQVGIDLGLLDSVILSTGQKFGNSRFFRKDEKRLAKAQRSLSRKQKGSRNWEKARIKVARIHAKISDRRMDFLHKLTTRLVNENQVICVESLQVKNMLRNHHLSKAIADVGWGELIRQLEYKADWYGRTLVKIDKFYPSSKRCSDCGHIIPKMPLYIREWTCPECGEKHDRDVNAAQNILAAGLAVLACGEAVRPGRKLSAKR

SEQ ID NO: 19964 - protein, 391 aa, Alicyclobacillus sp.
MYEVRKLHLKPTPELDALARAAGELYTRTLVGFWRTVRKKNIWLKASSMMRWHTSNQLHAHSADAVVQSFYAALKSWRERRKTDPQAKPPYRRRFYFRIQWKSSAIRVRAGKLILSNGRGNAPLVVPWPWEIPVLVELGWAGTAYELRAVYVRPAAKPVAQGDTAGVDLGEVHLAVVHDGTRTTIYNGRELRATRRYQNKLKAILSAKQSRMQKGSRRWRKLQRSKRKQLRKLDHQIWDILHKQTTMLVSTLHASGVQTVVIGDVRDLRKRVDYGPAVNQRIHQMVSGKVRWLITYKAERLGIRVELQDEAYTSQECPRCGCRHKPKGRVYICPTCGFRFHRDGVGAVNIRRKYLGLGPVVGAMASPTGVRWHPHLRTRVARDERERIPVL

SEQ ID NO: 19965 - protein, 415 aa, Alicyclobacillus sp.
LYATQKNQIRGLSKREYNALRLLCRLSKNLYNVGLYNVRQYYIQERKHLRYESNYHYSKENDNYKLLNTDVAQQTLKVVDRSFRSFYGLIKKARNNEYRFHDVKLPRYLPKDGYFPLIIPRIRVKDGFLYVPMSLEFKKEHGDIKIPFPERLANKIIKEVRIHPKYNARFFEIEYVYVQDEEPKTVDPDSALAIDFGLDNLAACIDTNGASFLIDGRPLKSINRWYNKRNARLQSIKDLQGIKGTTEQQARLTMYRNNYIRDYLNKSARYIVNHCIEHCIGKIIVGVNPEWKQDINIGKRNNQNFVQIPHWSLRCKLEGLCQRYGIQYVEQEESYTSKASFLDQDDLPIYNADNPQQYTFSGKRVKRGLYRASDGQLVNADINGAANILRKSNHRLNFERVARGLLANPLRVKLS

SEQ ID NO: 19966 - protein, 408 aa, unknown
  TnpB Polypeptide
MHLYVNHARGIWNLFLSKEKEYYEREKRFLWKNDLQKLHTRLVSQEEYKWLSEIPRQSSTLVCQNLSNAIQFATGKKKIQGREFPTYKKKNPNSGSFQVFGSKSGFYASDPDHVLTLPKIGKVKTRGRRHFPGAVYQRCTVFRDGDRWYASLSYDAPDLPEPEETDRVVAVDMGIKALVTTYDGNSFKQILAPKFARKSQKRLTLRQRRLARKQKDSKRRAKQVLRVRAVYRKIRNQRKDLAHQITHRLTTKVDVLRIESLRPRAIARGGKGRRGAGIRYAAHDASMSLILSQLEYKCARRHVILDRVPWNFPSTKQCASCGTKHEMPLSKRVMQCDCGFRLDRDANAALNIYWYGEERRNHRHLSGTLVETVKPAELALLGETGVEARTSVRTEDSSAIALACASVI

SEQ ID NO: 19967 - protein, 396 aa, unknown
  TnpB Polypeptide
MFVRYRYRAYPTAGQAEMLARTFGCARVVFNDALRLRDAAHEAGEKISGTEVQRRVVTLAKATPEREWLSGVASVALVQACQDARRAYRNWFDSMSGKRKGRKVGHPRFRSRKDSRQSVRFTRNGFALHGGRVYIAKVGDVRVRWSRPLPSQPSSVTVIREADGRYYVSFVVERDPQPLPAASRETGIDLGLSQFIATSDGEIIPNPRFLRAKERHLARAQRALCRKKKGSANRAKARNRVAVLHRKVRETRLDHAHKIALRLIRENQAVYAEDLAVCGLARTRLAKSVHDAGWSQLLRLMEEKAEHYGRTFCRIGRFVPSSQVCSECGVKDGPKPLSVRNWTCAACGALHDRDVNAARNILAAGQADRLNACGGNVSPGAFRATPCEAGTRRGAV

SEQ ID NO: 19968 - protein, 378 aa, unknown
  TnpB Polypeptide
MQRSVKLAIPLEDMDDCVLETIRIYNSISNQHVYYALKNKACSKNTLHKALYKGIRTKYPDFPSALVQCARDHAVGMLKGNGKKAKTVKNPLSGIRFDLRTCKVFLESGSMNLATVDGRKRINFNVPEYFQKYASWEVKGCVVGVHKRFLFIHVVVDGETPTVQTGKVLGIDRGLKNFVVCSNGIQVRGNHIRCVKRRYAYLRRRLQACGTRNAINHLKVLAGRERRFMQDVNHTLSKRIAGTDYNVFALEDLTGIRKGNKGRRFNRMRSNWAFFQFQKFLEYKAESLGKSVVYVDPRFTSQRCCVCGFVAKANRHNGLFHCKSCGRFDNADLNASVNISQLGQALVEQATVNQPIPAGNDGNTALHLSSTRVGSHTF

SEQ ID NO: 19969 - protein, 412 aa, Rhodococcus sp.
VKRIVVVKLAPTPEQYVALKSTLELCNAGANLVAQLAHTAADRRPFALQKQVYAQLKACGLSAQPAIRVIKTVADAYATRTANLRNGNYGTPGSRRYAKVAGKAIVFRQDAGQPFDDRCLSWQIDRSTVSIWTSAGRMRDVGFVCAPWQLRMLADRTGESDLIFRDGCFYLHATVDTDAPPQLVPADDPTGWLGVDLGIVNLAVTTADDPAELDVRWSGGAVTARRKKNAAMRSALQKVGTKSAKRKLKKRRRKETRYATDINHQLSKTIVAQAQRTGQGIAVEDLSGIRDRVRLARRQRQQLHSWAYAQLRDQITYKAHAAGVPVQVINPRNTSKTCHLCGYCDTANRHSQALFRCRGCGWAGHADHNAAANIAALGHSNYRAAQSTVPNAATPLAASWNVSSKPASFRTG

SEQ ID NO: 19970 - protein, 501 aa, Lachnospiraceae sp.
MNFVLTLKLNTTEYDEAVLAKRFYYGYKISNIVTAYASKQLRLMKQDPAYQSLLSERYVLKDFGASKKEINRVNKELQVVRVSYGLSEYQLHSFVKMQQHKYKKHIDSDTAQKIATHVWKSVEKVLYSNGKRLHFHKYNDFLSMEGKKNTSGIRYKDGCIKWNKLSIQVQMPKHGTLGSSAFKEYEYTKACMKHKLCYNRIKRMQVGSCWHYYVQFVFDGKPPVKPNSHIGTGRVGIDIGTSTIAVSNPDGVILQELGSDVKNYSRELNRIQRALDRSRRATNPGNYNPDGTIKRGVKLRWFMSNNYKALAAKKRSLERKQAVALKDSHEALANEIISHGDDIYVESMAFKGLQHRSKETTYSKTGKINRKGRFGKSIKNHAPAKLICIIERKLGYEGIKLHKINTRTFRASQYNHISNDYVKKRLSMRHTWIGDNCVQRDLYSAFLLMNSDESLKYASRDRCNDTFKDFLKNHNDLIIKMQNDDISYPSSFGLKYIRIVS

SEQ ID NO: 19971 - protein, 394 aa, Deinococcus sp.
VTQIQTTTHHKAFKFRLYPTKAQELVLNEQLRLCRNLYNCALQERRDAYKKAGVTRTYYDQQNLLPEIKEALPEYKEVYSQVLQDVLKRLDKAFKAFFRRIKEGSKPGYPRFQGHDRCDSICYPQSGFSVSDKTAYFSKIGNIKIKLHRPLEGKIKTATIIRDCGEWYVSYVCEVEAQPLPTTGNAVGVDVGTTWFYVTSDGEYEPNPQYQKRTLKKLRVAQRSVSRKPNKRSRRRKKAVQRVAKLHRKVARQRLDFHHKAARRLVHENDVIAHEDLNVSGMGRGNLARSIHDVGWSQFFQILASKAECAGKKVIRVDPKFTSQRCSKCGHTCKENRVSQAKFVCLACGHSENADHNAAKNILARALPSGAKVSGCAMPSLRSPDHTALAVGQG

SEQ ID NO: 19972 - protein, 234 aa, unknown
  TnpB Polypeptide
MGLNNLFAVTISDGSAMLIKGGTIKSEYYWWKREIAKYQSIRDVLRRLSISTWIYYHEKYLDAMYKRDERLRHLYITAIRFLADELHRRGVRKLYIGYPIMLSQNNGNEYNTNIWWFRKIVLWIVDIFMEYNIDVEIVPEDYTSKECSICGNKHKNGRKHRGLYICSKTGKKINADINAALNIARRLGHRVRVSRKIESYLLTHNGVKPLNPLQGANTRDPSIETPPLKGGEGS

SEQ ID NO: 19973 - protein, 407 aa, Chloroflexi sp.
MIRTHLLPCGLPREEADALNRESGRTSTDVLVWHYRIYRRTGHWLSPVADERLNDSFGPSTLHAHSRDAAQQGFQKACKTAKANRGWGAKYPYRRKVYRTTVWKATGMKQEGNRLRLARAKGLTPIVVALPPELAVLPPTLFVEMRLVYEPISRRHQWHLVVDDGQAAPEPPGQATLAADLGEIHPAAVANEQGEVVIFTARDLRAINQYRHKQLASLQAALARKQKGSRRWKRLARRKTFLRARNKRQRRAIEHKVTRAITNHARAQGAKRLVVGEVRNIGNGKRLHTNAQQKVSGWSHGKQGDYLTYKLAAAGIVLERQSEAYSSKTCPCCGNHNKPDGRRYRCSACGFVGHRDAVGAVNHVSKAVHGFYGHVQPRSVRYRRPFRRSSRDTGHVARGQPREAAPL

SEQ ID NO: 19974 - protein, 306 aa, unknown
  TnpB Polypeptide
LKTVIARYKTILENQNEWIKPSFKKPQYDLVWNRDYSLTQNRFSINTLNGRVKLSYFADGMSKYFDHTIYKFGTAKLVNKHGKYYLHIPVTYDVEESNISDICNVVGIDRGINFVVATYDSKHKSGFVSGKAIKQKRANYSKLRKELQMRRTASSRRRIKAIGGRENRWMRDINHQVSKALVKNNPKHTLFVLEDLSGIRNAAERVKTKDRYVSVSWSFYDLEQKLIYKAKQNQSSVIKVDPRYTSQCCPCCGHVEKSNRNKKIHLFTCKNCGYKSNDDRIGAMNLYRMGIDYLADSQVPDTVVTE

SEQ ID NO: 19975 - protein, 392 aa, Thermus sp.
MLKAFKYRLYPTKPQTRDLEKTLDLCRQLYNAALQERRGAYKKAGKTVGFYEQKRYLPEIRAELPEYRGIHSQVLQNVIKIRALPVTERVDKAFQGFFRRLKEKGKAGYPRFKGKGRYDSFTFPQAGATGVKLQKDGKRVLIYGIGSVKIKLHRPLEGKVKTATVKREGDHRYIVFTCEVEPKPLPPNERAVGIDLGTNPHFLITSDGKTVEAPRYFQKSQEKLANAQRELSRKKMGSYRYRQIQTRLARLHRKIANQRKDFHHKLARGLVKEYGTIVHEDLNILGLARSHIAKGVLDAGWAQFLQILAYKAEGQPGRAKLVAGRRVIGVDPKHTSQDCPVCGHREKRPLWVREYTCPRCGTHLHRDIAAARNILAKARTEPAGTGTAHAVP

SEQ ID NO: 19976 - protein, 504 aa, Bacillus sp.
  misc_feature (300)..(425): Xaa can be any naturally occurring amino acid
MILAKKVRLIPTPEQEKVLRNHAGAARFAYNYCKRMSDRYYKLFGKFVSQLDLQKRFTKIKKRKRYEWLKDINAQVPKQASKDFDKARKNSFEKYKNGYHTSYKSKKDLIQGFYANYERLIIGKKVVHIQSIGEVKTSQQLPRNKKPFNPRVTFDGLHWWISVGFEESFEVQELTDESIGVDVGLKELFVASNGTKERNINKDAKVKKLLKRKKSAQRDMSRRFKKGVKIQSAGYEKAKAEHLQLSRKIMNIRNNHIHQATANLVKTKPMRIVVEDLSISNLLKNKKLSKAFSFQKLNFXXXXXXXXXXXXXXXXXXXXXXXXXXXXXXXXXXXXXXXXXXXXXXXXXXXXXXXXXXXXXXXXXXXXXXXXXXXXXXXXXXXXXXXXXXXXXXXXXXXXXXXXXXXXXXXXXXXXXXXXXXXXXXHFFFQCLSYKCEKYGIEYVKADKWFASSKSCSCCGVKYDHSVQPEGQWSLKIREWCCVSCNSHHDRDVNAAINLSRWVK

SEQ ID NO: 19977 - protein, 378 aa, Halorubraceae sp.
MVEPYITKIYAEDYPLYASTKQGMVQQYFKDLSNYFRAREKYIEEDETEKLEKLRPPYKVKRFRKIIYKNNAMAFDDDGSLVLKHGKKGKDIQLPDYTLKQQPGYAEVIFNYAKRKYELHATYNVDIKQADYNTDKILAIDLGVVHPMVSYDGQEVVIYNGGVVNSKLRYRNKKRAEFQHKMSRCEKNSSRYRKLKRAKDRVLGQLRSQLDDVLEKYTSQVISYCLEREISTVVLGDVEGIRENVEFHRIVSQKIHQWCFYRIKKMLERKCEYVGLEFSVIDESYTSQACPGCGAKNKTYDRNYTCSSCSFEYHRDGLGAVNIFRKYHGEDLDDPSYVVGVLASPVGVRYDPHLCCSAEWNASPWAGRSNDTSAEKTA

SEQ ID NO: 19978 - protein, 353 aa, unknown
  TnpB Polypeptide
MFRTLKLKLDRSNELIQTARLWNAACQDVIDYGFAAHDYNKTRLNKATYKDLRAKYPTLPSALHQTARDQASDMLKRLRFEKKPFKHPLGAVRFDIRTMKVFLESGYCKLTTAFGRLRYDFQLADYYQKYATWKVINAQLKIAKKACYLNVQVEQPDPEIVEGDKRIGVDLGINNIAVCSDNTFWKSGPVKSVKGKYQYLRSKLQSIGTRSAKRKLCKLSGRERRFQRDVNHQIANWIVSKQYDVIALEDLTNIRNGKKNKKLGKWSFAELRSIVEYKAMAIGKKVVAIDPRYTSRTCCKCGFQKKENRRGRTFKCINCGFQINADLNASRNIATFSRSDRSRLPVNQPIVAG

SEQ ID NO: 19979 - protein, 360 aa, unknown
  TnpB Polypeptide
MEYTYSFRIYPNEEQIVLIAKTFGCCRFIYNYFLDYSNSNGYSSKYTNNNICNRELKAEYPWLKEVDKFAITNAIYNLDNAYKRYMNKLGSKPRFKKKNKGESYQTNYTNNNIEVLDNYIKLPKLGKVPTKVHRKVEGTIINATIKKYSNNKYKVMILVRKEIKKLETNSYIVGIDMGVSNFVHDSSNNIYNAPKKLMNTYDKIGRLQKSLSLKMKGSNNYKKIENKINKLYDKCNNVRNDFLHKLSTSIINENQVIVVEDLNVKEMFQNKNIAKVLGDISISKFINMLEYKARWYGRRLIKVGRYYPSSQLCNNCGYQNKKIKDYSIRTWQCPRCDSVHDRDYNAANNILDKGIELLLI

SEQ ID NO: 19980 - protein, 509 aa, unknown
  TnpB Polypeptide
VKYYDTVTRHRFTTEDGVDANSVSAELAQMITWMAQAERKVTTSQKFHDLALNALKGDRPSGSLNSWGRKRLSRYDFKFQKHNMNEMLVTNVVGALKAYVVSVGLFQIMSTHPSTTKPDQILSYYKSTYPDAPQPTSGMVRAHLIRYHKKGERKASLPGVSAKLSLAVCDMNFAPKTSRDNSDSLNVIVQVKTPSYGITRFYLRLPDNESRFSEGKVCRPTIRLNNKGRIVFDLAIEHETHQRDTNKVVGVDLGKIEPFVATVIDPKGKHRYAPYHARHKGRLSSLVKKEKQRRDLSHHLYEKADLCERYNRDQHAQVLRTEAKHVSAKATRIKNEIGQCIASQVVSIADQNDAHISLENLSWLDSQGGRWPHAEIQHRIENTGKRYGLKIVKVSAKDTSRTCSHCGGKVSNNSKTRIGICATCGFSLNRDVSASREIALRAVSNTRNRERMRSLLRQRREMRSSAATRQSKPVTALGGNQGHTGTSSDGLEATLMMVRESLDSRGSPT

SEQ ID NO: 19981 - protein, 428 aa, Caldilineaceae sp.
VRLYPGTAANGQYLEQLAGACRFAWNHVLSGHETDYRTWKASGKLGEGPGRPTFFTLGQRFTQLRNAPGNEWLQDYSYEIVRYACKYMGDAYAAFFDPDRPDHGRPQYKAKHYTQPAFTIPSEVHIKDGCLRIPKLGWVRLAPIRRYADGKPLTVRVKQESEGKQPKWYAYIVFKVPVDHPDVRRPAESGAVGVDRNVGQATDSTGTLHALPDTTVEDAKIKRYQRRMARQQKGSNRRRGTAGKLRKLHRKRARRRDTATHQISRKMADTAHNVVIEDLNTKGMTKSAKGTVENPGRNVKQKSGLNRSILASGWGQLERKLAYKAGEVVYVDPAYTLQACSQCGHAAKSNRPSQAVFRCGACGFRANADHNAALNILVRAGLLPVPVPARGTGAAARRGALPPWSALRPTTGTPATREPDMHGVNQCI

SEQ ID NO: 19982 - protein, 404 aa, Petroclostridium sp.
MIKTIRVQLLPNNKQKTLLKKCADVARWAYNWALSKQLENFKNGGKFINDEELRKELTQLKKNPEYNWLNEVSAQIPKQAIKDLCIAYKNFFRIENKHYSEKTKKKALRQGRQLTVYDLEGHPKFKSKKDVQQGFYHREDLGHLKFKGDKVKLEKIGWIKLSENRIELQTAEKFYNPRIKFDGFNWFITVSIDYKPTNNQKYSDGIGIDLGVKDLAVINDGRKIPNINKSQEIRRLNKKLKRLQRKLSRKYEKQKEGGVNRYKKTKNIIKLECLIRKVHKKIKDIRTNYLHQETAKLVKAKPEFVCMENLNIKGMVKNHKLAKSVQEQMFSEFRRIMEYKCKWNHIRFIVADRYYPSSKTCSECGYILDKMSLSTRKWVCPECGIMHDRDINAAINLMKYGKSA

SEQ ID NO: 19983 - protein, 318 aa, unknown
  TnpB Polypeptide
VKPREEPPAEVVAFDVNENSVAVAKVSLLATVDAVARWNRRYVDPAVYSIKTDFGRLAERYEAVRNAKLEELKRKYPYAGRDDEEKVQNVTDTREFRKFARRLRERRRKESRVRQVAREVAKSPAVVITEELGKNPQEEMIGVEKKVGKRELRHRIKQTPFRKLIRAVEDKAAEAGSVVVYVSPYRNSKVCPIHFAKLENGDDWHAMHCPRGHVVDRDVAAVLNMLWKITPEGVVKAVWWDVKEVGKRLGKGIVPKEAVRKANPIIPRLIVHAVWVSLMALKAGGKWPAVLARAAPMTPARGAYEGGTRAPPRLKGAP

SEQ ID NO: 19984 - protein, 418 aa, unknown
  TnpB Polypeptide
VVKTVKLRIYPNKSQIHIINGTLGCCRYIYNKYIESNIESYKTSNKFISGYEFSKDINWLKKNNDDYNWIKGYSSKAIKDTIMNVEKSFKRFFKSKKGFPKFKSRKRIHKESYFFIKNQIGYIKHNIINIPILGKIRITQNYDLPNIKDVTSGRVIREYNKYYIMLIYEYNNEYLDLTENSLGIDLGLKNYCTVANSSYDIGTGIIRHFKNNLNYKKISDKIIKLQQIISHKAEINYYRLLNKWLDNNSTKELSENYKRIMKGESYNSSQIRKLFKKIRVLKSKLSNIRYDFINKTVHTLTVITKPKCITVEDLNILDMIKHNGTKDAKLHKAIQESSFFTFKTKLMMKCLEYGIKFRMVSQWYPSTKKCFICNHKFKDITLKDRVLYCPNCGLEIDRDINAAYNMLNVKDKYCEIVS

SEQ ID NO: 19985 - protein, 388 aa, unknown
  TnpB Polypeptide
VIVREAKLKHGTAEQYSAIDEAIRTTQFIRNKAVRYWMDNQGTGKAQLYSLCKDLAREFDFAKKLNSAARQASAERAWAAISSFYTRCKKGAGKKGFPKFKKHCRSVEYKVSGWKLSDDCKSVTFTDGFEIGTLLIFCNNQTQEDLYTLKINRVRIVRRADGYYAQFCFDADRKEQGQYSGNVVGLDLGLKFFTKDQNDNAVIYPQFLRKAEKQLKKAQRRLSKKFVKGAKPQSKNYHKCRKRLGKIHLKVSRQRKDWAIKQARCVVASNDVVVYEDLKIANMVKNHCLAKSISDAGWYQYTQWLDYYGKIWDKAVIAVNPAYTSQDCSNCGHRAKKALSTRTHSCPNCKIEICRDTNAALNILHKGLNILGVEWNKQGTSGQEESSE

SEQ ID NO: 19986 - protein, 412 aa, unknown
  TnpB Polypeptide
VKILKAFRYLLAPTDAQEILFYKMAGCGRVVYNDTLDYLLNIIKKDLGITDRKALYKHLNSLDYKARKALFSKLPHHSAMNKLVTAWKKLEHREWLSEAYRDNLDQRQRDLHKALEKWLKGAGSFPRFRQRSTAHHSTMRFVNFNKYCALHDSRVKLPNKLGLVKFRNSQPIEGTPKSCTVSLNACGQWHISILCELEVSKPMPTAETAVGIDMGIAKNMTLSDGTVYSGVHSFKGIMGKLAKSQRKFARQEKGSNNWKKQKLKIAKLHQKAANARRDFQQKATTEISKNHAMIVVEDLKVSNMSRSAKGDAENHGKNVRQKAGLNRSILDQGWGEIRRQLEYKSEWLGNVFHAVPPHHTSQTCPACRHKAKENRLTQAEFICVECGFSENADVVGAINVLHRGMALEASAN

SEQ ID NO: 19987 - protein, 430 aa, Bacterium sp.
LQGKDRLKLIKQWQEKRKYSLYSRGDKSKQGNLNTRLLLEQDGTYLRINVGDRTWIKAKVIRNVKRLTDKWINFIARLLEVERMGKCFPYSVEIKIRDDEVYAYISFEEEIPQISITKGNGVIGIDVNARPFHLALAEVNADGNLASYQSISLHELLNKTKNQRDYLTWQVAHKVVDIAKEKQKAIVIEKPSTVDKGNKGDGNKILRKRLQQWSYRGILEKIKTLARRNGIEVIEINPAYTSIIGMLKYCPQYNIDKDIAGAYVIGRKGLGFKERLPENYEKLLRNQEYINYAVAKLEEEEERNKQKLNQEKNVYKQKPIKKYIGQIKKDINLLKNLSSKPLTQEHLNRWKEDVRGEVKTSHKQWQVVKVALTFPILEKSSSRDFSPLKSYLVDWDRVVRRLVLVLGAGAMAGSNTACWGLSQPEVAGYK

SEQ ID NO: 19988 - protein, 381 aa, unknown
  TnpB Polypeptide
MKLTRTAKIKLGISPSDILPTLLAYTKAFNFVCEKGFATKEKNGINLHKLTYQDTREYLPSQLAISARMKATEALKGVFAKPKKYVSCPKSKLCSARYDKNSYTLFLDRKQVSILTVSGRKRYDLVIPEYYQELFSVWKNTSADLCIVKNTVYLHVVFERDITDTQPNGTLIGIDRGINNIAVVSNNKFFGGGKVKNTINRYRRLRKLLQKKGTKSAKRHLAKLKRKERWFRADINHQISKQIIDSLNPGDTIVLEDLTGIRNKRLRKEQRTMINSWSFYQLEQFLIYKAEAKGIKVEYIDARYTSQRCNKCGYICRSNRKQHSFECKECGFRLNADLNASRNIVVKALESYKLSSGAGVNQPIVGAEKLLTSHQPCAGGN

SEQ ID NO: 19989 - protein, 401 aa, unknown
  TnpB Polypeptide
MKRTYKYRLLPNKEQTKVLDEILSFCRFLYNCALEERITYYKRFGKTLSYASQSNELPEIRRFFSEDTENILAQTLQQVLKRLDTAYQNFFRKLKEKAGEAGLPRFKGESRFRSICIPQPIPDLSKGCVKKLPNNKLKISGIPGEIKVKWHREIPDGARCKQVRIVKGVGHYYVMIYCDNVNDEVLAPTGKTVGVDLGINSFITLDDGKQFHHPKPYKTSKEKLAFLNKKLARKKAGSNNRKNVLIALRRENERTRNIREDFQRKIAKQLIVENDAIIIEKLDIRELMSKSLGPEATPKEKAIFKSHKENMMDASWGSFTDKLIYKAESAGRKVIQVDPRYTSMMCSSCGHMQDMPQEVRTYDCDACGTILDRDLNAAINIRNKGLGASLAIPKVFQKSKF

SEQ ID NO: 19990 - protein, 390 aa, unknown
  TnpB Polypeptide
MTQKAYKYRFSPTSEQAHNLACTFGCCGVVYNWALKRRTVAWFEQGQRVSYNDLSHALTELKKQEGTQWLAEVSSVPLQQSLRHVEKAMVNFFEKRAKYPKYKKKQKKQSATYVNTAFTWNGSTLTLAKQKEPLAIVWSRPLPDGVKPSSVTITKDKAGRYFVSILVEEDIQTLPPTDKTIGIDLGLKSFLITSEGETIDNPKYYARYEKKLAKLERKYARKNKGSKNHNKARLKVARLHAKIADMRCDFQHQLSTQLIRENQTICVETLSVKNMVKNHKLAKAISDVGWGEFVRQLEYKATWYGRQIVRIDRFYPSSKTCSACGFVRDELGLEVREWVCPQCGVCHDRDINAACNIKAVGLTVSACGGTVRPVCVKARRARSSEAGSPS

SEQ ID NO: 19991 - protein, 598 aa, unknown
  TnpB Polypeptide
VQCDVPGGPQQEQPAPGAPLRRGDLDRRDPRAVDRVGDGDQGRRRDPEPPALPDHDGDPGGRGQHGPADPQGQPGVAGQGAEQGAVRGNEAASGLAPRPRARPSRGRRPGPVRLRPGFGVHGPSVIQPRRATVYPGRERQPGRCWTAGRGPSTVRSPLPQEEALAFRPGNPVPHVTRRCLVAAAWHAVLVRTAYRCRAYPDEVQQAMLNRTFGCVRVVWNRALAERQQRWQRDHRGTTYAETDAALTVLKKDPELAWLNEVSCVPLQQALRHQHQAFCAFFGKRARYPRFKSRRCRQSAHYTRSAFSMRDGALRLAKTPGLLVFVWSWPAVDPATLGPTMVIISREPDGRWYVTLAVDAQPQEPLPAVGRAVGVDLGVHDFVVTSDGDRVANPRHLERKARNLGRYQRRLARCQKGSANRAKARAKVARAHRKVGNARRDFLHRTTTGLVRGNDLIAIEDLAIKNMVRNRRLARAISDCGWGEFRRQLQYKCERAGRQLVVIGRWYPSSKMCSACGFVLAELSLSARTWRCPSCRTRHDRDLNAAKNILAAGLAVARGNPGDACGADVRHLETPSVQSAAKQEPQPVTAGIPVLQGEE

SEQ ID NO: 19992 - protein, 369 aa, Deinococcus sp.
MPSFLTRTFKYRVYPTARQERQLEQTLELCRQLYNATLEHRTLAWRMARVNIHAFTQMAVLPEIRAALPEYRQVHSQVLQNVVGRVDRAFLAFFRRARQKGKPGYPRVKLAGTYRSITYPQPSPRSVSPDGHRIYLPKIGLVRIKLHRPALGHLKTLTVLREHHEWYVLLICTNVPVHTMPATGLSVGIDVGTRWFFTTSDGEQVSNRRPQEQLQHQLTDAQRELARRTPGSGRYRKAHDRVVTLYRRSRRQRAQWHHEEAKRLVQRYDLIAHERLNVEPMTGSRRAIQDVAWSQFFRSLTSKAEMYGRKVIAVHAHNTSLRCRKCGKTTRANRRTQERFLCVFCGHDEHADFNAAWNILARALPSGRR

SEQ ID NO: 19993 - protein, 369 aa, Microcystis sp.
MFVLEYKLRGKPSQYQAIDEAIRTVQFVRNKCLRYWEDNKGVGQKDVYKYVTQLRSEYPFVQDLNSTACQQAWRRTWTAILRFYNNCKNQIAGKKGYPKYSKRTHSVEFKKSGWKLNRNSKRITFTDGKNIGELKLIGSRDLFYFQEWQIQRIRIVKRADGYYCQLMLKLDARDITPQSESTGHCVGLDMGLKYLYADSNGNTVEPPKYYRKAEKRLNKLNRQREEFAKKLALRLIQSNDLIAYEDLKVKNLVRNRKLAKSINDAGWSQLRKWIEYFGIKYGRLTIAVNPAYTSQECLNCGRLIQKSLSVRTHVCLCGYIEDRDKMAALNILKKATIGHIGSWSSDLNAWGDLSSILVGSNTCQDNLSQ

SEQ ID NO: 19994 - protein, 382 aa, Lachnospiraceae sp.
MTYKAYKYRIYPDKEQAGRLARTFGCVRFVYNKCLEEEERRHAAGEPFAGRTALNNWCNRCLKDEFPFLREVDKFALTNAVWALAGAYERMFEGTAGHPRFKSRRKSRCSYTTNLTGGNIAVLDGCIKLPKLGRVKAVIHRRAPEGHVLKSAAVSMERDGTYYCSVLYGYEEAAASVPSPEQNAIGLDYKSDGLYVSSDGEVCGSPKYYRKAQKRLARAQQGLSRRKGSRKGEAESNNHHKQKRKVAKLHRRVANQRKDFLHKQSTAIAKRYSLVCVEDLDMRALSNRGFGGGRAVMDNSYGMFLDMLDYKLRDRGGALVRVDRWFPSSQLCGACGRREPAVKDLSVRTWTCPACGAVHDRDLNAAVNILREGIRSYKAATA

SEQ ID NO: 19995 - protein, 253 aa, Halomicroarcula sp.
VTVSDDVRDTPLADETAALDIGANNLVACTTTTGEQYLYEGRELFQRFRDTTREIARLQSLLEGGRYSSHRIRRLYDRRTKRRDHAQDALTRDLIERLYDEGVSTVYVGALTDVLDTHWSVETNAKTHNFWAFKKFIKRLVCTAEEYGMSVEVRSEAWTSQECPQCGSTDQTTRHQDTLACPCGFEGHADLTVSETLLRRQTTVTRSMARPVRFEWDDHDWSGISHPHESPKEQRTDPSTAHHGGNIASGESA

SEQ ID NO: 19996 - protein, 304 aa, unknown
  TnpB Polypeptide
LELGTHAFYSTEPIKRVRLVRRADGYYAQFCVKVEVREELKPSGNTVGLDVGLKEFYTDSNGQTEPNPRFYRNAEKKLKRAHRRVSKKQKGSANRKKAVNRLGRVHLKISRQREEHAKRLARCVIRSNDLVAYEDLRIRNLVKNHCLAKSIHDAGWYQLRKWLEHFGVKFGRITVAVNPAYTSQKCSSCGTVVQKSLSTRTHVCQCGCELDRDHNAAINILNAALSTVGHTGTWVDDPNASGDLTATLAGANLSGQVGSLKEESPSRDSRRVSKSIQHFWDTRFSGVGCVRLEQRKRQGEITST

SEQ ID NO: 19997 - protein, 406 aa, Gluconacetobacter sp.
MIQRKANIYRLYPDPAQREMLSRISGACRTVYNLALEQRRDWWQRHKDRTGKSISFAGQCRELTDLRRDVDWLREAPIHPLQQALRDLDRAYQNFFSGRSGYPSPRRKGLHDSFRFPDPASLRVERTGKKTGRVKLPKLGWVAFRGWYDLPGAIRTITICRRGGQWFASVQWEREVEEPAPTVLAPVGIDMGVAVFAAMSSGETVAPGDFGRKALCALRKAQRAVSRKRKGSANRRKAVRRVQTLHARVASARKDFLHKVSTTIAKSHGTVVVEALQVRNMSASAKGTVDEPGRKVRQKAGLNRSILDQGWRLFRTLLGYKLAERGGSLVEVPPAYTSQTCSACESLDPTSRVSQARFVCTTCGHTENADINAAKNILRRADSPLKPVEGHRNKRPGEAGSTRRAA

SEQ ID NO: 19998 - protein, 385 aa, unknown
  TnpB Polypeptide
MYNTRRLNLVKTEELDVLARAAGELYSRTLVTYWRLVRKKQVFLSQYGMEKLCMSDSLHSHTSDAIVGNFYANIKSAKTRKKDGCLEAKYPRRRKWFFKTTWKSSAIKVKNGLLTLSNGKDNQPLTVPWQWDKPKQVEIGWKKGSGYQLRALYTHVGSVKPTGDKIAAIDQGEIRTATVFDGKDTTVYSGRLLRSKVRYRAKTIGSLDASISRTKKGSKNRKKLVATKHRVVRNLDNQISDILHKQSSHLISTLYKAGVQKVVIGDIRDIRDSIKYGKKVNQKLHSWSFGRFRWLVSYKAEQMGMEVVLQNEAYTSQTCPACGKRHKPKGREYKCGCGFRFDRDGVGAINIRRKYLGCMDIPVVGLMASPSGVRFRPHIHCSLNH

SEQ ID NO: 19999 - protein, 339 aa, Paramecium sp.
MYNLAIEKMLDTGRWHWKGHKVLTTYDNIPKNEKVRLLPTNIRKEAYREASTAMAKAPHKNTVKFKTLKRNGRSLRVFGAVSIVDTPDGKRIKLTDSQKHKQLSKELIGFDQKNLADIRIGSSSQIVYDGKWWLLSPFEVERSNVPKKHAVALDPGVRTFQTTYSPDGTSKKLGDQASCRIFRLMKYIDKLAVFKDKRTRGKRLRLERRVGNLVDEMHWKIARELATDYDTIIIPPFETQKMAKKWKNGRYRKINKTAVRMMLRLAHYRFRERLIHVANKLGTRVVICTEEYTSKTCGNCGVVNADLGSAKKFKCPRCHIHVDRDGNGARNILIKSVCC

SEQ ID NO: 20000 - protein, 394 aa, Methylobacterium sp.
MTFAAGYRYRFDPTPEQADLLRRTFGCVRVVYNRALYERETAWRERRERIPFKVMSRWLPVWKAEWPWLAEVSSVPVQQTLRHLEAGYVRFFQRLGGKPRFKSRRDPQAATFMKTGFRWRDGELTLALMNQPLAIRWSRELPSAPSSVTISLDAAGRWHVTFRVEVEPEPAPEPLRPAIGIDLGLMRLAVSSDGASVANPRWLRQRQHRLRRAQRVLARKKKGSKNREKARRAVARLHARVADARRDHHHKLSTRWIRENQAIHVETLSLRGLARTRLARSLYDAAWGSLLAMLRYKAAWYVRDLVAIDRFYPSTRACSCCGTVGPKRALHVRTWTCDACGVTHDRDVNASHNILAAGHAVRAGAHPRRSPVEGTSDATGLARCASSVKQELAA

SEQ ID NO: 20001 - protein, 350 aa, unknown
  TnpB Polypeptide
MLLSKKTSIKVSREYANLIGHMCYAASKLWNVCNYERQHYKETGIEQHPDWYYQKKAHKEDLWYKQLPSQTAQEVCRLLDKAWKSFYALKRSGGIEAPRPPRFKQESIPITYMQMGIVHERDTGRVRLSLPKTLKKYMEETYQIHENFLYLENKIFRGMDQIKQLRIYPPEKGSCKIIVVYEVPDQEELPQNGHELSIDLGLHNLMTCYDSGNGKTFILGRKYLALERYFHKEIARVQAQWYGQQSGKGVKYLATSKHIRKLYKRKHDSVTDYLHKVTRYLAEYCREQGITCVVTGDIRNIRREKDLGHRTNQKFHSLPYNRIYIMLEYKLKRYGIRFIKQPANKKSRLN

SEQ ID NO: 20002 - protein, 382 aa, Acidobacteria sp.
MMLKTFKYRLYPSGAQAQQLAETVEACRRWYNLCLEERQQAWEQEKRKVGKYEQLAKVKEHRRVDPKAGKIHSHILQVVVQDLDKSFQAFFRRAKAGETPGYPRFKGRNRFDSFGLKEYGNGFKLDGRRLRITGIGRVRVRWHRKMEGEIKTLRIRRQAGQWYACFACEVEGQLLPSTGKEIGVDVGIHHLLATSDHEIVENPHWYREEESKLRVLQRRVSRRKIGGTNRQKAVMGLQGQHEHIANRRKDYLDKLANYLVTNYDRIALEDLHITGMVRNQHLSKSILDAGWGYLKQRLVDKAVEAGRQVVLVDPSYTSRTCCSCGETFAELSLADRWVACTCGLSMDRDVNAAHNILKRAGHALWGESTANRLRLPQEALPL

SEQ ID NO: 20003 - protein, 521 aa, unknown
  TnpB Polypeptide
MAESTVTADHLATHSNPVRAILNRFEARMFEELATYASCHGLTVYLGAQAPAFRPGLAPALIGVEGFEPSPLRCGEGREDDVGECQSAAGFGLEVECCEAEGVPGLVGEVHGHERGLSHALQGTASVRVCDICYSGLVFMRYAYRIYPTPDQQQMLARTFGCARRVFNTAIQVWEDAYRCSTKVTDVQVQNRVITQAKAHPDSLWLSEVSSVALVQSFQDARKARRNFFDSRSGKRKGSLMGGPRRKSRKDRKQSIRLTRNGFTLRPDGTLYLAKVGDVEVRWSRDLPSVPSSVTITHEADGRYYASFVVERDTAPLPSTTQDVGIDLGLTTLAVMSDGTRVENIRPLKEKGSRNRVKAVRKVAVIHRKIRNTRADHLHKTALHLVRDNQAIYVEDLSVKGLARTRLAKSVHDASWGMLVRLLVEKGERYGRQVVKVGRWFPSSQVCSACGVKDGKKPLNVRSWTCPQCGTTHDRDVNAARNILHEGRRIKAAGLVASVCGADVSPGLVPAVGVEAETLVA

SEQ ID NO: 20004 - protein, 366 aa, unknown
  TnpB Polypeptide
MPVQVPPRESCSLSGGSESVVLAFRIIPSAGWVLRPCLVAVLHLRSSLYCVSPYTIAACNASRPVPVFDGMHAVPFGVPLHGHPGLGVDSPKPVRGRPDRRGGDQGWQVSLHSAGAYLQDCGPLDIVWSRPLPEGAEPSTVTVSRDAADRWHVSMLVESTVETLPANGVTVGVDAGITSLLTLSTGEKIPNLRHERTDRARLAKAQRRLARKAKGSKNRAKARVKVARVYARIADRRRDHLHKVTTRLVRENQAIVIEDLTVRNMVRNHCLARSISDAAWRDMRIMLEYKCAWYGRELVVVDRWFPSSQVCSACGHTATSMPLHVREWACPQCGTTHDRDVNAARNIRAEGLSVLACGAGVRPTRR

SEQ ID NO: 20005 - protein, 398 aa, Nonomuraea sp.
VRRSFTFPLRPTRHQEIALAQCLEDHRQLYNAALEHRRTAYRVAGATVRYGEQSAELKHIRADDPEGQGRWSFSSQQATLRRLDKAFAAFFRRVKTGHKPGYPRFKGRGRFDTVTWQKDGDGCRWDSGPHHPTMTFVRLQGIGHVRVHQHRRVLGTVKTISVRRAGHRWFVVLSCDDVPAETLPPTGAMAGIDMGVASLTTTSDGDRLENRRHLAASAARLAVAQRELARAARGSRRHRKVAARLSALHAKVRRQRLDAAHKAALVLIRTYDVIVHEALEVTNMTRRATPQPDGHGGYLPNGAAAKSGLNRSILDAGWGVFLTILSHKAESAGRELIAVNPANTSRTCAPCGHRAKENRLTQAVFRCTACGHVAHADVNAATNILRAGLALRDAARAA

SEQ ID NO: 20006 - protein, 309 aa, Escherichia sp.
MASWLVEWKNATETQWLKDSPSQPLQQSLKDLERAYKNFFQKRAAFPRFKKRGQNDAFRYPQGVKLDQENSRIFLPKLGWMRYRNSRQVTGVVKNVTVSQSCGKWYISIQTESEVSTPVHPSASMVGLDAGVAKLATLSDGTVFGPVNSFQKNQKTLARLQRQLSRKVKFSNNWQKQKRKIQRLHSRIANIRRDYLHKVTTTVSKNHAMIVIEDLKVSNMSKSAAGTVSQPGRNVRAKSGLNRSILDQGWYEMRRQLEYKQLWRGGQVLAVPQRTQASVARAVVIQRKKIACHKVNSDARHVDIQRTLM

SEQ ID NO: 20007 - protein, 477 aa, unknown
  TnpB Polypeptide
MKLHKTLLLKIVEPNEGKRKKLENTIELYAKVLKFYLGVIPKLGMYRIASMDSKSALTFLEFNTVPTKTHPNPLYPIFGGVQTNIRRSAINKAVGMIKSYLSNLLRWHREGKELEHSKPSYPNPKNFSFTYYATDVEFEDVLSAKEFAFVKLKVIDEKGNYEFVNYPILPYRRFYEKLSELKSEGWKLKRSATLIKKGKSFYVALTLEKVVKKVKQERPKYVINVDLNIQKNLACIGIFEIDWEKRESRLYGIKFIKGELTKLAYKRDYLLEEIRLRQVLTGRSPERGDNRKLWRKIYNLNRDIALKVAKEIDEVAKYFKEKGEVVVVFEKLKGLRGKRGKGKRLNRKLSYWMRKSVQERVEYLAFENGYGIDFVYPHYTSKRCCVCGLLGERFSPNGSKALFGCSRCGYEVNADVNAVFNQHFVYLSHLLHGGGEARPVVRVGVSLKGLRKRRHNLSGASKAMATCCNHITNEVAP

SEQ ID NO: 20008 - protein, 209 aa, unknown
  TnpB Polypeptide
LKEKDKEYKVGKRKQQKFNTLKSKMIKSEQQLIANMCKTLQSQSVGHIVMEDLDNGFGKCYVKDKDNEDINYNRKVKFLGLSSLKQEVEHIARKYDIAVSTVQASYTSKMCPICGCIEDENRPNQETFECIECGHKDNADFNAAKNIKNRVCVTVLRNMILKQLDNGAFEPRKLKREKVKEVLLSFRRNLQENARSECREGSVTTFDYV

SEQ ID NO: 20009 - protein, 432 aa, Saccharopolyspora sp.
VKGNAYALSGRAGRKASLSRRLTQGTLLCKMISVRRAYKCRAYPDREQAAMLSRTFGCVRLVWNKTLAERHRRYHAEGKRLSYKETDAALTRWKRTEELAFLSEVSSVPLQQTLRHQHTAFANFFAGRSRYPRFKSRNGRQSAHYTRSAFRMRDGNLYLAKTTTPLEFVWSWPDIDITTLNPTMVIISREPDGRWYVTFAVDTDDPVPEPETGHTVGVDLGVKDFAVTSDGERIANPRHLERKARNLARYQRMMARKQRGSVNRRKAKQRVARAHRKVHNTRQDFLHRTSTRLVRSADVIAVEDLAVKNMVGNKRLARVISDCGWGEFRRQLEYKTERAGKTLVVVDRWYPSSKTCSYCGHLLGHLKLSVRAWTCPNCRTRHDRDHNAAKNILAAGLAVAACGADVRRGELARARSATKQETQPARVGTPRL

SEQ ID NO: 20010 - protein, 457 aa, unknown
  TnpB Polypeptide
MKLNYQYRIYPYTQQIQRLNQWLRICRYLYNRWLGQCLNWWDSNRCPINACSLVCYLSELADNPYLTDLKAQLPELKKDLVEVKWSGELLDLSKVYSTVLQDVYTSRLKKAMERYVLGDSNGKRSGRPRFKNVADYHSFRFSQAKDEWINTANQVLKLPFIGGIQYEKHRPLPDGFRLKTVQVIKKADGWYVNLCVEDPSVPVFNLDEVTPTWDNSTGMDAVLHEDDYLALSDAQKLPSLKSFRTSQSELAAVAKRKAARKRGSNRRRKLAKRESRIHQRIARSRKDHAFKTAHKIVRTGKKVFFHEDLDLKNLTKRNKPDLDEFGKFIPNGQSAKAGLNKSWTDAAFGNFFKTLEYIAAKAGAKVVAVRPNYTSQFLSYRDEKVFTDCNIREYWDEIEQLLVDRDINAAVNIKRVGLGLFLTINSRSGNIKVSHTQSTAMEVLRFLREFGKPTLTR

SEQ ID NO: 20011 - protein, 433 aa, unknown
  TnpB Polypeptide
MNISHQYKLLPTHTQKIQMSRWLDLLRHQYNFLLADRFDWWQSNRCDINACPLICHLPKLRDNPDYYGQKRSLVPLKVSRPWYKEIHSQVLQDLVMRVKLAFDRFIKGDCNGKRSGRPRFRGRNRYRSFTYNQVEDKDLQGNCINLAKIGLIKLVMHRPIPVGFKVKTAIISKKPDGWYVTLSLEDTSVPELAVDLKSTVDNSIGIDVGLEKFLADSEGEFEESPQYFRRSEEKLAKLQQKVSARKKGSRAKKLLNRKVAKLHQKVARQRQQFHFETVKKILNKANVVFVEDLTVKNMSKRCKLKQDETGRFLPNGQSAKSGLNKSIVDAGWSQFIDILSFKAERAGLRVVKVNPKGTSQHCSICLSAVPKTLEDLWHSCSSCGLEVDRDTNSAVLIKKVGLGVVLTIKRSTRKGREARAMPLVAWRREYVTR

SEQ ID NO: 20012 - protein, 403 aa, Actinomadura sp.
VKLMVQVRLLPTSEQASALRSTLHVCNVQANEVSRTAFERGVFRNHDLRKLTYRSVRDAGLGSQAAQHVIKKVADAYGTLRAGIRAGNFGRPGSRRRIKAESKPITFRPDAAQPFDRRNMSLALDAGTLSLWTLNGRLKGVPFACSTSARRTLAECRHGESDLLCRDGKWLLLVTVEVAEQPLNEEPDGFIGVDLGIANIATTSTGYRAAGRESSRHRARQARLRRRLQAKGTKSAKRVLKRQRRREQRRARDVNHCVSKRIVAEAERTGRGIALEDLTGIRDRVRHRRPQRAAFHSWAFHQLGNFITYKARRAGVPVVFVDPAHTSRTCADCGHRERADRVDQALFICRGCGVVAHADRNASRNIARKGEVAWDAGRRSSAPAPPRGGVGWTRRATRQPVGP

SEQ ID NO: 20013 - protein, 305 aa, unknown
  TnpB Polypeptide
VIKKQAFKFLLEPNKSQSSDFLAFAGSCRFVYNKGLALLNESYRSGKKFIGYNQLASELVEWKNEESLSWLKEAPSQCLQQSLRDLDKAFRNFFTGKAQYPNFKKKGRHDSFRIPCQRVRVDQEKKLVSLPKVGWVKYRKSREIIGDLKNVTISMKHGKWYISFNTEHTVPDPIHPSDIKTTIVLNNENSVHLSTRVGGANTYQAEEKKKLVRLNKILARRKKHSNNWLKTKGKIDSVISKSARIRLDNIHKATTAICKNHAVVEVVNLMDSVSDKNDNTLSMRYEFIRQLIYKQEWLGGEIIRR

SEQ ID NO: 20014 - protein, 421 aa, unknown
  TnpB Polypeptide
MKVHIKISNVKLRYQEVGSEELMDNFSLEVMRMVRAASRVVGGKCREGLISKICNQNGYITLSDGTTVKPTQARDDENWFKAIFKDCENKSLPVILIEQVLNRYASYKKRNKKFPNYVEFKKRSINIKKNYFKYCDKTDRVILRDLHNTNIHLDILDATSVTTHKETFINQLKAKLTKEDSKLTTSLWAANIMFDHRLIIPIVKLKIDDSHEAQNFFAADINKSRANWLQFNMPMNGVTCFPKPDIIAQKEDRLKKIQSVINETLEIKPHERKNHTVSFEGEEYKTTSGGRRRLRLEWIKGHKDLKKEISKLDILKEIESFIIDNELGYAHDDVATGQTNGTFSQDKLKKYWVDRADKANFPFEIVNPAYTSRECPKCGDRSEKNRSGDEFKCTNCDYENQSHTVGAINIGRKAMKSYSVK

SEQ ID NO: 20015 - protein, 342 aa, Symploca sp.
LYKCQQHKINTTSDVEAVLELVCSEVNKLINCGTYYCRQIFFKTNKYVSKYDLDEQLKSNPHFGALRSAVAQQALHGVVESFKSYRSLMKLHKRGELAPRPKLPKYRKKGGLAVATYPARWVKLVDGTLRFSLGTQVKAWFGIEAFVLPMPSNLNFKSIKEFRFVPRNGCFYLEFVYKQPDNKTIPYTKEALGIDPGLNNWLTCVSTTGKSFIIDGRKIKAQNQWYNKQVAELKKGKSEKYWDEHLAAITEKRNRQMRDNINKAARFVVNWGLTNNIGTVVFGWNQGNKDSINIGKRNNQSFVQVPTSRLKERLRELCEEVGIEFVETEESVRFVGWKPSPT

SEQ ID NO: 20016 - protein, 395 aa, unknown
  TnpB Polypeptide
MKTVLDSLCDYRRYCWNQGLELWNTLYDARLIGLSTELRDKIKASLTDKTIEFSEEEQALRALFPAPSERIVRDELVAQKADWQYKFSARTLQLTIKDLANAWNLFFSNPKTANKPGFQSRKKLKQGFKTDRARIINGRLVLDKPHAYKGEWSSIQFKGANTPDGELKLCTVTRVKGRYIATITVDVETVAFPKTGEKTAVDANVDHFDTTEGQMSLKPELLDCLYERVRTYQRQLARKRKVNKNYRHSKGYQATRAKLQATYERIRNIQNDLLHKFTTDLYCKFDIVVIEDLDVKSMQMKKKAKNLHRSLFGRFRQFMEYKSEKFGKTLIVADRFYPSTQRCSVCGHVKTGDEKITLSGNVKHGTKHHEYVCYECGYEGDRDHNAVLNLLAYSE

SEQ ID NO: 20017 - protein, 427 aa, unknown
  TnpB Polypeptide
MTGSIKIRLFPTEEQEDKLWEHVHAARKVWNWGLNIEMELFQNNEKHLSAYSLKKVLTQAKKSDELKWLNNVSSQTLNYVLLDLGKAYDDFFAVKPARYTKAKKAKAARTGKKLTSYDLEGHPKFKSKKDNDFRFPVRYDHTYFADRHVNIEKIGKISYQSDQKGVASLQSDEAKTSFPQGKDACKISNPRIKYTNGKWILSFGMERDNQALSLTNKPLGIDLGIKTTVTASFGGERIEYHNINKSKRVRGMERKLRHIQRSLSRKYETNGKRDIKSKYGQTKGVMKVKALKQKIESKLSNIRKNHTHQTTHELVSLLPHRVVMEDLSVKNMMKNKHLSKAIQDQAWGEFIRQMKYKCEWSGIEFIQVGRYYPSSKKCSGCGFIKKDLKLRDRVYECDACGLVIDRDYNAALNLERYGLPEEKGQSA

SEQ ID NO: 20018 - protein, 422 aa, Bacteroidales sp.
MIRAYKYKMKPTSNQEAYFAKCFGCTRFVYNYALSEKIKAYTNEKKTLSFFDLCALVRASRKDNEHKWLNEVPALSLNYSLLNLNNAYNHFFRTKSGYPKYKSKKDRHDSVKFEPNSTRYDFKNYKVRIPKLGWVRLCMGRTFDVSAVKINSTTVSRDACGTYWCTVTIDDGNTVPPKVKVERGASIGIDVGISDFAVLSDGTRLPNMQFSERSQKQFARAQRCMARKQRDAKGTPASRRYERYRIKLARLHRAVENRRTDYLQKTSTMLVRQYDTICIEDLNVKGMMHNHNLAGSIASVSWSSFVRILEYKSEWYGVNLLKAGRFDPTSQTCSVCGYRNNGTKDLSVREWTCPECGTRHDRDINAAINIVNTAIERHFNKQSPAVTGITDADGADSESKTGTSSRICDYASDETSMQNVLK

SEQ ID NO: 20019 - protein, 407 aa, unknown
  TnpB Polypeptide
MRLVERHIITKNHRLFAECDRVCFAAKNLYNLANYTIRQHFFATSTVLGYNALDKLMQPNDAYRALPSKVSQQVLMQLCRNWKAHFAAMREYGKHPERFQGKPKLPRYKDKEQGRFLALYTVQAVSKPHLRNGIVRLSMTTIDVPTKQRDIQQVRISPQLDHYVIEIVYEQAPKPYDLEKTADKSKIASVDIGIGTLAAVTSNQAGFPPLLINGRPLKSMNAYYNKQKAVLQSRMGGEKQTSRRIRKLTHKRNCKVDNYLHHASSVIIKELLKHRIGTLVIGKNPHWKQEVNLGKRTNQAFVNIPHARFIDQLRYKAALVGITVILTEESYTSKCSFLDNEACTKHETYMGKRKHRGLFVASDGRQINADINGAANILRKVFPNAFADGIQGVVVRPVRLTPYKVAA

SEQ ID NO: 20020 - protein, 175 aa, unknown
  TnpB Polypeptide
LELHLVCEKEIPVEDAPGDNTAGIDLGISNYLAIDYDDGPSELYPGNVLKEDKHYFICEECQTEGENRPSKRALKSRRKLFRRKDHFLHTLSKHIGERCVEEGVEKIAVGDLSDIREDENGDSRNWGASGNKKLHGWEFDRFARLLEYKAEEHGVLIDRVDEENTSETRSCCGQI

SEQ ID NO: 20021 - protein, 366 aa, unknown
  TnpB Polypeptide
MRKEFIETGQVTSAYDFNKMLKNEEVFRALPSKTSQQIIMKLAKNWKSFFKAIKDWSIHPEKYLGRPKIPKYKEKNGRNIVLFDYQQGSFKRDRYCFPKSEHFIEMKISKEQFKQLQIVPYGSCYKICIYYQIETPEKEYYNDNYLAIDLGVDNIATLTNNIGLQPIVINGKIVKSINQYYNKKISKLRSFVGNKTSNRMKKVSHKRNNIVDTHFHHISRWIINYCKAYDIENIVIGKNKGWKQNSTMSKSSNQKFISIPYEKLIHQLKYKGEELGIRIIEIEESYTSKSSFIDGDEMVKDTDFSGKRISRGRYRSKNGILINADVNGSYNILRKCNAQFSYESIEGLPLIPVRLSVAPNKEVKKV

SEQ ID NO: 20022 - protein, 443 aa, Deinococcus sp.
MLRVSTRRWIAQAPEGGGGRCFCLKRKRRRVLCWNSKNPPPFWGVRRGGRRTPLEEVTRIQTTTHLKTFRYRLRPTKAQESVLLEQLRLCRNLYNAALQERRDAYRKAGKTVTAYDQMKYLTEIKAALPEYKGVYSQVLQDVLKRLEKAFQGFFRRVKAGQTPGYPRFKGAGWYDSICYPQSGFSVSEKTAYFSKIGNIRIRLHRPLSGKVKTATITRDCGEWYVSYVCEVEAAPLPATGSQVGVDMGTTYFCITSDGEFVENPRHFQRSMKALRVKQRSLSRKKRGSNRWKKAKAAVAKLHRKVARQRLDFHHKTATKLIRENDLVAHEDLNVSGMGKGNLARSIHDVGWGQFFSLLAVKAVSAGRQVIRVDPKYTSQACNKCGHTCRENRVSQSRFVCVACGHTANADHNAALNILARALPSVQNVEVMRGLRSPGLQSGE

SEQ ID NO: 20023 - protein, 264 aa, unknown
  TnpB Polypeptide
MEYSHRYPAYPTQEVAAELQHHIDIHRQAYNYTLYEYENVDADDIGSAYKHHYRLPDWKDEFPVFSEVNSKALQRTVTRFYQNLDGLSEQKQNGRKVGKLKWKSPREFQSMTYSQSGFELKNTSGRRATLWLSKIGDIPIRYHREIPDEEAIKEVIIKKETTGEWFVSFGLETDEADLPEKPDVDSLDTSNSVGVDLGILNYIHTSDGKIVDWLNLKDEYARLRREQRKLSRKKKGRTTTRSNAEKWRRSSVTSVGRCWTTSTS

SEQ ID NO: 20024 - protein, 367 aa, unknown
  TnpB Polypeptide
MNRAIKYRIYPTKSQEELLQKTFGCCRKIWNLMLTDKINYYKETKQILQTTPAQYKEEYDYLKEVDSLALCNVQLHLQTAYKNFFRDKKIGFPKFKALKISKKSYTTNNQKGKIQIIDDTIKLPKVGKIKAKIHKKPKEDSIIKSATLSQERDGTYYISVLFEYDEVIEKVEITDKVLGLDYKSDGFYMDSEGNVCGSPKYYRKSQSKLKRLQRQFSKKVKDSKNREKIRLKLAKLQRHISNQRLDFLQKESTRIANLYDVVCVEDLDMTAISNKGFRNGKATLDNGYGMFLNMLEYKLQDRGKYFVKVDKWYASSQICSKCGNKKKIKLNERTYTCDCDNTIDRDLNAAINIKNEGLRLLKKSLIK

SEQ ID NO: 20025 - protein, 394 aa, unknown
  TnpB Polypeptide
MIRSIKVRLNPNNKQLTKLFQYAGCARFAYNWAISREEENHKQGNKFLSDMDLRKEFTQLKKLKEYKWLNEISNNVTKQAIKDACNTYKRFFKGQCNRPKFKNKKHSITSFYQGNDRIQFTDTHVKVEKFSISKKPNKQKLNWIKLCEKERIPTDCKYMNPRFTYDGLYWYVSVSIEVDNDTENILPSNEGIGIDLGIKDLAICSDGNTYKNINKTQRVKKLEKKKRRLQRSVSRRYNKNKKGENYCKTSNIIKREKELLKIIKHLTNIRHNYLHQTTSEIVKRKPSFICIENLNVSGMMKNRHLSKAVQEQKFYEFRRQIEYKAKWNNIPVIIADRFFPSSKMCSCCGNIKKDLKLSDRIYKCECGNIINRDFQASLNLKKYGEDVLKQQSVA

SEQ ID NO: 20026 - protein, 423 aa, unknown
  TnpB Polypeptide
MKVHIKISNVKLRYKEVGSEGLMDNFSLEVMSKLRKTSKIVGRKSREGVLGKICNQNGYITLSDGTTIKPTQARDDENWFKEVYQDCENKSLPVILIEQVLNRYASYKQRNKKKGFPNYIEFKKRSVNIKKNYFKYCDKTDRIIIRDLHNTNIHLDILNATSVTTHKETFINQLKAKRTNEDSKLTTSLWAANMMFDHRLIIPIVKLEIDDLYEAQNFFAADINKSRANWLQFNMPINGVECFPKPDIIAQKEDRLKEIQSTIKETLKIKPHERKNHTVPFEEKEYKATSGGRRQLRLEWIKGHKDLKKEISKLDILKEIENFIIDNELGYAHDDVATGQTNGTFSQDKLKEYWIGRADKANFPFEIVNPAYTSRECPKCGDRSEKNRSGDEFKCTNCDYENQSHTVGAINIGRKAMKSYSVK

SEQ ID NO: 20027 - protein, 238 aa, unknown
  TnpB Polypeptide
  misc_feature (41)..(114): Xaa can be any naturally occurring amino acid
MRSGSRFLPHTNEGIYEVNYKIREQMYPPSSKRVFRKGSSXXXXXXXXXXXXXXXXXXXXXXXXXXXXXXXXXXXXXXXXXXXXXXXXXXXXXXXXXXXXXXXXXXXXXXXXXXELGVSTIYLGYPFNISQEKGNKFTVNMWSYRKLIDAIELKAQEYGIKVYEIIEYNTSRYCAYHNVEVKRNPRGVINCPLRHKLHSDLNGALNILKKVTGKVLSSIKKPLSFIVEHNRVAPVKGV

SEQ ID NO: 20028 - protein, 94 aa, unknown
  TnpB Polypeptide
MMRNHKLAQHIGSASWTKFFDMLSYKATWYGNDIVKIPTMYPSSQTCSCCGYKNPLVKNLAIRNWECPKCQTKHDRDTNASINILNKGLQMQST

SEQ ID NO: 20029 - protein, 387 aa, Streptomyces sp.
LLVKVVTQVKLIPDAAQASAIAATMHTFNSEANWVSEVAFMNGVPREYALRKLAYAQLKERGLGAQVAQHVIKKVRDAYTTLHAGLRAQNLGRPGSKRRRTAQAKPVVFRPQAAQPYDDRCLSWQYDAQAVSIWTTAGRLKNVRFACSADALKMLQQYRKGESDLIERDGVFYLLAVCEVPEAEQYEPDGFIGVDLGIANIATTSTGYQAAGRGLNRYRKRQLALRAKLQKKRTKSAKRRLKERSRREARHVTNTNHIIAKTIVTEAERTSAGISLEELKGIRQRVRLRKPQRVTLHSWAFAQLADFIVYKARRAGVPVVHVDPAYTSRQCCECGHIDKKNRASQALFICLNCGVVAHADRNASHNIARKGDAVWIAGRESRVPATP

SEQ ID NO: 20030 - protein, 407 aa, Microcoleus sp.
MKVVKLRIYPTPEQSVALAKAFGCCRLVWNRSLQLTTEAYRQTGKGISGYDLKKMLPQWKQELEWLGETYSQCLQSSVLNLSRAFVNFFEGRARYPRFKSKHKRQSLQYPQNVKLEGDQLHLPKIGEVYCRVHRWFEGPIKTVTVSRHPDGRYHASIMIDDGSEKPEPSADGKAIGIDLGLKHFAVTSDGEKYNNPRHLKKHERNLKRKQRKLSRKQQGSNSRQKARRLVARVHSKIANSRADFLHKLSRKIVNENQVIVVENLAVKNMVKNHSLAKAISDVGWGIFSAMLKYKAEGEGKVYLEVDRFFPSTHLCSETLLPLPQMGLDVRSFECPQCGKIHDRDLNAAINLKNEGLRIWASGTGASASGGNVRPKRGRIRSMLSEAIPDKTGSPRCTRSGTASGSSR

SEQ ID NO: 20031 - protein, 551 aa, unknown
  TnpB Polypeptide
MIVKSKYIRIFHSNCMTRRKYDELYEFAVLARSHKNIVSQFVNDNLLHYLDYSKFQFVKEMRARYHGCISSSFDYQLYSDVYVRYQNKFSAIIKKMTFYVVDFMGFELYKKNTRKHKKGDLKRILFKKRKTKLSVCLTYLARHGNANTLRYLEQQVLVCTDADKVKFYKDIIECCEKFGFKRLFRLAMDKRERIVRKYSEHPIEFKSLTFGGRSRKDTLLAYNKRFGSVINAFITLSGFNRKTFDIPVKFNKDWFGSMKDYNNASTGNFEYLMMFDEKNHQVKILLCRKGDRYVPDVDSEKETVGIDVNCKHNLFSISDGTTYDYDRRLVNDYCKCCLEVDELKSKNSDYVVGKRRQRKLDKLDEKMLKSEQQTISMMCKRLQSENVGHIVMEDLDNSFGKCYVNDSENDNINYNRKVSFLGLSSLNDEVEHIARKYGIAVSTVQSCYTSKMCPVCGCIDDDNRPDQETFRCIECGHSDNADFNAANNIRNRVLATVLRDKLLKQQDNGSYKPRDLKKDEVKKVLLSFRRNLQQNAGSECVQSAKDGFEHV

SEQ ID NO: 20032 - protein, 498 aa, Bacillus sp.
MTKPKKDCFIIELKLIVDTWQKDILLNRFEIARKLYNTTLSYAMKQCKLMKESKAYRKQLRCYQKAKKEKHPKEWKEIAKELDTIRQSFGLSEYQLHAYIKKHQHNYKKHIDSNTSQKIASTVWKAMQDVLFKGANPHFKPYGMLHSVEGKSNKAGIRFKENRVYWNGLIFPVRFRKHDLFIEESLALHTIKYCRLVKKVIHGKDTFYLQLVMGGIPPAKRINKTGAFRHSYQKKQRIGIDIGPSTIAIVSEETVSIQRLVPDVPLFEKQKRRLLRKLDRSRRSTNPNNFNENGTIKRGIKLHWICSKSYQKTKNLLNELYRKKASYIKEKHGALANHILSLGDEVYIETMHFKGLAKRTKETKTNQQGKFQSKKRFGKSIGNYAPAILVDIINQKLKYGKQEIQKVNTITFRASQYNHVTNTYEKKKLHQRWSQIGNHLVQRDVYSAFLLMNSDVNLKQTNQNRCIQTFDTFVKIHHQHIESLQQTKKKYPLSMGIL

SEQ ID NO: 20033 - protein, 378 aa, unknown
  TnpB Polypeptide
  misc_feature (199)..(199): Xaa can be any naturally occurring amino acid
MYRVKPSNAMLSNKKQGGEIVSQTITVKIKLLPTKVQALTLTEMSKIYISTINDLVFEMVKEKKSTKKTSKNIDVSLPSAVKNQAIKDAKSVFKKAKKTKFETVPVLKKTMCIWNNQNYSFDSTHISLPIMIDGKTKKTPIRALLVDKDHRNLDLLKHKLGTLRITKKSGKWMAQISVTIPTSQRTGMKIMGVDLGLKXPAVAVTDDEKVRFFGNGRQNKFKKRKFRSVRKKLGKKKNLTAIRKLNNKEQRWMLDQDHKVSRAIVDFAKENNISVIRLEQLANIRQTTRTSRKNEKNLYTWSFYRLSQFIEYKAKLEGIKVEYVNPAYTSQTCPKCSEKNKAQDRKYQCKCGFEKHRDIIGAMNIRYAPVVDDKSQSA

SEQ ID NO: 20034 - protein, 438 aa, Lactobacillus sp.
LASEYYIKATPELDRAAEIAHKIYNAALYQLRQALFKRKGSIYYEGLDRIFKNKRNANELMLYGQMPTVQCAQQTLKEVAAVWKAWFCALQSYKIAPQKFTGRPRIPRYLKKSRRHTFYVTPQNARVKEVKSADGKDVVARYLIIHSLGLSIKLADGIKKVNRIAIKPLSNGYKLTVAYTPAANQKPYLPDNGRYIGIDPGVDNAFACVSNTGDKALLINGRAIKSANQYYNKRMAKLKSLQAQYHQLESIINTKQGPKAVYGQTKSMQRLTDWCNAKIRQFAHKTSKRIVDYALSCGANTIVIGKNKTWKRSVNMGKKNNQNFVGLPHQQMINMIRYKANMVGITVICTNESYTSQTSALDGEKPCWNNGNKSRKKQGLSPANRRIHRGMFRTNKGLLVNADINGAMQIVRKVFPNVSFANGIVDAVLHPAKWSPLI

SEQ ID NO: 20035 - protein, 307 aa, Unicellular sp.
MYGCQQNLIHASGDITAILEFICSEANKLANCFYLECVYKQNEVKKVNPNLNVLGIDHGLDNWLTCVSNTGKSLIINGKKVKSQNQWYNKRVAQIKKGKAQDYWDDELSFLTEKRNRQMRDDVNKAARFIINWCLQNDISIIVFGWNQRQKDSINIGKKNNQEFVQIPTAKLKNRIAQFCEKYGIRFIETEESYTSKASFLDNNLLPTVGKKPDGWQPSGKRIKRGLYQASSGQLINADCNGSANIITKVITQLKVSLAKVSRGVLSLPQRYDLDRLSRSYRKRCEASIYKGLWGESHSPLYKPRGA

SEQ ID NO: 20036 - protein, 387 aa, unknown
  TnpB Polypeptide
VLKAYKYRLSPNRQQSELINKHIGSVRFLYNLALETKRMAYASNKINLSRYDLQKQLKDLKKECVWLKEINSQSLQVSLMHLDAAYLKFFKGQSNFPNFKKKSNGGSFNIPQNVILENDKLIIPKFRKGIDIILHRPIKGKIRQATISKTPTGKYFVSILCETGESIKPKVIIEESTTIGIDLGIKTYLVTSDGQEFDNPKFLREAQNRLKYVQHKYSIYKGKNTKHRLAILHEKVANQRKDFLHKTSTKLIRENQSIAIEDLNVSGMVKNHCLAQSISDAGWNMFVTMLEYKAEWYGRNILHIGRFEPSSKLCSECGYVNKELTLEDREWTCKVCGSVLDRDRNAAINIKNFALKNYLSGTDRKTRNELPTLVGVMTSDASQQAAR

SEQ ID NO: 20037 - protein, 347 aa, Methanocalculaceae sp.
MIISYKYRAYPDAATEAELNAAPDTCRWLYNTLPGECNAMREKWDPANHARNAGTDRHAERGASVFQGCVLESASDGELFSLEQHRLTLADEEERTKDWKLRFKSASRFRTLNYNQSGFSSTPGRVRSRSQRSEPFPLRLYRPYTKTVKGVLITRCGDTWYVIIQAAAVIESTREGRSVGIDVGLNSFAVDSDGTAIENPRFNERSLNTIRKLQRSIARKQCFSKNWKKAKSRPEKAHDHVTNQKRDFLHKLSRSYVDRYRTICVEDLDIKGLKETGSSKGLHRSIHDLSWGRFYSYPGYKVLSAGTQVIKVDPRNTSHICANCGSIVKKTLSERLHECPYLRECYR

SEQ ID NO: 20038 - protein, 397 aa, Actinomadura sp.
MSRYRLQPTPAQEQTLLEHCGHARFVWNLAVEQHACWRPGRGSAPGFAEQCRQLTQARAEHSWLHGGSVTVQQQALKDFAQAMAHFYAGTHRRPTWRKAGRHEGFRIVAVKPGDVRRVSRRVGQVRIPKVGWVRFRWSRPVPDAKSYRITRDRAGRWHVAFAAIPDPIPAPGTGEVVGVDRGVAVSAALSTGDLLHAPGLRDGERARLARLLRRLARARPGSRRRARVKAAIARLKARETDRRTDWIDKTTTDLARRFDVIAVEALNINGMTRSARGTEEAPGRNVAQKAGLNRRILAAGWGGLVRRLEHKARGRVTKIDPRYTSRTCNACKHVAGQSRESQAVFACVACGVRVNADVNAALNIRDKAAGHAVTARGGPPLGGPVNREPQHHPPLTG

SEQ ID NO: 20039 - protein, 470 aa, unknown
  TnpB Polypeptide
MGKTITKTVKQYSYELDDYEVEELLKIGREYKNVKNYVYSRYNGIKSLLIIEKPRKIRDEWVSTKFYEQWDLPARYWKLALQDAIGNIKSGWSNTKNEIRTAAYNNEHLSTDDRYYINYILSANKLYYNVLNNINFDIPKKFEGKNLNIKYLNNLIKRYTRRYKGKVPYTNKINSFSIDTGLYRYSKNNTNENYIYISSMETRKRVPIKLRDSNEYNKILKIKIIDNVLRINIPLEVESKENTNENIIGIDKGYRYLLATSNGNLYGEKLNYYLSKETERLNNKNVNRNRFFALRRKYLEEGNTKKAENILKNNLGKKKYRKNKNKHDEKVKSYINKNINEFIKSEKPKEVVMENLDFVNWDDRYPKSVKRKLSRWIKGYIRDRLEYKFKLSSIEFTYINPAYTSQICSKCGRFGIRNGDSFVCDNCGEIHVDINASKNILERKYDKKIKMFTSYKKVKEILESRIADTK

SEQ ID NO: 20040 - protein, 414 aa, unknown
  TnpB Polypeptide
MYLTIKQQLKKLKKDEYLTLRELSHIAKNLANEALYNIRQVYFKEDKYLSYNENYNLLKESKNYKLLNSNMAQQIIKEVDGSFKSFLALLKLSKKGEYNNKINIPKYLAKDDFSTLIIGFVRIKDNKLKIPYSYQFRKNHNYIEIKIPPILRDKKIKEIRIVPKAKARFFEIQYIYEVTEIQMKLNKNKALAIDFGVNNLATCVTSSGESFIIDGRKLKSINQWYNKENSRLESIRVKQGYENKTNRQNKNTIKRNNRVNDYISKSAKLILNYCIKNKIDCIVCGYNSNFQKDNNIGKINNQNFYNIPFGRLYKKIEYLSKLYGIKFITQEESYTSKASFLDGDFIPILEENDNKRIKFSGKRIKRGLYQAKNGELINADVNAALNILVKSKVVSLDRLYCSGELNTPLRIKVS

SEQ ID NO: 20041 - protein, 349 aa, Lentzea sp.
VAFEQGVFREYALRRHTYRELKSRGLGAQAAQHVIKKTVDAYATLRASIRNGNLGGEGSKRRVKAESKPIAFRAAAAQPFDDRCLSWQHDARTVSIWTTSGRLKGITFTGHPDQLATLAKYRQGESDLVCEAGEWFLLATCEIPEKPQFEPVDWIGVDRGIVNLATTSDGNNFQGRRLSRYRRWHARKRQELQAKRTKSATRRLKRRAKKEARHATHVNHKVSKRIVAVAERTGRGVALEDLQGIRDRVTVSRHQRATLSTWPFHQLGQHIAYKARRTGVPLLEVDARYTSQMCPRCGHTARVNRSDRDEFRCRRCGLAGPADVVAAVNVRERARRAWVFVNMPELRLA

SEQ ID NO: 20042 - protein, 361 aa, unknown
  TnpB Polypeptide
VAKSFRSWLGASRFVYNATLDYLKGIEGPRPHWTVVASAVLSSLPAWADETPYQVKKIAVKDACDALSAAKVRAKKSGLPFRMSYRSKKQPTQSCFIPKSAVSERGLYHTKSGAGLVYREPLPSDFSDCRLTLRDGRWYLCTSYAAATTQAENQGRVVALDPGVRTFLTFFSEGEAGKLGHGDMGHIVRLCYRLDDLLSRMAKAPARRRAAYRKAADRMRWRIRDLIDELHHKCARFLVDNYDVILLPTFEVLQMVRRTSRKIRRKTVRSMLTLSHFRFKQFLKAKAFEAGKTVVDVCEAYTSKTCSWSGEIVPIGGAKTIRGSDGVSMDRDYNGARGIYLRALVDTPTQATSLGAMVGVS

SEQ ID NO: 20043 - protein, 445 aa, unknown
  TnpB Polypeptide
MKRAPFGALFISRPRARKPRRSGRGGASALTLHVLLDTYNRHRQSVNVLRAYRYRFYPTPEQESVLRRTFGCVRLVYNKALHARSEAWTLGKESIGYVAQSSALTAWKKTPDLAFLNEVSSVPLQQALRHLAVAYTNFFSKRAAYPSFKKKRSNGSAEYTRSAFKLDGQSLTLAKMNGPLDVRWSRPLPEGARPSTVTASLDTAGRWHVSILCDDPTVSHLPKSEQAVGLDMGISSLVTLSTGEKVANPRWDEREKKRKRTLARSLARKEKGSKNRLKAKLKLARLHARVADRRKDHLHKLSTRLVRENQAIVVEDLNIRGMVQNRSLARVISDAGWSMLVGFLDYKSKWYGRDLIKVDRFYPSSKTCSACGFVVERLPLDVRRWSCPACQAEHDRDENAACNILAAGLAVSVCGPGVSQRALRGAVQSGMKQKSLAVKPGILAL

SEQ ID NO: 20044 - protein, 316 aa, unknown
  TnpB Polypeptide
MKYRQPPCSRSNVTLSSSPNSTSTRTGKKKIGKPNYKNKHDNQSFRLPFPKFKITDNKIRIEKIGWVKIVIDREIPDNARFISCTVSKNRAGQYFVSVLVETEQCYKQKTGKTVGVDLGIKTLATLSDGISVENPHFLCENQAKLKRMQRHLSRKKLGSNRRNKCRLKVSRLHCDIANKRSWHMHNLTTMLVNNYDVICIEDLNVSGMLQSHKLASSVSDTSFSMFRNQLEYKCRWYGKELIVIDRFYPSSKTCSRCGWKNKDLKLSDRTFVCKDCGLEIDRDLNAAINIQAVGVDAAIRTQSSRVASCVEASKME

SEQ ID NO: 20045 - protein, 411 aa, Micromonospora sp.
VRLRYNYRVYPTPDQQEALARAFGCARVVFNDGLRARQAAWEGGLAYVSDGELSKRVITEAKKTPEREWLGEVSSVVLQQALADLNTAYRNFFNSLSGKRKGRTVGPPRFRSRKANRQTIRFTANARFKVLDNGRLRLPKIGDVVVRWSRALPADPSSVTIVKDATGRYFASFVVATTDAPLPAVEAEVGIDLGLTHFAVLSNGRKVAAPKFLRRAARKLRRLQQDVSRKQRGSNNRKKAVVKVAKAHATVADTRRDWQHKLSTEIIRDNQAVYVEDLCIVGLGRTRLAKSVHDAGWASFIAMLEYKAARAGRTFGKINRFTPTSQTCSRCDRIDGPKPLNVRTWTCPCGAVHDRDINAAINVLAAGRAERLNACGARVRPAPVPAPRREAGIHPNAARSTARTAEGIPTL

SEQ ID NO: 20046 - protein, 495 aa, unknown
  TnpB Polypeptide
LSENCAYRYSHINPCSISQAWPSRYTSSSRVSTVSAGSAAGWPSASPDIVTGTSGGSPGLVAGEECGAAAARGVAGFVGGAWHAAGVRTAYRCRAYPDAAQQQVLARTFGCVRVVWNRTLAERRRRWRQEHRGTTYAQTDAALTVLKKDPELAWLNEVSSVPLQQALRHQHGAFRAFFGRRARYPRFKSRHGRQCAHYTRSAFSMRDGQLRLAKTPGPLAFVWSWPEAGLGVLDPTMVIVSKEPDGRWYVTFAVDASEPEPLPAAGRSAGVDLGITSFAVISDGERIANPRHLQRRARNLARYQRRLARCQRGSANRAKARAKVARAHRKVRDARRDFLHRTTTGLVRGNDLIAIEDLAVQNMVRNRRLARAISDCGWGEFRRQLEYKCQRAGRRLIVIDRWYPSSKKCSACGFLLAELSLSTRTWRCPSCRTRHDRDLNAAKNILAAGLAAARRLPGDACGADVRHLETPPVQSAVNQEPRLARAGIPVLQGGE

SEQ ID NO: 20047 - protein, 424 aa, unknown
  TnpB Polypeptide
MTIITEPLSLEKDDKRIIKNNKIKQSLKNTRNRRKNQEAKTYECKIVKNKLTPQQLEILDKMFLEAKWYYNSIINHLENENINTFDNKVKTVKVRMGSESDDYEDRQLKVLPASMKQKLITRVKDNLSSLKARKEKGYKVGRLDYTKSITSVPLKQYGIDYVVLPNNKVRISKVGRVNVRGLDQFSQDAEWSTANIIKKANDYYIHITVYINKVIDNSWVDLPIIGLDFGIKDHITTSNGLKINSIITITKRIKNLQRKLSRQVKGSKNYIKTIIKIRKAYDRLSNLKDDAANKIVNYLLTHYSNIIMQDENIKGWHSGLFGKQVQYSILGRVKARLVSNPRVVVLNRSVPTTQYCPNCGALNKHFLDKRVYSCSCGYSMDRDIHAAMNMINLYVKNSSNGNIVKKSPVECGSTLEEFITSGTV

SEQ ID NO: 20048 - protein, 350 aa, unknown
  TnpB Polypeptide
VLQELALAEAFRGWYGKRRNGDVRANPPGYRKRGDEHPRSTVTFKAAGFKLDTQYNRVRLSQGANLKNYWSDFILCTFHTRPDVDLSTVEAVQQVKAVWTGDEWELRFVCQVEIEVSESPGEKTVGVDLGIKNFAALAYEDGHSELYPLNCLKQDDYYFSKRIARCDDSHSEQATRLNQKKSERRTHYFHALSKHIVERCVEEDVGTIVVGNLSDIRVDEKTDEAKNWGRHGNLDLHSWAFDRFTKLLTYKAETEGITVEQESERNTSKSCSCCGRKRDGNRVERGLYVCDTCGTVANGDVNGAENIRQKVSPSSPNLSVNRSNGWLAQPSTFLFDKETGAFAPQERVRS

SEQ ID NO: 20049 - protein, 291 aa, unknown
  TnpB Polypeptide
MSSSKFRVWLNHEYLPQHPEYLWIKEAYSKAVTQAVNHGQTAFKKFFNHESAFPKFKKKGRSDVKMYFVKNNPKDCRCERHRVNIPSLGLVRIKEKGYIPTTKEGYIIKSGHVSMKAGRYYVSALIEIPDNKTADLSNEGIGIDLGLKDFAIVSNGKTYKNINKSARLKKLEKRLVREQRCLSRKYENLKKGESTQRANIQKQKLKVQKLHHKIDNIRTDYINKTIAEIVKTKPSYITIEDLNVSGMMKNKHLSRAVASQRFYEFRIKLKAKSRENLPLLWNDQERFKTFK

SEQ ID NO: 20050 - protein, 137 aa, Planktothrix sp.
LSRKQKGSKRREVARKKLARLHAKISDTRNDFLQKLSTKIIRENQTIVLQDLNVSGMVKNRKLARAISDLGWQYFRTMLEAKSVMYGRDFRVIDRWTPTSQTCSCCSFRGGKKELNVREWICWNCGIFHDRDVNCHH

SEQ ID NO: 20051 - protein, 421 aa, unknown
  TnpB Polypeptide
MPYRTVKIQLFPKPEQEKRLLLTLHACMATYNDLNEYCRDCIARYREWKESLGIDESEDASLYETDSNPMPRFPSEFDLRAKAREFREINLWRREAYGKPVEETGSRIYKTYQHWFDAMACDTSAGLPRFRSDGSYDSYTFSYNNQYHFDTQGLFKGKKPRIFLGGVGWVRFSDTGILKRYPFECMKTAVVSRKKMGKTNKWYLTISCEMSEVPDNRTWYLDTTTPDPVGMDLGARRVATFTDGTIVENPRTQRRNEDKLARIQRKISKTEKDSDERKKYLGHQNHLLKKMNDSKNDRLHKATRSIVQDHRKIFVEDLSVRDLIDLQDNSETRKLFRDASAGTFMRLLRYKGEESGSEIVPVNPAYTSRICTKCGRLNEPFSEETFRCRFCGFTKHRDDNACVNVLRRGMGFDILGTSPIA

SEQ ID NO: 20052 - protein, 425 aa, Tissierellia sp.
MICFGKVVKTMYLCVKQQLKKLSKEDYLNLKELSHIAKNLYNEGLYNVRQYYFQEKEYLNYPKNYNLCKSSENYKTLNSNMAQQILKEVDGVFKSFFGLIKLAKKGSYNFKDIKLPKYLEKDGFATLVIGFVRIKENKLIIPYSNTYKKEHKPIEINIPPILLDKKIKEIRIIPKSNARFFEIQYTYEVVEEQRELNNQKALAIDIGINNLATCVTNEGKSFIIDGKRLKSINQWYNKQNSKLQSIKDKQKIKGITNKQSNIINNRNNAINDYINKTCRYIINYCLDNEIGTLVIGYNETLQKNSNLGKKNNQNFVSIPVGNIKEKLEYLCKLYGINFLKQEESYTSKASFFDKDIIPKYSEYNPVNQTFSGKRVKRGLYVTKTGYSFNADQNGALNILNKSSVVDLTVLYSRGDVDTPIRIRIA

SEQ ID NO: 20053 - protein, 421 aa, unknown
  TnpB Polypeptide
MNCKKQTAIKTTLVETRKRRKDQTARSYTLKLDKSHLGAKKAILERLFLEVKWFSNHALENQLKVDCLIKTVRVKVGSRFEERAINLPSQVRQEVLDWMRDDVRSLHAKKVKGYRVGRLRFKRVVNAIPLKQYGITYLIAGSHVRVQGVGWLRVNGADQIPADAEMASATLVRRHGDYYLHVNTFTPKEKNKNGLAIGSDFGIKNQVTFSNGVQINYAVPLPKRLRGLCKSLSRKKGSRKGERKSKSWLKALAKVQQAYAAHTNHKRDIRNKMFHFLRANYQYVAFQNDCVAGWQRLWGRRILESSIGGLRSTFFRVDTPIEVPRFYPSTMTCSGCGHVQRVGLDERVFRCEKCGLEIDRDLNSANNNLTEGLRSVGVTPVEKETSILMLKYFNSILGVRASLIREAGSPQALAVGSSPPL

SEQ ID NO: 20054 - protein, 382 aa, Acidobacteriia sp.
MESLLGCLNWLYNQALENRKSAYEQRKESLSFYDQCKWLTQLRTANEHQLGEIAIGASRGMLKRLDLAFQAFFRRVRAGEAPGFPRFRPISRCRTIDVADPHNGMVRFHNGYYLIRLKGFPRLRVRSARPLPLHAPLKAVRLTQRGHRWEASLVYAVDKQPLAPAVAAVGIDLGIRKRMTCSDGTVVARAQRDWKRKRRLQRSVSRGQKGSATRRKRVAALQRFDRKQYICERNACHRATSGIIRQHGLIAVEALKVTNMTRSARGTVDRPGSNVKAKAGLNREVLAQNWSLLRSQLRYKAAWAGREYVEVDPKHTSQDCSRCGARNDPGRSETYRCRACGLVADRDVNAATNILAAGVIAAGASTWVVRPCVAPEPYARVA

SEQ ID NO: 20055 - protein, 460 aa, Chlamydiae sp.
MLMGISIPVKPKNSLKLTFSQWMGCDRFIWNAKCDEDHYLMNYAKKFLPINTYPKINQKYSKYKDKVLSPWLFNTPSQILRNSAVNWFKTYQNFLKGLCKKPKRKKKSNKGSIHLTKELFYFEKISKSVIRLFIGTKKNTIGYLTLKIHKPFREPTSIRIKKRNGKYSVSFCYEDGLDESELMNQEDHLNYLKKFTRKDLEDQTIGIDLGVKIPVQAGDDIFDFSKEQKNKKKAKEKYIKRCQKALSRKKKGSKRWQRQKHKIAKAYDKISNIRKDFCHKTSFSIVNNEKTKVIIFEDLKTQNMTKKPEAKKDEKTQKWLPNKRKSKAALNRVVLDKNWHQVVTFVKYKAYRVRKAVFKVSAHYTSQECVNCGHTHPNNRKKQDVFICENCGHVDNADHNAAKVIKKRAINLILDSGTELSKRGVLLDRGRRAENKTRKANANRAHGYEMSKKMVKAKVA

SEQ ID NO: 20056 - protein, 407 aa, Calothrix sp.
MQLVERHIISRQHKFWLECDYLALQSKHLYNCANYVQRQYFFDSQKYYNSNDIYHQTKNLDAYRYLPTKISKQIVRRVAVAWSCWLAALKDWSKHPDKYLGQPKMPRYKHKERGRNVVIYPPDAISKPAWTKGIIKLSQTNIELKTQAKNVLEVRIVPKLEHYVIEIVYTLALPAKTDGKYIAGVDLGLNNLIAITSNHPGIKPLLINGRPLKSINQFFNKRVSKAQSIAANRQIKQLNSKRDRRIDNYLHTSSRRVIDWCQLNEIGQLIIGKNLGWKQDINIGKKNNQNFTKIPHAKLISLLTYKAQLAGIEVILTEESYTSKASALDGDKLPTFNKKSDIKPVFSGQRVKRGLYKSSTGRIINADTNGSLNIVRKVIPNFMDGIVGLPFIPVVLGLWTKITNVNV

SEQ ID NO: 20057 - protein, 142 aa, Paraburkholderia sp.
EVARMHARTADSRRDFLHKLSSRLINENQVIAIESLAVSNMQKNRCLAKSISDASWSEFTRQLEYKAQWYGRTLVGIDKWYPSSKRCCDCGHTVVKMPLNIRAWTCPECGSIHDRDINAARNVLAAGLAASAHGDSVSPMSL

SEQ ID NO: 20058 - protein, 226 aa, Ruminococcus sp.
  misc_feature (11)..(14): Xaa can be any naturally occurring amino acid
  misc_feature (207)..(210): Xaa can be any naturally occurring amino acid
MVLCAFKSHRXXXXLKLYDGHDWKWFCVHLNHTDMEYLRRNWSGKKASAPTLEKRHHKYFLRFSYTEEVTLTKTPVKEQIICSVDLGINTDAVCTIMRADGTVLGRKFINHPSEKDRMYRTLGRIRRFQREHGSAQSRGRWAYTKRLNIELGRKIAGAIVKNAEENHADVIVFEYLEMQGKISGKKKQKLHLWRKRDIQKRCEHQAXXXXKTETASVEKTGYPETL

SEQ ID NO: 20059 - protein, 365 aa, unknown
  TnpB Polypeptide
VYNQAVAYQKANGRIGKLKLRNAIMQSDLPQWVLDAPCHIRQNAIFDAHRAFIASSSCQFRSCRAPSQTMKFNGCNYSNGAWYPKLTQGLTYVASEPVPSKCGQGTQLVKCKALASKPGGRLQVAIAASGWFAVFPEPIETHDNQSDKIIALDPGVRTFITGFDGSRFLEFGNGDMGRITRLCQHLDGLISRVAGSKNRRQRQKMRIAAGRMRTKIQGLVNEVHKQVACYLSENYRVIFLPTFETSQMIQKAKRKIRSKTARAMLTWAHYRFKLFLKQAAIRRGCIVVDVTEEYTSKTCTRCGHVHTKLGGSKKFKCPSCAHELDRDMNGAFGILLKALSDTTCVISDDGVAIVALHDNTSCSSA

SEQ ID NO: 20060 - protein, 412 aa, Novosphingobium sp.
VLVTYRYKLKPTRAQYARLAKLCEGQRQLYNAALQERIESYKVAKRNASLKGRDKPIASRMENGKLIPGDFTTLRGAPISYMDQCKSLTEIRHADIPDVGDVPPNMGRWTLKGVDAAFSGLFQRMKAGKAAGFPRYRAKSRWRSFGFAEFSGITLKADKLRFKGIDGALRINLHRPIPDGAKIKSAQFTRYDRAWYVTLVIDTPVTEWHPNTGSSIGIDVGVENLATLSNGEVFANARPRSQRERQLRIAQRALARCKRTSHRRQQVRRKLARIHQRIGNARTTHLHQVSANIVRRFEVIAVEDLQLKNLSRSAKGTLAEPGTNVAAKSGLNRSLLDAAPGRLVSMLRYKAERAGGELRMVDPCNTSQDCSFCGTKVPKKLTARQHNCSCGANLHRDHNAARNILARAVQGP

SEQ ID NO: 20061 - protein, 405 aa, unknown
  TnpB Polypeptide
MHRKPTLKAYKYRICPTDAQVVFFAKTFGCCRFVWNKMLDKKMNAYKKKERIPQDTPAKYKEEFPFLKEVDSLALCNVQLQLEKAFKDHFRNRKQFKLPKFKKKRDKQSYTTNNTHNSIRIDFDRGLLYLPKIRECVKIELHRKFDGKIKSLTVSRTNDGKYYASILVETDNRRNKVVEPKSKACGIDLGLEHFVTVTNDFGSYKIEHPKYLRRGEERLKRLQKSFSKKQKGSKSSEKARLRLARQHAYISNARNDFLHKLSKAIIDENQVVVVEDINVKGLLKTRLAKSIADSGWSKFLTYLRYKAEWYGRTFIQVDRFFPSSKLCHRCGHKNEDLTLNNRTWCCPACGEIHDRDVNASINLYFVGIGQPEVTPVEQALVDDRSPDELPKKPSCDETGSLTIKG

SEQ ID NO: 20062 - protein, 369 aa, unknown
  TnpB Polypeptide
VSKGDAVGKRKTDKWVGFISGLEQAAKTGDWFPYTVRLKLRNGKVYAQFSKEEKLSEVSITKDNGVTGIDINAYPFHLALVHTAKDGNLEKYERINLDKLLEGSSERRQYLSWQVAHQAVEIAKRERKAIVVENLENLPKGKRGDGLPKLRQKLQKWIYKGVMQKIEIVAKRNGIQVIKVNPAYTSIIGKLKYAPLYNMDKNTAGAYVIARRGLGFKERLPKNYKELLEDTEFISYTIAKIEDKIANLKQEIREEKNEYKRNRLKSVLWKTRKKLDLLLRYLRESGESELAAQQTVNRQMERVRGGAQALQKSWQVLSVALALSCLESLRDFSPLKRVIFARDWAGVAKRASPSLPGQGTTVLNLYSFV

SEQ ID NO: 20063 - protein, 542 aa, unknown
  TnpB Polypeptide
MDKDVLKMPTEKKIDSNFVTVECLLSFDKDEDKGRVLALMRKFSSMVRFAYKRLMHEAERKELKKLLFRKYGINTRYSDDAILLAKQTLESCIEREQNPKKLVFGSRELFEQLKKKHLTGKRRATLKQKWEERRYGILYSRGDKSREGNLNLRLVNLNNQWHLRINLGDGEYVWARVIRSAKRKTDKWIDFISSLEQAAKTSDWFPYTVRLKLRNGKIYVQFSKEEKLPEVSITKDNGVIGIDINAYPFHLALVHTAKDGNLEKYERISLDKLLEGSSEKRECLSWQTAHQVVEIAKRERKAIVVENLEKLPKGKRGDGLPKLRQRLQKWIYKGLLQKIEIAARRSGIQVIKVNPAYTSIIGKLKYAPLYNIDKDTAGAYVIARRGLGFKERLPKNYRKILKDKEFLSYSVAGVEDRIVKLRQEIGKEKNEYKRNKLRSDLRRLKGELSLLIKSLLDSGESESAAQQTVNRKMERVRGLTHVRQKSWQVLSVALAFSCLESLRDLSPLKRVILTRDWVGAAKRASPYLPGHGTSVLNMYSSV

SEQ ID NO: 20064 - protein, 391 aa, unknown
  TnpB Polypeptide
MKKLLKAYKTEINPTQQQKQKIHKTIGVCRYVYNFYIAHNKEIYEKEKRFVSGMDFSKWLNNDFIPNNPEYKWIKDVGSKAVKQSIMNAEQAFKRFFDGKSKFPRFKKKKNQNVKAYFPKNNKTDWTVERHRVKIPTLGFVRLKEKGYIPTNKKVTSGTISYKAGRYYVSLLVDEDTKVLNNNTNEGIGIDLGVKYFAVVSNIDKPFKNINKTKKVKDLEKKLKREQRKLSRKYESLKTRNKKEGGKATRQNIQKQVAKVQKLHNTFTNIRDNYINQVVNKIVKTKPSYITIEDLNVSGMMKNRHLARAIAQQKFYQFKTKLQSKCVLNGIELRIVDRFYPSSKMCSKCGTIDKTLNLSDRIYICKECGCVIDRDKNASINLANAKTYKIA

SEQ ID NO: 20065 - protein, 455 aa, Gordonia sp.
VLPSHANSGKIEAIRQVLPWWRRGLVHTQLIQVRRMRAGERLGYIDTKSMPGYLSQRQWKDVVNQVNSTLRAWQEQMTAAVKPMISSLPGLSDETRRALYRANLAHEWWNDDVLAPIVRTLMRSTLPLPNFSRCSTMLLGTSVVVEDAAPDSPHALWARISRPPGQGTPIPIPLGGNRYEAAASGARANFMQITVPDAGSVLFRVVKHRPATPPRDSDSGYTLGVDWGLRTLAATSDGRLLGRKFYDWLAVRDRELTELGAALRRQGLRPRDSRRYRRLLSRIRGYVRNEVGRVINVLASDPDLTEIAVEDLDFRSPGLSRQMNRLLSRAGRGAWASKLRSLPADTGIAVTHVNSAYTSRQCSGCGYVDARNRLQQNRFKCLFCGKILHADINAARTIRQRRSVASGGLLMSKSAVLAELDQDFCHQWTADPGRLRERQLRPGSRAPRTSVRVNS

SEQ ID NO: 20066 - protein, 396 aa, unknown
  TnpB Polypeptide
MLVFEYKAYGKQQQFDAVDEAIRTVQFVRNKCLRLWMDRGGNSQYELNKYCTILAVEYPFANELNSMARQASAERAWSAIARFYDNCKKQIPGKKGYPQFQHDNRSVEYKTSGWKLASDRKSITFTDKKGIGRLKLKGTRDLHFLKPEQIKRVRLVKRADGYYVQFCIQVDRSELVEPSGIAIGLDVGLNDFYTDSNGKTVDNPRFLRKGEQRLKKAQRRVSKRVKKSSNRRKARLILGKRHLKISRQRKDHAVKLGRCVITSNDVVAYEDLRIKNMVKNHNLAKSISDASWYMFRVWLEYFGKVFGKITIAVTPNGTSQECSSCGQVVKKTLSTRTHVCACGCVLDRDENAARNILSRGLSTVGHTGTFALDASNAWGEVASTLVGVVLPEQVAS

SEQ ID NO: 20067 - protein, 470 aa, Paenibacillaceae sp.
MYTTQQIIVKKGHRMHRYFDDMCANAKNLFNASNFYIRQVYTALRTDKSLQPLQHEVLSMIHQSIDPMNATQRLAYQKNLAIQAKKPVDQRKEVKFNGFEVPNKETPYLSYPFLNALFKQIKQPDYRSLPVQSSQQVMKSVFECWKSYYSSLRDYQQHPHKYKGRPGIPKYVRKDAKEVTFTNQDCVIKDGKYLKFPKTKDQLNIGKLGAMGTLKEVIIIPTYNYFVVTLVFKVNHVILGKPQTNRHMAIDLGIDNLATIVTNTGRNPAIVKGKTVKSVNQFYNKRKAHLLSILRHGKETNQGSFTTKRLQHLHETRHRKLKDLFHQASAKILNMATTENIDTIIIGQNKGWKQEINIGKRNNQSFTSIPHSILIRMITYKAEALGMGVIVNEESYTSKASFVDGDDVPVYPQGQRHSFSGKRLKRGLYRSKHGSLINADVNGAANILRKAAVSVDFNMETVHVWNPVCV

SEQ ID NO: 20068 - protein, 161 aa, Chamaesiphon sp.
RLQVAKVHSKITDARCDFLHKLTTQLVRENQTIVVEDLAIKNMVKNHKLALSISDASWGELIRQLAYKCEWYGRELIKIDRWFPSSKRCGNCGHIVDNLPLNIREWECGVCHTKHDRDINASRNILAAGLAVSVCGATVRPEESKSRKAGAKPRKGQKQKP

SEQ ID NO: 20069 - protein, 432 aa, Microcoleus sp.
MKRVEQHIIKSSHKWFAYCDEITNISRQLYNSAQYTQRQSFFYGHSTLTLAQLDRLFQRDQNYSLLPAKVAQLVLAQCADAWASYFAALKAYRMDSVKFTGKPKLPGYVDSRNIVKFNNQAISKREFKKGKIVPSMSSICIPIKDGLKFEDLCEVRIVSKTGCYVVEVVYEKPAPAQFFCSLNPELAAAIDIGLDNLATVVFSDPTISPLAINGKPLKSVNGFYNKQVAKYRGFIKTGTSRHLQNIVRNRNNFVDSYLHQTTRLLVSEFLALGVTKVAIGKNTQWKTSINLGKQTNQKFVQVPHARFIEILTYKLNDVGIEVVVGEESYTSKASFLDWDTIPTYTPGRTEKPVFSGKRVHRSWYVASDGSKIHADVNGAFNIGRKVISKSFACLQDIVLRDRGCLVVHPRRITPAFPSLLGKAQVLLKAKLG

SEQ ID NO: 20070 - protein, 374 aa, Brevibacillus sp.
MDMEITITAKFKIKPTIEQQSLLCDTVRAYQKGCNFVSELVYQTKDLAQLKLHKLTYEILRRDYALRSQMAQSVIKTVISCYKSLLSIGSNWTNVQFKKPVYDLVWNRDYSLTKDHFSINTLQGRIKVPFETKGLERYFEGEWLFGTAKLVMKYGKFFLHIPMTKIVELVSEKKINQIVGVDMGINFVAVSYDSKGKSLFFKGRPIKDKRAHYKHLRKQLQQRQTSSARRRLQAIGQRETRWMADINHTVSKALVTRYGANTLFVIEELSGVRQATERVRTKDRYQSVSWAFYQLRQMLEYKALLQGAKVITVDPRFTSQSCPKCGHTERANRNKKKHTFSCKNCSYTSNDDRIGAMNLQRKGIEYIVEATVQA

SEQ ID NO: 20071 - protein, 393 aa, unknown
  TnpB Polypeptide
MYYNLKQRESDCMTTVQKSIRVRLYPTDEQEVLINKTIGCTRFVYNATLENCKQSYEQTQHFPSKNERSANLVPLKVTNDFLKEVDSKALQQSVRDLNSAFDNFFKNRKHFGFPKFKSKRNLKQSYRTPWDNGKADVLDNKHIKLPKLGKVKTKRFSMPDIYRIFNITVERTNTGKYYASICIETEVRPLPKTGKQVGFDLGLKDLLIGSDGTRVERPKFSYAFKDKLAQEQRKLSKMRTKLERAKLNLDECKNYQKQRHKGAKLHEHIVNCAKDFSHKLSIELVRSYDFIAMEDLNVSGLLKNHYMAYSIADVRWTQLVNFIQYKCQWYGREFRQVDQFYPSSKICSCCGTVHKEIVNSLKVREWICPDCGTHHDRDVNAAKNILNQALSVA

SEQ ID NO: 20072 - protein, 311 aa, unknown
  TnpB Polypeptide
VVYDKRSATFYRNKISLSTVNGRIECEFELPADSPTPYEEYVLSEDYEFRTSTLQYDQATDEFSFHINTRKVDTDGEAVEIEGSDDTGHQTVLGIDLGVNSLAVSSTGTFWSGDEHDHWIHEFEKRRAEIQQRGTQAAHNALLRLGKRERAWRKQYIHTVANEIVAEAVAHDCDVIVFEELTDIRERLPRADWHHIWAFRRLVEYVEYKAPERGVAVEQVEPAHTSQRCSHTDCGFTHEDNRDGEQFRCLKCGYEINADYNGAKNVGLRYMRRRQHRLRSSPTSGSADAPVDVRVTGGMVNGDGYRPTAES

SEQ ID NO: 20073 - protein, 228 aa, unknown
  TnpB Polypeptide
MMNRAYKYRIYPTTEQADSINKNIGCSRFIYNHFLALAKSDGYLNYSQYAKALPLLKKAYPFLKEVESTSLQQTLKDLDKSFAHFFKKLGGFPKFKSKRNPKQSFRCQMVNNNIQITDNYIKLPKLGLVKFAKSREVEGRILNVTISRTNTNKFYISICVDTEIETMPSSSGEIGIDLGLKDYLVTSEGLVVPNPKHFRKYERQLAKAQRRLSKKRKALKIMKKLGFK

SEQ ID NO: 20074 - protein, 93 aa, unknown
  TnpB Polypeptide
MIKNRRLYKSIADASWGIFLNMLEYKSSWYGRNYVQVDSFFPSSQLCSNCGYINQNTKKLHVRTWECPHCGAFHHRDENAAKNIKAEGLRIAS

SEQ ID NO: 20075 - protein, 307 aa, Methanomicrobia sp.
LKRKGKARGEKPVARKLFMHLDPQLVKYEGDRIRISVKPRKFLTIHLKYGDYQKRFIEEWRKGELRVGEVTINEEKVLVPFRKDVNLLDPDDWIAIDINEGNITAVSSNPHILRFETDIREIRSAYFEKRRRIQRLSKHKPVTSRKLMSKYSKRERNRVKDKCHKIARSIVSIAKVSGWGIILEDLKGMRYRIHYGKKMNRRLHAIPFRKIQSYIEYKAKLEGLPVIYVDARSTSSLCPVCGGKLRKAPNGHRMLRCDCGYENDRDVTACLNLLRRNPRCGELPFPPNAFEVTPFGVMEKEGLRYKC

SEQ ID NO: 20076 - protein, 387 aa, unknown
  TnpB Polypeptide
LDWLLCEFRLLVNESIRIALREDIQSRARLARAAYEVLSRGHAVYKQYIPSAFEVALTVLKAHRRRLRRKKRSSVPYMRKLILKAENQSYRLDRETGRLRIPVRGTEGVQLQLPVSKWHRSYLSDPSWTLGSLSLVPGKVIFVVRKEAPRTYNPEGAIALDTNEDSLDGVVASDENMVSTSLAFGGVRRIQQTHFRRRRRLASKKAHDRRVLRRLLNREGQRERHRVRQRLHLASKRLVQFAKNGKSAIVLEDLRLHGSGGWSRRMNRRLSSWPRREIHRQIEYKAALAGVPVIKVNPAWTSKTCPVCGARRRDRVGQVFVCEMCDWEMDRQINAGLNILETALASNEVLARAVRFQPGALRHDVVSPLYDLSALPTGAREEPSGVE

SEQ ID NO: 20077 - protein, 414 aa, Spirochaetaceae sp.
MRLVYKYYIRHTEALDRLFKVSNNLYNQALYMFRKQLDADGTWLWYNDMDKLMKNTLNLEGQCNYKLLKSQCSQQVLRVLDKSVKAYCKSIKDWKKHPEKHKGMPKMPHYRKRGGMFNLYYTNQSCSIKDGRIRLAKDLFISVPQWEKYGESLKSVHQVVRLIPSNRNIKVEVVYEREVVQADVDKTRYASIDLGLDNLAAMVTSEGCTIYSGKYLKSYNNHFNKTLSHLQSIKDMQGIKRTTRRITRMYDKRDRYFEDAFQKVSRHIVDTLVRKRIGTLVVGYNAGWKQNSGMGKKNNQKFVQMPFARLADYLRYKCEMVGIEFVMHEESYTSKCDALALEPIGKHESYLGRRVKRGLFRSSTGKMINADQNGALNILRKVVGDSEFSRIVDSGHSLCPIRYRNPFQSVAGSM

SEQ ID NO: 20078 - protein, 376 aa, Proteobacteria sp.
MFMGMKLTLQLQLLPDETQANALRGIVERFNEAATWLAGVAFAQQCANKVALQKLAYYELRERFGLPADTAIRCIAQVVEAYKRDKTVAPAFRPHAAVPFSMRKNLSFKGPDRVSIQTLTGRVVVPYLMGMYQAQRFGFAHGQADLVLRRGGKWFLLVTVDVPEDTRIPVSDFIGVDLAVVNLATTSDGATHSGDTIEACRTRYAKRRQRLQHAAHVAQMDGKRPKNIRRALQRIARKEGRFRRDVNHCISKALVTEATGTERGIALEDLTHIRSRTQFRPPQRAKMSGWSFAQLRTFVEYKARLAGTPVALVDPRNTSKGCSACGHVAKANRPSQARFSCKQCGYTANADLNAAQNIRHRAPVNAPQVAGLLFHA

SEQ ID NO: 20079 - protein, 374 aa, unknown
  TnpB Polypeptide
MGVSIATMNPIIKTLSVRVRDKHARVLNRMAFDVNQVWNAANADSAEFSWVGIPEVGYMNCGTSAFDLMKDLKVIRKQRGMIIDSTAVQETIAVHAKARKQFKKNKLKWRCSGGSKKALGWIPFKSGAAKWVNGQVRYAGQYFKVWDSYGLSKFDFRSGCFSQDSRGRWYFNIVVQIESIVRQAEGGQIGIDLGLKTTATCSNGDSFARQNCYRNLELKLGKAQRAKDKKRVKAIHAKIKNTRKNAIHKFTNKIVRENSLIVVGNVRSQKLAKNGLAKSVLDAGWFMLKTQLEYKSIATQGVFIEVNESYTTQTCSCCGCISCNSPKGRAGLGIREWTCAECGTTHDRDVNAAKNILALGHERLAVGITASLGR

SEQ ID NO: 20080 - protein, 421 aa, unknown
  TnpB Polypeptide
MYFHVGCMAYENTKNRLRGMRLLLKAFKTEIAPTEVQKTKIIRSIGVARFLYNQYIAYNLRLYKMYQRGILDEKQKRFVTANDFDKYVNHKLKKELPWIAQCGSKARKKALVNAEQAFRRFFSGTSGFPNFKKKANQDVKLYFPKNNNGDWTIWRHKLMIPTLKQVRLKEFGYLPVGAKVTNGTVSYVAGRFYVSVVVDIDEKSKYNKDLEASYHTVTDGVGIDLGVKDLAIVSDGKAFKNINKGSKVKRLEKRLRREQRRLSRKYEFRKKKGGITATASANIDKQKLKVQKIHHHITTIREDYENKTVHEIVKQKPRFITVEDLNVKGMMKNRHLAKAIAAQRFNHLLAKLKRKAEIIGIELREVDRFYPSSKTCHTCGHIHKGLKLKDRMYACPKCDYTADRDYNASLNLRDAKEYRVA

SEQ ID NO: 20081 - protein, 432 aa, unknown
  TnpB Polypeptide
MPTMLSRVERHVVKRADKNYNNIKELCHRCKNLYNYCNYILRQSLFREEGLPNEYSLTGLLAKENQDDYRALPAQTAQQVIKLLYRNWKAYFQALRSYQRDKSKFLGCPKIPKYKPRGDKGHSVALFTNQQVKLKNGKIIFPKPANLKPIKTKASSIEQVRIVPSTACFIVEVIYEKEITPAETIDGSVASIDLGINNFVTFLDNQGYQPFIINGKGAKAYNQYYHKEKARLQSELKQGKYSSKNIQLLGLRRANFMQNFLHQSSSIVIKALKDRKISTLVIGLNEDWKQKTNIGKANNQNFLSLPHRKLIDQLVYKCEEVGIEVILTEEAYTSKIDHFVEEEMKHHDKYAGKRIHRGLFRSSTGIYINADLNGALGIMRKVFPEKALAIAELIRNSGVAFTPIIIHPINCHKVNTMALGNRIRMSTMKKAS

SEQ ID NO: 20082 - protein, 358 aa, unknown
  TnpB Polypeptide
MVKTFSFRIKDSTSAKHLYAMARAVNFVWNYCNEVQKKAANSHRPWVNWVMLNNLTSGCSKELRLHSQTIQAIDECYATSLKEAKSPTGKKKRFLRFRGRRSQGWIPFKASGIKLRKDSVVYQGRIFRFWKTRSIPEQIKGGNFSCDVRGRWYLNLVCEYEEALVSNEGSVGIDLGLKSLATLSNGKKYDAQKFFRKYERKLAHHQRCNNARQVRTIHAKIANSRKDFNHKVSHELTRDFNKVFIGDVDSLGLLKTRLAKSVSDASWGQLRTFIEYKAIARGGTYYVVDENNTTRTCSACGCLTGPSGLAGLRVREWQCKECGTVHDRDTNSAINIEQRGLSTLHSPLRTLSAKEEIP

SEQ ID NO: 20083 - protein, 437 aa, Streptomyces sp.
MARFRMYPTGEQAGVMLGHCAHARYVWNLAVEQHAHWYRGRGTAPGFAEQCRQLTEARRDNAWLRAGNADVQQQALKDFAQAKNARFASGFGEPTWRRKHVHEGFRVIGTDRVPEFEADGSPKLNAKTGKQVMGRSVVVQKLNRRWARVKVPGCGWVRFRLSRNGKGSQLPKAKTFRVTFRNGRWHIAFAVVPVPVEGPGTGEVIGIDRGVKITAALSDGRNLNCPQLTVRERARIRKHQRRAARAPKGSERKSTEYARAARLRAREADRRRDWCEKTSTMLARGYDLVRFEKLSIKNMTRSARGTVAEPGRKVAQKAGLNRVILAQGWGLLRQRTGHKAPGRVEDVPAPYTSLRCSVCGWIDKNSRKSQAEFVCSSCGFTCNADTNAANNVAAGQGGIPRPRRTAGAGGVTTATGRSNTREPQPGRVGIPLFSSSK

SEQ ID NO: 20084 - protein, 427 aa, unknown
  TnpB Polypeptide
LLVSKAYRLKLYPNVAQREAFLRWTGSCRWLWNMFLQMEQEEYKKTGKFLFRYDLDKLIPGLKKDYPWLGETPSCCLQRVARHMDFALKRKFQAGAGFPRFKNRAGRRSCYLTNEAFRLDGSTHLVLRKAGRIRFRAGRLPEGKVMGGTIRMVGDDWYLIVQCQAEIPDVTVPPDAETVYGGDLGLTKTVALSDGTVAMMAKTLRRKERKVKREQRKMARQVKGSKNREKTRRRLAKAKAAEANARNDFRHKLSRAVVDKASVIVLEDLLVMAMAMALNLGKSVNEAGMGEIRRQVEYKALWDGKTVVIADRFFPSTQKCSACGHVKTGPDKLKLSDRTYRCGACGHTADRDLNAAMNLRRYGLEALGLVEADEKNTASGEGYSLELRQGDNACGGHVRREGESRSATAAETGIVACSQTVTTNQYE

SEQ ID NO: 20085 - protein, 223 aa, unknown
  TnpB Polypeptide
MVYRRCSTVPEKTEYQNVIAIDMGIKHIVTSVELATNRTVFYGKDLNHVRGWYFWLRRSLGLKKAIDTIKKIGDHEKRIANGIIHKITREIVNQAIETDSLIVLGKLKGLRNQEKKKGKRGRKFNRKLSGFPYFKFTEYLTYKAALAGIKVIKIFENWTSQTCRKCNQLGTRRTQGLFRCKTCGEENADRNASSPYRALGYISKVGVTVNIPITYARVQTGVQ

SEQ ID NO: 20086 - protein, 401 aa, unknown
  TnpB Polypeptide
LIIVQLRYNFRLYPTPGQAQALAKAFGCARVVFNDALAARRAAHEAGLPWIPDAELQRRVITEAKKTPERAWLAEVSSVVLQQAVADLNTAYRNFFASATDTRKGPKVAPPRFRSRKDSRQAIRFTRNARFRVTPGGKLALPKVGEVRVRWSRPLPTEPSSVTVIKDAAGRYFASFVVEVAPEPLPEADAEVGIDLGLAALAVLSDGRKVDSPRFLRRAERKLRKAQRALSRKQQGSKNREKARLRLARAHARVADARRDFHHQLSTSIIRENQAVYVEDLAVKGLARTRLAKSVHDAGWSQFVAMLEYKAARHGRTFGKIDRWFPSSKLCSACGALRESMPLNVREWTCPCGAVHDRDVNAAKNILAAGRAERLNACGAGVRPGLVPAAGGEAGTHRGAA

SEQ ID NO: 20087 - protein, 402 aa, Clostridia sp.
MQLTQQIRIKPTTAQEVVLNTLSEKCRLIYNFALKERKEAFTNKLKGINYIKQQNDLPELKTKYPEYSWVYSKVLQYTLRILDADYKSFFQSYKKDKNAKLPKFKGKKYFTTMVYNQSGFKHEKGFIELSHKHPAKTKLLFKIPDNFIFEKIYQIAIYKKDNKDYYLSVTYQKQEKKYKDNRLYQAFDLGVTKHTAVNSKGKFIEFITKRPDRYWEDKIQKAQSRRDHCRKKSNRWNLLNKNLKLIKRKSANQLKDSQHKLSRKIVDNTKANTIILGKLETKRLSQKNKYAKGLHKSLQNTGNISRFVRFLTYKAKLIGKRAIEINERGTTVTCCVCGRKHKMPLHKRTMICDCGNLLDRDKNSTVNIMSKFLSQNGMWTSYQQFAGNLRKTGLVIDMARYS

SEQ ID NO: 20088 - protein, 404 aa, Clostridia sp.
VQIYKGTKRNMIKRTYKYRIYPTKVQKEILEEHLSLCRWLYNHFLEERKTFYEKNGTKVTCYDQIKEIPKLKKEKPELKKVYSQTLQDTVRRLDKAFQNFFRRVKENKKGKKQKPGYPRFKGYLRYDSFTYPQSGFNLKDNKLILSKIGSLKIKLHREIRGNIKTLTLRRTTTNKWYACFSVESDKELPGKMEIENIVGLDVGLTSFLTTSKGEKIDNPRYLRKSEEKLAKIQKCHSRKNLKSKNRKKSRIRIARLHEKIANQRIDFLHKLSSRLVKNFQLIAFEKLNIKAMIKNRHLSKSISDASWSIFLQQLKYKAEEAGVWAIEVNSKNTTQVCSGCGAIVFKTLATRKHKCPKCILTIDRDINAARNILQSALSTVGTTEINACGVERLLPTTKQEALYL

SEQ ID NO: 20089 - protein, 270 aa, unknown
  TnpB Polypeptide
MKALDVGIDVGVVHAVATSDGRFYDLDTAKIRSIEKRIAGLKRKLSLNQESRKKLAKLGLAEPFDKKQPSCKRRRLKEKLQKLYRKIRCIRQDFNRKTAHALAQEYGCVYVEDLKVKNMTASAKGAVENPGKNVKQKSGLNRAILRTGFYSLRQAIEWQLLKVGGVVIPVDPRGTSITCPHCQTRDKRNRPTQAIFKCINESCGFKANADVVGALNVLRKGRTGPSAHNKKHIAHVVSIGEQGFRPEDSMPSMGAILKPRDRVAQGIPAL

SEQ ID NO: 20090 - protein, 421 aa, unknown
  TnpB Polypeptide
MLQLRAYKYELTPTAEQCSMLAQFFGAKRWIYNYFLSENKRRFLNKEKHISNFDCNTEITKLKQQSETSWLKGIDDWCLKHASEDLATGFKNFFDSVKGTRKGPKVSVPQFKSKHARQSYRTRGVKVDFEKNVVVLPKIKSVGCILHREFTGTIKTSTISKTPTGKYFISILVEEDIALLPSTGLEVGIDLGLKDLMILSSGVKFDHPEQMLLKAKRALKKQQRKLSRKKRGSKNYEAQRLIVAKCYAKVTNIRNFYYHNLSRWLVNRYDAIHLEDLNVSGMLKNRRLARKIQESSWTTLVSMISYKAMWAGRTVHKISRWFPSSKTCSSCGHKLAKLDLGTREWTCPSCGTHHDRDINAAKNILNQGQLDCYNQIIPSGETTEVGLNIPMTLMKHSSKIERSMSRRCGLNEDGVRKPNCL

SEQ ID NO: 20091 - protein, 362 aa, Anaerobacillus sp.
MVKAYKYRIYPNEEQKLFFAKTFGCVRFVYNKMLSDRIDSYKESQEKIDKSIKYPTPAKYKAEFSFLKEVDSLALANAQMNLNKAYTNFFRDKSVGFPKFKSKKDNYRSYTTNNQKGTVYIENGYIKLPKLKTLVRIKQHRLFQGLIKSVTISQTPTNKYFASVLVKENEQLFPKIDTRVGIDVGLKDFAILSNGTKYENPKWLRKAEKRLAFLQRSLSRKKKGSKNRNKIRLQVAKLHEKIANQRNDFLHKISNEITNENQVIVIENLKVKNMQKNHKLAKAISEVSWSKFREYLDYKATWKGRDLIIAPKNYASSQLCSCCGYKNKDVKSLNLREWTCPECKTHHDRDINASINLLKLAM

SEQ ID NO: 20092 - protein, 1188 aa, unknown
  TnpB Polypeptide
MPKLASYFECQTHLAKNLRNSANFILRNLRTGLKKDPVDRTSNENEVIETVRIGIEMANEKLQKDVDRLTKQLQSLPASDPARTKIQKRIENKQKNHPIMPTSDHWMLTYETLDAVMKNTKNPDYYAMPSQANQQVLRKVLKDWKSHFELLASYRQNPGKFKAQPKQPGYIRTPYTTVTFTNQVAKRSDIKGKMHITFPRCLVPLCVGKPEGSYVRTEVKPCYGGYMVYVTFQDAVKTPEAPTNPTRILGLDPGLDNFLTALTNFSATPFIIDGHWLKSINQNFNRRRAALMSELTKGMDSTKSVKNSARLNRISKKRACRIDDFFYKAAHYIVDFCLKNKVEVIVCGHNKDQKQEINLGASNNQHFVSIPYTRFFWILTCVAAKASIPVIETEESYTSKASLIDKDPIPVYKEGDRLEYHFSGKRISRGQYESKEGTILNADVNGAGNIIRKVYPNAFEGVTDFSYTNKTVIREVLCHAKHKKKHARPQRKRGMNRWLHHRRQEQKLVYFALFKVSSAKDKTKYIEESKQTAAKETAVKQFSDTLREGDIERRRLICALGALLDYISETQKTDISYIKELNIYENGQYMQIDLNTRRNLELTETMRAKEKRGSLLGVLDKTSTAAGARLLRQWVEHPLLSISAITRRQAAVGELFDDFMLREDLRERLESVLDIERLVTRIVYGTANARDLRAVSSTLSVLPDVCELLSKCKSDELSAICSALDPMEDIVKLINDAIVESPPALVREGGMIVDGYNADVDRLRSIISGGKGWIEKFAEKEREATGIKSLRVGYNRVFGYYIEVTRSLVGQVPEDRYIRKQTLANCERYITQELKDTEAAVLGAGDRLSSLEYELFSEVRTKVAENASRLQRAAALLARIDAYVSLASVAAKNNYTCPHLNVRGAIEIRDGRHPVVELFVKDSYFVPNDTSLDMKKNRVMIITGPNMAGKSTYMRQVALIAVMTQIGSFVPAADADMCITDRVFTRVGASDDLASGQSTFMLEMNEVANILKNATKNSLIIYDEVGRGTSTFDGMSIARAIVEYTQSRKVGAKTLFATHYHELTVLEDELDGVVNYNIAARKRGDTVIFLRKIVRGSTDDSYGIEVAKLAGLPNEVIKRAKEVLASVEAKSRAVSASDVKKEESDDGAISLEECMREQVIDDLRAVDVNTLSPIEAMNFLFELQKKLK

SEQ ID NO: 20093 - protein, 491 aa, unknown
  TnpB Polypeptide
MICENSIVKQLSFWYNYNVFGRPKEEILGRRLTFLILTTSLKLELNSSDEHLLREEMKKYIACVNFLVALHLSGVSIQKFSSKDVDAELPAVVKNQAIRDAKSVLRRYAKKQWKVERKRAWFAEQGKTPKRPIRDAKVPILRRPVLFVNNQNFKIDLDAKTVSFPLFRNGETAPRKTTRNSVQKEIRVTTITPRQREILTTTPHLATLRIVRRGDTLLAQVGYTVEEPETASLDDLLADPNTLVMGVDLGIKCPAVSYSTSGTIRFFGNGRENRYKRRKFYARRKKLQKAKKLHAIKRVSDKEARFMKDRDHQVSRAIVNEAIRQGAKVIALEDLDGIREGCTKSTPTRKSRKNVDKPKVDSVVENAKNSMDASTSTGEPVQLDLFSESEALTKKQRRKKRKFSKKQIAARRKSNRSLNSWSFYRLAKFIEYKAALAGILVIRVDPYKTSQRCPLCGSEHKAKDRKYVCECGFHAHRDVVGAINIAKNAFK

SEQ ID NO: 20094 - protein, 147 aa, Oscillatoriales sp.
LGIKTFAVMSKGEKAESPSYKKLYRKVRKLQRKLARQPKDSKRRNVTRIKIAKLHNRIADTRSYFLHKLSTKIVNENQVIVWEDLNVSGMVNNRKLSRAISQQGWREFRTLCEAKSEKFGREFKVISRSNQGSVLGSGRWSPLSARS

SEQ ID NO: 20095 - protein, 386 aa, Streptomyces sp.
MKLVVQVKLLPDAVQVSAFERTLPALNQAANWVSALSFEAFALRGGVRELRKLCYGELRGQGFGAQAAQHLIKRVADTYTTLRVSIRAGSLGPPTSKRRRTAESKPVAFRPHAAHTFDDRCLSWNYDAQTVSIWTLDGRVRNVRFACSPKALKQLTAHRKGESDLVFRDGKWFLYATIDVPDREVYEPVDWVGVDRGIVNLATTSDGTDYQGRRVGRYRRWQARKRAELQAKRTRSAKQRLKKRAKKEARHATHLNHRIAKTVVAVAQRTGRGIALEELRGIRDRVTVPRDQRARLSSWPFHQLGAFIAYKCRRNGVPFVEVDPAYTSQRCPRCGHTERANRPTREHFTCRRCGLAGPSDHVAGINVRNRARSAWAFVNMPDPAPA

SEQ ID NO: 20096 - protein, 243 aa, unknown
  TnpB Polypeptide
VETEIGEVDHQGKPVTGLDVGVKTLAVLSDGTAFENPRAFYRLEKLLTRAQRQMARKQKGSKRGQKARLRVQHIHKRIADLRANATHRVSSYVTKNYAGVAIEDLNVAGMLKNHHLAKSMTDANFQELHRQLKYKGQWYGCEVRQVDMFFPSSKLCSVCGRINDNLTLADREWVCECGAHHNRDVNAAINLAKRCWPGVDGHCSLRVKRSKAPDEARTTFVGRSKKGDLPNLAILSGLVNQVP

SEQ ID NO: 20097 - protein, 364 aa, unknown
  TnpB Polypeptide
VNDQQNRFLEKAFELGRTLYNATLGTALGCLQRMRETQEWRVARDMPKGKARTKAFSAVHKAFGLTEFGLTIIANNHRKASGRKDIGAHEAQSIGKAVWRGLQRHMFQKAGRPRFKSFRRGLNSIEGTNNQEIMYKPERGAIVWRKHVMTYMKPDTGYMKEALASDRRVKYCRIVRGTLKGVRRWFVQLVVEGLPPVRKVYASKCEVVGIDPGSSRIAYFHERHAAIVEVAPHVDLKEPKIRLLQRRIDRSRRANNPDGTVKKGSSTWNTSNRGRRTAARLKLRKIITDLFNAASDGRQTGGEWVSLWSISNARLKAVPEDQRGQDEGSPNQLPRRQIPWFWILDSAKGKRGVDRARSAAQEVP

SEQ ID NO: 20098 - protein, 230 aa, Chondrocystis sp.
VLASFRNLLKKKKLVMENIHRVNINIYRYYVHYVSHNVGLKVFLSCSDNTEIKSPLFLKQSLKQLKIASCNHSTKKRGSKSREKARQNLVRVHEKVVNRRSDWFWKLAHQLTDKFDYLFFETLNLKGMQRLWGRKIGDLALAEFLKILEFVAEKKSKLISYIDRWYPSTKTCSECDFVIDKLGLNERYWVCPSCSTKHGRDLNASRVIQKVGASTLGLGDVRHLQDAIAV

SEQ ID NO: 20099 - protein, 409 aa, Chondrocystis sp.
MSSPYPTRQVQKVRIYPTDEQKQQLAGAMGCSRWWWNFALNKSIEIYKETGKGLSRAGLNALLPSLKQEHEWLKTEVYSQSLQQTSLNLSRAFINFFEKRAKFPRYKSKHGKQSVGFPQSVTVNGDWIKIPKIGLVKAVFDRRYNGTIKTVTVTEDSSDRFFAAIIYELEACFISSNGDKIIGLDLGIKDLIIAHDGNKTSKYANPKHTKKYTKNLARKQQKLARKVKGSRTRAKAKKLVAKIHARITNARQDYLHKLSRKLTNESQVVIVENLHVKGMVRNHKLAKAISDCGWGTLVNFLSYKLERENKRLVEIDRFFPSSHICPDCLTQTPKMDLSIREWICLNQSCGKTHDRDIAASRNIRAEGIRIIQTDGTAVSASEGSVRQDRGRKTKVMQHPAKLETTCSTK

SEQ ID NO: 20100 - protein, 367 aa, Chondrocystis sp.
VEQNRCGINACPLICHLPELKDRPDFYSQKRDLVNSKKLFPEYKELPSHTLQDVIARVEKTMSRWLSGDSNGKRSGKPRFKGQGRYRSISFPDPVKPKHIDGRFIQLPKIGRLKLILHRPLPDGFAVKTAMITRKVDGYYITLSLQDSSVPEHTPAMPTMDNTMGIDLGLKSFLVDDSGEKVEIPQHYRKVEKRLKRLQRSLSRKKKSSNRRKKAIKRVSKEHLKVSNQRKDFHYKTVQKLLFQGKHVAHEKLNIKGIAKTRLAKSTHDAGWGQFLQILSIKAEKAGLLAMAVNPNGTSQNCSGCGTKVPKELKDRIHACHECGLTLDRDHNAAINIKYLAVGHSVGKAQVTSDAIAGVTEKPALYA

SEQ ID NO: 20101 - protein, 406 aa, Lactobacillus sp.
MVKLGRTIKLRLYLDTIQAGEFLAMTQEYQRLANIVSQWVFDHDFPLSWLKINNHLYKKFRQESALNSQMVQSVFRTVVARYKTVQEQMKQHFYRYKAADNKWIQIPRGLTWLEKPIYFRRPQADLVRQSNYSFINGMTQISITTLGKRTKLAFTNKGFEDYFQGDWKLGTAKLIHSQGKWFLHIGITKDVADFDREGSPQIVGIDRGLRFLATAYDHLGKTTFFDGQKILLRRKKFLENRRRLQSKGSKSAKKKLKQLAQRENRWMADVNHRLAKTLVAAYGAHTLFVLEDLTNVTFNTDELPKPLRNSHRSWAFFQLEVFLTYKAQAVQSTVVKVSPAYTSQRCPKCGLIEKTNRHHDTHEYWCAQCQYRCNDDRLGAMNIEMLGEAWLNGVKRPKIQKLTITG

SEQ ID NO: 20102 - protein, 514 aa, unknown
  TnpB Polypeptide
MASVTRAISLRPFACFEKKTGNGLDLHTILEELRNDAILCATEAFKHITVENLEKLSEHDGVKPAVAGRRMGIRFSVPGRGTGRSRFEWMIREYTVSQLRSWSERRKAHTRRNDKYVSSGFKRTANPNKPDFLKPRLALSATDKQYYVIRQSGSNIELDMVVNKRWVTFTFASPKRFLEPGIKTIAPTISIDDRSRVMFNWHVDIPTELTEFSSKYVVGVDVGITNHTTAVVRNIKTGKVVESSFMNRRVRSLENKIQRTKTQIASLYSQNRRNEIDPHRKALSNRRKELAILIGQEIAALSYQYGNAIVAIEDLSHIKNTMKHGRWVRGMIVDRITDMVESNGGRGMTVNPAYTSKKCHQCGTMLDMTNYHTPICSSCKVGWDRDENAAANIASKLKDKDRHKKACQTRKRHAASERRKNSRGSTKPLKHPLKKTGPTPKAPQNQPKTNHTIHHKRVVIEKREKVYPVLCAAGQSPLCGVTVPAVVHTGGSDNKPHDYSYNGAILTDCVYTKE

SEQ ID NO: 20103 - protein, 526 aa, unknown
  TnpB Polypeptide
MATQTKSVFLYGKPTTVKRNELIIMQEMYTKLINSFIEKLVSDKKYWLDILNNNKKAPQIRELEKANRTKLGSAFGQNAIDHAVKELHNHFIRIRNDLYGKTIGSDKNYFVASIALLNACIQDFSVNDTEILIKNFIDNTKKDDVDKLAFYNEILDILKKHSEDEIQDMMLDVKILFLEELESRNIPTLKKAPLQLDSRLCTLGKATNIKADYVLSVKTLERGKRIEIPLSTSKNSIRRLNQYGMQSPTITVTEKGIMVAVPFKKKVKNKSSNKNLKGIDIGITDLIYSSDGLAYGNYSKVTNFYNAKVLPEDRKNNQLRSLMKKYQKELRDKNTHPKRKEFLRKKICNINTMLQQNKKANRIRQSYKHLQNTEISKAASDYFLSIEGTNATTVMEDLDIITFDRGKESNRRNSMWARGQLHKKIESLLLWNGYKVIKVDPAYTSKLCPVCNNIHNDNRHGKDFTCTCCGYTADADYNASINIKNRAFDKEVSLIVEEYRYNTKKRHTALKELYEKRNKEYKTTVV

SEQ ID NO: 20104 - protein, 652 aa, unknown
  TnpB Polypeptide
MGRTVKSCKSRKRDSATDDPKICVQNNYDSPDWYDLNISKLINLPISGPSGNYTLSDKNIGLGNVVFNNRYIKHYSFNNKSNCEIINTLLINTSDSDITKLTKTFEKSIQTVRTKFVDDSNKINTKIKTLTTKYNKNVSNINKVTICKKYRIYPDSKQKEKLHKWFDECRKVYDYCIEKYNENTSYFDNGYMSVKVLLFEEMYGTNDKPAPYSILTDEVRIFCSNLKSCLTNLKNGNISSFEMKPKNNHNGQCLFIPKTSMTENGPYIKYLGKMLGMKHINFDEVTHDCRLIYNKDHKSYTLLVPVNKEKTVIKGRKKIVAVDPGGKIFMAYFSPEDFGYLGYEFRGLLLKELEKVSILQRILSRGYNNYGSKIKNKQSLIRKINLIYERMRNLRDELHNKIAKFLCENYDTILLPKFETQKMLKTDPNYRKAQKNVETIYNEKGSEAGKEALRQYKKKKRLNKKDKFVLNMLSHYRFRQHLTHKASEYGCKIKVVTEEYTSQTCTNCGHKSTNYDYREKKCEKCNYKIDRDLNGSRNILLKNISGYIKQEDLSINSKSNCDNDSEEDFINEEKGFNNEDYSEYMDEDPNDSYNNVMEYFDNLTSDKKFGHDNEQIEKYTKKILYKIIKNKADRSLDKKSLVAGRIAPMRNC

SEQ ID NO: 20105 - protein, 390 aa, unknown
  TnpB Polypeptide
MIKEVWYMEKIIKGYIFRLYPTDKQIELIEKSFGCSRYIYNYFLGKNKNYINSFNSIKEIPNLIKENTWLKEVDSCLLRCSIFNLEDSFERYKNKLSEYPRFKSKRKSRQSYRTNNITSTYKDKTYNSITIDLENKVIKLPKLKEVRIRGYRNLKEINGRIINATIYKEAGKYYVSICVEEFITIPKLIPTKIIGLDLGIKDLVITSDGETIENKHLIKKYEKKLKGLNKWLSRSKVGSKNRYKIIKKLQTVYKKLKNARKYLLHTISNKIIKENDIIVTEKLKINKMVQNKNLSKKIYDVSWNELIRQMEYKSKWKNKKFYQIETYYPSSQICSRCGYQEKRVKELSIRKWECHRCTNKNERDINASINIMFEGLKIYMKKNLNELQVN

SEQ ID NO: 20106 - protein, 401 aa, Blautia sp.
MPSTTGYSITTRKLRLCCGHPNWLRKTQELYNEIESFYYDLLLKREELWELSSQKTMRALEVLTIMGRDKKIPEVPIPWEKVPLYFRRAAINSAIAAAKSHISRQSIIPGRKAEKLHSAVTYYKGMYRDFSHKEITLKVWTGEKWQWMRCRLYGEIFPEQAELMSPSVTYEKKYLMLHVPVKEFTADTASVKQRIQEGRRICAIQFTNGDAFAVGTVCDGAGKEIAVKFWSGGKEYTHRCNQIQKKIEKARKSLGEEKQPGENRKHWMRLKHLSEYYAHEVSAQIIKFCLKNQVSMIILPKYKKEYTDYVMIGSGNWSTLHLSTGIRRNLTYKAWKNGILVIETYAKGISETCASCGAPIVSVNRKADEYICRNGHRGSRSLNSARNLSRKCIQQLGKQVV

SEQ ID NO: 20107 - protein, 431 aa, unknown
  TnpB Polypeptide
MALNAIIDPMLLTYQYKLNPTSEQAALMALWSELLRRHWNYALGQRLDWLTRTRCPIDRCSIAREPIGEIPEKVNYYLQASELRQTKQRFPEYKDIYADCQQQNLMRLDKAWKRWFVPDKNGKRGGKPRFKKRGDTCSFTFPRVNCPKAGAHLAGNSLKLSKIGEIEVIWHRSIPDGFDLKQATILHKADGWYVSLSLEDGTVPELLPVDKIKSVVGIDVGLEKFLATSDGQAVQIPQFYRKSQKQLARQQKQLARKQKGSANYQKQANQVARLHLHIARQRKEFHYQVAHWLCATYDLIAFENLNIKGLARTRLAKSILDAAWGAFLNILQAVAVKRGKWAQETDPRGTSIECSRCGERVKKTLKDRVHSCPNCGLVIDRDVNSGINILNRGQRTLGLAFAGCGGYENTRPMKQQFSIVRLDAPVTPLCG

SEQ ID NO: 20108 - protein, 386 aa, unknown
  TnpB Polypeptide
MKLIVQTQLLPDREQAAKLRTVVERFNEAANCVAVVAFESHTANVFELRRLCYSEIRERFGLSSQMAQLAIKTARDAYCRDKGIRPVFRKHAAVAYDQRIMSFKSIDRVSLLTLDGRVVVPFVLGRYQREGMTLPKGQCDLVLRKDGKWFLIVTVNVPDVAPVPVTDFIGVDLGIGNIATDSDGDKHSGKPIDNVRRKHNLQRKRLQRKNSKGAKKKLRRVSKKEARFRKHENHCISKRIVETAKRTERGIALEDLMGIRERVTARGGEARNRLSGWAFAQLGTFLRYKAQAVGVPLVFVDPAYTSQTCPECGHCERANRRSQSEFRCKACGHEQHADIVGARNIRNAALSQGRALAVSCNAAIELVGTAGKGCRVLSPNRKAARL

SEQ ID NO: 20109 - protein, 413 aa, Streptomyces sp.
MRLRYSFRLYPDTGQQTALAKAFGCARVVFNDAVRAREDARKADQPFPSAAELSKRLITEAKQTVERSWLGEVSAVVLQQSLRDADTAYRNFFASLKGERKGPKLGPPRLKSRKGSRQSIRFTANARWSITDAGRLSLPKIGAVKVKWSRTLPATPTSVTVIKDAAGRYFASFVIDTDPAADAARMPETSRTIGIDLGLTHFAVLSDGTKIDSPRFLRRAEKKLKKTQKELSRKQKGSKNRAKARLKVARAHAQVADARREFHHQLSTQLISENQGIAVEDLAVAGLARTRLAKSVHDAGWAQFIGMLKYKAERYGRTLVQVGRFTPTSQTCSTCGAVDGPKPLNIREWTCSACSTVHDRDHNAAINVKTAAGLAVTACGAPVRPEPVLAQRAETGSHGFPTGHRAAQRHSNR

SEQ ID NO: 20110 - protein, 410 aa, Chamaesiphon sp.
MLVFEFKAYAKSAQFVAIDEAIRATQFIRNKCIRYWMENPKVSKYNLNKQCAILAAEFPFANNLNSMARQSAAERAWAAISRFYDNCKKKVAGLKADARPSGSPTRKAHQAGFPSFQKDNRSVEYKTTGWKLADDRKSITITDKIGIGKLKLKGTRDLNFYQPDQIKRVRLVKRADGYYVQFCISVDRNESILPTKNTIGLDVGLNHFYTDSNGEQVENPRFYRNSEKSMKRSQRLVSRKVKGSSNRRKARVKLSRIHLKISRQRKDHAIKLARCVVQSNDLIAYENLSVKNMVKNHCLAKSISDAGWYQFRIWLEYFGKVFGRATVAVNPAYTSQECSSCGVIVKKSLSTRTHVCQCGCVLDRDENAAVVILNRGLSTVGHTGRSALDAGNAWGDSISTSVGEKRMQSR

SEQ ID NO: 20111 - protein, 376 aa, Clostridium sp.
MIKAVKIRLFPTKEQEVLMFKSCGVARFTYNWGLNRWNEIYKSGEKPNKIKVRTEFNNTLKKDDNYKWLKEVSGQVTAKSFDDLKDGFDRFFKGLSGYPKFKTKKKSKKSFYVRYDSIKFKDHKVNFEKIGKVKYNTNYKIPNLSKYNNPRCHFDGKYWYLTLGFEHNENQVGLNKDLSIGIDLGVKDFAVVNCLDKPIKNINKSVKIRKLKKRLKRLQRQVSRKYLMNKQNNKFIKTNNIIKLEHEIRLIYRKLNNIRNNHIHQTTNKIIKLKPHRVVMEDLNIQGMMKNKHLSKAIQEQCFYEFIRQMKYKCEWNNIKFIQVDRFYPSSKTCSCCGNVKKDLKLSDRVYKCDKCGLVIDRDYNASINLSNYKIA

SEQ ID NO: 20112 - protein, 386 aa, Sutterellaceae sp.
LVAPGSVVLTACVKLLVSEETEKKLERTRLAFRDACNFLVPFVREDPKKRNWQRFNLHHAAYEKLKQAFPELGAQLRCNAMRCVSSAYKTELSNHPRKTPDEPLREIKFRNPSIHLDKNTITYCGNGLTATVRTVAKRVQVTLCPGPHQQKLLRLGRVRESNLVWHTRPGRDSFWELHIAIELKTDLLQKIAQVSIDQIAGVDLGENNPAAMSTGKIWKGGKIKDDRDRYLGHRARLQCNGSQSARQHLRKASGRERRHVRHVNHCISRQIVDQAKKHDIRVLVLEDLTHIRERIKAGKRVHSRLNRWPFRQLQEMIRYKSLLSGISVLTVDPRYTSQSCSGCHAIGKRHKHRFTCSNCGLRAHSDLNASRNLQGLGYLLIAQGLQ

SEQ ID NO: 20113 - protein, 578 aa, unknown
  TnpB Polypeptide
MAFGSKNSTPSFVLTLPLDISLNEQDYLYKEFKKCGVIYNQLVSVTTKMWHQLRKTRKYRELMAAIAKATPDSDKRKTLFKQRKKMLKEYRFSEDAFHKLVVPYAKHYAINSHIAQAVASNVWKAWSTFFFSKGKEVHYKRLDDLAAISGKNNSTGIVLRPANLTTSNIESAKRKAQKAVEKRYDDMYGRPDPKDDKKVVLPDEVKPQMEAEIAAAIAKIKPTIGEGSLRIVYGKHEFPVVLRNPKTQTGKYQQEALKCGVKYCRITRKWVKTKWKYYAQFILEGYPPTKCDGNGVMKHPVNQGRIGLDIGTQTLSISGKDICDLRVLAPSARAQAKSLVNEIARTQRAMDRSRRVTNPKYYNPDGTIKRLKRQHGHKQRRDWKYSKHYYRLWAKLRELNRRLADIRKMEHNMLANELLQHGNEFVVEDMNYKALQKRSKETKVNPKTGRAHSKKRFGKSIGRCAPAMFISILNQKANRYGGSVIKVSTFETKASQFDHTDESYTKKRLSERMAHLSSGEVVQRNLYSAFLLAHINTETLKYDTEALKAAFPAFLEMHENTKRRLQAVGSSLPASIGF

SEQ ID NO: 20114 - protein, 408 aa, unknown
  TnpB Polypeptide
MITKTILLKIKEPDTIKFKLLRQEYFKTLNLGMEYIYAQWPQKIKRSQLYNYLKTKTALPSSVRSEAVRLIFSRWITFCRQKKQHIKTSIPHFKNAIAVSFNNQNWSIKRTEYKYFIGFPINGSKLYFELALSNRQKNVLNRLSIAQIRPGNGQLLERKTKWYFAATFNFPEPEQATGTNIVGIDLGLNNIAVCYDKEQGKTKFHSGKETRFHRTRYALLRKSLGKFKKLNAIRKSKNKEHRWMKDFNHKLSRKIVDFASEVKANIINLENLKHIRTTAKTNRKQRQRLGNTLHNWPFNQLKQFITYKAKEMGIAVNLVPAFYTSQKCPRCHYIDSSNRSGIYFHCRACGYRSHADRVGAINIVNRQPGDVVTASLPEIVYPFRDGLFGTALNLRIVQNGNGQRTLIT

SEQ ID NO: 20115 - protein, 384 aa, unknown
  TnpB Polypeptide
MLKTYKYRLYPRPAQEKNLLKILACARNFYNMCLSERKWAWELERRTVSRLDQQQQIKHYKTTFPQAKQVHTHVLLVVTHDIQKAFDGFFRRVQAGEKAGYPRYKGRNGFNSFGFAEHGNGFRLDGNRLKVFGAGRIPVRMHRAIPDNGTIKTCRIKYQAGQWFVAFAVELPDAPELPKTGRFIGLDMGISALITTSEGEKVENPNYYRAGQRKLRVLSRALARKKKGGKNRRKALRRVQRQHMHVANQRGDYLHKLTTKLVQTCDGVALEDLATRNMVKNPHLSKSILDSGWGIFKQYLTYKAASAGREIRFVDPAYTSQTCPQCGKVEQIGLPVRWLDCACGLSIDRDHRAAINVLIKAGWDTPLQLNVGDCAVRVVEAAGL

SEQ ID NO: 20116 - protein, 378 aa, unknown
  TnpB Polypeptide
MATTTATVHQAYRFALDPTPRQQGKLASHTGAARFAFNWGLALVKERLERRAAGEDVRVPWSLFDLRREWNQAKRDVAPWWPENSKEAYSSGLDGLARALSNWSDAKRDRRKGARMGFPRRKRKGRACDACRFTTGAIRVEPDRHHVTLPRLGRLRTHESTRKLARRLEQGTARILAATISRQGGRWFVSFTCEVQRAIRGPHRPQARIGVDVGIRHLAVLSDGRRVPNPAPLQAAMRQLRRLNRQLFPSLRPHRPRRQQPRAVQRMAADQTRTRQSARQSRQPASQRPAPPHQCPDRHLRHGGSRAPQRRRHAPQPTPGQADRGRGFRRAAPPAHLQGRLGGRDARPGRHVLSVVEDLLGLWARESQAAPVRADLPV

SEQ ID NO: 20117 - protein, 136 aa, unknown
  TnpB Polypeptide
MLRNRRLARRIADAGFGELRRQLTYKAVWAGGMLVQADTFFPSSKTCSGCGHVKAKLPLSERTYRCERCGMVLDRDLNAARNLAALVDASSRDAALLMVAGSGSETENARGWGVSPGLGWAVPGEAGSRRQAVGLG

SEQ ID NO: 20118 - protein, 463 aa, Actinokineospora sp.
MTMVLQAYRYALDPTVAQEAVLRSHCGGQRYAYNWGLARVKANLAQRAAEVSCRLAEADLTPWLNWSAYSLRKDWNQAKNAVAPWWGENSKEAYSSGLANLATALTNWNGSRTGKIKGQKVRFPRFKGKRAGLSCRFTTGCFGLTGGDRRHVKLPRIGAMRTHESTRKLARHVERGTARIRSATVAYQGGRWFCSFSVEIDRHDPAPTRPDSVVGVDLGIKSLAVLSTGEVIANPRHLDVALRELRRLQRQAARRIGPDRRTRRAPSARWRKTQTRIRRLHTAVANARRDGLHKLSARLVRTHGVIALEDLHVAGMLRHRRLARHIGGVGMGELRRQITYKTEWAGGRVHLADRWYPSSKTCSACGAVKAKLRLSERTFHCDQCGFVVDRDLNAARNLAQMVNEVTGGMSSPSYGATQNEPDGNPRKTRSTRAPGTATGRPGHQAGPTPHRKVKAHDTSSRVS

SEQ ID NO: 20119 - protein, 283 aa, unknown
  TnpB Polypeptide
LDKAYKNFFRRVRQGEKPGFPRFQSYKRYNSFTYPQSGFALSGSHLQLSKIGNVKVKLHRPIDGIIKTCTIVRKNGRYYACFSCEAKPNAMFLTYQDIGIDMGVREFCITSDGELIPNPKNYRKAEVKLRKQQQALSRKKKGSNRRKKAVSELANTHEHIANQRKDNAYKTANYLLNKYDTIVREDLQINNMVRNRKLAKSISDAGWGIFFDILNAKAKQAPGKRVIKVNPYNTSQICSGCGQIVKKDLSVRIHSCLSCGLETDRDINAAINILQRGLSQLAA

SEQ ID NO: 20120 - protein, 397 aa, unknown
  TnpB Polypeptide
MYLTKRIRLLPTAEQEKIFWKSAGVAIWAYNFFLHYNEEKYNEYLEDNTKEKFVKESDVRKYINNVLKKTTHTWLQEVGSNVMKQGVKDANIALQNFFKFNKGYPKYKSRKKSKPSFYVNYESLKREPNGFQGERIGVVKTREPLPKIPKDEKYVNPRITYNGKFWFLSVGYKVEPKQVKLTDEKIGIDLGLKDLAIVSNENNSYSKKYKNINKEYRIKLLEKRLKRAQRKLSRKILNNIESYDEDRKPKYIRSLEGCKNIQKQIHIIQNLYKKLTNIRNNYIHQVTTEIVKTKPSKIILEDLNVSGMIKNKYRAKSISDAKWYEFRRQILYKAELYGIEVVLANRFYPSSKTCSCCGNYKKDLKLKDRTYICDECGLTIDRDVNAAINLANYQNLE

SEQ ID NO: 20121 - protein, 416 aa, unknown
  TnpB Polypeptide
VKIVVENQKLKKMKENKNVSYRARVHYIVPSQELINQARLSNNLYNQALYILRQAFTNEKDIPSKFDLINTLRHKEYECEEYNNFGKMVSDTAEQIIILASQNFKSFLMALKAFKKNKSNFTGIPKIPGYNKKEQEFVIIIRNTLCTVKDGMMRFPKKLNLDKIYVGDLDIAHVRIFPGKKKYKVEVVYKVEALPKKTKGNIAGIDLGLDNLATVAINKRGIRPLLINGRPLKSMNLYFNNKRDKVQSELKKCNDRYMSHKLETLYRKRNNRFNTYMHKASKKIIDYCLEHNVKQIIIGHNKLQKQKSKLKNFVAIPTFRLIELIKYKAEYQGIEVIETEESYTSITSYLDKEEPIKDNANKARRIHRGLFKSNKNKIINADVNSAYQIMKKVIGDKVIKPIGKGVVFIPRKVTIA

SEQ ID NO: 20122 - protein, 483 aa, Micromonospora sp.
MVVLGVELDRLGLEVAAYVPHDHLHPGQVPVAEHLVPELCHEDHVNVDRKDTVPTGAYAFQYCPKPTGTVLLVRLRYNFRVYPTPGQQIELAKAFGCARVVFNDGLRLRQQAHEAGEKYVSDAELSKRVITQAKLSPQRAWLGEVSAVVLQQAVADLNSAYRNFFASVSGKRMGRKVAAPRFRSRKDNRQAIRFTKNSRFKVLDNGRLRLPKIGDLDVRWSRSLPSDPSSVTIIRDAAERYFASFVVQTAEDETLPPVESEVGIDLGLTHFAVLSDGTKVTAPKFLRRTARKLKRLQQALSRKQKGSNRRKKAVVKVARAHARVADTRRDWQHKLSTTIVRENQAIYVEDLCVTGLGRTRLAKSVHDAGWAGFTAMLEYKAARYGRTFARVDRFFPSTRMCSACGRVGEKMALNVRSWDCPCGAAHDRDVNAALNVLAAGQADNSNDRRAQVRPGLVPAPRSEAVSHPDAACSTRSVEGTSVL

SEQ ID NO: 20123 - protein, 372 aa, unknown
  TnpB Polypeptide
VIIVNRAYRYRLYPTTEQKIMFAKTFGCARFIYNKMLSDRLDYYKKTGKKLNNTPAQYKDEFPWLREVDSLALANAQMNLNRAYNNFWSNKKHFGKPRFKSKKSGHLSYSTNNQKGSVRLEGNKVRLPKVGWVKLRLHRPIMENSIIKTVTISRTPSGKFYISILVEYENQILPIIPETFLGLDFAMHGLYVASDEEDADYPNFLRKVEKRLAKAQRKLSKRQKGSRNRDKQSLRVAKLHEKVANQRRDFIHKKARYLVDKYDAIGIEDISVKAMAKRKKGGKFSFGKSVADNGWKKFVNILEYKLVWQGKQLVKIDKWYPSSQLCHTCGYKKSEMKDLSIREWDCPKCGSHHGRDKNAAINIREEARRISA

SEQ ID NO: 20124 - protein, 485 aa, unknown
  TnpB Polypeptide
VPRVVPFSSLDEPVGRYPTVFTTLGTQSSTPKQKNGNVRTVRLRLLPSGSQERKLRRIADAAARLWNELNYTRLVQFRTMGKIDFKGTEHELYHRYKGRLGVNAGQVIRLNNSAWKSYFETLKLHRQGRLPKFMGKPSPPGFWRDKVFGRRLLRILVRNDRYYIEPISNGEGYLVLKDWGLRIRYAGRIKWAGKQGTLVIKFEDGRWFAYVPITVGEKPAKSNPKGYVKGVYDRVQINKPKGTNKAFIDIGLNNLFAVVFNHTDTAILIKGSTIKAEYYWWKREIGTYQAIRDWLRNRGFNAWRKYHAFHLHAVFKRKERLRHYYRTAIRFLAKTLHGMGVDEVFIGYPYLVGQDNGNEFNTNVWWFSKVINWLNDVLQEYGIKLHVVNEYGTSKQCSICNANHENGRVKRGLYICELTGIKINADLNAARNIAKRVGYEAPIPKKILSYIVTTNGVKPLTPKEGVTIETPTMKPSPKKARRGSY

SEQ ID NO: 20125 - protein, 406 aa, unknown
  TnpB Polypeptide
MKTTTENRVRRIIIRKSDQRYAPLRALTLRSAKLWNVALDRTRSSYQVNGKTTPFEHLDKELASESNEAYRALPAKVSKMVLRDYYAAMASFFKLLACKRSGEYRRRVNLPGRANEHTGRAVTFTKQAVNNGSRDTSFKIGLPADKVELDAGIPKSDVQFVRVVPRSGHLVVEVGVRVKILIGAAKSTDRVAFVDPGMNNVMTVTSNVFSPLLYSGRKLKSTCLFYIDRAAMLQKSGQSTHGHILWTRRSLEVSRQCHEMTNHLVDVLVQNRIDMLIFGHNKGMKTGINLGCEINKSFGSMPIATIIDQLSYKLRAAGIEMVITEESHTSKCSFLDAEEICHHDKYAGSRVKRGLFKASSGKAINADVNGSLNIGRKYLTKVGLYTEELDRQLRAAMHNPRVVKTY

SEQ ID NO: 20126 - protein, 668 aa, Mycobacterium sp.
MAATRPDATPVSSGEVVLARRRGKSKAPNFKYDGPVAVIQLELDVSDERTRRRLERQWEAVFRLRRALQRDAAARCRVYWAAHHERAQDPKALRERLGLSRKGIEAAAKRHIEASGWMRDHLTKAVGLHVADEVWETIDRHLFADSSGRRHGPPRVGSWWDFTRIPGRARSHTKDQPTWETYRLVGTLDGHLDTYRDRQLPAEVSTAHQAAGQPGGTSILAQPARLRVPSRPASKSWWDHDGMLAVVFTGLPAGDLVMPVRLPQGAGQWPHLAHFLADPRVWHKIDLVRVGDRKAPGGWRYYAHLLIHGRGYQSPSTIARRGEIAAGRRAGVDANVSNFSVVSFPHDHPERLVVGRVDCTPAQQKAAAGAAKKTRARQKALDRSRRNTNADQYGPSVRQHKRAERRAAARLPTRQVSNPGGARHSRADGVPLRAYRHDTLSRRYQRTRADHAAESRSTSQAKQARASQVAATIVSAHGNTITVEDCRISTWARLWGKRIALFSPGMLVAALQTECVATGGQFYRAGTHPTAMNQHCLCGARVPKTLQQRTHDCPHCGLHDDRDIVSAALAACVEFANPDDPRTARVEYRLAHALRDGLASQQEWEGSVNRYQPPTPHGEGSARTGSHHHPAVASAEQAAPALPPNRPGTPGRRGTSRKQPAPKLIGAA

SEQ ID NO: 20127 - protein, 398 aa, unknown
  TnpB Polypeptide
MSRYRLLPTPAQEAVLRDHCAHARYVWNLAVEQHSHWRPGRTSAPGYLEQCRQLTQARAEHPWLAAGSQMVQQQALRDFAQAMAAFVDPGNPAGRPSWRKAGRDEGFRIVGRRGRQWDVRRLSRHVGEAWVPKAGWVRFRWSRAVPPGVKSYRVTLDRAGRWHVAFAVIPEPIAAPGNGETVGIDRGVAVSAALSTGEMLTAPGLSAGRGHRLRRLHRRLARARPGSNRRARVKRVVARLRAREADARRDWAEKTSTDLARRFDLIRVEDLRIADLTRSARGTAQNPGRNVRAKAGLNREILRSGWGLLVRRLQDKAPSRVEKVKPHYTSQRCSACGHVDAKSRESQARFVCTACGFAGNADVNAAKNIAAGHAVTARGGDGAARPVNREPHLLLQSA

SEQ ID NO: 20128 - protein, 437 aa, unknown
  TnpB Polypeptide
MLKAYKYRLYPTDEQKRLINKHFHMTRLIYNMALSIKSWHYETYRGAVNLSFNDITKQIPELKEHFPEFKEVNSQSLCWSIDFLKNAYDNFFKGRGKYPQYKKRSTHNSFTAHQGTSIDWDKKKLKLIKFKEGIDIVLHREFLGTIKRVTVSRNSAHQYFASILVENGVPLPEPVEQTDISNACGIDVGLKQYITLVDGKDNQMDVKYPKYYEKHIKRLSILKRRRSKKKKGSKNSKKALLQINKLETKIVNMRNYFLHKHSKAITDKYDLITIEDLDIKEMTQKIKPIEDGSGHYLPNNRKDQKKHNRSIQDSAWGRFFSQIEYKAKFKGKVVVKADRYFASSKNCSVCGIKNNEMTLDVRVWECNNCGTLHDRDENAAKNLLNEGVRKSGLCKSVEPVEVFSSEAVEAGIPENCSHKNNEKSKTKKSRKRMKVIA

SEQ ID NO: 20129 - protein, 385 aa, unknown
  TnpB Polypeptide
VRRALKYRLWTNANQDRELSIMLETHRRLYNDCLAERKDRYESDKVAVKYAEQSARFKAARAGNPYYARLNFSSAQATMRRLDKGFVAFFRRLKSGEKPGYPRFRGRDRYHSIEFPSHGDGVRLKGDRLRVQHVGEIRVKLHRPVRGTVKIITLKRDADRWYVVLSCDLGDVAIPPSVNPAVGIDVGLKSFLSKSDGTEAEPNPRYLKDALPELRRKGRSVARKRKGGKNRRKAVKKLAKVYARVKNLRAEHHHQVASKLVRRYGFIAVESLNIRGMLGNDRLARAISDVAWGNFLLTLKSKAESAGVSVVEVDARGTTQQCSGCSETVLKGLSVRRHDCPHCGLSLDRDENAARNILARGLLARTGPAGGKGQPAFSREAVCCS

SEQ ID NO: 20130 - protein, 382 aa, unknown
  TnpB Polypeptide
MTYRAYRYRFYPTPDQEKNLNQTFGCVRYIYNRSLRYRQDAWYERQENVSYLQNSALLTEWKKEPEHIWLNEVSSVPLQQVLRHLQTGYKNFFQGRAKYPNFKKKEGHQSAEYTTSAFKWDGESLKLAKQSEPLDIRWSRRFEGRPTTVTVSRVPSGRYFVSILVDEKIDLLPVVNSVVGIDVGIKDVVINSDGVVSGNPRYTAKYAAKLAKYQKRLAKKQKGSNNRRKAKAKVARIHEQIADCRRDFTHKLTTTLINENQVICVENLAVKNMVKNPMLAKSISDANWGELVRQLEYKANWRGRTVVAIDRWFPSSKRCSCCGYTLDKLDLATRQWTCPECNTTHDRDINAAQNIKAAGLAVLACGETVNPVSAKVDIGMAR

SEQ ID NO: 20131 - protein, 141 aa, Bacillus sp.
VSLLIETEVQELPKTHSYIGIDVGLKDFAILSDGTIYKNQKFSRFSEEKLAKVQRVLSRRTKGSSRWNKQRIKVARIHEYIMNSRKDYLDKISTEIIKNHDIIGIEDLQVSNMLKNHKLAKAISEVSWSQFRTMLECKSKW

SEQ ID NO: 20132 - protein, 406 aa, Rhodococcus sp.
MRTAYKVRAYPDPEQSALLRRTFGCVRVVWNKTLADRQSRYTTERKSTSYKETDAALSQWKKTDDLAFLSEVSSVPLQQTLRHQHTAFQAFFKGTVRYPRFKNRHSRQSAHYTRSAFRMKADGLRLAKTTAPLRVAWSWPGIDLATLDPTMVIVSCEPDGRWFVTFAVDHTDPEPLPATGTSVGVDLGVRDFAVLSTGEKLANPKHTARHERGLRRQQRRLARMQKGSNNRAEQKVKVARKHSRVRDARRDFLHKTSTALVQRFDTIAVEDLNVSGMVRNRSLAKSISESGWGEFRSMLEYKTERAGRRFVVIDRWYPSSKTCSACGHLLAALSLGAREWTCPDCGTRHDRDHNAATNILVAAGLAETTKACGADVRPHGFSHRQSVVKQELPDVSPRIPVLQGGE

SEQ ID NO: 20133 - protein, 396 aa, unknown
  TnpB Polypeptide
MEVRKMIKTIRIMLIPNKKQKTKLFQYANTARFAYNWALGREKENYKNSGKFLSDGELRKEFTQLKKIDEYSWLNEISNNVTKQSIKDACNAYKRFFKGYSKFPKFKSRKYSIPSFYQDNVKIKFSDTYVKIEGFTTSKKKNKQKINWIRLAEHNRIPTDCKYTNPRIKYDGLNWWLTVGVEYEDSTIISSNEGIGIDLGIKDLAICSDGNKYKNINKTQKIKKLEKQKRRLQRSISRSYEKNKKRKEYCKTNNVIKREKLLLRLNHRLTNIRQDYLHRTTSEIIKREPSFIVLEDLNVSGMMKNRHLSKAVQQQGFYEFRRQIEYKSAWNNISVIIADRFFPSSKLCSCCGNIKKDLKLSDRVYKCECGNVIDRDYQAALNLKRYGENVFKESVA

SEQ ID NO: 20134 - protein, 421 aa, unknown
  TnpB Polypeptide
MMEELPDLLFLKPSINICLVGDMQRAILLQNVATKSKMNVLNEFSRKAVKLANNLLDKKWNPEICDWVDSFNEFHAKVYSASKTNTHFNSQAICDIERNIWSHKGQIIDGLTVKFNCPRNCKTFDTKANSFVELGMYPRKKIAIPIRKNRNWQRYYSLIGNGWICKTYGLTSNGEIVAYLSKEKEIAHRKNVLGVDVNAKPYAITVFSPGGKVLYQTYFGKNIWVRRKKIMARRAMLQTKKAFGKLKALRRTERDFVKTNLGQMVAEIIKIAQRFDADIAIENLKRFRPKCRNYNRKVMRIPFFAFRKILEQRCFDNDIVLDIVDSWHTSKWCSHCGAVAKSGHSSNYALFRCKECDQVVNSDRKASLAIAVKSLSERNISNQDVQISGRRVPVNGLVRSDEVGNPCFVSHDYRPMESHPS

SEQ ID NO: 20135 - protein, 413 aa, Actinomadura sp.
MARQVKRAFRYRFYPTGEQAAELARTFGCVRLVYNKALEERTRAWYAERRRMSYVQTSAALTAWKQTPELGFLGEVSSVPLQQALRHLQTAFTNFFARRAKYPRFKARKKSRESAEYTGSAFRWRDGELMLAKMSEPLAIVWSRPLPDGAEPSTVTVSRDAAGRWFCSILCIDTVTRLDPVEQAVGVAAGLSSLVTLSTGEKIANPRHERRDRERLARAQRGLARKVPGSANRDKAKARVARIHARIADRRRDFLHKLSTRLVHENQVVVIEDLNVRNLVKNHSLARAVSDAAWRQLRMMLEYKAGWYGRELVVIDRWFPSSKTCSGCGTITEKLPLYVRVWECGCGARHDRDVNAAKNVLAAGLAVSACGAGVRPQRESSRTGQSVSKQETHGVTRGLPRPRAGEEVKGGLF

SEQ ID NO: 20136 - protein, 325 aa, unknown
  TnpB Polypeptide
LVRFGYDYFETFFTLCYPACYLKIKGRTLTLPTGGGGKHGAKVYPNIQAQLTEAPPEQFQEVAISRDARGEYYASFSTEKQEEEQIEGGVIAFDLGIKTLATGVDEDGRFYHIGGFKGAQWYNKQLDKIRSKRSKCKKKSRRYIFLSKVYKRVSQKKRNKQRDCLHKASHLIAHKTVERTIVVGDLSQRQMVTKQHQERKKRLNRMIFNDWGLYVFIQMLTYKCQLYGKQLHREDERNTSKMCSGCGHLQKMPLWKRTYCCVECGLVMDRDENSAVNILTRFLARRGPSLSVLTGDVLQEDSSRGEVMEASYPTIMQQLNMFEHI

SEQ ID NO: 20137 - protein, 488 aa, unknown
  TnpB Polypeptide
LTWLASEVRDISSYATYVVRNDEALGGELARVAAVQPAVAGRQAGVTMPDFLVSGKSGRSRKEKLLQYNVVTTHRSWKERANAANGESSKYVSQGWKRTVDASAPSYGGDYVNLGAVDKWYAAIENDPFSDGEIILKMVIQGTWHRLIFNFDNKRFTEGKVTLPVVKVQDGQPVFIFTVVTDNPVVQFSGDYVIGVDVGINDYATVVVRSVETGRIVHQTTLSQRVHSLWNSVRASEAQVRALRKKAAAMLGDRQERMAALDEAQFHREAASRKKRELAILASQEIAYLSHVWGNAVVAVEDLGWIANTMQNGRWNRGELVKWLTHYVSQNGGWVVAVNPANTSQQCHECGQRVSHPTHEVSVCAEHGAMDRDINAAVNIASRAVPRVTKARVTRAKNRKLRPQATLRTPPARDSLKYPGRDRTKNSPTPKRKKHRIAKEVNLPVCPARVQAHSLDARVLADQGTRGTLGTVQAALKQGCVTYKCMLL

SEQ ID NO: 20138 - protein, 431 aa, unknown
  TnpB Polypeptide
MTRVTRTVIVRSIKLPRKVFRIFAELEGMYRNMVEQLVMYAVSNNIKSFAKLKALKYREMRRLYLRLSSHYVYTACQDASTRTKSFLRLKKLGLAEKDYPEVRKVPIWLDDHLWKPDGYASIRIVTHKGWVTLELESHKQYWKYVNRDWKLSSEAKVKLDKKNRQLIIYLTFVKEIEEYKPRGYLSVDVNENNVTILADDAFLFETGTEKLVLGYYYRRKRVQKKYDKLYGKKSRIKKKVLRKLKERKKKHDIKWKMANLIVRTAYEKQYAIVLEKLRKRVANNMIKKMKDKQLRHRIFQANFRGIQRAIEEKAREYGVPIIYVNPKNTSKLCPIHTSPINYDNSSRIGKCSEGGEIWHRDVVACWNLLLKALRGDGSHAPSLVGLNVDGCLVPLGTTAPHDFIGIPKSLWARWKSLLLIRHDIVLNKMKR

SEQ ID NO: 20139 - protein, 303 aa, Okeania sp.
LTVNLNFPHLSTCINFWWQWLNRITIGRYEVSKTAPQYALRYLSNAWKRCFTKVSDQPKFKKKGRDDSFTLDGSISVGFNQIKLPRIGWVKTFEILPDNINPKSVTISKKANRWFVSFKVERESQNTEKSVDVVGVDLGVKTLATLSTGEVFDGGKPYKKLESKLSRLQYLNRHKTKFSSNWKKAQLKIAKLHNKIADIRKDKLHKLTNYLAKNHSQIVIEDLNVSGMMSNHSYVACNVAKAVADMGFYEFRRQLEYKCELYGSELVVMDRWFPSSKTCSRCGAVKESLLLSERVIKLRTLQF

SEQ ID NO: 20140 - protein, 435 aa, Firmicutes sp.
METVGRLMVSQGMRRQAFAALAAVCASGPEHVLEEGRLYPQVLEAQALWETTHDGEEPPKAGFLLGVAEQMHADHRRRTTRKWNGLTWAEWAALYGEPAPAPVAGSYTELQRPPRMMRFLMRCAADDGACYGQAARYALTDDGRSLDIGFLLPNRPDPGPDDCSWCAFTLGLPDIAVAGLTRGGRLQAPDLRQLPDGRWVLDLKVDALPAGACRGKTRRILAFDWGLPKVITAVVMEQDGQGNVKQLSRPFFLKVGGVYAKLKELRAHASLLQKKADNLRNQRWTAATAEQDSLAQEERKTRQELAAFWRRYHELQDQLAHQAANFLLTLALKSGCSVVVGEWLGNLKSRNKSRDLNWRINSQIRSVIIDKLKYKARRVGIKVKLIWPRGTSHRCPRCGAEHQPVVDHGYQLLIGSCRNDINREKEIMMSGFYRH

SEQ ID NO: 20141 - protein, 452 aa, Bacillus sp.
MSATKSKTLKHKITNQTNIFEPTIQIFNEALSYLMNVIDKEFLSLDDWNTKGIVPAVEMLTHTTKTNPLPKYREFNQRFYKFPSYFRRAAIASAFGKVKSYRSLLQNWVEEKEQAKQEGKRFSKRPPSFQLEHNEFPVFYRGNMFEKGSNHEAKLKLFIKKDWVWVDITYKPIDLEKRGVSDWKECNPKLIKSGKKYYLAISYEKKMPLNKTNIKDQTIISVDLGMTNSAVCSAIRSDGTVIGRTFINQPVEKDRMDRMSKNVKIAQKKYGYLSSPNLWRKINGLQKHIMIDTARRIVNFAEQHHADVIVFEFLGKIKFSPNTYGAKRLKQKLHHWCKNGIQNKVQQMAHYRGIRIRRVNAANTSKLAYDGSGEVVRNHKKDLATFQNGKVYHADLNAAYNIGARYFLREHLKAFSEKKKLKLEAKVPQVSARTQQSLSTFISFLQAVAPTV

SEQ ID NO: 20142 - protein, 378 aa, unknown
  TnpB Polypeptide
MHGASCTKTKVLRLRLKDKHAMFLRHLAGEVNFVWNYCNELQITMFNRERRFLSGYDFAKFTRGATKEGLHLHSQTVQAIAEEYATRRRQCRRVRLSWRKSTGRRRSLGWIPFKKTAIQAAHGQVKFAGRWLSLWDSYGLDAYPIRAGTICEDARSRWYLNACVAVPVAEPRSSARRDVGIDLGLKDLVATSDGEKVSAPQFYRGLEPKLAIAQSAGKKDRVRAIHAKIANRRKDSLHQFSTRLVRGYDTIFVGNVNTSALAKTSFAKSVHDAGWSAFRTMLRYKCDFAGATFAEVNEAFSTRTCSACDSRSGPKGIAGLGIRAWKCSKCGAVHDRNVNAAKNILAAGRRRLAEGIPALLGRGRTSNCGETVRRTILC

SEQ ID NO: 20143 - protein, 569 aa, Mageeibacillus sp.
MKVFTPVQAKHYQRKEAEKMISKTVTVQLFAPSRTKKNLLLLTMNRYAMALQYLLDTYHPAVDQLLASGTHPSQFALMKLPDRAALNHLNQFEMQPFKDSLKLDFAMLISSYLSLSSTRKTSYPIVYTDDKDIEELLSSQRPAKAKTVTALSKFHAPRTLLFGRYDTGRDFCLLKDELSGRYFAKTYLFPAISEYRRTYTESRRLALKYATENPTYLETRKQRERYLIFPLACGKKQTAILDEAAKNPSRFRTARLYCRGDKFYLAFCIVKETGNERHPESYIGLARGYDCPLHLSLEGLSTGQDTGSGSRVPESYRLTEPSDACNNNARLHIWANQIIRIARDNSSQILYEGLARRTDLLRAPMPAGKHKAASITTSGKIASLTIPEYKQLCALLPYKAAEAGLPKPLAISPLRLYQTCPSCGHCSSSNRFLPGLMICTKCGYSVDSNVVGSRNLIRRFENYQKQRVIFSCLSEGRDVSIENSILGIKYRIRASSHIEEDFCAQLEEYLITIAPREKPFPYSAELGRQKYGLLRKLRAAPVLADGIELVGLPCKMGTAVSQYLSESEP

SEQ ID NO: 20144 - protein, 211 aa, Planktothrix sp.
VSNVGTSFIVDGKHLKSLNQWYNKQVADHKNGKPQGFWSNSLSVITEKRNRQVRDAINKAARLVINHCLKNSIGRIVFGWNKGQKDGATLGKKGNQSFIQIPTARLKSRIQELCSRYGIEFIETEESYTSKASFPDHDFLPEFGEKPDNWEPSGKRVKRGLYRTAFNQYVNADCNAAANIVRKVSTTLGLNLNGVSSGALTTPLRVHIWTT

SEQ ID NO: 20145 - protein, 289 aa, Planktothrix sp.
MKLRYQYRIYPTDQQKRLMSQLFGCCRVVFNDALAYCQEQYRAGNKKPSSSELSKRLTELKKTEEKEWLTEVSSVPLQQSLRDLEQSYCNFFKSCKGQRKGKKVKPPRFKKRKCKQSARFTDNGFKIYPDSNYIHLAKIGDIKVIWSRELPAVPSSVTLIKDSADRYFVSFVVEFNPKQLPENQNSVGIDLGITDFATLSNGEKIKSPQPLKKQLNRLRKLQRNLSRKQKGSKRRAVARKKLAKLHAKISDTRNDFLHKLSTKIIRENQTIVLEDLNVSGSAIRFRPNG

SEQ ID NO: 20146 - protein, 390 aa, unknown
  TnpB Polypeptide
VIRTYQYCLLPRRGEKKLLEYLLAMSCNVYNKALERRVETYKETGSGITYGMQWPHFRELRHLDPSGIGMLNAGCMQQTLRRLDKAFKAFFRRVKAGEEPGYPRFKSRNRWKSIEFTHGDGCKLRFDDDGRALLYIMNVGEIKIKYHREIPSGAKIKHVIIKRNLGKWHVFFQVEMPEQEIVTHCGPEIGIDVGIKSLLALSDGTLIDNPRWLRESLGDLRIAQRRVSRRKRGSSRRRKAALQVAKIHDHIANQRHDFWHKTTRKLADTYSFIAIEDLNLTFMTRNHHLALSASDAGLGIFRQLLTYKVEETGSSLVAVNPTYTSAMCSGCNEIVKKDLSIRTHKCPYCGLVLGRDVNAAINILQSARTGRSCANVARSKGERSTRSSLL

SEQ ID NO: 20147 - protein, 351 aa, unknown
  TnpB Polypeptide
MRRVSPPGYWKDRDTGKRKLIIVIRQDRYEVDVERHVIILKDFGMEIRFAGRLRWFGKQGRLEIIYDDAKNAWYAHIPVEVGVEEARTGKRSKHIVRGERRVIQIESPKGNKVASIDLGINNLASVVVSDGTWILYKGVRTKEDYFYLQRRIAEIQSLRDSLKYKLLDDVIDELNHEVRRLFGKLMRRLLHLYRNFAKHLIEQLHELGVSTIYLGYPLNIAQQKGNKFTVNLWSYRKLMEAIELKAQEYGIRVFEVVEYNTSRYCAYHNVKVKRKPRGVIHCPKGHKLHSDLNGALNIMRRAIGKIPLVIKKPLSFIIDHNKVAPAKRGVTSKTPRKPRPSGREGVIRTIN

SEQ ID NO: 20148 - protein, 416 aa, unknown
  TnpB Polypeptide
VTPDALYIHPVMKRLQAFKFELRATGQQQRQMRRFAGSCRFVFNKALALQKERFEHGEKKLGYAGLCKLLTEWRNGSDTPWLSDAPVHPLQQTLKDLERAYTNFFAKRADFPRFKKKGQNDSFRYPDPKQIKLDQANARLFLPKLGWLRARFSRDVPGTVRNVTMSSSGGKWFVSIQTEREVEPPIPCATSAVGIDVGVARFATFSDGTFLAPLNSFKKHESRLCRYQRAMSRKVKFSKNWRKAKARVQRIHARIGNARRDYLHKATTAISQSHAMVAIEDLQVRNMSKSAAGSAEKPGRNVRAKSGLNKSILDQGWFEFRRQLDYKLAWNGGWLVAVSPHNTSRICPACGHVSADNRQTQAEFLCVECGYKNNADVVGAINVLARGHRVAACGEPVQSGHSVKQEPTEATSQITA

SEQ ID NO: 20149 - protein, 583 aa, unknown
  TnpB Polypeptide
MQTTLTATLIKNQSNIEPIKAQLDSVVVLHNTIKRKIYKDIISYYIKNQVNELPKTIVNQFKQDYQLKYNINARQYNSIYAELNGQISSVLELNKSYLEDTKDKIESLTKAIKSKQKTLDNLVKKINNKKYKHNKVDDSNLSNLKDKLYYLKQKLNKTNLKLIELNDIEKTGNPHLCFGSNKLFKQQFQINSNNNLTQFKTHADWRKAWIESRNKSFVLIGSSDETLGNTNCQIKYVSNNIYELKVNINPKEPKLKDRYISFQIEVHNDKYNLIQQAIINNLGKDKSKYQALTYRFYKDKNSYKVFISLDKSKQQRKIISNKQLGTIGIDINANHLSITEVDRFGNLLKSWDLALNLKDKTSKQSLDNIACAMKKITDYAVKVNKPIVIEKLNFSQKKSQLKSGYDKKYNVMLSSFAYNKIIELTKSRSFDKGIEVIEVNPDYTSKIGKFKYQNKYKLTTHQAASFVIARRGLLSYEKILEVKNKNGDIKNKTITICNKEKTISNRCSKYYSFELPVRTIQRKENIYWKEVEQNYLKAKKHRLTLKKKKRTLILDNVNLSREITQVTDNFGVYRDSDPNSVLF

SEQ ID NO: 20150 - protein, 360 aa, unknown
  TnpB Polypeptide
LTLQLRLLPTTKQGAQLRSTMRAFNGAATYAAHAGFEVGVFSQPSIHKRCYYDLRGKFGLSSQMAVRAIGKAVECFQRDKTVCPVFRPDGAMTYDERLMSFKGVDTVSLLTLEGRERVPLIYGEYQRERFDRMKGQVDLVLRDGRFYLYASIQIPDGAPIEPTDFLGVDLGIVNLATDSDGTTYTGAAVERVRRKHAKQRRALQRRNTRGAKKKLTRIAQKESHFRRHENHRISKQIIQTAKDTARGIGVEELTYIRSRTTVRRTHRNRQGGWAFAQLRSFIEYKAQLAGVRVVAVDPRNTSRTCSQCGHCETANRRSQADFRCLHCGSSTSADFNAARNIAFRAQAARKPASELPGLAA

SEQ ID NO: 20151 - protein, 462 aa, Moorea sp.
MAQANKSIGVQQIMLYPDKETKAILEYLCEQSGKLYNMGVYFARQTFFKTGLILTGKFDLIYEPSVGKTKISKSLPSTPAQQTLLSVTEAFKSYKKLRDLWFKGKLQHRPKPPSYLKGSKMFKVTYPNSGGQKPKLVNGQVKFYLGLTVRRWFGIKNFTLPFPSNLKGRKIKEWTILPKNGVFYLEVSYEIPVQNNQRNLASNEALGIDVGTADNLAACVDTLGNSFLIDARAMKAFNQYWNKQVSSRKEGKPQGYWDSWLDRVTRKRNHRIKDGINKAAKLIINHCLKYGINTIVLGWNEGLKSNANMGRLNNQNFVQIPLGKLKDRLRQLCEIHGIRLEVTEEAYTSKASYLDGDSLPKFGEKPNGWKASGKRIKRGLYRSGDNSVVNADLNGSANILRKVASKLGIDLSRLGRRSLTTVARIRLWALPQSNLSAESPRLMIGECQVFLNSYKNHTESNR

SEQ ID NO: 20152 - protein, 429 aa, Bifidobacterium sp.
MLEAVKVALDPTPRQERLLEGHASAARFAYNLMLSHVQSQLARGEKADWSMYAQRRWWNEWKTEIAPWWGEYSKEAYNSAFESLAAALRNFFDAKTGRRKGRRMGWPKYRSKRRGTPRFAYTTGSFGLVEGDPKRLKLPRVGRVHCMEDIARRVGDAKVVRMSVSKRAGRWYASLTVERDTPTAPAAPRGGGVGVDLGVKALAALSDGTVVPNPRHMSGSLRRLAHAQRVLSRRGEGSNRWWKARTRVQRIHARIADQRRDGLDKLTDRLTRTYTDIAIEDLNVAGMVKNHRLARAVADCGFAELRRQLVYKSMRTGARVHVINRWYPSSKTCSNCGTVKAKLSLNERTYHCDACGFRIDRDLNAAINIEKRIVAPSAEETLNARGGDVRHDRRKPAAQTPAKREPSSHNNGMRLGASLGNETVQTTTD

SEQ ID NO: 20153 - protein, 519 aa, Thermus sp.
MPKGKDKNASFRGVQTKLRFLSQEDRKALLDLMRRFSSATRFAYQRLLEGYSRKELKREDGPLCQLFRLNTRYVDDAIFKAQGVLDSARERGVDPRAVVFGGRSLFEGLKRKHLSGERLLQLKREWREKRQGLLYSRGDRSKEGNLNLRLEVEDKDLWLRINLGHRTYIKAFVLSSHPQVKALVERALLGEPYNVELTLRNGEVHAHFTWQEVLPPIVATKERGVLALDANAHPHHLALALVSPDGELRHHFTIPLNEVDRAPNRGAKEILLWKAAHQVVDFALSRGVAIATERLKHFRKSRRGDGSGRRFRSIQHRFAYASLLQKIHALARRRGVEVLEVNPQDTSTIGMLKYAPLLSLSKDTAAAYVIGRKALGFTEKLPQGYERLLEDQAFQIETQAFYEELQTELQRRKGGENNPYLKRRIAREIGKAKRALALLSSLRSSPGSQRGSTEGRNLPGANPWRVLRVGLFLPLLGREVPRDLSPLKPILLGGSWEGGKVRLRSSSWWRAQGANGRFE

SEQ ID NO: 20154 - protein, 410 aa, unknown
  TnpB Polypeptide
  misc_feature (10)..(13): Xaa can be any naturally occurring amino acid
  misc_feature (56)..(59): Xaa can be any naturally occurring amino acid
VLSFSKVVQXXXXGLYSVRQHYFNTQKYLPYYENYKECKENENYSILLSDCSQQIXXXXDRDMQSFFKLLTLKKSGKYSDKVKLPKYKKADELAICTIQGRSCRIQKDGRVAIGLTKEFRKKYQINERRILFTIPKNIRCVSEFKEIRIIPQFNGKQFSIEFIYESKKDLKQSVGDGYMSIDLGLDNLVASTIFSNGGVQQFLIDGRRLKNINHYYNKKVATLKGEYDKKGISHNTKRMLRLINGRYNRINDYFNKSVQLIINKCIENGVTTLVIGYNKEQKQEINIGKVNNQNFVMIPLHKFRQKLKYKCELHGIKYCPQEESYTSKASCLDDDKIPTYGENETTKFSGKRIHRGLYKSADGKVLNADINGSVNILKKYLISSKSNVVFTTDDVRVLVNAPCKRLSVFC

SEQ ID NO: 20155 - protein, 451 aa, Cenarchaeum sp.
MIRIVKVPLRRAVLFAEWAHRTNHASRYVYNRAVSEYLFGGEYMGRVVVDILQPFKLPNTLDDFTSGTLEDDYQTYDFGPSKKALKYGMYKQLTEWRAKHTWLRECPTSFGRGAIQDASIACRRVVDDNSGHAPYRRKDGRIILSSVTPPVRKDSHTVHIPGYGTVETAKPINTSWDMRSFKIVDVTKRVDKHTKPSDHMFELHIALHEPVESHRNTGTIRGVDVGGKHLAVTVDTNGNVTIHNTRHRAILREIDALKSLRDHKTRHGRKWHILNDQIKRLYRKANNIAANTINQTIAQITNGVDAVVVESLSVKDMTTHGGNYKRAMNRSMRENHVGEFLRKLAQWCEMHNIPLLGASAKYTSQTCHVCGTVNAKSRVTRDKFICSNCTRVFHADVNAAWNILHRAAGKVVLRRPGHKEDYKPTPAMLRSIQRGRQKRHECTAEVVYFCI

SEQ ID NO: 20156 - protein, 417 aa, Streptomyces sp.
VTRQVKRAFKYRFHPTDEQVAELSRTFGCVRLVYNKALEDRTRAWYGEQRRISYVQSSAALTQWKKTEELAFLTEVSSVPLQQALRHLQTAFGHFFAKRAKYPRYKSRKKSRSSAEYTRSAFTWRDGQLTLAKMAEPLDIRWSRPLPQGAEPTTATVSRDAAGRWFVSLLVEDTITRAPATTAAVGLDAGITSLVTLSTGEKIANPRHERRDRARLARAQRELSRKAKGSNNRAKARVKVARVHARIADRRRDFLHKLSTRLVRENQTVVIEDLTVRNLLKNGRLARAISDAAWTDLRMMLEYKCAWYGRELVVIDRWFPSSKLCGTCGTVATKMPLNVREWTCDCGAVHDRDVNAARNILAAGLAASACGDGVRPQRESSRTGRSSVKQEAQRATAGIPRLQAGEEVKSAAFPERR

SEQ ID NO: 20157 - protein, 537 aa, unknown
  TnpB Polypeptide
MISHEEYKKALKQFHKLSDRHILAAETDMSSSDIQKVVKLSDKIRKAGNELVGLMRKNYDHLMRTKRYRKLLKLYGSTEDKKKRKHFAGQLNEMQKQYDVTWDFCRKSMIFIGKKYNVDAVFALTKAEDIWRGMEKCLYGNGNILHFSKYGDLPCIRAKQMNRGIRIFVKDNKLQFKLGRTVFGIKINDRFQTDEVNAILNYLAEPEIMNNKAVQTLMDEAYCIDTYRPCYATLVPKMIRGKYRVYLHLTIEGKAKPKYDRFGSPRHKYGKGMIGADIGTQTVAYTSDTEVGLKNLSERGNSIQTSERKERLLHRAMDRSRRATNPQNYNDDGTVKKGRKTWKYSNHYKELKTKHSELCRINAINRQLAINEDANHLRSLGDVFITEPKNAGRLMRRAKETTVNSKGKFNRKKRFGKSIKNRCPSGFQTAVEQKFKASGGIYIEVSNDYRASQYDHTVDDYIKKRLSDRMYKLQDGTEVQRDWYSSFLLYCYDYRTKDIDKNKCISEFDKCYSKEKALIEWIKANEIKVLNSGIKIA

SEQ ID NO: 20158 - protein, 423 aa, unknown
  TnpB Polypeptide
VDSITLVAESKLYLKDNLSLYNYFDDYSRLFNFLVRRTVHHLRHQLNGESEPKYRTSLLLEFGITNRMVKSIVVTAKNQLKLLKESSYYQYSRLYKRKRSLQKKIDKLKLSLNSNRLGRRKLAKVRLFWTQMKLNKVNQLISNGLKLNLTFGTKRLLQTNKKKFLVKRDNQVIYMGSKHDTCGNQQFQIYFNSKHNRFDYKLRIDNPWIPKFNKYIFGSFVLKNKEAKVNILQTLSTKLSNPLTYRIIKRDGTLYLQVLYRRDVLHITQSVNGVLGIDFNKGFISVSEINQNGKLQSLTRYDYLHKGKATKTKTSMLDLVSKLVSQAVSVGKDIVIEDLVSLDSNKKQDKTTSKTYNHMINSLKFGLFKRCLQSKAAKEGVSVHTVNPYNTSNIAKESYTNKMKLNVHDAASYVIARRFYQYD

SEQ ID NO: 20159 - protein, 420 aa, Mariprofundus sp.
VRLINRHVQVQSYTMEILKAYRFRLEPTPEQRQSFVEFAGCRRFVWNKALELNLYRLDHKRPIIRYRDIAGMLRLWKQSDEFGFLAQAHSQVLQQCLKDLDRAFADAFDKKQPGKRMPRFKRKGLNDSFRFPQGIRVDGARVFLPKIGMVRMRLSRPLAGEIRSATVSRRGKHWFVSILCRVEVDTPVHPSDSIVGIDRGVVNLATLSDGSAFEGSKPLRRLSRKLARLQRQLARKKKLSANWHKQRDRITRLHINIADARSDAIHKATTTISKNHAIVCLEELRTRNMTASAKGSADEPGSNVRQKAGLNRSILDMGWFEFGRQLEYKQQWRGGQVILIDPRNTSRKCSACGFTDKGNRADQASFSCMACGHAENADVNAARNILAAGLAATACGGIGRKAPREAGTGGAAMQPLPLAA

SEQ ID NO: 20160 - protein, 374 aa, Mariprofundus sp.
MMRTASIKLDVTAEQSASLRDLQSAYVDACNKLVPVASDHRCWNRVALHALAYTLLRSTTPLGSQMVCNAIYSVCKAYKAQKELGRIRKDKPVPIIGFKKSSIHFDKRTYTIKGDMVSLYTLGGRISVPMIMGQHQHEMLRSGMPKEAELICRKGKWYFNLVVEKEDTEKLTSGPVVGVDVGENNLAATSIGKVYGGGDLRHRRDKHLALRRRLQSNGSRSAKQKLRQVSGKEQRRVKHINHETSKSIVQEAQKTGASKITMEDLNHIRDNIKAGKRVRTRLHRWAFRQLQTFIQYKAEAVGITVEFVNPAYTSQTCSACGSLGNRDRHRFECLCGLRAHADLNASRNLARIGSGIPLSKAFVNTPDVPSGIDA

SEQ ID NO: 20161 - protein, 390 aa, unknown
  TnpB Polypeptide
MKRLKKAYKTEIKPTEEQIIKIHRTIGVSRFIYNFYIAHNKEVYEKEKKFVSGMDFSKWLNNEYIPSNVDKLWIKEVSSKSVKQAIMNGEKAFKKFFKGEAGFPKFKKKKNQDVKAYFPKNNKTDWTIERHRIKIPTLGWVRLKEYGYIPANGRITSGTVSQKADRYYVSVLVEEDIQVNNKPHSEGIGIDLGLMDFAICSDGLTKKNINKTKTVKKAEKKLKREQRKLSRKHENLKLRNKKEKGEATRQNIQKQIVKVQKLHQRLTNIRTDYINKTVSELIKQKPSFITIEDLNVRGMMKNRHLAKAVAQQKFYEFRIKLISKAKQNNIEIRIVDRFYPSSKTCSCCGNIKKDLKLSDRVYKCDNCNTSIDRDLNASINLANAKEYKIA

SEQ ID NO: 20162 - protein, 378 aa, unknown
  TnpB Polypeptide
MKTYRFRLYPSKSQEKQLMQHLWLAKNLWNDLLEHSKETYRDFEKFPTRNSLQLMVKNSGLFSQTAQEVAHRVEKGIWRYIKLRKAGNTNVGFPRFKPIDGMRSLHYSQAGFSLGKKLRVAPFGEIQIVQHREVNGRIKTLTLKKEASGKWFACFAVEETPTNRVPNGKPRVGMDLGLKTLATLSDGSVVKNPRHIWKHQEKIAFLQRISDRKKKGGRNRDKAKRLLAIEHEKLKDTRTDFLHRLSHHLVNSYSFIALEDLASQELAEENFGKQINDAGWGELANMLRYKAESAGCEVVFVNPKDTTKTCCICNSMMDMPLSAREYDCQNCGNHMDRDLNAAHNILARATVGITGSNACEDVQIRTSMKQEAHVFRHR

SEQ ID NO: 20163 - protein, 219 aa, Escherichia sp.
  misc_feature (216)..(219): Xaa can be any naturally occurring amino acid
MASWLVEWKNATETQWLKDAPSQPLQQSLKDLERAYKNFFRKRAAFPRFKKRGQNDAFRYPQGVKLDQENSRIFLPKLGWMRYRNSRQVTGVVKNVTVSQSCGKWYISIQTENEVSTPVHPSALMVGLDAGVAKLATLSDGTVFGPVNSFQKNQKTLARLQRQLSRKVKFSNNWQKQKRKIQRLHSRIANIRRDYLHKVTTTVSKNHAMIVIEDLXXXX

SEQ ID NO: 20164 - protein, 364 aa, Sulfobacillus sp.
MRQSFKYRLYPNKAQQQMIEDTLEHCRLLYNRLLAERKEAYEKSGTTLSYVVQANSFPARKAATPALAAVHSQVLQDVAKRLDKAFQAFFRRVKHGETPGYPRFKPFGRYHSFTYPQGGYQIRDQRLLHLSKIGDIKIKLHRPIEGTIKTCTLVAKNGKYYAVFSCEVEAVPLPSAQAMMGGDLGIKHLLVTSDGECFDHPQSLRKAERKLKRLQRAVSRKKKGSRRRQKAVRRLAKAHEHVANQWRNAAHQIARYLVNTDGLIAFEELNAQGLLKNHYLAKSIADAGWHQLVQFTTDKAESAGRRVVLVDPRYTSQDCSTPGCTYRKTDLTLADRLWECPRCGVWHDRDINAAQNILQRALVG

SEQ ID NO: 20165 - protein, 410 aa, Methylobacterium sp.
VIIARGYRFKLDPLPEQEDLFRQFAGVCRLTYNLALEQRAIWGRKHRLGYVGQAADLTRLRAEFDWVRAVYVSCQQQALRDLDRAFQNFFTGRAAFPRQRRRGEDDSFRFPGREVAVRRLSAKWSAVRLPKIGWVRFRDTRPIQGTVKNATVSLDPIGWHVAFTCEVEHAAPAPSAEVVGIDRGVTTTLALSTGETMRLPESLERIEARKRKAQRVASRRKRGSNRRRRALARVARLQARQARIRRDFHHRAALDISRRFGTAVLEGLNTRAMTASAKGTLAEPGRNVRQKAGLNRVILNAGWHQFATILTYKMEARGGQVVTVPAQFTSQTCAACGVVDARSRESQAVFRCISCGHAGHADINAAINIRRRANSALLDVEGLHKRPCEASTGRDLTISENPRPSGRGRC

SEQ ID NO: 20166 - protein, 325 aa, unknown
  TnpB Polypeptide
MFRTIELKLPYENELVERAKQFKDASQMFPDYGFKSKMLNKNKLKKGIYRTESKKVPTLPSAFVLTVRDKTSEMLKLTKIQKGIKKKSLSMIYDKRTFKFYSDSNAMSLSTVQGIPGYPIAHSTTIDKSRGEYTNAQAITDGKGERIFVMVQVEIPDREVMRKEDMKIVGMSIGMRNITAVSNNIFFNSKYLMEVKGRHRYLNRKQQHSNTNSARSKSKNMEERERRLVRDVNYLISKDAVSLPFDILALETLNPAGMKGNKHDTLFKCSNYASESNADINASRNIEVLCKSKYFRLSPASQSFRLDETPLIGGEETSGELQSFS

SEQ ID NO: 20167 - protein, 393 aa, unknown
  TnpB Polypeptide
MRAYKTEIKPTKSQIELIHKTFGCTRYIYNRFVFENFENLTSDKPFVSAFDYSKRVNNDTNTPSWLKEVPSKAIKQALIYADRAFKDYFSKRRGKPKFKKKGDNESFYLIGTIKVERHRIFVPKLKWLRLKEFGYIPKNITSVTISMKNGRYYISCLCKEEKDERIPLSDCAMGIDFGLKDQFITEDKVIPSINRSFRVRKLEQRLRREQRKLSRKYEANMVDKVYYQSGSKKGQLKSYKWLKPLSECKNIQKQKLKVARIHERLTWIRTDYNRKALHSLVLERKPSFITIENLSVRNLMKNRHLSTAIIKAQWYQSRLYLEKLCRKLGIELRLADRFYPSSKICSDCGFKYKELKLRERFWTCSNCGSAHDRDKNASINLGRCETYTVLTTV

SEQ ID NO: 20168 - protein, 334 aa, Hormoscilla sp.
MNMAPSWVTKTPYSPRQLAVFQAYEAHKAARKTGGDAKFRSVRTPVKSIRFQKDNWKKGTFYPTQTKGLRFKVSEQIIDKMHHEPTLVLDRRRWFICYAIDAPKPEPLDSCLAIALAPGVRTFLTGFDGQEIWEVGRSDMGRIYRLASHLDRLMSRICLSKGRQFKRLRYRLRKAAQKIRVKIRNLVDELHKKAANYLCTKYKVIFLPTFEVQNMVKRGKRRLSTKTARKMVTWSHYRFKQTLKHQAAKYGCVVVDVTEEYTSTTCSKCGHIHSKLGGNKRFVCPSCGHNIGRDINGAFNRMLKALRDTSASGVISFQIVPYHETSGNCQIFPG

SEQ ID NO: 20169 - protein, 391 aa, unknown
  TnpB Polypeptide
VLRTFKYQLRLDETQTQVLDYLLWQARQVYNAALEQRINAYRETKKGIGYAAQWAHFRDLRHEQADTLGRLNASCLQQMLRRLDKAFTAFFRRVKAGETPGFPRFKGHNRFKSLEFTHGDGCKLRVNAEGRASFYIQNVGEVRLTYHRPIPTESKIKHVVVKQSAGRWYVCLMLELPDPAPIADKPAVKPVGVDIGLESLLALSDGTLMDNPRWMRQALAKLRRVQRHAARQMKRSHGQQETYAQIAKLHEHIANRRRDYWHKVARQMVRKYDLIALEDMPLAFMTRHAHLALSAHDAGLNEFRQYLHYKAEEAGVKVMAVNPRNTSQRCSGCGMIVPKDLSVRLHVCPECGLTLNRDINAARNILSLALPPARTGRLELNVSGSNSLSVL

SEQ ID NO: 20170 - protein, 370 aa, Pantoea sp.
MKRAFKYRFYPTPEQVELLALTFGCVRFVYNSILRWRTDAYYERQEKIGYVQANARLTALKKEPEFSWLKDVSCVPLQQSLRHQQTAFSHFFAGRAAYPVFKSKRHKQSAELTASAFKYREGKLYMAKSKTHLDVRWSRPLPSVPSTVTISKDAAGRYFVSCLCEFKPVSLPITACTVGIDVGLHDLFVTDTGFKTGNPRHTAKYAKQLALLQRRLSRKQKGSKNRARASAKVARIHAKIVDCRLDNLHKLSRKLINENQVVCVESLKVKNMIRNPKLSKHISDASWGEFVRQLEYKAEWSGRSLVAIDQYFPSSKRCSCCGYISKSLPLNVRHWQCPECSAKHDRDVNAAINIKTAGLAGFACGESVNP

SEQ ID NO: 20171 - protein, 94 aa, unknown
  TnpB Polypeptide
MIRNHKLAKSIASVSWAKFFEMLEYKAVWYGNEIRKVPTMYPSSQTCSACGYRNPLVKNLRIRIWECPGCHAVHDRDTNAGINILKKGLQLQSA

SEQ ID NO: 20172 - protein, 436 aa, unknown
  TnpB Polypeptide
MSVYEAVKVRLDPTPRQARLLCSHAGAARFAYNAGLAHVKDMLENGEPPDWSHYSLVRWWNANKDTLAVNPDTGVVWWSQNSKEAYSMALRSLAQALSNWSKSRKGQRKGRRVGFPRFKSKNTAMRFAYSTCITAPTASDPYGLKLSRIGRVHCMENVFKRVNGARVIRVSVSYRAGCWYASLTVEREQPSSTTHTRKRGAVGVDLGVKHLATLSDGTVIPNPRALDARLKALRKAQKALNRKTKGSVRRGKAKERVARLYARASDARMDAINKATTMIARTYSAVCIEDLNVAGMVKNHHLARSVSDASLGEFRRQLEYKTMRTGAVLRVVDRWYPSSKTCSNCGTVKAKLSLNERVYRCDVCGLSIDRDLNAAINLMVAGSAPETLNARGGDARRADTMSGNADPSETRTKQPPTSGVRLGAGLGNEAMRTRTN

SEQ ID NO: 20173 - protein, 379 aa, unknown
  TnpB Polypeptide
MITLKKSFKTEIAPTPAQMKKINQTIGVCRFIYNLYIAENKKEYKTTKQFVSGMTFSKWLNNEYIPSHPELGWIKDVSSKSVKKSIMNGEGAFKKKNKSDVKMYFVKNSKTDCECQRHRIKVPTLGWVKLKEKGFIPTTKDGYIISSGTISKKAGRYYISVVIEVPDISKLNMQSEGIGIDLGIKDFAVLSDGRVMKNINKTAKVRKIEKRLKMAQCGLSRKYESLKKRKKEEEGETTQQNIKKQILKVQKLHHQLDNIRTDYIDKCIWDIVKTKPAYIVIEDLNVSGMMKNRHLSKAVASQKFYEFRIKLSAKCKEYGIELRVVDRFYPSSKTCHHCGSIKKDLKLSDRTYKCTCGYEADRDFNASLNLRDAKTYKLA

SEQ ID NO: 20174 - protein, 380 aa, unknown
  TnpB Polypeptide
MARTVKRAYKYRFYPTPEQADLLSRTFGSVRWVYNRALAERSRAWTQEQRRVTFAETCRMLTAWKADPDTAWLYEVSNVALQQGLQHLQQAYVNFWSKRAKYPNFKSKRKSRASATFTTSGFRWRDGQVTLAKMDAPLDIRWSRPLPESAEPSTVTVSRDAAGRWHISILVECPVGTLPALDTSVGIDAGITSLVTLSTGEKITNPKHERRDSARLALAQRRLSRKQKGSANRAKARVKVARVHVRITDRRRDVLHKLSTRIIRENQTVIIEDLSVRNMVRNHSLARAISDASWSEFRRQLEYKADWYGRTVIAVDRFYPSSKTCSACGVIAAKMPLSVREWACAACGVRHDRDVNAAKVIRAEGLSVQACGDGVRPPRT

SEQ ID NO: 20175 - protein, 367 aa, Eubacterium sp.
MEKAYKYRIYPNKTQQELIHKTFGCVRFVYNYYLDKRIKAYQENKTSLNYYDCCKDLTSLKKELEWLREPDKDSLQKSLKDLDEAYKKFFKEHSGFPRFKSKKNHKKSYRTSCTNNNIKFQNNHIKLPKLGWVKTRDAQILQGRILNATVSQDPSGKYYCSLCCTDIEIKHLPPTNNQVGIDLGIKNFAITSDGVKYSNPKYLQQSLNKLAKLQRELSRKTRGGSNWNKARIKVARQYEKIRNQRHDFLQKLSTELIKENDIICIEDLNISEMIQDNRKDMRRNIGDVSWCEFTRQLQYKADWYGRIIIKVGRYFASSQICSCCGNKFPITKDLGVRQWICPNCKSILDRDINAAINILNEGLKQIA

SEQ ID NO: 20176 - protein, 402 aa, unknown
  TnpB Polypeptide
MIKSFKYRLNPSKSQILQIEKTFGCCRYVYNWALNLKIKTYQSEKRSLTAIDLCKQLTLLKKDENHLWLNEVSNECLQLSIRCMDSAFTKFFREHTGFPKFKSKHHNKSSFKNINSVRIDFDNSRIKLPIVGWVNFYKNRSFEGKIGTVTVSKSTTGKYYVSILVEDGNPLPEKFPIISTTSVGIDVGLKDFAVLSNGQVFQNPKYLEKSSKRLSCLQRRLSRKKKGSNRYKRAKLTVAICHERIRNRRSDFLHKVSKKIISENQTVIIEDLSVEGMLKNHCLAKGISSVAWSDFFRMLQYKSEWNGVNFIRIGRFEPSSKMCSCGYIYKDLKLSDRVWICPNCGSKNDRDLLAAQNIKKFGLEKQNLLSQENINKTPVVNREGDVELSAVAETVKRQNVLV

SEQ ID NO: 20177 - protein, 407 aa, unknown
  TnpB Polypeptide
MRLVEQHTIKPSSVYYNELYDLLYKCKNLYNKGLYVVRQHYFQYKDDNTVKYKYLNYYSLEKKLRTGNDVDYRSLPAPVAQQVLMMVDRNFKSFFNLLNKKNRGEYSEFVRILKYLNKNGLFTAVFTTIAFSQKWIKQGVVKLPKQFSFTTRTNKQNIQQLRFIPKNGYIVLEIIYNKKEKNLMSDNGSYLGIDIGLDNLASCVSNNGSCFIINGRPLKSINQYYNKRLAYLKSKLKDNKHTSKQIRSLTNKRNNKIKGYLHKASRILINHVVSKGINTIIIGHNKCWKQEINIGKRNNQNFVSIPFNMFISMVSYKATLEGINVKIVEESYTSKCSFLDNEKICKHESYKGRRIKRGLFKTSFDKIINADINGAFNIIRKSEKESFDVTMLPEGRGFWWNPVRISV

SEQ ID NO: 20178 - protein, 342 aa, unknown
  TnpB Polypeptide
MIRKSTLSLSNTNDIKLSILDDIINESKRIINLYIDELWLMQDFNSKYISTKQNTWFSARMQQNLGKQALQIVKSQRKRKKKHKPIFNSNTIEFDPRFIDFQKGNHFDLFIRLTSIGNKISLKLPANRHRHFNRFNSNNWNLKKSVRLRKIDGKYFIDCYFSKEKSELRIEGKLKAIDVGYKKLIVSSDKEFIGDCKIYEKIARKKQGSKAFKRALIERDEIINTSCKQLNLYDVKCLIVEDLKNVKHNTKGKTSKKFANKVQRWLYPKVLNKLSMICDESGIEMIKINPAFTSQTCSSCGFVDKNSRKGGDFKCTKCNYSEDADYNASLNILYIGEYGLYA

SEQ ID NO: 20179 - protein, 413 aa, unknown
  TnpB Polypeptide
LRKTILLNCLPLTAKKKGILDSFFSEFLHVLNLTFEQLPNAKSSNELHHLTYSNIRSTSFLSSDIVQEARKDVWAKRKTVKNGFKRCDIRLNTRWFKFFTTKRGTPCFKVTYSPRKTFVIPIKADNGFTRFNTFIKDGWMIKAISLLDNKIAVSIEKAYLEPTNNRRYVVGVDVGSATLAAVTVFDTETGKTVKQLYLGRDVAIRQRDYLKRKQVLQSHADSGSENAKKYLRKLKRKQANFVKTRSGQVAKDIINLARSFNASIAIEKLSIQGRRHKFNRKTNQKINHIPYAQLREFLMSNCNEFEIPLDQKDAYHTSKWCPYCGSVNPGHSSVNYALYVCKNCGKVVNSDRKASLAIAIKSALEREYSQGLTTLFTQFSSAGVVVDQLWRPDDEFCVFAVRHITSPMESKRL

SEQ ID NO: 20180 - protein, 407 aa, unknown
  TnpB Polypeptide
VDVVALSIHFDESVLVVRADAWEQSKQIVQSRGGKHLATEFGHKHKMVDKPVDTVATCTKIRIPDAFTPVLDSLLVRVRKDCLPRMLHLRECSSSKYYPEIPCVIAKSLIAKYQRNEKLVTVSNIVLPICGDKGKQIKLEKSGLRIPALFKKEVLPVTFPKPVLGWVRSIEFFKRKGVWLASVCYNTPAQELVDVEGVIGVDRNSVGNVAVLADPQNGKVLHLGFNPAATKYNWRRRRANLKSKGFRRTLRHLSRKQSRRTTHENHIVSKQIVSYAVTHHRMVVVENLESVRKPKSKIRGYVEKSQWAFYQLLSFIQYKAALHGIIVATVNPAYTSQNCSRCGQRNTPNGKKYVCEYCGHTDHRDANAAFNIAKRGAESVSMSGTQDSVSLSGAVLVTPYLEVPTYV

SEQ ID NO: 20181 - protein, 528 aa, Streptomyces sp.
MSGLREVAAPFVVSGPSGVAVRGGLKGLTVQDKEVLRLVGDLLGSLASRDLRARCAAGLNHDSDQWAQRKRALTGQCSSRWGGSITKATHDQWALARRAQLAHIHTLQAGVTTIAHRLSLPIGAKGSKGQPGGYRSKQEWFAKSRRLHVLEDRLECERADFDAGRVRVARGGKKLLRTRHHLEAAQVTEAQWRRQWEAERWFIQADGESGKRYGNETIRVTPDGEVSIKLPAPLARLANAPHGRYVLACRTGFRHRGEQWADRITANRAVAYRIDYDARRDRWYLTASWQIPPVRTVPLEAARGRGLIGVDMNADHLAAWRLDEHGNPVGQPRRFDDDLTGPAHHRDAQVRHALTRLLHWATRHNLALAIEDLDFAADKTREKHGRRKRFRKLISGMPTARLRGRLVSMATELGITIVAVDPAYTSRWGAQHWQRPLATPTRKTTRHDAAAVAIGRRALGYPIRRRTAPPPQHRSDAVGHRTVQARPGIPGREETRPRIPGPTDTIRRRRMWSESGRPACPQPFGARG

SEQ ID NO: 20182 - protein, 334 aa, Methanonatronarchaeia sp.
MVLKQLYDNLRSLSERQKNGYKVGKLRYKGEGWYKTIEYNQSGFKLKKTDNRPDQLKLSKIGEVPIRLHREIEGEVKGVILKRDSAGDWYAIFQTEQEEAETDTTDSENFEAVGIDLGIQKFIVDSDGNRIEHPKNVEKAREHLKKEQRNLSRKEKGSNNYEKKRKRVAKLHKRVKNRRMDFLHKLSNAYVEKHDKIVLEDLNISSMLQGEMNSKNTLDSSWRTFIQLLLYKAESADTEVILVDPKDTSKECSQCGVKTDKKLWQREHSCPSCEYTTDRDYNAAQNILGKGLAEVTPAETATSTEHRDQNNSVFCDVSASASSKQEAPSTSKHS

SEQ ID NO: 20183 - protein, 399 aa, unknown
  TnpB Polypeptide
MLDNICSEFEHFRLYLNKEEERKLLKEFEFKKRLRKFLDKKIEERFNVTVKGKVASSSLRPFVYGIIKRFKESKKYNFASYAYLDHFEFVSFELFSKYEIKKSKEESKINSYPLNKQREVIRFNRGSFKFSWKEVEFLASSVKGKISPKNKFFHNFRYLYVERIDGAFYIFGQTYKEKSFSKKESLAASIVLNGLSSIYIYDTNNNFTTFNLYLNKESYNLDKLVKLSIYRKEALKKNGGIISNNVVRLEKRFNKTYESIRRKLRAKFAPIVIELAKKYSYISIEKPAKAIYFKDLTKKNVIESFLMNQFYLSLEEYSKRFNTVLLIVDLDCDISKICHKCGAFVKDNKSDLIHCDCGNVFDKNLNAAKTLLSYLINKHNLKSEYLFKESKVEQLQLFA

SEQ ID NO: 20184 - protein, 353 aa, Escherichia sp.
VERLQAFKFQLRPGGQQEREMRRFAGACRFVFNRALARQNENHEAGNKYIPYGKMASWLVEWKNATETQWLKDSPSQPLQQSLKDLERAYKNFFQNRAAFPRFKKRGQNDAFRYPQGVKLDQENSRIFLPKLGWMRYRNSRQVTGVVKNVTVSQSCGKWYISIQTESEVSTPVHPSASMVGLDAGVAKLATLSDGTVFEPVNSFQKNQKTLARLQRQLSRRVKFSNNWQKQKRKIQRLHSRIANIRRDYLHKVTTTVSKNHAMIVIEDLKVSNMSKSAAGTVSQPGRNVRAKSGLNRSILDQGWYEMRRQLEYKQLWRGGQVLAVPPAYTSQRCACCGHTAKENRLSQSKFRC

SEQ ID NO: 20185 - protein, 387 aa, unknown
  TnpB Polypeptide
VYKKAYKIEIIPTLEQKEKINKTIGVCRFIYNFYLSHNIETYEINKGFITGYDFSKWLNNEFLPNNKKYSWIKEVSSKAVKQAIMNGHKAFNKFFAKEADFPKFKKKNKSDVKAYFPKNNETDWAIERHKVKIPTLGWVRFKEYGYCPVNSIIKSGTVSKKADRYYVSILVEEPENKPSKSNSDGVGIDLGLKDFVICSNGDVYKNINKTTRIKKAEKRLKREQRKLSRKYDSLKKSNNKKGGATRQNIQKQVIKVQKAHQTLNNIRTDYINKVINKIVKTKPSYIALEDLNVKGMMKNKHLSKAVANQRFSEFRTKTENKCKRHNIELRIIDRWHPSSKLCSCCGNKKIDLKLSDRTYKCDNCNTILDRDLNASYNLKNAKKYKIA

SEQ ID NO: 20186 - protein, 416 aa, unknown
  TnpB Polypeptide
MWYDYRFRAYLDRTGVTAEVERHIDIHRQAYNHTRHEYTTLDTDEANIGSAYQHQKRLTEWKKEWPVFKEVHSKALQKTVERFYDNLSNLSDKKQNGHNVGWLKWKSPREYQSMTYSQSGFELKNTSGRTATLWLSKIGDIKIRYHRKIPDNVTIKEVTLKKETTGEWYITFGLEVKDTASPKKPDVDDLDTEDCLGIDLGINNYIYTSDGDSVDWLDFTDEYERLRREQRSLTRKEHGSNNWEKQRREVAKVKRRIKRKVEDFQHKLSTWLVKTYDAVFVEDLNVSGMLQSDGNARNKQNAAWRRFIDMLEYKGDLYGTHVVQVNPAGTTKECAECGVETDKPLWVREHSCPSCGFEADRDANASLNVLSRGLQELGLGQTEATPVETATAVETDGGSSSSDPASRVVETGSLGA

SEQ ID NO: 20187 - protein, 369 aa, Anaerolineae sp.
VEWREQYEAGEKPSAYRLKKQFNAICRERFPWSYEVSKCAGDSGFKNLEAAFRDFFRRCKKGDTQKGYPRFKSRRRSCGRFKVDGHWLKLDKLDAPINMAEVLRVAGQVKSVTISEDGGHWCAAVNVEVERPKQEHVQELAGIDLGIKTLAVLSNGTQYENQGLLRSELRKLKRLNRELSRRQERSRRWNRTKKKMAKLQRRIASRRLDYQHQMTTKIARTYRVIGVEDLNVAGMKCNHRLALSIADAGFGETHRQRAYKSEGCGGMLVEIDRFFPSWGLCHVCGCISSDLTLADRTWTCDCGAVPDRDSDAALNIERQALEMVAGEGSRRPKTPGERMSDSSEQSASKRENRAEERRPSKPCQFGTVW

SEQ ID NO: 20188 - protein, 473 aa, unknown
  TnpB Polypeptide
MAATTEEERTRTNTFQLAPKAEWKKLCLIELLDSAAALVNIVTYHRRQAYFDQDTTRTDVWSAVTKTEMRNRFQSVLGRAITDKMLDKCDEQWDSFFEQLDDYSDGEREEKPGVPGYWKDDDKRVLKACIRNDAYTVEWGERSRIELALGSGLKEKYGIPLNQRIRVPIKGNPQYEGHGGRLELVYDRSTDSFTATQPVTFSQDTTRVADSSDEECVAAVDVGANNFVAVTTTDGHQRVFHARPLFQRFHHYTERISELQSQLPENADTSRLIETLYDKRTAHRDHAQDALVRHLARRFEEWDVATVYVGELDDVREKHWSATVNEKTDLFWAHGRFRKRMHTVLDGECGISVEEKSEAGTSSDCPRCDEGTDVSRHGDVFRCGACGFEGHSDVVGSENFLQTVVNSDVESRRERPMARPADSGQNGPERGHQSVPRLEWNDHRWQQRGHATKEEPANQSTRAGNRASELGTA

SEQ ID NO: 20189 - protein, 444 aa, unknown
  TnpB Polypeptide
MQKRKFTIVTQLHEKNNHNIIKYVEFSRSNYVKALRETFYVIKHGGFNKSTYNTYLQHKYGILKRTSNSIISDAQGRFNALKEFKEYEKKQLEHKITYIENIIIPKLVEQRNYNSAMLRAGVFVSLVKQRNLRLKIVAKKAKLNQLKQKLNNLSHQLESGMLKLCFGTKQLLKQDYNRFIEQRDSQMTFVGAREEISCNQNLQLTYNQNNNQFLIRLRRDFGGYKSVNGEDRYAYGKVYFNHHKEHLISILRSKTSPLSYKIIKRNNRYYLYCIFEIQVGDRDFITRSDYGTIGLDFNKSFIALSETNKYGHLIQTQFLPYRFKSGDKTKTDLQYIANHVTKLACQTGKDVAIEDLNFNYRKFKTEAKQGKKYNDMIHSLAYRQFSDIIESVTYRNKVNLIKVNPAWTSWLAKQLYCPTMKLNVHVGASYVIARHGQGYKDSAK

SEQ ID NO: 20190 - protein, 408 aa, unknown
  TnpB Polypeptide
MILVEKHIIKPKHKYYDELDNLCWLSKNLYNSTLYNVRQYYFNNKKLLTYQVINKMYVDTNNEDYRALPSKVAKHTQILVEHNFKSFFGLLKLKAKGKYSKPVKIPKYLNKKTGRQVVHYEKGAISFKEQGYIKLSKTNIKIKTKLTKDKVQFVRLVPKNNYIVIEIGYNIKEQEQKLNNNILAIDIGVNNIASCVTNIGDKFLINGKPLKYVNHNYNKRIADIQSKIKLTHNKNKSRCKSNITNKRNNRINDYLHKITTYIVNQAVSNDITTIVVGYNKEWKQDTNMSKSNNQNFVNIPFYTFISMLEYKSKLKGIIFKTITEEYTSKCSFIDNEEIKKHTTYSGKRINRELFKSKKGIIINADINSAYNILKKYMIKNATWNKRISQTLVKVCSIPSVQKINIRLS

SEQ ID NO: 20191 - protein, 364 aa, Methanosarcina sp.
LKNTDEYKQLPAQTSQQILKLLDKNWKSFFRAIKEWKKDHSKFQGEPNPPKYKPKDGENILVFTNQQCKIKDGVLKFPGKIDLEFKTRLKDVKLCQVRIIPRRFNYVCEIVYEKEVTPCELDSTRVIGIDLGVSNVVTIGNNFGADPIVVKGGVVKSMNQFYNKEKARVQSVYDKSGLKYGKKLAKLDWKRNNKIKDYFHKLSRDVIEYARSNEVKTIVIGNNPDWKQKINHGKRNNQNFVNIPFATLIQMIKYKAEEVGIDVIVNEESHTSKCSFLDNEPVKHHESYVGKRINRGQFRSASGTIINADLNGALNIIKKAIPEAFADGIEDVGLHPKRHEILSFKQSSSKIAQMNEKREFLPCS

SEQ ID NO: 20192 - protein, 137 aa, unknown
  TnpB Polypeptide
MQKHSNNYKKQTRKIAKLHEKIANIRNDFSNKLSAQIIKDNQIIISEDLQISNMIKNHNLAKSMADVSWSEFIRQLQYKSEWYGRTYHKISPWYASSQICSECSYQNKEVKCLSIREWVCSECGCTHRIRIRKSLLI

SEQ ID NO: 20193 - protein, 202 aa, Mycobacterium sp.
LLPTGEQAAGLAEHCRHARYVWNLAVEQQQHWQPGRKAPGYNEQCAQLTAARAEYQWLAAGSQTVQQQALRDFTQAMRNFFNGTHRRPTWRKKGVHEGFRQVAVKAHHVERLNRRFGRVWVPKVGWVRFRLSRPIPQGVKSYRVTCDRAGRWHIAFAHPPPPIAGPCDGSVVGIDRGVTVAAALSTGELLHAPGLSPVRPDG

SEQ ID NO: 20194 - protein, 496 aa, unknown
  TnpB Polypeptide
MDKKEDEKHLFIYTLKLKTSQQDRERLNKRFRMAQDIYRKALIEVHKRYLKFKKDPLYKKAIKLDKGDKEKTALFKELREKHQLQGKFTFGQFANDYRNARNYSPYIPSDVATKLGFRAYEAYEKIMFAKGAKTVDFRKVVNSMEGKSDAGITIRNGIFKMGTKTDRAKFSCPVIYEEDNFEEEILRNKVKFVRLVRRLEYGQYNFYAQVILEGTPVLKNPQNDLKTNVGIDIGLTSVAVATDYETQLIELAPSVKNNDKKLAKLNQKMDRQRRANNPQNYNPDGTIKTGRKTWNDSKRYLKTKAQYQELERLGREQRRHAHERLSNQIVEMGDSFIVEQMSFAELAKRHETPTKNESGKFLSSAGFGKHVKRRAPASLISLIKYKAFFRGRKFLEVNVDDITATQLDHSTGERKPLELSQRIKIVDNQVVQRDLYSAFLLKNVYPSAIGVNLDSCKKDFPHFLSLQEETMENLEFEKTTPSMGLKKWKSLKKKHK

SEQ ID NO: 20195 - protein, 503 aa, unknown
  TnpB Polypeptide
VTESIQELPHSIVESVAPSKKKTSTDKSTISKESTRQGKSSKISGEDSTLKEKAFLPFWDKSCQELSVKLWSATKTDLQGLVVTSDDGYVSKTIACSWFSVAQTYLQKEKWLKISLPSSTYSVADYTDSESTNLLSKKIRVYPETKLAAIWRTWISASRWCYNQAIAILKTQKIGKYDLRKKIMDRAPDWVSQQPYNPRQLAVFQAFEAHKSAQKSRGSARFRTFRDNSQTIRFQTSNWKSKTFYPQLTKGFSFRTSEPIAEVMEHEPSLSLINDQWFVSYAVNENKPAATDSNLAVALDPGVRTFMTGFDGREILEIGKYDIGRIYRLARHLDQIMSRIGQSKGRCFKRLRYRLRKAASKIRIKLKNLVSELHKKTAKYLCDKYKVIFLPTFETQQMVKKGKRRLATKTARAMVTLSHYKFKQTLKHQAAKYGCVVVDVAEEYTSKTCSKCGHIHTKLGGNKCFTCPSCGHKLDRDLNGAFNILLKALRDTSRAGIFTKKTR

SEQ ID NO: 20196 - protein, 384 aa, unknown
  TnpB Polypeptide
MKVIRTSKIQIKGSNKASEVIKNYLQALNWLSPLAFNSKELNANRLAKLYYPTLRGQFHLPSQLACSICKQITAMYQSAKSNKRWELAVFKNATLPIIWKRDFNKSGKGVTLWGERISMHHIYVPFNRWKDSKLKRIKNKLYLILSYEKEVPEPRQTGCIVGVDSGIKRMLVASNSSNTTPFFFPGGKLNHLRKCIRTRRSKIQAVGTRSAHRLLGRLAHRERAITEHLLHVASKALTSYAVKSNARVVVFEDLSNVREASLKKGQDLREKVCRWPYGSLQFKAGYKLAEKGIDTTTVNPAYTSQGCPRCGHIARGNRVGLQFRCVACGHRGDADLTASENIRDRYILREQGFRRMGSVNTHERSDCELEMVLHNSTTCSGVQV

SEQ ID NO: 20197 - protein, 337 aa, unknown
  TnpB Polypeptide
VRQRRGAAGAEHAGQRGVRVTPGPRCGSRTARPARQTRVEKAHRLPRTVADRVVERGPETDRRGTSCQPARGQHGRRGGPDGLALLGAGHDPDRLRGRRFGGRHAHIWARADLCTRPAASDPALTVRHPFGAGVDRGIKALAVVANTEGALLHVAKGVNALRHAQASLRRANKTHSRTKEGSNGRQQARERLVKIHARVANLRKHAAHEVSAWCAGNLTRLAVEELYIAGMVQNRALALAVSDSGMGPVGRMLGYKADWYGLKLVPVDRWYPSSKTCSGCGNVKDTLSLSQRLYECAPCGLSIDRDVNAAINLARWPDLDASTRAAVAEETAVPSSA

SEQ ID NO: 20198 - protein, 421 aa, Okeania sp.
MVEKAYKFRFYPTPEQENLLRRTLGCVRLIYNKALAIRTQAWYEKQDRVGYKQTSAMLTKWKKQEDLEFLSQVSSVPLQQSLRHLQTAFTNFFSLRAKYPNFKKKRNGGSAEFTKSAFKWKDGQVYLAKCASPLPIRWSRQLPPGCSPTTITVMLDPSNRWSVSLRFNDNRDFKLKPLNKQVGVDVGISSLIATSDGTKVNNPKYFNKLYKKLRLAQKSLSRKTKGSNNYQKARLKVARIHAKIKDSRLDYTHKLTTQLIRENQTIVVEDLAVKNMVKNHKLAKAISDANWGELVRQLEYKAEWYGRELIKIDRYFPSSKRCSNCGHVVEKLPLDIREWDCPECSAHHDRDINASINILAAGQAVSVCGATVRPEGSKSRRAGAMKQKAPISNVRESRAVTQVQRQEDVKDGVTARLEIGQ

SEQ ID NO: 20199 - protein, 421 aa, Acaryochloridaceae sp.
MLLTYEYRIKPSPDQIAMMDNWLELLRRHWNYALGERLDWLKRSRSWVNQCSLVSEPIGEVVQPVNYYSQQSALKETKRLFPEYKGIYAEVQQGNLRRLDRAWSRWFKPDATGKRHGKPRFKKVGKLRSFIFPRVNCSKAGVHVNEKTIKVSRIGEMPIILHRPFPDGFTPKTCTVIKRADGWYASIVLKDATVPESMPLDSVKTAVGIDVGLKEFATLSDGSSYPIKQHYRKAQDALAKAQRKLSRKVKRSNNYLKQLNKVQRLHLKVQRQRKDYQYRVANELVNEFDLIAVEDLNIRGLAKSRLSKSILDASWGQFLSLLDAVAVKRGVQVVRVHPHGTSQDCSSCGAKVPKSLSVRTHECPECGLVMDRDENAALNILKRALSEVGIILPVCGGLGTSQPVKQKDLGETLRSSRYSAA

SEQ ID NO: 20200 - protein, 411 aa, Microcystis sp.
MIVREAKLLNATKEQYQALDEAIRTAQFIRNKAVRYWMDNSGVGRNDLYALCKVLAQEFSFAKKLNSAARQASAERAWASISNFYTRCRKGEKKKGYPKFKKHCRSVEYKVSGWKLSEDCMYITFTDGFNAGAFSLYCDKETREDLFRLKINRVRVVRRADGYYAQFCFDADRKEQGNYTGNVIGLDLGLQYFYKDQNDNAVVYPKYLRKAEKRLKRQQKRLSKKHRKGAKPQSKSYHRTRKRLGKLHLKVQRQRKDWAIKLARNVVASNDVVVYEALKVSNLVKNHNLAKSISDAGWYQFTQWLDYYGKIWDKAIVAVAPNYTSQDCSNCGHRVKKSLSTRTHSCPHCGIKICRDTNAALNILKRGMEVLGMEWQNSTQGHWESGSEDRKHGEKTASTIEGKPEIASGFL

SEQ ID NO: 20201 - protein, 437 aa, unknown
  TnpB Polypeptide
VSALREIAGPFVVAPSAGTRVRTRLRVSGIDAAVLREVGGYLGSLASADLAARCAEGRLDAKQRARSRQVRKQQLTAKSSSRWAGALTRTSEDAYQLAHRNLLAERRCLLARIKRIETRLAVTAGKRAGRLRGYPTTAERHAKTIRVQTFRTRLAEVGQQLDTGRMSVCRGGKALLRKRNNLADAGLTETRWRELWAASRLFLTADGEKGKTWGNETIRWNPHQNWLEIRLPTPLARLANRPGGRYRLSCPVGFTYRGGDVAAQAATGAVRYDISLDPARGRWYLDASWKTPPTGPITLAQARQGTVVAVDVNAGHLAVAVLAPDGNQAGIPHTIDLPLAGLPSSTRDGRLRAAITSILTTAREHRASAIVIENLNFDDARHHGRERTGNRPSRGRRGRAFRHQVAGIPTARFRDRLTHMACNAGLHVIVVDPAYTC

SEQ ID NO: 20202 - protein, 399 aa, unknown
  TnpB Polypeptide
MKKLKAYKYRLRPTVEQERKLLQHGGSCRFLWNNLLADNQQYYKSTGKFKFYHEMATSLPQLKQQHTFLTDVFSQSAQQVCRHLDRALKDSFKQQDKGFPNFKSKHKFSDSWTIPQKYRLAKHFVFIPKIGEVKWIRHRMYQGNVKHITISQEGSQWYCSVTCEIDMNIPRKQDKNVVGIDLGLRSFVMLSDGTSVPSPKCFNKSQDKLAKLQRQHAKKQKRSKNKLKLTKKIQDCHRHIRNQRKDFLHKLSHDMITKYDGFCLEDLSVKSLLKDRSVAKSISDASWSDFSRQLEYKSDWYGKHYVEIDRYFPSTKTCSECGNIQYVERSAKVYKCKNCSLLIDRDLNASLNIKSEGLKKLNISKNTRGHLGINACGDDVRLISNNKQLSMNQEKCPLL

SEQ ID NO: 20203 - protein, 418 aa, unknown
  TnpB Polypeptide
MLLSHKTSVKVTEDQANIIGHMCYAASKLWNVCNYERLHYKKTEPDEYPDWYYQKKAHKDDLWYKQLPSQTAQEICKLLDKAWKSFYQLQRTHGVTNPNPPRFKQENIAITYMQNGIVHSEGDSTVRLTLSKQLKQFMSGQYDITNNFLYLKNKIFKDTDVIKQIQIYPPENGTCTVIVVYEVNDAVMLSDNGRYLSVDIGLHNLMTCYAPSTGKSFIAGRKYLSVCHYFDKEIARVQSQWYKTQTKAGVKYPKMSKHVQKLYKKKNDCISDYLHKVTRFIAEYCHDNGINTVVIGDVTNIRKDNNKGSVTNQKLHSLPYRKLYILLEYKLAMYGIRFVKQNEAYSSQTSPLMSEVCKENAEKSNRIKRGLYTDGDKRWNADCVGAFNILRLYFQTNGIEKQMDPLKIADPYVIKVAV

SEQ ID NO: 20204 - protein, 240 aa, unknown
  TnpB Polypeptide
VTSGSGQSPSEGIPSGNTGLPSSLRQIPPFSTPLPKTGYERGIDLNLIELVNGSDGQTSANMHFYREAQASLAKQQHKLSRMAEHAKKEGRELHDSRNYQKQRRKVAYIHRKVARQREDYLHVLSKHEVENQDFIAAEDLKVKNLVRNYRLAKAVSDAGWGSFLTKLSYKAEAYGKEFVQVPPRFTSQTCSACGYVLKLEERLSLSDREWVCPACHTQHHRDTNAARVVLQIAKEKAATA

SEQ ID NO: 20205 - protein, 395 aa, Brasilonema sp.
MQLGFKTKLKTTLFQQQLFAQHAGFARWVYNWGLATMENFYQSGVKLSYRDARKFYTNVVKPEYPWMTQMSSRVYVYAFEQLKEAYKRFFNGIALKPTFKKKGKSKDSFTVDWNGKVKRTDGKSIKLPAPLGIVCTFEQLPSVDIKKATISHGADGWYISFNYEIPDISVGQLDECNHVDDIVGVDLGINSLAVAVSLNTVKTFDNPKKYRKSKKQLARLQRQLQRKTKGSKGHLKAKNRLARYHKHIADTRSHTINHMTTTICKNHAVVVIENLNVEGMMQNHKLAGAVADCGFGEIERQFQYKTQKFAHRLIQVDRFYPSSQLCPKCGAKQKMPLNLRTYKCDCGYERDRDENAAFNLCLYGWEHNGFQTGELPGSDRGGLKLPTAPVEAIKE

SEQ ID NO: 20206 - protein, 566 aa, unknown
  TnpB Polypeptide
MDELLKKENIDLSTFVKTFGSYNVAKINAYNFLFDETFLNVTHSETVNEMIKSKYKFDNYYTNNIVTQAKGVIESQKELIHTYEQQLKEEVQSIKTKIKSTKKLITQFKTNQQQLIKYNHLLKINKSVKKWKFKNYPLAHHGLTTSETVDKSEMRFFTYYDESVDFYTYSCFIDQELKKLKAKLGRLNFAKYRREEKLKSIAIPKRVCFGSRKLFQSKDTKDISYDDWKKDLYEHKYSKMLFSGRSDSHYGNYSVKYENQTLTIDLLQTYQLKGKQKNISKSMRKQVVIPNVSFKYGQKQIEDYLKKQYEVTTDMSLSKKDRKYLPIAYQIELHTDERNRQYLIVCIILSLPKKAHVNYDTSIGVVSIDLNVDHIALTDIDKCGNLVYQKILHYDVYHKNKGSVLHEVSRVTEDIIQYCKKVKKCLIMEKLDLVRKKQQLKYQNKKSNFLISGFVYSKLYNYLNSKAYKNDIYIYRINPTYTSQIGKLKYMRLFGLSIHICAAYVIGRRGMGLKESIPKYLRPLLTEKERNKHQWSQYATLTKKLKTLKKHNFYKNLQDIDKLILN

SEQ ID NO: 20207 - protein, 148 aa, unknown
  TnpB Polypeptide
MHGLYVASDEEDADYPNFLRKVEKRLAKAQRKLSKRQKGSRNRDKQSLRVAKLHEKVANQRRDFIHKKARYLVDKYDAIGIEDISVKAMAKRKKGGKFSFGKSVADNGWKKFVNILEYKLVWQGKQLVKIDKWYPSSQLCHTCGYQKK

SEQ ID NO: 20208 - protein, 423 aa, unknown
  TnpB Polypeptide
MASITLVAESKLYLKDNLSLYNYFDDYSRLFNFLVRRTVHHLRHKLNDEPESKYQTRLMFEFNITNRMAKAIIKTAKNQFKLLKEASHYQYSRLYKHRRSLQRKMEKLKHDLNSNRLKRRKLAKVRLFWTQMKLNRVNQLISNGLKLNLTFGTKHLLQTNKKKFLVKRDNQVIYMGSKHDTCGNQQFQIKFDSKHNHFNYKLRLDNKWVFGSNKHIFGSFILKNKEAKINTLQTLSTKLSNPLTYRIIKRDSALYLQIMYRREVIHITQSTNGVLGVDFNKGFISVSEINQNGKLQSLTRYNYLHKDKATRTKTSMLNLVSKLVAQAVNVGKDIVIEDLVSLDLNKKQDKTTSKTYNHMINSLKFGLFKCCLLSKAAKEGVSVHTVNPYNTSNIAKESYTNRMKLNVHDAASYVIARRFYQYD

SEQ ID NO: 20209 - protein, 367 aa, unknown
  TnpB Polypeptide
MLKAYKYRIYPNKEQKIQIAKTFGCCRFVYNNTLAYRKEKYEKEKKSSSKTDCNNYCNRELKKKYAWLKEADKFALTNAIYNMDSAYKKFFKGHAGYPKFKSKHDNHKSYTTNFTNGNIAVDFVRRKIKLPKLKEVKAKVHREFCGKIKSATVSQAPSGKYFVSVLVETGHEEMLHKNKNTGLDLGIKDVCITSDGEKYGNPKTIKKYERKLAKLQRQLSHKKKGSNNYHKQRKRLALCHEKIANTRKDYLHKVSHEIISENQVIVSENLQIKNMVKNHHLAKSIAGVSWYELTRQLEYKAKWNGREYVKIDTFYASSQICSNCGYQNAGTKDLSVREWICPVCGAKHDRDINAAKNVLAEGLRQIA

SEQ ID NO: 20210 - protein, 365 aa, unknown
  TnpB Polypeptide
LNKSFKVRVYPTEEQQVLLEKTFGANRFVYNYFLNLKIKLYEFYKINLSYNHSSKVMTELKKQKIWLKEVDSVSLQQTLRNLDRAYQRFFSGRGKYPKFKKKQDKNSYRTNHHIKINNRYITVPKVGMLRFRDNYKLEECNILKIYNITISKTTSGKYFASISAEVYIPCFEKTNQNVGIDLGLKDYLILDSGEKIHNPRILKSLEEKYRRLAKSLSRKVKGSANYRKAKINLARFHEKIVNIRKDFLHKLSTSLVKTYDVICIENLNISGLMKNHKLAKSFQDVSISEFIRQLEYKARWYGKTISKVDRFYSSSQLCSKCGYKNSEVKNLSIREWICPECGTYHDRDVNSAINILNEGLRLLEI

SEQ ID NO: 20211 - protein, 311 aa, unknown
  TnpB Polypeptide
MRGGELRLAKTAGPLRFTWSWPEVDVAALDPTMVVVSREPDGRWYVTFAIQDGAPEPLEPAGHAVGVDLGVTDFAVTSDGEKIANPRHLARKARNLARYQRRLARCRKGSANRAKAKMKVARAHRKVRNARRDFLHRASTRLVRENDVIVIEDLNVSGMVRNRHLARAISDCGWGEFRRQLEYKCERYGRDLVVIDRWYPSSKTCSACGHRLAGLSLGTRQWACPSCGARHDRDLNAAKNILAAGQAVAACGAGVRHPGPSRVRPAVKQEPRPVTAGIPSFRARSSQGSARPFRSGTTGITEGLCPVFRLT

SEQ ID NO: 20212 - protein, 427 aa, Cyanosarcina sp.
MLLTQTVRLKLDESEQEILKTLCRLSKNLFNVGLYAVKQYFFQERKYLSYESAYHLCKQNENYQLLATDCGQQTLKYVDRCFKAFFKLLSMRQEGSYTAIVKIPKYLPKDGFFPLVIPIRARHDFAKDNWKLLIPTSRQFRRDNGFVYITIPENIRHYRIKEIRILPKQRGRFFDIAFVYESQDEIVKTNPTAAIGIDFGLNNLATVVSTTGESLIVDGKHIKSVNQWFHKRISHLRSHKDKQGIKGLTEQEAWLSYRRSNQIRDYLSKSARYIIDFCIQRQIGTIVVGYNPTLKQGINLGTRSNQNFTQIPIFTLRAKLESLCARYMINYVEQEESYTSQSSFLDNDPLPVYNADNPTTVKFSGKRIKRGLYRTKKGHLISSDANGAANILRKSNNKLDFQRVDRVCLTQPVRVKILRESPATAVA

SEQ ID NO: 20213 - protein, 479 aa, Methanoculleus sp.
  misc_feature (293)..(372): Xaa can be any naturally occurring amino acid
MPSIFRGAESPFVMFPEDYQKQYIPVRSTDTCMLQAYKYRMYPNCEQTAMLMKHIHACRFVYNHSLEQKIRAYEQEGKKLSCYDLNNRLPVLKEEHPWLKEVNSQSLQNANKNLDNAFTRFFREKKGFPRFKSKKNPVQSFQVPQHYTVDFGRRRIKLPKIGEIKTIFHRMFTGKMKYAIVSVTTTRKWFVSILVDDGQPAPDPSPFCLDTTLGIDVGLTDFATLSTGEKIKNPRYLKNSLQRLKVLQQRVSRKVKESKNQQKAIQRLARCHEMIANQRNDFLHNLSNRIVSXXXXXXXXXXXXXXXXXXXXXXXXXXXXXXXXXXXXXXXXXXXXXXXXXXXXXXXXXXXXXXXXXXXXXXXXXXXXXXXXQSIGDASWSTFFTMLEYKCRKYGKTLLAIGRFDPSSKICHQCGHLKRDLTLSDRDWVCPDCGTHHDRDINAAINIKKFALQEQNLVGVAGAERAREPVDPAFSREEG

SEQ ID NO: 20214 - protein, 367 aa, Methanosphaera sp.
MKKISKYYKCRIYPNKKQIELFETNFVAYAYVYNKSKLIYEKEYKENLKSGKKVVYSNKYFYDILKQLLKENNHLKQVDKIILIDAYHRLLDSINNYKTGLSQKPKFIKKTSTQSFRLQCTSKDKLKCKRLYLNDYGTFKLHDKREIQGKLKEVIIKKHNSQWFIILKCSDISITEYPKTNKKVGIDLGIKNLIIMSDGKSIKPPNISKIESKINKYNRKLSKQKENSKNYQKTVLMLHKLYIKRTNIIEDNLHKIAMEIVKDYDFIAMESLDIRNMIKNRRYSHSIYNMNWARLIKLIKINAELNNKTFIQIPQSYPSTKTCSNCKTINNNVTIDVREWECPKCNTYHDRDINAAKNILYKAIEMS

SEQ ID NO: 20215 - protein, 415 aa, unknown
  TnpB Polypeptide
MEVRRTAPVKLVVPDEYHDDLHETADQFRYCANQASDYCWDNTSYKNCVTSNSKARDALYDRLKDETDLNANLVQEAIRRAVHAVDSGVDRWKKGKRTNKPEFTSWSIVFDKRSATFYRNKISLATVNGRVEFEFELPADSPTPYEEYVLSEDYEFRTSTLQYDQASNEFYFHVTTRKVDDDGEAVEIEVSDDTGHQTVLGIDLGVNSLAVASTGTFWSGDEYDHWIHEFEKRRAEMQQRGTQAAHNALLRLGKRERAWRKQYIHTVANEIVDEAVAHDCDVIVFEDLTDIRERLPHADWHHIWAFRRLVEYVEYKAPEQGVAVEQVDPDHTSQRCSHTDCGFTHEDNRDGEQFKCLKCGYEVNADYNGAKNIALRYMRKRTHSLRSSPMSGSADAPVDVRITGGTLNGNGYQSV

SEQ ID NO: 20216 - protein, 412 aa, unknown
  TnpB Polypeptide
MPLRAITAKAIPLADATEEILKNAMNSATKVYNGLLWHLREEYKKTGKSTVTRKNLNRILKTLPRAKDYYSLAVQSTRNEVIGAYKSFFALRKNGHTQHNSPKFRRKPEPSPLKYLQSGFSVNDNTLTLSLGSSREDGMKSITLKIEHRPDIDLSTTKIKGVTITYDKQLGFKAHLVIETPPIAMVQEGLTVAVDLGETNLITAVFSDETTIIYSGRIMKAVRRYWQKVRAKVKPPSKDNPHYSRRYDQISRKESLWTTNFLHQTSRHFIDLCKQKDVKEIIIGQLTDIREEIDYGKKVNQRLHAWPFAKLTEFIRYKAEGMGITVRQESESYTSQTCHACGKVSKSNRKHRGLYACYCGYRENADINGAANLFKYTYKVSPWGAALRSSGAVTAPALVVKFIGHMVREYLA

SEQ ID NO: 20217 - protein, 467 aa, Saccharopolyspora sp.
VAYSKNVNPGKYAQLEEQALRLGCVRSMVWDRYGSVAGAGVSDRAIRDQWMVDGTAADFDVLANAWKETVRDAVADITASRAAAKTKVRKVIALRDVSQAERKRLYELLKRDQWASDPYLSRQMRKHWKRGRNRTRNQIIIRSDNVRTFTLIEGGNVWLAVPGLKPRSSVAVPLGTTVAPSGTLRVLLRAGRIEVHYQIDDATLKSAQRPCGTRAVGVDKGYSEVFTDSDGQHHGTELGDLLTSESDYRKVKNAHRAKLRAIAEKAEESGERAKAQRIRDNNLGTLKRQRRSAAWQRRVRNITFQAAHAVADKAGVIVAEDLTKTFTGRKRLGRNTNRRLAAWTKGVTAEALQTVSERRSSVLRLVNAAYTSQAIPGTSSLGKRVGDQLHCTRCGVVWHADHAAAINILDRDADPDIGLYTPHTRVKQILQERDRRRSRLPDQDSNTTRQCRCGERINRFQPTVIKE

SEQ ID NO: 20218 - protein, 283 aa, Microcystis sp.
MLSFKTELKLNNKQQSLMAQHGGCARFAWNWGVALTQEILDYNRNNPENKQKFPTAIDLHKRFVAEVKSVNEWLSESSKCAPQQALRDLRIAWDRCFKKIAKSPKFKKKGVKDGFYLEGSIKVESNRIKLPVIGWVKTYEQLPTGGIKSVRITRKADRWFIAFKIDDVEVHPTIKQREAIGVDLGIKSLAVCSDRTVFKNAKAYRKLKRKLAHVQRAVSRKAQGSNNRKKAVKVLARVHYRISCIRNDTIHKLTSNIMVSQEPQRHRVRGFKRLRNVEKSQTG

SEQ ID NO: 20219 - protein, 465 aa, Acidianus sp.
MGNSTGQLRTDEGQEPTLTPAIPVEVPNIKTNVIRLLVNGFQNRKLHKLANTSAKLWNELTYERRQQYFKEKKVNFKETYKKYYEKYKIILKVNSQAIIQKNNEAWSSFFSLLKQGEKATPPGYWKKNGKRKEILIIRQDRYEVKDNNIILKDFGLEIEFAGKLRWSGKQGRLEIIYDELKNTWYANIPVEVGVYLARTGKPSKYIVKGKRDKIIIATPKSNKKASIDLGINMLASVVVDDGTWLLYRGTRAKEDYFYFQKKIAEVQSLADKTKNIGEAEAYEELTREKRRLFKKLYSRLLHLYRTLASHLARTLYELGVSEVYVGYPYDIAQDKGNKFTVNMWSYGKLIDILSQKLIEYGMRVYKVIEYNTSRYCAYHGVEVVRKPRGTITCSLGHKLHSDLNGALNIMKRVVKGIPVKIKRPLSFYVFHNGVAPIKGSNALDPSGILAFRAWSGSKTFCRGKY

SEQ ID NO: 20220 - protein, 406 aa, Acidianus sp.
MFKTKEKNKNTITLSYKYRIYSTLEVEQKLAKTMETEVKVYNSLLDYITEKKKQGIKVTQLDTQKLLKNMKEKHEVYSKALQMINNILWYNINSLSKLKKNGKKVGKLRHKKIFKIIWYNQSGFKLTGDTLYLSKIGEIKVLLHRPIRGEIKGVIIKRSKTDKWYAIFQVEQEKQPLEKTGKVVGVDLGVEKFVTTSDGVVIENSKLLDKREERIRLLQRRLSRRKRGSRNREKARLKLAKAYERLENTLADYIHKVTTWLVKNYDVIVVEELNTQRMVLDSFGRLRKHILYSKFSSFLHQLFYKAVRAGRKVVEVDPEYTSQTCSRCGYKVKLSLSDRVFHCPNCDLVIDRDYNASLNVLRDGVGTAFLPVEGEPLLYVTFHEVLYSKFPLRSRKSSSRGGDASS

SEQ ID NO: 20221 - protein, 382 aa, Acidianus sp.
MAKGGKNPIRATVSMKIGVSEPLLALSRNYVKALKFVLFWLKERNVNPKEKGILQLIHQELYEKIREEFQLPSKIAEDCYRDALAIYKGWYNNTNKGRFPWVHKPTVWLSPRLSYSLNLEKMGVKIASVGELPILGYPRNLSSYKDWKMKEARLVIKDSQAFLKVVFEKEQEQIVPMDGVAVDVNMNEIVAGKDDTHYVRIPTRLSDSHHWKSLAEVLQKKYPKRWKENKRILYRIHSFHLKAKCIMEDSARKIGKWVVDIDRDLGANVIKLENLRDLIKNVKDLPKEYRDKLYLMQYRRIQYWIEWQAKKHGLIVEYVPAFYSSVTCPKCGKKMKETSHRWFSCSCGYENDRDVIAVANLNGRGSLSLSTAPQMRNVNPNR

SEQ ID NO: 20222 - protein, 425 aa, Acidianus sp.
LKNLRIKTFQPQTQYLHITYIIKNNQEKSKELIKAYTKLLNKGIQYLFKKITIIHVKKTNKILLPKNKNTYKELRKYLINQNNYNLAKHYIDQAIHDTYSILESWKRKYEKKKAKFKPPLVKKGYVRVKTTLRKVEGKSVRITVKPYEYITYSWDKTWFSKRVEDFELTEPIIKEDKVHLVFRKELPTTTPLEVVAFDSNLFSLDGYDGEKFVMVSTKQLYSLKFIMQEKRSRVQSLASKKFRVGRRLLNKYSHRERNRVNDLVHKLANLILSLYNNHVLVFEKLNKEGMFKDGSDSLSRKLSRTVWRKLVGVLRYKAFFYNCRVVEVDPYLTSRSCPRCGWVGSRMVGRTFRCGRCGFALDRQFSASLNIFKRYLKNFNLRMWGFSHPERVSGVIPLMGGRGMSVRDFGELQGSRIEYKIYEIQ

SEQ ID NO: 20223 - protein, 451 aa, Acidianus sp.
MGTSAGQLRKNEGQEPTLTPAIPVEVPNIKTNVIRLLVNGFQNRKLHKLANTSAKLWNELNYERRQQYFKEKKVNFKETYKKYYEKYKSILKVNAQTIIQKNNEAWSSFFSLIKQGEKATPPGYWKSDGKRKEILVIRQDRYEVHENKIILKDFSMELEFAGKLRWSGKQGRLEIIYDELKNAWYANIPVEVGVYLARTGKPSKYIVKGKRDKITIATPKSNKKASIDLGINMLASVVVDDGTWLLYRGTRAKEDYFYFQKKIAEVQSLADKIKNIGEAEAYEELNREKRRSFKKLYSRLLHLYRTLASHLAKALYELGVSEVYIGYPYEIAQDKGNKFTVNMWSYRKLFEVLSQKLIEYGIKVYKVVEYNTSRYCAYHDVEVMRKPRGVISCSFGHTLHSDLNGALNIMKRVIKEIPRQIKKPFSFFVFHNGVAPVKGCNALDPSRILTL

SEQ ID NO: 20224 - protein, 315 aa, Acidianus sp.
MFKTKEKNKNTITLSYKYRIYPTLEVEQKLVKTMETEVKVYNSLLDYITEKKKQGTKVTQLDTQKLLKNMKEKHDVYSKALQMINNILWYNINPLSKLKKNGKKIGKLRHKKIFKIIWYNQSGFKLTGDTLYLSKIGEIKVLLHRPIRGEIKGVIIKRSKTDKWYAIFQVEQEKQPLEKTGKVVGVDLGVEKFVTTSDGVVIENSKLLDKREERIRLLQRRLSRRKRGSRNREKARLKLAKAYERLENTLADYIHKVTTWLVKNYDVIVVEELNTQRMVLDSFGRLRKHILYSKFSSFLHHFSTRLKELVGRWWR

SEQ ID NO: 20225 - protein, 592 aa, unknown
  TnpB Polypeptide
LARARGRERAASWSSPATRRTLGERVRRGSIVHGGSPDRVGLGELQRGRRRCRWPARRPAGGNGRSYLAKMDDPLHIVWSRPLPEGAEPSTVTVSRGGTLVRAHPGRGEHPARLPRSSRLWGGAGITCLVTLSTGERIDNPRHERRDRRRLAKAQRARSRTAKGSVNRDKTRRRVARIADRCRDVLHKITTRLVRENQTVVIEDLTARTMVRNRSLARAISDAACRQLRSMSDYKCDWYRRELVTVDRWFPSSKLCSACGTLRDEMPLNVRRRECACGAVHDRDVNAAKNVLAAGLADRQNACGAGVRPQRESSRTRRLAVKQEGRPATFEGPAFRPGEEVNCGYFGCLADLVRRQPPEQRSTKPPAARRPSLPLTVARSTPALTAIWAGPAAPLAGRASRTARAVGSRRSRGSTGPDGTGARSSPIRPTASMISSERVTSVADGSSRSSLWQPTDVRESTGPGTAMRTRPSLRVQAAVLRAPLRASASTTTVPRHSAAMTRLRTRKRRRCGSTPGGDSLTSSVRRAISANSPSLDAGYGTSTPLASTAIVGPSAARAPRWAAASMPSAPPETTVQPRSARSAANPAASRRP

SEQ ID NO: 20226 - protein, 466 aa, unknown
  TnpB Polypeptide
VSSQPQRTNEYTADPTTERHRQCLFEWLAAHAPLWNQINYRRRQQYFADDGNVWDADYTGLYDKYAPILGKAACQQVARKNSEAWRSHFQLLDTYHDDSNTSVTDKPSPPGYWGNRDEGYELHGFVRNDLYTLDWDEKRSTLEFGVGEVLEEKYNFEYQERITLEVRGNPQWQGDDARLELVYDGVADTLRVKHPVRIRPNQLHEQRLDAFTHTLTSENTTHTAAIDVGANNTLAIVTSTGETAVYHARPEYERFRELSTRIAELQSALPDDRYTSRRIQLLYDKRGEKRDHSRDAAVKHAADWLLSRNVDTVYVGDLTDVLDAHWSAVVNEKTHSFWSHRQLVERIELTLGDVGIAVKPVCERDSSSRCPECGSGDIVRDGDGFRCHDCGLDAHSDVVGAWNVLQSEVGPMARPAALSVERGRDEPCEGAYWEWNGHDWRPAGFGEQLSPVNQTSVSKPVSSQPG

SEQ ID NO: 20227 - protein, 325 aa, Escherichia sp.
  misc_feature (64)..(64): Xaa can be any naturally occurring amino acid
  misc_feature (74)..(74): Xaa can be any naturally occurring amino acid
  misc_feature (118)..(118): Xaa can be any naturally occurring amino acid
  misc_feature (151)..(151): Xaa can be any naturally occurring amino acid
VKRLQAFKFQLRPGGQQECEMRRFAGACRFVFNRALARQNENHEAGNKYIPYGKMASWLVEWKXATETQWLKDXPSQPLQQSLKDLERAYKNFFRKRAAFPRFKKRGQNDAFRYPQGXKLDQENSRIFLPKLGWMRYRNSRQVTGVVKNVXVSQSCGKWYISIQTESEVSTPVHPSASMIGLDAGVAKLATLSDGTVFGPVNSFQKNQKTLARLQRQLSRKVKFSNNWQKQKRKIQRLHSRIANIRRDYLHKVTTTVSKNHAMIVIEDLKVSNMSKSAAGTVSQPGRNVRAKSGLNRSILDQGWYEMQNTATAFPYRKYPQGLPS

SEQ ID NO: 20228 - protein, 440 aa, unknown
  TnpB Polypeptide
VDLNQLTRGKPGALHYISGITHDTQYIIVAMSLKRYRYRAYPRKGQKQLVAALFGCVRVVFNDALAYSVEQYKETGRKPSSGELSARLTRLKRTPGKTWLRDVPAVPLQQSLRDLDRAYTNFFASVTGKRRGTRVGAPRFRRRSNRQAARFTSKAFKVRETSHGVGFVKLPKIGEIRFSLSRGLPSPPTSVTLIQEADGKYYVSFVVETTPTPAPEPTAYAVGVDMGLKDLAITVNSNGESTVFPNIRPLKKAEKKLSRLQKQLSRKKKGSNRYTKQRLRVAKAHTKTRNTRAHYLHHVANQVVNENQVITLETLTIRGLAKTRLGKSILDASWGHLTRLIAEKATDYGRTLIRVDRFAPTTQTCSICGAPNGRKPLNIRECVCTSCRSRVDRDRNAAVNIMLAAGLAESLNEHCGDNVRRSLADAVIVDAVHPPKVTTA

SEQ ID NO: 20229 - protein, 352 aa, Uncultured sp.
MFYKDLVSMGFRAHHAKEIYVYAKSVVRSAKSKGGRRPTLRRLTARLDKYDYRLDLDDMTLTLRLHRGREARLRLIAPKERAEKFRGWENYELAVRHDGDGLWVTVYFRRDVKPAEPRTIMSVDLNFDNITLAVFTLNGKLIRLRRLRTPLRKALTHRIWIERIQRRYPRSWRFVKGVRRAVERHGERIKNISWDYAHRAGDLIAELALRYRSAVVLEDLNGLREDRKGGSKFNKRLTLWFYRKAQFCIEYEAKERGLQVAKVDPRGTSSRCPRCGAKLVEVGHRRLRCPRCGLEGDRDVIATINIYRRYVKEHSRCGAPGVALNAPKPDESPSGMRGNRDEAMTVRQHEPI

SEQ ID NO: 20230 - protein, 435 aa, unknown
  TnpB Polypeptide
MKIMSTYSVKIRESHGAFKDTTEEYRQAVDFFIVVTINEWEKISAIKSSQLRQREVELLTHKTEKNPNTKYNFDEQFNKFPSYLRRAAINEAIGKVSSYKSNLANWQENPQGKEPGMPRAGRIYPAMYRDNCFVRTGTYTARLKIFINGTWDWLNVELKKSDVDYIQRHCKNRKECSPTLQKRGKNWYLDFAFEEVVEIIDREITEQVIIGVDLGLNNACVCSAMKSDGTVIGRQFLKLPREKDCLNHAVNRIKKAQQHGARKMPRLWARVKGLNQNIANLTAQFIIDVAKFYSANVVVFEHLDLRGKKRGTKKQRLHLWKARDIQQIVEHKAHQEGMRISRICAWNTSRLAYDGSGYVQRNEHNYSLCTFQNGKQYHCDLSASYNIGARYFIRELLKSLSATVRLGIEAKVPQCTKRITCTLSTLISLNAELAA

SEQ ID NO: 20231 - protein, 419 aa, unknown
  TnpB Polypeptide
MELARLKPRPSGRGYSRQPSTNHVRWHRRIFHDLVVNFNARPSINSYEHSPMLETTRTYRAKIVNHQQVQDDLDNCGFSASKLWNVARYYTQGRWDDDGEIPDDGELKSELKEHERYSDLHSQSSQRVLEELAESFTSWHKARQRGDEDANPPGYRKHGDNHPRSTVTWKQKGIKHDSKHNQLRLSKGFNLKNHRSDFILAEYETRPDVTVENIQQVRAVWNGDRWELHLVCKVEIPVEDAPGDNTAGIDLGIKNYPRHRLRRWRRRVYPGNVLKQDKHYFTRDEYDTEGENGPSRRALRARQKLSRRKDHFLHALAKHIVEQCIDHEVGRIAIGDLSKIREDENGNSRNWGKRGNKKLHGWEFDRFTRLLEYKAEEHGILVDRTSERDTSKTCSCCGRKRDANRVGVACTSVNRAVRR

SEQ ID NO: 20232 - protein, 402 aa, Streptomyces sp.
MARQVKRAYRYRFYPTDGQAAELSRTFGCVRLVYNKALEERTRAWYGQQRRISYVESSAALTSWKRTEGLAFLSEVSSVPLQQALRHLQTAFANFFARRTRYPRFKSKKKSRASAEYTRSAFTWREGQLTLAKMSEALRIVWSRPLPKDAQPSTVTVSRDSAGRWFVSLLCEDTAIPAPATANAVGIDAGITSLVTLSTGEKVANPRHERRDRVRLTRAQRELSRKAKGSANRDKARRKVARVHARIADRRRDFLHKLTSRIVHENQVVVIEDLTVRNLVKNHSLARAISDASWTQLRSMLEYKCAWYGRELVTVDRWFPSSKLCGTCGTVAKNLPLNVRKWTCDCGAVHDRDINAARNILAAGLAVSACGDGVRPQRESSRTGQRSVKQETQRATAGLPRL

SEQ ID NO: 20233 - protein, 510 aa, unknown
  TnpB Polypeptide
MRNTANFYIRNVMTGLRKSPEERTHAETEVLHEVFTGIQKANLLAVERYRKKLRKLRLAGGMKSAVVCSCLELKQFSYPTRTNWFLSYEVLDAVFKATEHPVYCRMDSQVNQNAIRKTVKAWKSYFKAVRDYAAHPEKYQAKPRIPGYIRTMGATAWWTNQTAKFLFRDGKAYLRFVNVKQPFCLGNASLFEGSTYVKTEVQPFHGHFRVLVTFDDHQKEAPVPEYPERILGVDIGLSNLLAAAGNFGDAPFVIGGGPVKALNQWFNKRKAELLSALTRGSDSKHSMKESHALDALSRKRDDTLNDIFYKCAWYLLRYAKANQVDVIVIGYNKTQKQGIGIGKQNNQAFVSVPYGKLRQCIRTVAAKLQVPVVEQEESYTSKASLLDLDQIPVYQSGKKNETGFSGSRIRRGLYRSADGTVLNADVNGAGNILRKRYPEAFDGRPLSYLWKTTKAVEIKDWYQKGGKKVSQKRHKASIASKVHHEQRKQTRREYLKLFGKSKKKRQPEAA

SEQ ID NO: 20234 - protein, 392 aa, unknown
  TnpB Polypeptide
VLKGFKTELRVTKQHIAKIHQSIDTCRFLYNLYLAKNQELYDLFKSGKIDKKQAFMSANDFDKYINNEVKVLDEFEWINNCGSKARKKAIVNAEMAYKRFFKGQSKFPRFKKKKNQDVKIYFPKNNNTDWTVKRHKIKIPSLGFVELKEKGYIPTNVKVVSGTVSMKAGRYYVSVLCDVVDHNDYSNIHNEGIGIDLGIKDLAIVSNINEPFKNINKTVVVRKLKRKLKRLQRQVSRKYEMNKDGKKFIKTKNIIKLETQIRTIHQKLSNIRLNYAHNITNTLVKTKPEFITIEDLNVNGMMKNRHLSKAIAEQSFHEFRRQLTYKCLWNNIELRIVDRFYPSSKMCSECGSIDKDLKLSNREYICKECGIILDRDKNASINLKKAKVYKIE

SEQ ID NO: 20235 - protein, 418 aa, Halorientalis sp.
MVNLVTTRTITAALTNDREGVVRDLDSLARSGSKIWNVARWTADRIWDHTAEIPDEGPLKSYMKNQACWKDLNSQSSQAIVEELSGAFQSWFEKNDPDANPPGYRKHGDERPRSTVTFKEDGFKLDTKHQQVRLSKGKNLKDGWSDFILCEYDTGPDADLTDVEDVQQVRIVWNGEQWELHFVCKVAITAADLSGEKTAGVDLGICNTAAVSVGDETLLYPGNALKEDAHYFRQEEYDTEGEDGPSDHAAWARQKKSRRQTHFLHAISKDIVEQCADKDVGTIGVGHPKDIRGDEDWGRHGNKRLHDWAFETLLSHIEYKAEERGIDVERVDEAELKTSKTCCECGTATDSHRVERGLYVCENCELVANSDLNAAENMRATVTPSPEKDRSNGCLAQPSVRLFEKSTGRVAPQEQVRP

SEQ ID NO: 20236 - protein, 413 aa, Halorientalis sp.
MEYSHRYHAYPTQEVAERLDHHLDVHRQLYNHVRWDYENSSEDDKPSEYDQNNKLPEWKRKWPVFGGLHSKAAQATVARFHHNLTVLRELKENGYNVGQLKWQSPTDYRSVTYNQSGFDLDEKRGHDKYAYVRFSKIGWVKIRYSRPIPDHATINEVTVKKETTGEWFVSFALETDDADLPEKPDVDSLNASNSVGIDLGILNYIHTSDGKTVDWLNLEDDYERLRREQRRLSRKDHGSCNYERQRQKVAKVKRRIRRKVLDYQHKLTTWLVTEYDAVFVEDLDVKGMLQSDGNARNKQDAAWRQFVHLLDYKGDLYGTHVVQVEPAGTTKECARCGVETAKPIWVRDHSCPSCGFETDRDANAAMNILQRGFAKLGLGWPEDTPVETVATTDTTQFESVSARHVIETGSLPS

SEQ ID NO: 20237 - protein, 310 aa, Microcoleus sp.
VQLKSKHGRQSIQYPQNVQVIGNAVKLPGTVGTVKAKLHRTIEGTIKTVTVTAYPSGKYYASILSEVEGENPAPSTEGKVIGIDLGLKHFAVASDGNKVSKYDNPRHLAKHEKNLKRKHQKLARKDKGSKSRNKYRKVVARVYERVSNSRADFLHKLSRKLVNENQVVVVENLHVKGMVRNHNLAKAISDAGWGMFINFLAYKQELKGGKLVEIDRWFPSSKLCSNCYHQVEEMPLDVREWTGPHCGTHHDRDGNAATNIRAEGIRMQLLVDGTSISASGGEVRPKGGRKSVLRHSPMRLEAQGVALAQP

SEQ ID NO: 20238 - protein, 390 aa, unknown
  TnpB Polypeptide
VLKAFKYRLTPTDSQAELINKHIGSARFVYNLALETKAAAWAGNRVSLNCFDLIKQLPDLKEECTWLKEINSQSLQQPIRNLDNAFTRFFKGQGNFPKFKKKSNGGSFNIPQNVSLENGKLIIPKFKKGIDIVLHRPIKGEIRQATISKTPTGKYFVSILCETGDPIKPKATIKENTTVGIDLGIKTYLVSSDGKEFDNPKFLRKAQCKLKFVQRKYSKHKGKRTKHRLAILHEKVVNQRKDFLHKTSTQLIRDNQSVAIEDLAVSNMLKNHKLAQSITDAGWSTFVTMLEYKAEWYGKNILKIGRFEPSSKLHANCGHINKNLTLSDREWNCPKCGDVVSRDVNAAINIKSFALKNILSGTDRKNQGELSTMVEVLTLEAHPIGSAVGG

SEQ ID NO: 20239 - protein, 351 aa, Geobacillus sp.
MPTVTLKLELHKPTKVKQEMYERMTRMNTEFANWLLHHPEWRKATSKIFKDFSDERFPSAIVNQTIQDVKAKKKHQKAQKFRKMWCSFNNQNLKIEKSGEFYIVSFPTLEKRVGVPIVTREYQQKWLDRIMDGTAKQGTATLYKKKKKWYLAIPITFEAKQRKETKVMGVDLGLRYIAVASVGTKSLFFKGNQCAFIRRRYAALRRKLGKAKKLDAIRKIGKKESRWMKEMNHKISRQIVDFALTNGVGIIRMEDLTDIRNRAKSKKEAGRNLHSWAFYQLQQMIKYKAEMAGIRFELVKPNYTSQTCKCGYRDRANRNGIHFKCKKCGYAIHADLNGAINIAKAISGLAS

SEQ ID NO: 20240 - protein, 261 aa, unknown
  TnpB Polypeptide
VVATLTEEAPTGYRDVAISRDGQGHYYASFVYEVKEETHEQEGVLALDLGIKTLAVGVNEQGRVYHIGGFRGNTWYNKQLDKLRSKRSKCKQKSRRYIHLSKVYKRVSQKKCNKQQDCLHKASHLIAHTLVESTVVIGDLSQRQMVTKEHKERNKRLNRAVFNDWGLYSFVQMLGYKCLLSGKELVVLDERDTSKTCSRCGHQQAMPLWKRTYCCPECRLVMDRDENSAVNILKRYFAWLRPHMEWTSMRCAGVFTATDMC

SEQ ID NO: 20241 - protein, 400 aa, unknown
  TnpB Polypeptide
MYYKTFKVRLFPTKDQEKMLWKHIHTCRAFWNFMLELNIDTLNSFNKRLSYYEMCKIITTLKEYEEMQWLNDVSLHSLQRVCDNLNDAYQKHFKNPKNYGYPKFKGRKKSVNSFPISSYNAENRFISNDCIKICRCGRIKCRFNYRTINFDKIKDKPFLNPQITFTNNGKWILTFSLEHENQVFKNKNSSLGLDMGIKDAAIYSYKDKDGIIHSDTIENLNKDKKLKKLDYEIIKLERIISRKYRTSKRLGYEFRSSNRYRKTVNKLRKLYYHRMNIIKDYYHKSSSHIVYDIHPSFIFIEDLNISGLLKNRRVSKNIAYVSWYSFQIMLQYKAERIGIPICKVPRFYPSSQICSNCGSIHKLKLSERTYFCPDCGLIIDRDINASINLMNYNQGLYRFS

SEQ ID NO: 20242 - protein, 502 aa, unknown
  TnpB Polypeptide
LCIFFPSLCRACFYSRGRKAPDSARGYKADRAPHDNKRAILARIQNFRHDSLIMKIICGFQYELYTTDEQRSALSRNAGCRRFVFNKALELQNERKKNSLSLLRYKELCLELVKWKKKEKTIFLKEAIAQPLQQSLKDLDRAIADSFRPKSDPARKEWPKFKSKDIGDGFRIPQFKPEHIDDVNGRVKLPKIGWMRYRKSRPLAFKCADGSMKSGTVRQIHIRKDCGHWFVVFTTEFDIEMPDPKELDVGIDLGVVHAVATSDGQFFDLNTGKIKELEKEIARYQRKLALNRSSRLKLAKEGRAEAFDKTKPSRKRRRLLEKLQKLHRRVRHIRRDFQMKTAHTLAQEYGCVYVEDLKTRNMTKSAKGTLDNPGKNVKQKSGLNRAILRTGFFGMRQAIEWQQYKAGGYVVAVPAAYTSCECPSCTCTDKRNRPRQAQFRCIGCGYENNADIVGAINVRRKGRTGPSAHDKKRIAREVSAGAVVPFARNSGANNENQPLGVA

SEQ ID NO: 20243 - protein, 423 aa, Candidate divison MSBL1 archaeon
MELAQKIKVQPTEEQEEVLTSLSEMCRLLYNFSLSERIENWEENKDKPEEERNCITSTDRQNELPELKKEYPKYGWMYSKVLQMILGKLDADYKSFFALRENGDRKARPPRYKGKKYFTTLTYNQSGFKIERGVIKFSHNHPSDMPLEFEIPEKFDFKDGNVKQVEIFRDELKDEYYVSVTYEKETPEYEDNGLYQAFDLGIIKHAGVNTYGESIEFKNRRADKYWESKVEEVQSKRDHCKKGSRRWKRYNEKLCKMKKKCADQLWDHQHKISRVMVDNTKANTIIIGDLSTKGMASEENGNAKGLNRSLQNTGMMGRFVRFLTYKAKLVGKKVIEISEEGTTKECCICGEKEDRSLHERIIRCDCGNVMDRDLNSAINIMKRFLSQERSVDELSSFMNGILRQTGLGYAHKPTPKHSQEAPS

SEQ ID NO: 20244 - protein, 407 aa, unknown
  TnpB Polypeptide
MRKVIKLQSLELTNKKKEELESARIEAKRIIEKYILQILDKCENNSELQQKIYHKIRKDSFLPSQVLLNLIRSSFHLKQKPKDKRTIERITLDYNIPRASKLFTLPNGTLCFAITIKPRHRIVVPIEMNGSIERFRKHIKNGWILKQVSLTNDNQVLLNLEKKKDPKNYKNHLGIDVNSNNISLTILAPKGKILKQLYLGKNLYKKKAKILKRWSKLQSYADKGDPKAREKLRKLNHKVSNMTKNAVGELSKEIHNIAEEYESMIVMERLTKFPTNKGKKANRKISLIPFMLLRQRVIVRSVDTGVPLGYVHPYHTSKWCPRCGSVNPPHDKKNYAIYRCSECGLECNSDRKASLTIALKKFVGRDQKWFQYPTKRVSVNALFWGNDDKYSKGTENPIYLSDPKVVL

SEQ ID NO: 20245 - protein, 506 aa, unknown
  TnpB Polypeptide
MMNGNPRRQVKPMNRTVTESYCITFEVKVNSSDQPEIDRRMECARQIYNTCLGHCQKLWRKVRSIQEWRSALKELQALNRKTELSSDEKSRQRALRQQLKAIEQTEGFSEYALHAYALTINRHFCSPLGVNEMQKTATFAWRAFERYRFGNAKKVRFKRRGAPITIENKSNATGLRLKSDKVLWGGKHTRTLEFPIIVKRNDTYAQQTFLDKTKFIRFFQRTIRGKRRFFIQAVKEGMTPPKKRQYGEGKPAVGIDLSPSTLVAYSPEAAVIEELAPDCEDIEAALRRVNRAIDRSYRTTNPEAYNENGTFKKGCRLVPSRRCQKLIAERKELFRKQAAVRKQSQEKAANELIAQSTDIKVEDTAVTSWAARAKETTVNRKNGKIHSKKRFGRTVARRAPAMLLSIIDRKLKYRGYALKRVISRQVKASQFDHSTGQYRKKRLCDRWCVIDGHRVQRDLYSAFLISHVTGKNLDTIDRKACCDDWTNFLKLQDEVLKTCDKNLGIF

SEQ ID NO: 20246 - protein, 365 aa, Lachnospiraceae sp.
MQKGVKFRIYPNKEQKNLINQTLGCCRLIYNKGLAMRNETYKNGGKIGYFQTSTMLTMMKKCDDFAFLKVVDSIALQQSLRDLDRGFVNFFQKRAAHPVFKSKHNHHQSYRTINQDENIRIVGKHIKLPKLGYVKVRQSMEIGHINSVTIERTPTGKYFAVLNVEFEPTPKPNGGKKIGIDVGIKEFYSDSNGNMVPNPKHLEKSMRKLVREQRRLSRKEKESNNRNKQRVKVALVHEKITNQRNDFLQKESTMLIRENQTICIEDLKVKNMMRNHRLAKSIASVSWSKFFDMLEYKAMWYGNDIIRIPTMYPSSQTCSCCGYKNPLVKNLAVRNWECPECHTKHNRDTNAGINILSKGLHLQSA

SEQ ID NO: 20247 - protein, 351 aa, Bacillus sp.
MQLTITAKIKINPIPEQIGLLQETLKAYRNGCNFLSQIIFETKEIVQAKLHKIAYKTLRSDFSLRSQMAQSVMKTVIARYKSAKTNGHDWAKIRFKKPEYDLVWNRDYSLTKGLFSINTLHGRVKVPFEAKGMEQYFDGSWSFGTAKLVNKYGKFFFHIPMTKEIPEVSEHTFSQVVGVDMGINFVAVSYDSDGKSLFFNGRSIKDKRSKYKYMRKQLQRLGAASARRKLKRIGQKENRWMTDVNHSVSKALVERYGANTLFVVENLTGVRHATERVRVKDRYETVSWAFYQLRQMIEYKACIVGSKVIAVDPCFSSQTCPKCRHTKKANRNKKKHIFCCKKCDTHQMMTV

SEQ ID NO: 20248 - protein, 409 aa, Bacillales sp.
VILAKKVRLIPNEEQEKQLWKSAGTFRYIFNWALNKQIEHFEKTGKLNKISDRVLRKELTKLKQSKEHEWLFDVSNNVGKQAVKDVCLAIDRFHLESKKYGYRYRKSAIKSGKPLTIRDFEDFPRFKSRKKSKISFYNDNVKLKVKDDAVLIEKVGWVKVAEPNKIPIGAKYTNPRITHDHKYWYISVGVEVAETAEKSTGTTVGVDLGIKNLAVISNIDKPFKNINKTKEVKRLKKKLKRKQRQVSRKYEKNKTLLGKAGENRYKFTKTKNTKKLEKEIKLIHRRLSNIRLNHIHQTTNEIVKTKPSTIVVEDLNVSGMMQNKHLSKAIQEQNFHKFITTLQYKSKLNGIEFVKADRFYPSSKTCSNCGDTKKDLKLKDRVFVCPSCNFKIDRDKNASINLSRYPKSA

SEQ ID NO: 20249 - protein, 416 aa, unknown
  TnpB Polypeptide
MIRSSKHTTKFANPLKLKRLSRFVDEYRRVGQIIIDTIWANGFDSFIPLKDQLNCPKYIDYNRFDVETDISPRAMSSLTTQICAALSASTKKRKKLLYTKSKLIDENIPTKSINRLLTKYIIVKPDCRYMNPELSSKCSDIESGKSFDYFLRIKCIGKFYGHIKIPLKHTKMSLKWLKSGKPLTSYSVTTSSITLRFEIKPSRTTIGTKVIGVDQGMKDVATCSDSQTTPKTDAHGHSLEFIINKLSRKKRGSRAFEKTQSHRKNFINWSINQLNFNDAKEIRLEKIWNIGYKNRTSRKLSHWTNTLIRDKIIGKCEELEVPVIEQDSTYRSQRCFNCGLVRKANRKGKLYKCKKCGYEADADFNASLNHSIDLPDIDWRFRGKGHNLGKGFRWTPTGLFNLDGSELRVPVSNKQG

SEQ ID NO: 20250 - protein, 436 aa, unknown
  TnpB Polypeptide
MIVRATRHTLKFANTGKRESIDRLLAEWRRVMQLICDDIWSNGYRWQEEDGWHEFNPDKFKYELPKYLDYNRFEIDTWLSARMMSSLVTQLSGKLRAICSKNAKRLYVFDKEAAQGNYLERLWEVIEERNPSKPDLSDAGIEISSKCAEFYPTPEGEFYGFLKIRSTGLDIFNVPVCRHKHMAKYLDGTWEACNGYLIDEYGIQLRWQKEFAQKEEGEKVGADQGLLTCISLSDGQTTADMVLDAPRKGEPTRKLKVNLDTITDKMCRKTKGSKAFERCQCERRNYINYAIKRLNFSGIKEIGLEKIDNIKYGRNTSRKLKHWSNPEIVIRLAQVAEEFGVRINPQSNAYRSQRCSGCGHVLKKARKGKLYICPLCGLVIDADINAARNHELELPAIPRTDELSRLARKEGFFWLPTGIFRIDGSELRVPDSIKGH

SEQ ID NO: 20251 - protein, 386 aa, unknown
  TnpB Polypeptide
MFQRAYTVRLYPNKQQEVLLSKTFGCCRKVYNCMLEARKKSYEATGTSCRSKPSDFYAEFPFLKEVDSNALTAEVLTLNAAFKNFFERNADGVGFPQFKAKHRDRDSYTSYTTKDNIRVEGRKLRLPKVGFVSFRNYEDLDWSSRNIRHVTVNRSRAGRYYASIMVEEAVPKALPITEAEVGIDLGLTEFCATSDGKVVANPRFLKEAEGRIAALQRAFARKQKGSKRREALRVRIAREHEKVANRRKDFLDKLSTRLLRENQTVVVEDLDVREVAEGDHAKSEHDTAWRIFLNMLQYKADWYGRTIVRVGRWFPSSQLCSVCNYRNPSVKDLTVRSWTCPLCGTPHERDVNAAVNILAEGKRLIAAGTAVQGAGAPRGEREAAAL

SEQ ID NO: 20252 - protein, 280 aa, unknown
  TnpB Polypeptide
MTDGETPGYPRFKGKGWYDSFTYPQLGFKLSFGKLRLSKIGDIKIKLHRPIEGKIKRLTVRRSSTGKWFACFSVEIDDHPKPPWKDGLMVGIDVGLESFATLSNGEKIDNPRFFRSEEKALAKANRRLSKYEKGTFERRKALKVVQRTHERIANRRYDFAHQVSHNLVERFGLIAFEDLSITNMLKNHCLAKSISDAAWRMLVTTTSYKAESAGSIVVLVDPRNTSQLCSRCGLKVPKSLSDRVHGCPQCGLVMDRDENAAINILRLGLQSLPTARSPAL

SEQ ID NO: 20253 - protein, 497 aa, unknown
  TnpB Polypeptide
LGDRRVPRSVRRYARLFDRSTDRAQEPRSVALVLRTQRKGRSQRQARLLGQPRRGRELRTYIRNTSYSVEWGEHSRLEILVGQDLKEEYGLGYQERLRLEVQGDPNWKEYDKQGRLELYYDDVSETFRAFQPVIIDNSRLAHPLADETAALDIGANNIVACTVSTGDQYLYEGRDLFKRFRETTQRIAELQSKLREGRYSSKQIDSLYRRRTRRRNHAMDAIARDVIERLYDEGVSTVYVGDLTDVLETHWSVRTNTKLHNFWAFRRFIGRITDTAEEFGITVEVRTEAWTSQTCPNCGSTENTTRHQDALTCTCGFRRSRGSRRERDVPETARNGSTADGTACVPQVGQPRMAGVTTLSPSQRGAHEPASCLRGLGIAETPSARKPRRSRRGGCHSCFVSPLEKSVRARLLRSGPKRRCDRRRHDRLRGVPRRRQRTPRARDDVYHGRTRRRAAGPRRRGHHRDRSRRRFRQRDDDRRRFRRPEAGGRPGAGRGSR

SEQ ID NO: 20254 - protein, 282 aa, unknown
  TnpB Polypeptide
MNENTLHGDEQAANHLQARINRDGSIDLHLMTVKAKARKRSSGMVIGMDWGLKSLFATSQGQLHGLKLYTWLQQRDKELTALTRALAKSGIRYRQSRRYRNLNKRIRDYTRNEVNRILNLLSRQEIREIVVEELDFRNGGLSKKMNRIISRAGRNAVKAKLKDLEDNKGITVTKVNPAYTSQECPSCGYVNPRNRPTQEHFRCTCCGYRSQADINASHNILARRSREDGWRRIGRRQILAMLLREHDERFHPTGGHAAKSAATPRVVSTTPRVKATSGRKYH

SEQ ID NO: 20255 - protein, 462 aa, unknown
  TnpB Polypeptide
LRVPSGNVSRSGGRRYVRLRAEFSFLCPFDSSGVQQEFFLGALIISPSRQLQVSIPLCYYGYANMMRRISKAYKTELDLTHAQRNACRRHAGAARWAWNWALARKKSAYETEGRVLSVFDLQKELTTVKKTTAPWLYEVSCDAPLQAIWDLGDAFRNFFANRSRYPRFKSRKRDRKAFRLHGGIKVMESAIKLPKLGILRLKERAYLPADAHVLNATLSERAGRWYVSACVEEEKLVPANNGPLAGVDLGLSTLATVSDGMTIANPRALARYERKLNRQQREISRKNKDSKNRMKAVKRMRRTYARIVDLRNDAIHKATRMLTRTKSVIVVENLDVKGLMQNKRLAKAIGDAGMREFIRQLQYKAGWYGCEILVAPRFFPSSKTCSRCGYVKAELSVSERKFVCENCGFEIDRDLNAAVNLEIVAPSLRETLNACQRREVADRPRRASQCPPMKQETFQSAS

SEQ ID NO: 20256 - protein, 380 aa, Microcystis sp.
MPREKTKSINILSINIVQFAAIQFKFVDTLNSTARQASAERAWSAIARFYDNCKKKIKGKKGYPKFQKNNRSVEYKNSGWKLSEDRKKITFTDKKNIGTVKLKGTRDLNFYPIDQIKRVRIVKRADGYYVQFCLSVDIREYAKPLEPTKRCVGLDVGLKVFYANSDGETVEIPQYYRKAEKRLNRLNRKKSKKFRKGQPQSNNYKKARKRYARKHLRVSRQRKGFAQKEALRVIKSNDFIAYENLNIQGMVKNSRLAKSINDAAWSTFRQWLEYFGFKYGKATVAAAPHNTSQNCSNCGQKVPKSISTRTHACPHCGYVEDRDINAAINILKKGLSTVGHTETNTRRREIPSGECWIRPARLRKLSEPRIPRLSAMGVSN

SEQ ID NO: 20257 - protein, 468 aa, Geobacteraceae sp.
MESKYYRTFRKHSLSHTGEPIPSDQQYSRYKDKELTPFLFDVPSQVLRNGAYRYMQGLTRYHKGLGGLPSRKLKHGKQTVMLTNELFRFEPIPNKPGVEKLFLGTNKFPVGELKFKAHRPYETPNTITISRHNGEWHVSFNFAAAPIEGAVETEPLTEKELIDCYSSLSREELEGMTIGGDRGVIIPLATSDGTAHDFTDREKAVLVAKEQGRIKYQKRMARQDKQAKLLKRQNWSKRRIKTTDKINKTYTKQRNIRQDRAHKISHALVNTASKVFVFEDLKVKSMTKRAKPKQDENGKYIKNGAAAKSGLNKAILQSMWGNITMFTKYKALALGKFVIKIPAPGTSQECSACGHTHPDNRGSQALFVCTGCGATANADFNAARVIKKRGIESLLSGWIAVKQKKTVKFTKTRAGTPEVMRVDMDCSTISGVVAADAMAQEAIVSRLAGLCLPDAGACESRSSHPKLR

SEQ ID NO: 20258 - protein, 422 aa, unknown
  TnpB Polypeptide
VLRTVLKQKKDPGLYEYLDHHMHLSNNLYNATLFRIRQNFTSRKKEHPTENELEVQREIEETLELCPHLKRPKSVLGYKFLERMMRVMDNPDFFAGLPSQTAEECQKAAVHDFRSWLASLREYKKHPEKYLGKPRMPHYKKQDLVTVIITNQDAVLYPEQNGVSLKLPITKERLYFSNISEDAFLKDVKIKPYHGRFLLCLTFEEPEPVIETSMPNTCAIDFGTDNFAAIVCDDGSSAIYKGGAVLSDTQWFHKQKAKYVSILTRGHKNRYIPSKRLSDLSYRHANFVKDQCHKISRSIIDFCVEHQAGTLILGVNPLWKQNSRIGRVNNQKFVSMPIAFLRTMITYKALNAGIKIVEQEESYTSKADITAKDYIPTYGVDDEKCEVFPGVRIKTRVVSLYRWNDPECGLSCSRQHHEKDSS

SEQ ID NO: 20259 - protein, 389 aa, Microbispora sp.
MVVCSIVKLVVQVRLLPTPEQAAALEATLHAVNQAANLVSQTAFAAGVTREYALRKITYGELKAAGLGAQTAQRVIKKVVDAYTTLRANIRAGNLGPQGSPRRKRAQSKPIAFRPSAAQPFDDRCLSWQLDARTVSIWTTAGRLRGVAFTGSADRIKTLTAYRKGESDLVTRDGMWFLIATCEVPDPPVATPDGFVGVDLGIANIATTSDGKRHSGRGLNAVRHRQRELRARLQAKGTKSAKRLLKKRRRKEARFAANTNHVIAKQIVTEAERTGRGIALEDLGGIRDRVRLRKPQRVTLHSWSFHQLGSFIAYKAARAGVAVVHVDPAYTSQACSSCGHVDKRNRPGQETFACTSCGFAEHADVNAARNIAARGVAGWAVSHAADDAA

SEQ ID NO: 20260 - protein, 486 aa, Crocosphaera sp.
MGKSKAKPKTKKKKDERPRAIESRKGTLEYDSMIRTDVWNLNVTSSQKKLLLLTVAEYRKFLKPLVFIVNAEWRTIGNLTDKEKVNYLEKSIHVTNKNPKAKYLYYQKVINKYPSFRKFPSYLRRAAIADAIGIVSSFQTRYREWQSGIRKYRKVRPPRLTAMCQSYPALYKGQQVKYNNDYQNVDLKVWNGSDWVWLEKVPVKGHGLNRHKVIGNQMKSPALVVNAKTCQLSMPVKVKPIKKEDSDYVCSVDLGINNAATCSIVGRDGTVKARKFINPARDIDRRNKRKMMIAKKSKQTHQKTGKKFVKGFCQGIYRKSSNINLEISRKVARQIIEFAKLHNVKVIVMENLAGWKAKGGKKGTLMRQKFHLWCHQKIVEILNNRWAELGGDVQTINPKYTSAYAFDGSGKVKRNKKNYSLCTFSSGKQYNADLCASYNIGARYWYSVLIGDKYFSRVFVSESPTNTLRTPITLGTLRGLKSSGCK

SEQ ID NO: 20261 - protein, 295 aa, Streptomyces sp.
LKSRKKSRKSAEYTTSAFRFQGGKLTLAKMTEPLAIVWSRPLPEGVAPSTVTVSQDAAGRWFVSVLCEDPGVKPLPTTDAAVGVDAGLDHLLTLSTGEKITNPRHERRDRARLARAQRELARKAKGEGANRAKARRKVARVHARIADRRRDTLHKITTRLVRDNQTIVIEDLTVRNLLKNGRLARAISDAVWSEFRSMLEYKARWYGREVIAVDRWFPSSKLCSHCGTPQNMMPLSVRAWTCGSCGVSHDRDVNAARNILAAGLAVSACGAGVRPQRSTPGGQSATKQEPLRREP

SEQ ID NO: 20262 - protein, 537 aa, Streptomyces sp.
LAPSVVTGKSGVIDGIHTREVGWMIRAYKFLMRPTVRQEQAVGEMLRDHCSLYNGALQERRDAYRHPSKTNIKYGMQPAQLKEIRAFDPERQGRWSLSSQQATLRRLDKAFAAFFRRVKSGETPGYPRFRGINWFDTVDFPKDGDGCRRDSTPHGPVTRVRFQGVGHVKVHQHRAVVGTVKTVSVKREGRKWFVVLTAEQAQPELLAPTGSAVGIDLGIANFLADSGGSFVANPRHGRKAAEQLEAAQQALSRYPRRKAHDRTANHQRAVEKVAKLHGKVRRQRLDHAHKTALNLVREHDLFDPADGAVRVRCAVRGFHVFHVARFRCRERVPVRRGEPRAPSPVVGSLPAPSCPSPTPSCAGAGRPRRARPTTTGGRRRTGRPGRLGGPVPRSAAAAGGRARPWWPGARRRSRTAVGRRRGGPAPTRYRHRPRPPAGRCRRRRRPAPPRQPRSGRRTRRRGRRTAGRPPKGSASRPPTGRPRRPARSTAVTVRQWAAAARACPPRRRPARHAGPGRSWSRLRSSYHHGTPVQCTMQ

SEQ ID NO: 20263 - protein, 368 aa, Streptomyces sp.
VSQDALVKRQFGHRARLALSPAGVLKTDDQAHAARTMWNLPHAWWQMMPKEKRTLANADAAIRQAREDIGFLAVLPAQAAQAVLKMYFQAWKNCWDGRAGAPNFKGRFRTVMSVDIPQGRDLNIVRVHRRWGMANIPKVGRVRFRWTKGLPVGKHANADNRITGARLIKDALGWHIAFRVQTLQGKPEPHQGPDIGIDVGVSVPIALSNGERYEHGEWLTGKEKDKLLHLEQRAAQRKQYRKPGEPAGRRLHHTYGQIRLNRSISGEAWGRTVTMLAYRTARHGGTLVEVPAAGTSRRCSACGHTTPGSRESQAVFVCKNPDCGWSGNADYNAARNVLHLYRMGRALIPAAGRAVVRRAKRVKPAAAR

SEQ ID NO: 20264 - protein, 247 aa, Streptomyces sp.
VTVVRDSAGRYFASFVVETGPEAALPEASHEVGIDLGLTHFVVLSNGTKVDPPRFLRRAEKRLKKAQRALSRKEKGSRNRDRARRKVARVHARVADARREFHHQLSTRLIRENQAVAVENLAVQGLARTRLAKSVRDAGWSAFVAMLEYKAARCGRTFVRIGRFEPTSQVCSRCGAKDGPKPLHIRTWTCRGCGAVLDRDINAAVNVAKAAGLAVTARGAQVRPGFPIPAQRGEAGTHPKPEPTPVR

SEQ ID NO: 20265 - protein, 361 aa, Haloarcula sp.
VEYGAMGEVTKTLELKLVDPNLHKRQKLRETRDAYQQALQATFAAGCDTQSAANDVVVEYDLSGYAKNALKKYVPQLHDSYDADELHDDHPVRFTNEGLQLDYQPQNAIEWYAKIPHHEDYHLWIPAQPNPEQREWLEAVYADDAEMGESRLFERNGTWYLHVTATRDVEDQSAASADERTPIGVDIGEASLVTVCHRDEHGSPTRPELWADDGKTVRRLRKTYFTATRRLQKRGSERIAASYGDALWDQIDDVFHRVAREVVAYAESVENPVLVLEDLTYIRENMDYGEYMNRRLHGWGFAKLHAQIRYKAAEKGIPVETVNPRNTSKACHACGDTDTGHDKRRSDARTMTVGSVSTKPT

SEQ ID NO: 20266 - protein, 418 aa, unknown
  TnpB Polypeptide
MEVRRTAVVKLRVPDEQRDVLHRTAEQYLYCANRTSAFCWDDTSYNKCKTHKRKVRDALYADLREETELPAQLVQAAIKRGVEAIKGVVERWKKGRRVSQPTFTAETMNYDLRSGTFYRKKASFATVNGRVELPFVLPSDSPTPYEEYVLSEEYEFRESTLRYDATTDDYYFHVSVRRHDSDNEEDINTDDPTDTDHQQTVLGIDLGVNSLAVASTGTFWQGDDYDHWCREFERRRGKMQQRGTQASHNALLWLGRREEAWRKQYIHTVANDIVSEAVENDCDVIAFEELDGIRDRLPWAKWHHIWAFRRLVEYVEYKAPERGVSVKTVEPQYTSQRCSKCGFTHETNRDGTQFACRSCDYEVNADYNAAKNVGLRYARQQTHRLRSGQKSLSGDAPVDVRLNRGTMTDDGPRPLAGD

SEQ ID NO: 20267 - protein, 359 aa, unknown
  TnpB Polypeptide
MPRAPRKQIEDGKTVQYTTLKVRLYPDEAQAELFENTFGCCRWIWNHMLADQQRFYLETDQHFIPTPAKYKSEAPFLKEVDNQALIQEHNKLSQAFRVFFKDPKTFGAPKFKKKKTDKDSFTACNHVFESGPTIYIIRDGIRMTKAGTVKAKFSRRPRNGWKLKRVTVEKTKTGKYFAYILYEYIVKEPEAVTPTPDTTVGLKYSMGHFYVADSGELADPPHWLKASQERLAKLQKRLSRMEPGSKNYAEAVQKYRLLHEHIANQRRDFIHKESSRISDGELEELVKRLKGWGLDAIEGYYPKHSPEQQAFYLHLAEKYQLHQTGGSDFHGEKVKPDVELAALELELGWLHSGSKDHKE

SEQ ID NO: 20268 - protein, 376 aa, unknown
  TnpB Polypeptide
MRKTFQYRIFPTHKQATILDQTLGNCRWLYNHFLEQRKNTWKLEKKSLSRYDQSNTLKHLKEENPFLSNVYSQVQQNVCTRIDLAFRSFYRRVKSDAKPGYPRFRGAERYDSFTYPQAGFKLYENVIHLSKIGDIKIKLHRPIEGIVKTCTIKRMPTGKWFVNLSCNVEHTPIPRPIEPAIGIDMGLKQFAVLSNGEQYPNPRFFKQEERVLAKAQNRLSKQTKNTPKRHKAKKVVTRIHERIKNKRHNFAHQLARQLVNKFNTIIIEDLSINNMQNNNFKCINKSIGDAAWRMFLDCLRYKAECAGSLCIKVNPAYTSQTCSNCGNRKKLELSDRVYHCLSCGLQLDRDLNASLNILALGMQSIKKDRSLFYKSH

SEQ ID NO: 20269 - protein, 372 aa, unknown
  TnpB Polypeptide
MHLTHKFRLYPTKEQEERLLWTLDKCRFVYNKMLEGLNNQDKPNRLELQSSIPKLKEEQPELKEVYAKVLQYESYRLFSNLRASAKLKKNGKKVGKLRFKSKGWFKTFVYNQSGFKIIKTGKRLDLLHLSKIGNIPIRIHREINGKIKQIIIKRYNSGKWFACIQFESNIEKENKPIEKKVGIDMGIKHFLTDSDGLQIENPKFLDKSHKRLRIEQKKLSRKKEGSKKREKQRIKVAKIYERLVNQRNDFLHKLSRYYADNYDFIVIEDLNIKNMVRSHLAKYINDASWNRFIQMLSYKAERAGGMVVKVNPRGTSKEHKFGKLDRDYNASLNILIRGLEKVGMGQTEVTPIETEPLLVRASSVVEMGSSLR

SEQ ID NO: 20270 - protein, 370 aa, unknown
  TnpB Polypeptide
VVVHRKDNQFKMELRNKYLKNWAYAAHWVDSALKTGFSIMDSWRKNYIKGSRKRTCPKAKRLFIRVKQTLCKLEGDKLRVTISPRKFVYFDLSKRYFKLPKRISSSGIGEPIITLDKIYLPIHEHDKNNTRYIAEKMAWDANMFSLDGYSPQTGWVRIDTKPLATVHISSFEKRRNLQRKAAKTKKAKIVLSKYSKREKNRARKHQIEIARAINSLSKENGIESLKKSNMYRKCKLWNRQISRTDWRAIKMRIKNCIELPPQYTSKKCSRCGYINKDLNRSKVFRCANCGLTIDRQLNAAINLYLKMEGVPYRINWWDSNILPTLMGGYFLTGVEQKTPNELVRGLHEAVKPKLYFAYDRYADSYLSTPI

SEQ ID NO: 20271 - protein, 387 aa, unknown
  TnpB Polypeptide
MKVTKTIKAAVVHLTKTKEGLLNREYDALQAYLHGSNEVELYSANKQQAKRFYKKIKPDKEYPLSIRKDLLRIEKRDTKIAKYWARVPVKGKKGGVWIAIKPHCDFPDKYEICESKLIRDNGRFFLNITIQKDIEVKYPSEFSKIAVIACDLGETNPITSVELREGRIFNPKFSGADIRKIRAHYNHIRKGIGKKKVKHALRIIKKIGHKEKRKVRDILHKETTKIVNRAKELREEGYEPIIVIGKLKGLRRPHKKYVARCRKNNRKVHSMPSYMITEMLKYKANWEGIPAVQVNEAWSSQKCHVCQEIGRRNKRLFVCLNPMCEIKEYNADLNGAINIGNRFLDHWLRNRALVDMPLSSRVSRISDEENALEKQSTMEEPTELVQW

SEQ ID NO: 20272 - protein, 565 aa, Clostridium sp.
VANILRIETNSSTRIYKDKLSFENLNNLSNILYIGNEAKIKTYSILVYNHEKGLSQSIHLTIKNMFNLNTYYTNYAVCEAKWNKSSNVELNKMYIDDLKQNINHREKSAKDLTNKIKFWSKIHTHIIDISKAIKNSKSLPKFKYYRPYYFYMSDDKIFVEANYKNKTIIYNMYDFEHALVVKKISRLTNKLNMIKRGIGYQKQKLARLNTSAVKSCFGTKKLFKAQHTLYNEHFEWKEDFYKARHKTIELQGLKTVTQGNACVKYNYETNLLKIQLPYENKIGAYHSSQWFEVENVDFPYHKDLLIEALNTKNSPVSLRIEDKGDYFLFKPSYKLFKDESQINCSKANGIVGYDINYDHIAWSETDCIGNLLDFGTIHFNIANKTSGQISKILEKGALGLVQIARDKNKPLAGEDIKNISKSKLTYGNTKRNIKISMFAHKKIIEAISSRAFKENLAVFYVNPAYTSQMGKIKYMKAKGISIHVSAAYCIARRALGYKEKIPLIYRTFTTNWRVLSKELKTLKIHYLYKISSTFGYTDLKAFVKDTIVSNYTVFKEKPIIKFSFN

SEQ ID NO: 20273 - protein, 390 aa, unknown
  TnpB Polypeptide
VIKHKAYKFRIYPNQEQQIYFAKAFGSVRFLYNKMLAERKELYELYKEDKEQLKAHKPKTYTEYKKENIWLYEVDSLALANAQINLQTAYSNFFRGKGKIGFPTFKSKRKDKDSYTTNSQGGNIRIENKHILLPKIKAVRIVQHREIPDNQTIKSVTVSRTPTNKYFTTILTEWNDEEKLMVLDTNRAIGLDFSMPHFFVDSQNNKGEYPKFYRQAQDKLAKEQRKLSHCKKGSNNYHKQKLRVALLNEKISNQRKDWLNKLSCQIAKDNDIICLEDLNMKGMSQTLNFGKSVGDNGWGLFVNMLSYKAKRVIKVDKWYPSSKTCNHCGTKNVSLTLKERTWTCPICGALIDRDYNASQNILAEGLRLLKENINKETVGTTGLAYLCLAQ

SEQ ID NO: 20274 - protein, 414 aa, unknown
  TnpB Polypeptide
VTIRARMYPTPGHRVGCLRHCGDARFVWNLACEQQSWWRLGRRSAPNFYEQHKQLTEARAAFPWLAEGSVHVQVQALRDFSHAMAAFLDKKNPRGKPQFRSKRGTQGFVLTTTKARRVNRRWGEVWVPKVGWVRFRWTRPLPEKLSTARVTLNQRGQWHVSFLSPQPAVARECSQKAVGVDRGVRTALVTSDGQHYRAPRISGRQAARYLALQRRIARQRKRSRKRERTRWAMAIIAARVADRRKDWAEKISTRLVVANDLIVLERLNIQGMTKKPAPKPDPALAGNFLPNRASAKAGLSRGILTAAWGALGQRLEQKGAASGVTVALVDPKFTSQQCRACGHTAAGNRESQAVFRCQSCGHTDHADRNAALNILARGLLLTTGELVPAHARGHRALRPHQPAQAAAGTTREAA

SEQ ID NO: 20275 - protein, 416 aa, Clostridia sp.
  misc_feature (28)..(28): Xaa can be any naturally occurring amino acid
  misc_feature (37)..(37): Xaa can be any naturally occurring amino acid
  misc_feature (172)..(172): Xaa can be any naturally occurring amino acid
  misc_feature (175)..(175): Xaa can be any naturally occurring amino acid
  misc_feature (178)..(178): Xaa can be any naturally occurring amino acid
MYLTVKQQVKHLSKEEYCILRELCHTAXNLANEAIYXVRQYYFTEGEYLKYEKNYALLKDSPNYKMLNSNMAQQILKEVDGSFKSFFGLLKLAKKGKYAFMDCKLPHYLPKDGFTTLVIGFVRLNGNKLILPYSNTFRKTHKPVEIRIPPILADKKIKEIRIIPKSKARFFXIQXIYXAECVQRNLNKNNALGLDLGVNNLVTAVSDEGRSFIIDGKRLKSINQWFNKENARLQSIKDKQGFDKRTTNRQKMLADRRNRQVNDYMSKTAKMIINYCIGHDIGALVVGYNETFQRNTDIGRQNNQDFVNIPFGKLRSKLEYLCELNGIVFVKQEESYTSKASFWDKDTIPAYNADNPQSYSFSGKRVKRGLYRTANGKFLNADINGALNILRKSSVVDLTVLYGSGEVDTPVRIRVA

SEQ ID NO: 20276 - protein, 223 aa, Pelotomaculum sp.
MLPVKSGSFQAEILDRLVSGVYKFCTAELSFSYRLNCYILNISYKYDVPEQATSAFMGIDLGITNLAVLAVPGQIIKFFSGKRYNQKRDHYAELRRKLGKKKLLKKIKAIGNKEHRYTKDVNHKISRQIVNIAIQYNAVIQLEDLSNIRGRVQFSRKINRKLHNWNFDQLRSFIEYKALAEGLKVVRVSPKYTSQGCHMCGVILKKVIGQIRPLSSVKPVATR

SEQ ID NO: 20277 - protein, 520 aa, unknown
  TnpB Polypeptide
MKRAKTPTFLLELPLHVDWSQERPVRAHLEAARCLYNALLGEASTRLRRMRNDPAWASARALPRANKQERAQAFSHLRKKYHFSEYALHEYAKGARCSWIADHIDSTMAQTLATRAYQAVNRVCVGKARRVRFRSCGRGIDSVEGKRNDVGLRFVLDPNAGDGGFLLWNEQVIPALIDWRDPVVQHGLRHPIKYVRLVRRRASSAQAQGADGDGNRYYVQLALEGHAFVKPKHEVSKSETIGLDVGPSTLAIVPREGKADLITFCEELRPNARTKRQLQRKMERQRRANNPENYDEQGRVKKHSKTRLRWKESKRYQATRRQHANTERRLAAHRKSLHGRLAHAIVAVGNTIHIEKTSFKGWQKQYGRSIGLRAPGMFVAHLARIVAKTGGSLVEVSTSKTKLSQYCHHCGQYVKKPRSQRWHACSCGLGPVQRDLYSAFLLAYQPSITRHVWEGAEPRLRAVMEGLQQRANEGQHLPRSMGVVARRKRGAARAGARRLQSPAYLHQEPVSPSGEAGNGG

SEQ ID NO: 20278 - protein, 428 aa, Streptomyces sp.
MSRFRLYPTPVQAQQMLLHCAHARYVWNLAVEQHTHWRPGRRSAPGFAEQCRQLTEARRENEWLGAGNADVQQQALKDFAAARNARFTSGFGEPTWRRKHVHEGFRVIGSDRVPEFEPDGSPKLNAKGKQVMGRSVVVQRLNRRWAQVKVPGCGWVRFRLSRAELPAAKTFRVTFRNGQWHIAFAVVPEPIDAPATGEVIGIDRGVTITAALSDGRKLNCPQLTVKERARIRKHERRAARAPRGSEAKVAEHAKVARLKAREANRRKDWCEQTSTMLARSYGLVRFEKLNIKNMTRSAKGTVEQPGTNVRQKAGLNRGILAQGWGLLRQRTEQKAPGRVEDVAAPFTSLRCSACGWIEKKSRKSQADFVCVSCGFTCNADENASINVAAGQGGIPRPRQTAGAGGVTAAASCSSAREPQPAWIGIPLF

SEQ ID NO: 20279 - protein, 352 aa, unknown
  TnpB Polypeptide
MFAKTFGCARFIYNKMLGDRLDYYKETGERLNNTPAQYKKEFPWLKEVDSLALANAQINLNKAYNNFWSNRKHFGKPCFKSKKTGHASYSTNNQHGSVRIEGNKVKLPKIGWVKLCLHRPLMENSTIKTVTISKTSSGKYYISILVEYENQILPIIPKNFLGLDFAMHGLYVASDEDNADYPNFLREAEKRLAKAQRKLSKRQKRSRNRDKQRLRVAVLHEKIANQRRDFLHKKARYLADRYDAIGIEDISVKAMAKRKKGGKFSFGKSISDNGWSMFTSMLEYKLAWQGKQLIKIDKWYPSSQLCHVCGYQNNDTKDLSVREWDCPKCGSHHNRDKNAAINIREEARRISA

SEQ ID NO: 20280 - protein, 400 aa, unknown
  TnpB Polypeptide
MVKIMQLVQQVQLKRSRLLDNITFLSKNLYNLATYEVRQRFFKDRHWIRYIELWNTLKSHGAYQELQKTCGSHPPQQVLKQVDKNFKSFFNAMKQWKREPSKFRGMPKLPHYKHKNGRNLLYFTSLQCRLRDGVILLTQKMEKLGFPKINTYLKNVKGVRIVPFGDRYNIELIYDYNPRDLHLNEKNVMGIDLGLTNIVTSSDNIGNNPLIIKGGVVKSINQFYNKQLAKYKSSSKKCNNTDATSRILRLHRKRNNKIRDFFHKASRTIINNCISNDIGTIIIGYNEGWKQKIKIGKKNNQNFVSIPFQKLVHQIEYKSEMVGIKVVRITEEYTSQVCSSCGVVRKSNRKYRGLYVCKECEMVLNADVNASRNIMCKGVPESLRIGDRGCLNHPVVLKVY

SEQ ID NO: 20281 - protein, 374 aa, unknown
  TnpB Polypeptide
MNKAYNFRLYPTKEQEVLFAKTFGCVRFVYNKMLEERIEIYERFKDDVAELKKHKTPTPAKYKAEFVWLKEVDSLALANAQMNLQTAYNNFFRDKSVGFPKFKAKHRDKNSYTTNNVNNNVRIEDSKLKLPKLGLIKMKQHREITSHQMIKSCTISKSPTGKYFVSILVEFFQQVPPISPKKENVVGLDFDMKNLYTDSQCIRADYPRFYRRALEKLAREQRKLSHCVKGSNNRRKQKLKVAKVHEEVANRRKDFLHKKSRELVNSYDAVIIEDLNMKAMGQCLNFGKSVSDNAWGMFTTFLKYKLENEGKLLVRVDQWFPSSKTCHYCGDLNKDLQLSDREWTCQSCGCIIDRDYNASKNIRDEGLRLLGLIA

SEQ ID NO: 20282 - protein, 577 aa, unknown
  TnpB Polypeptide
MRHTTFRFALAPTPAQVMMLNRHAGASRFAYNQCLRLVDDALAAKRAEPQVKVPWSGFDLINAFNAWKRSEAAGRVFVAAPDGTITRHVTGLRWRQVVSAQVFEEAAVDLGRALSSYSDNNSETQRVRVGFPRWKRKGRCRDSFRLRNKHGNGRGCSIRIGEGRPRSVTLPTIGVVRVHDDTRRLRRLLRPVAQLDTGTGQSKMAPRAKILFATVSRHGSRWYVSLNMQAPDLHANRRHLPRPAGDDGFVGLDRGLIAFAVAATADGTEVGRFRAPMPLHRGMVRLRRLSHHISATRPGSRNRAKAVRRLSRQHAHIANIRRHFLHEVSSQLVQTHDRLCLEDLAVANLITNRRLTRSIGDVAWAEFARQLTYKAAWFGTELIVCDRWFASTKIGSVCGNVARQMGSAERSFCCAGCGLVIDRDRNAAANLAAWAERSHAQAPDRQAGGRVINAPGGEGAGHRPGDGGTSPSEGEPTPTSSWRELGHPRRVLPDHLTRGRPTGFSAGPRPRSGRWPWRPRAAPGAGRRPASRGGPARPGDRPRPGRPRTPARRGPGGPCGWPAPGRSWSGPRRPWPS

SEQ ID NO: 20283 - protein, 378 aa, unknown
  TnpB Polypeptide
MIRSLKVRLYLTDEQEILARKHIGCARFIWNYMLAEQIKRRENGEKYLSRFDMIKLLTPLKKQEEYKFLNEISNTTLQIICSDLNQAYQNFFKKIAKFPIFKSKRKSKASYPICSDRFYFTEDYIQIQKLGHVKYKSSKPIPLGRGVAKFTNPRISFENGKWILSFGMECENQTVHTEYKGKIGIDLGIKELAVVSVDGEQMNFHNINKSKRVRTLKHKLKHLQRKVSRKYRTNGNYEKTKAILGTEAQIKEINYHLANIRLNYIHQTTHKLTELCPEVITMEDLNVNGMMKNRHLARAIAEQNFYEFRRQMEYKCETKGIKIQFADRFYPSSKTCSCCGHIKKGLKLKDRTYICSECGLVIGRDFNAALNLERYVVH

SEQ ID NO: 20284 - protein, 322 aa, unknown
  TnpB Polypeptide
VDAAIGTVTIPKVRAVRARLSRPLQGVVKSATIRQDTCGDWFVSLRLEAPTLVDAPVPPDQARANPVGIDLGLTTYATLSNGEQIANPRHLRSRQRALRQAQRTLAKKQPKSKNHEKARQRVAKLLRKVARQRADSRHKLTTGLIRRFDLLCVENLSIAGLARTKLARSMHDAACGELLRQVRYKAAWYGKHVVAVDRFFPSSKTCGACNHVYAGLTRKERVWTCAACGVTHDRDANASRTLLVEGTRLFVLRHAGDRQDDVSAGTALAGRGTASGSGSGRSTTTPTPPSRRDRPRREAPVDGASDTAPGARCRAKQESHTL

SEQ ID NO: 20285 - protein, 166 aa, Clostridioides sp.
LVISQNKSGNIYVYSLTKNLFFNRNKARLKVARLQEHIASQRNDFLQKLSTKLIKENDIICIEDLQVKNMIRNRKLSRLISDVSWSEFIRQLEYKANWHDRQIVKVGKFFASSQICNKCGYKNEEVKNLNIREWICPSCNETHDRDINASINILKEGLRLITIQNR

SEQ ID NO: 20286 - protein, 365 aa, unknown
  TnpB Polypeptide
MIIYEFRLYGTQKQYQAVDECIKVSQFMRNKALRKWMDSKDSEQKVSCYSLNGISKILAKEFDFVKPLNSTARQAAIERAWNAIKRFYDKKSRYPKFQHDNRSVEFKKSGWKLSDDYKKLTITSCNVGTLKMKGTRNLQSFSTDKIKRVRLLRRADGYYVQFCINTKRKIKHIFTGKAVGIDVGLNSFLTDSDGEPVDNPRFLRKSEKRLKRFQRRFSKKEEGSENKKKARGKLSRLHLKVSRQRKDFAINTARQVITNSDFVGIEDLKVSNMVKNRKLAKSISDASWRAFRTWLEYFGEISGVRVVAVPPAYTSQMCSSCGAIVKKGLECRVHECSCGCVLDRDENAAKNILAKAYEAVGHTDS

SEQ ID NO: 20287 - protein, 513 aa, Kibdelosporangium sp.
LRRIAVPFTVAAPAGARIRDRLRVSVDDEKVLSLMGRELGRHARADLADRVRIGDVPQALNQRARRKKALTLVSSSRWAGTITRTSEDQYQLAMRCLRDERTSLRRAIGAISARLSVTCGQRHDRVRGYTNRNERWQKQRRLALLKSRLAKVEFRIEKGHPAIVLGGRQLAKTRHNLDAARLGEDEWRNRWDAARVFLTADGESGAPFGNYTITVTPDGRVSVVLPESLRYLANMPRGRYRLSCEAGFSYRRDEWLDRVGANRAVRYDIKRDPLRGRWYIDASWSSEKTVLPTPVELADSGARLLGVDLNADHLAACVTDAYGNPAGQPHTIRLDLTGSATTRDGQLRQAISKVIHLARQHRCAGFAIENLGFADARAVGRETLGRGQRGRRFRRTVHGIPSARFRERLRGMAFHADLLVIAVDPAYTSQWGAQYWRRSLQRQTTNGTATRHHAAAVAIARRACGYGLRRRPGVTLIDQRIGKGRATGQAASRLRGRGNVSPPRTPGSLLRGR

SEQ ID NO: 20288 - protein, 452 aa, Kibdelosporangium sp.
VAAYRFALDPTRGQERNLLSHCGAARFAYNWGLSWVRAAWEQRAAEASYGIPEPELTPWRPWSLAALRKVWNRVKGDLAPWWGENSKEAYNTGLAGAAAAFDNYTASRNNSRPGRMMGKPRRKKKHSAALSCRFTTGTIRLESDRKHVTLPRLGVIKTHESTRKLARRVEAGTARVLSATVSHRSGRWFVAFQVELHRDDPAPHRPDLVIGVDLGITHLAVLSEPVAGVSDEDGFIANPRHFDQARKRLRRACRRVSRRRGPDRRARQQPSNRWRKANAHRNRLHHRVANLRADGLHKLTTALAGHAGTVVVENLNVAGMLKNKRLARQISDAGWSTLRRLLDYKTTWRGSVLRVADRWFPSSKTCSACGAVKTKLPLRVRVFRCNACGMVLDRDLNAARNLAKLVAELSESGTGVAGHPRPPGRNRRGADPKTRPSLAGGYETSTPQRHGV

SEQ ID NO: 20289 - protein, 363 aa, unknown
  TnpB Polypeptide
MQQLIREAKLYPNKRQEEKLLVLFEDCRKLYNVVLESKIKAYQEEKKNIQRFELHKMFKDYEVNIPASLKQSVASRVNTAYDRFFRKLGKYPRFKSRNRFRSIELRQYKIDYRIKNNYLSIWRDIGYLRMMGMQPLTNPKGARVVKRASGWYLQVIDEVSETPRESKKEVGIDLGLKYFLADSEGNKVEPPKFFRNTQKKLRVQQRRLKNKTKFSKRWKRQSWQVAKTHEYVANQRKDWLHKISREYADMYGKVYAEDLNVSGLLKNRHLAKSISDASWNMFLNMLGYKLKMLNRELVLVPAHYTSQQCSSCGELAQKSLSIRTHLCPFCGYTADRDINAALNILAAGQATQASTWDNSPSVA

SEQ ID NO: 20290 - protein, 501 aa, unknown
  TnpB Polypeptide
MKCKTPSFVLELPLETTSVQETAILTRLEAGRHLYNACLGEALKRLDLIRQSREFKKIIVLPAGKERTEKFRNLNGEYGFTEYALHDHAGTIRDSWIKEHINSHITQKIATRAFKAVQKKAFGKAKNVRFKGKNQFDTLEGKNNLTGLIFRNNSLYWSGLEIPCVIDETNKVIAYGLKPEHKIKYCRIVRRKINSKNRFYIQLILEGKPYQKPEHKIGNEEIGLDIGPGTIAIVGGIKAELKQFCSELVPKQEEKRKLQRKMDRQRRANNPQNYNTNGTVKKGKKKWKKSNHYNKTSSQAAELDRKLAAHRKSLHGKDINEIIATGTRINTEKIPYISWQKNFGKSVLMRAPSMFISSLKRKAENAGGYLNEFPTNSTKLSQVCHICANAVKKPLSQRWHICCGIEMQRDLYSAFLSKCIDVSTGSLDIARARLLWPGLEPVLSAAVSRVIQSANGGKMVPASFGVGRRLSGSPVKPEATITEAVDAVIRINEDESHREVI

SEQ ID NO: 20291 - protein, 395 aa, Brevibacillus sp.
MKLVYKWIPRWSAQQLALLEDLAFHTTKLYNIANHLCREEGFRSYVRLEKELKSNWHREYLHSHTYQHCLKLVEQNGKSYFAATKDFKKNPQKYRGTPQPPGYKHVARRKNEIIFTNLAIRVQENVLKLSLSKKMQERHQVDCFSIVMDPDNLPIDVSALQQIRLQWRNRIRTWEMVMIYKKAEQELPATFTNLMSIDLGVNNLAAVTFLEGDDSYLINGRPLKSKNSYYNKEIARLTSIAMKQTGKREDFVRTHRIRSLQGKRNRYVQNFLHQASRKIVDLALKHHVQIPYARFVDLITYKAKLLGITVVKQNEAYTSGCSALDEEKISKKAYASKRRIHRGLFVSNSGFKINADVNGSLNILRKYLGGKGSPALIQSARDNGCLKHPKRILVA

SEQ ID NO: 20292 - protein, 174 aa, Thermoflavimicrobium sp.
MAEKSFCIDSEALFISLRARKPLSLKGGSNWNRARIKVARIHKKIVNARHDFLHKLSTKLIHENQVICLEDLQVKNMVKNHKLAKSITDASWSEFVAMLEYKAKWFGRTIVKVGKAFPSSQLCSKCGHRYKEVKNLNLREWTCPECQTHHGRDINASINILQEGIRLIADGLSV

SEQ ID NO: 20293 - protein, 465 aa, unknown
  TnpB Polypeptide
MKTTYQYKFYPDTKQKLELNKWLRISRYWYNRQLGDRFDWWEMNRTYVNSCPLVSSIASVREKPNFYSQKAQLPIIKKDLVKVFHSGELLDFKRVDSTILQGVSDRVDKAFERFIIGDSKGNKSGKPRFKTEADFKTITFATANPEWIKLIRKDWIYLRLPKIGVVKIRMHRELPALCVLKQVSVTRKADGWYIQMILEDTTVPEFNPDELIPTWDNSLGMDAVLHEDVYLATSEGEKLPSLKPLRKNQAKLDKISIKRNARRRGSKARRKLAKNEARQHQRIATSRKDFQYKTAHKLVRTGKKFFFHEDLNLKGLTKRNKAKQADDGTFLPNGQAAKSGLNKSWSDAAFGNFFKTLEYIAAKAGSVVIAKQPAYTSMVLSYRDEIIFTDCSIRDYWDEQESLMVDRDINAAINLKRLGLDIFPSIKRRSGKISVVGTMDDSTTKEILHTLRGCWKPTPYPLGLV

SEQ ID NO: 20294 - protein, 408 aa, Lactobacillus sp.
VKEGEAMTTITLKLRLYPNNNQANLLEATMEQYRLASNLVSNYYFEHDFKPKQSVLQKSLYHLVRDTFGLKAQMAQSTFKTVLARYKTVNTQIKKKPYHFEDINTGQWYREKRDLTWLRKPIQFNRPQCDLVSVRDWSFVKDQLSINTIGTREKMNFAAKGFEKYLDKGKLGTAKLVKTCGHYFLHVACTLDSPKFNKDNLKHVVGIDRGLRFLSTAYDEKGTTSFVSGKNIIAKRRKYKQLRQQLQSKGTKSAKRRLKKIGQRENRWMSDINHQVTKTLVDKYGSGTVFTIEDLTNVRFATEKVSKYHRYEQVSWAFYQFEQFLTYKAELKGSTVVKVDAHYTSQRCPKCGIVDKQARNHAKHEYHCEHCGYTSNDDRIGAINIQLLGTNWVTDKPITFQQVISNQE

SEQ ID NO: 20295 - protein, 318 aa, Thaumarchaeota sp.
VVRLDKSFQRFFTGLTRFPKFRRQGKYNSFTYPQLGGFSISGDRLKLSMIGNVKIRLHRPVDGSMKTCTVIRDIDQWYACITSETEEDTAATTIPASSINSEKKPAVVGVDVGVSCLAALSDGTILSNPRSLNRSVDKIKWLQRELSRKKKGSSNREKARLRLEKAWRQVRRQRDDTAHKASRKLADNYGTIIFEDLMIKNMVKNHRLASAILDATWSKLRRLTAYKAERRGGRVILVEPRGTSQECSGCHKIVEKSLSVRTHVCPHCGLMLDRDVNAAKNILARGLEQTHAETEPIPIIRIGKFSQRSKKPKAFRQE

SEQ ID NO: 20296 - protein, 402 aa, Escherichia sp.
VKRLQAFKFQLRPGGQQEREMRRFAGACRFVFNRALALQNENHEAGNKYIPYGKMASWLVEWKNATETQWLKNAPSQPLQQSLKDLERAYKNFFQKRAAFPRFKKRGQNDSFRYPQGVKLDQENSRIFLPKLGWMRYRNSRQVTGVVKKVTVSQSCGKWHISIQTESEVSTPVHPSASMVGLDAGVAKLATLSDGTVFEPVNSFQKKQKTLARLQRQLSRKVKFSNNWQKQKRKIQRLHSRIANIRRDYLHKVTTTVSKNHAMIVIEDLKVSNMSKSAAGTVSQPGRNVRAKSGLNRSILDQGWYEMRRQLEYKQLWRGGQVLAVPPAYTSQRCACCGHTAKENRLSQSKFRCQVCGYTANADVNGARNILAAGHAVLACGEMVQSGRPLKQEPTEMIQATA

SEQ ID NO: 20297 - protein, 398 aa, unknown
  TnpB Polypeptide
MLIAKKIRLEVSEQDAATLEWMQGKCRALYNWWVMRLRNGEKWPGWKAAKKTLQASKAYDPELQWVYGKLLAEVYFRLDGAMKAFFRRVKNGEKPGFPRVRPRHCFFTLIYPAMYIQVEGKALRLPTGGKGKNKRYPDVIAKLTEEAPTGYKDVALSRDGQGHYYASFVHEVKEETHEQEGVLALDLGIKTLAVGVNEQGKVYHVGGFKGKTWYNTQLDKLRSKRDKCKKKSRRYKHLSKVYKRVSQKKRNKQQDCLHKASHLIAHTLVESTVVIGDLSQRQMVMKEHKERNKHLNRAVFNDWGLYSFVQMLVYKCLLYGKELVIVDERDTSKTCSGCGHKQPMPLWKRTYHCKECGLIMDRDENSAVNILMRFLARLGPHVADATRCADVFTATEMG

SEQ ID NO: 20298 - protein, 395 aa, unknown
  TnpB Polypeptide
MSRYRLLPTPAQEAALRGHCAHARYVWNLAVEQHSHWHPGRKGAPGYLEQCGQLTRARAEYPWLAEGSQMVQQQALRDFARAMAAFFDSENPAGRPSWRKAGRDEGFGVVAVKPERVRRLNRKVGEVWIPKAGWVRFRWSRPVPPGAKSYRVTMDRAGRWHLAFVAIPPPIPAPGNGQVVGVDRGVAVGAALSTGELFRVPGLTAREQKRLRRLERELARAKRGSNRRRRVRLTIARLKARDTDRRKDWAEKVSTDLARRFDLIRVENLDVTSMTRSARGTAEPAGRNVRQKAGLNRGIMRSGWGLLVRRLEDKAPGRVEKISPAFTSQRCSACGQVDAKSRESQARFACTACGFACNADVNAARNIAAGHAVTARGGDGVTRPLNREPQLLQSA

SEQ ID NO: 20299 - protein, 271 aa, unknown
  TnpB Polypeptide
LQHVKGDARLFKRGEAWYVMLPLRVPHTPAVRDGDEAAVIGVDLGIVRLLTAQHPHGCLVVNGKPIRHAREHQASLRRRYQRHRRTDRVRAMRSKERRWMTDLNHKVSRQLVDLAAQYPNPVLAFERLDGIRDRIRGSKRFNRMVAGWAFRQLADFVQYKAEKTGVRVVFIDPRKTSQTCPKCGHAARSNRATQADFRCVACGYCANADVVASLNIAGVAAGLLRQGPPDTARLGAAPRRGAGQAAPARERLDGVKVWASAHTDSNLESSV

SEQ ID NO: 20300 - protein, 267 aa, unknown
  TnpB Polypeptide
MRIVTFATELWEFPGEESPPEEENTADPEGDEIERQECESRDDATENGVVLGVDLNVTGAFAVTSTGEFIGSADYLTHKRDQYEQRRARLQQTGTRSAHLTIQSIGSKFSEWSLDWLYNRANNLIAEAHDADVDGIIFENLAHIRENIANGSKFQQWAYAKFVELVEYKVESMELFVDFVNPAYTSQRCSQCGFTHEDNRDDKQFECQDCEYEVNADYNAAKNIANRYCGYIHRGQKSRGGWATSQLALKSGTLTVNGDYTPAGLLG

SEQ ID NO: 20301 - protein, 387 aa, unknown
  TnpB Polypeptide
MRNYRFRLYPTKRIEQKLEETLDGCRWLYNYFCDKNMSEFDMNYVLVELKIQHPWLYNYHSKMLQMVGKQLTAARRALRTSGVTRNRSSRLYQKKHEDFNSFTYNQTGFRIKGDELWLSKIGLIKIILHRRLINIKQVTVVRNAGKWYALVTCDKKQIFHFINPRKSVGIDAGITKFVHDSENHGFENPQFLNQMIKPLRRSQRRLSRRIKGSHNYTKAKKRMVDLHSKIKNKRNDFLHKLSTYYSERYDIIFLERLRILNMVKNHRFARLILDAGWGTFKIMLKYKAKKLVEVEPAYTSVDCSRCGHSVPKELAVRMHRCDVCGLTLDRDYNAALNILQRGLRAACLPQDLREVTPVENNDWSMKQEAYDFSQGQLTNPYSIKTLR

SEQ ID NO: 20302 - protein, 430 aa, unknown
  TnpB Polypeptide
MAWEVTRTVRVRLDVPDDRKRDLHATNTKFQYCANRTANWAWRYPNEDCVTSKSEAEAAIYDDLRHETDGLHANLVQKAIKRATDDIGNCVDRLADGENTGKPEYDTFSIVYDKRAATYCRDKVSLATVNGRVECDYDLPDDPDGTPHGEYLLNEDYSFSTSTVHYDSDTDEFYLHAAMEQELDVIRPEKAEHSRVLGVDCNVNDHIAVTSTGRFIGNADFVNHRRREYQKRRASLQQTGTRSAHLTYHRIGDRFGRWSEDYLHRCSKAIVAETRRHGCTHIAFEDLKQIRKRISDGKKFQQWAFNELQRQVAYKADEYGIVVDTVKPQYTSQRCSKCGTTLEDNRNGQHFECLDCSYTTNADYNAAKNVARKLVLKLQRGQKSPTGGAFCQYALKSGIMTVNATDVASDSYVSAERESTGKPTASAVGS

SEQ ID NO: 20303 - protein, 315 aa, Streptomyces sp.
MLTHRLCLPVGEKGTQGKPGGYRSKGEWFNKSRRLHLLGARLVAVEEDIATGRVHVVRGGKRLANNRHNLAAAALTESGWRDRWEAARWFLSADGELGKRFGNETIRVAPDGEVSIKLPRPLQHLANAPRGRYVLSARVAFQFRGEEWAARIAHNRAVAYEIHLDVLKGRWYLTASWKRPAVQVIPLQAARADGLIGVDTNADHFAAYRLDAHGNPVGNPHRFTYDLTGSADHRDAQLRHALSQLLRWATRTGVSAIAIEDLDFCDGKTREKFGRRKRFRQLIHGIPTGKVKARLVNMAAEHGLALVAVDPAYTS

SEQ ID NO: 20304 - protein, 392 aa, Streptomyces sp.
MAELRTIARPFVALGPSGVAVRDRLKGLTAQDEKVLRLLGAHLGSLASRDLKARCTDGMEHSTDTWAARKRELTASSSSRWAGSMTKATHDQWALSRRGQMAHIQSLEAGVRTIAHRLSLPVGEKGSKRAPGGYRSTNEWFQKTRRLATLEGRLSQVRADRDAGVVHVVRGGRKLLNTRHNLGAAQLTEPQWRQRWETTRWFLSADGESGKRYGNETIRITPDGEISIKLPSPLAEYANARHGRYTLAAKVSFPHRGPEWADRVEANRAVAYRIHYDVQRGRWYVDASWTFPVVPTIPMATALAHGVIGVDTNADHLAAWRLDRHGNPIGNPHRFFYDLTGAANHRDAQVRHALSRLLNWAKSCGVAAIAVEDLDFHAEKTREKHGHKRRFR

SEQ ID NO: 20305 - protein, 412 aa, Streptomyces sp.
VFTDQPQHLLVIWGEVLEPVAYRHTGRAEREAGVVHVVRGGRKLLGNRHNLQAAQLTETEWRQRWEAERWFLAADGESGKRFGNETIRVTPDGGVSIKLPAPLAGLANARHGRYVLASRVGFAHRAAEWADRIDANRAVAYRIHLDVVRERWYLTASWQRPVIQTIPLEAARARGMVGVDTNIDHFAAYRLDVHGNPAGDPMRFPYDLTGSADHRDAQIRHAITQVLHWAKRCGVAAIAIEDLDFTAEKTREKHGRRKRFRQLISGIPTAKLKARLISMAAEQGLSIVAVDPAYTTQWGGQHWQKPLATPRRKMTRHDAAGIAIGRRALGHPIRRRTAPPPHHQSDGVGHRTVQAEPGTRGREETRPPVTERAHDARARAGNTGTRETSRTSKTVRDVRSDQAWVQSSLLIT

SEQ ID NO: 20306 - protein, 563 aa, Streptomyces sp.
MGRKRGKKRELRALAAPFTVAPPSGARIRDRLRLGAADESVLTLVGEHLGGHQRSDFTARVALGNVSQKDTGRAARKRKLTAVSSSRWVGAMTRASEDQYQLSVRCLYDERAGLRRAISTIDKRLAVPCGQRGGRLRGYPDQNERFQKQRRLQALTTRLAVVEERIAAERPAVVVGGRRLARVRHHLADAHLTGQEWRQRWDAARLFRTADGESGAGHGNYTITVGPYDGSVTLVLPEPLRHLANAPRGRYRLACTAGFHHRREEWLDRVSAHRAVRYDIVRDAARGRWYLDASWSADTTPPPAPDEIRQRGERLLAVDLNADHLAAVVLDGHGNPIGEPHTVPLELTGPTTTRDGRLRAAITGLLGIAKRQGCAGLVIEDLGFADARATGRETMGRGGRGKQFRRTVAGIPTARFRERLRGMACHAGLFVIAVDPAHTSIWGGRDWQRPLQQQTKTTVTRHHGAAMAIGRRGLGHRVRRRPGVTAPDQRIGQRRATGQTGPVPRPRGTTSPPRTAGTPPEGGKTRLCRGDQLVLLPGPQDRSEGHRTTCPDYGELANSDQQR

SEQ ID NO: 20307 - protein, 452 aa, Streptomyces sp.
VTRRFDLKSQPRQFVSVTTKHVKRAFKYRFYPTDAQAAELSRTFGCVRKVYNLALAARTEAWARQERVNYNATSAMLTVWKKTEELAFLSEVSSVPLQQCLRHLQTAFTNFFAKRAKYPRFKSRKKSRKSAEYTTSGFRFRDGRLTLAKMSGPLDIVWSRPLPEGASPSTVAVSQDSAGRWFVSMLCDDPSVKPLPANGNAVGIDVGLDHLLTLSAGEKIANPRHERKDRARLARAQRNLAKKAKGSANRAKARRKVAKVHARIADRRRDLLHQLTTRLVRENQTLVIEDLTVRNMVKNHSLARAISDAAWHEFRSLLEYKAAWYGREVVVVDRFFPSSKLCSTCGVLQGKMPLRVRTWTCDCGTTHDRDVNAAKNLLAAGRTVTACGAGVRPQRSSPGGQSAMKQEVSRRERKNLLPSGRRASTTCSSPIPGGVVPAVARGEAPGAAGSPA

SEQ ID NO: 20308 - protein, 562 aa, Streptomyces sp.
MSKRGKKRELRTIAAPFTMAAPAGARIRDRLRLPEADVTVLTLVGDHLGHHQRADLAERVAMGSVPRTDTRRAERKKALTAVSSSRWAGAMTRASQDQYQLSMRCLYDERASLRRAIAAIGRRLAVPCGQRKGKTRGYADQNERFHKQRRMQALTTRLAVVEARIEAGCPSIVVGGRRLATTRHHLDQAQLTESEWRRRWDAARLFLTADGESGAPHGNYTITVDPEDGSVTLVLPEPLRHLANAPRGRYQLACTIAFHHRRGEWLDRVTAHRAVRYDIVCDPARGRWYLDASWSTAATVSPSPEEIRASGRRLLAVDLNADHLAAIVLDAHGNPVGEPYTVPLELTGPTSRRDGRLRAAITRLIGVAREHGCVGFVIEDLGFTDARQAGRETMGRGRRGKRFRRTVAGMPTARFRERLRGMAHHQGLIVIAADPAYTSRWGGQHWTKPLEQQTKSTVTRHHGAAMAIGRRGLGYRIRRRPGVTARHRRMVGRRAAGQTRCEPRPCGATSPPGTAGTPLRGGKTRPRPDDQLVLFPALQDRSGEHRTIRPDYGELANTGQQR

SEQ ID NO: 20309 - protein, 899 aa, Streptomyces sp.
LNERKKPFRPVRDPFVVQEATGVAVRDRLKDLTPQDEKVLRLLGAHLGSLAATDLARYSRAGFERTNRSWAARKQDLTAQSSSRWAGSLTKGTHDQYALARRGQFAYRDKLTDGIRMLTHRLCLPVGEKGTQGKPGGYRSKGEWFNKSRRLHLLGARLVAVEEDIATGRVHVVRGGKRLANNRHNLAAAALTESGWRDRWEAARWFLSADGELGKRFGNETIRVAPDGEVSIKLPRPLQHLANAPRGRYVLSARVAFQFRGEEWAARIAHNRAVAYEIHLDVLKGRWYLTASWKRPAVQVIPLQAARADGLIGVDTNADHFAAYRLDAHGNPVGNPHRFTYDLTGSADHRDAQLRHALSQLLRWATRTGVSAIAIEDLDFCDGKTREKFGRRKRFRQLIHGIPTGKVKARLVNMAAEHGLALVAVDPAYTSQWGAEHWKTPLASSKRAMTRHDAAAIAIGRRALGYPIRRRTAPPRTHQSDGGPPCPLPRRPLGAAPRPVDPAGRAAGPAADRPGAGRTHVRRCRTQHRHGRSRPPVRALPAADRRASRPAGDHPHTGGLAAQPGDRPGVLATAPTSCTSPSCRTRGRRSMISVSRCRSSPLAAPFLPGTRALGPNRSPLPQTSRTRSFPSARPAPDAAGPSGGDAEFFARPVDELADGRLAPPGGEGGVELADVVLGPGGLDAGEDVDGPVAEFEAVVEVTGLEVGGPDDGEPHADGTGEHARRHRGRLLVPGEGGLGVLQVAENLGRVRREAGMAIEVDPGGLVAAVVLGLTQEVLGGFQGPGGGPRVVLAGVSAGLDQLGERQDSRRRLAIGPLEGALSHIDGLGREAPHQGLHRHGGQHIAAQLHVAAGAGEAKGLDEVPLGGIVLTDIEGCPAGDYLELSGILAGQGVASAAGT

SEQ ID NO: 20310 - protein, 483 aa, Streptomyces sp.
VKKFKPQAGFVVQAYRFALDPNAAQEQALRSHCGAARAAYNWAVGWVTASWWQRKAEESYGIDEPELTQWRPWSLPALRKEFNRAKVTDPRFAGWWEENSKEAYSTGLANAAAAFDNYSKSKQGRRKGKRAQMPRFKSKRKARWSCRFTTGTIRLEPDGRHVTLPRLGTIRLYERADGLRDRFEARRARILSATVRYERGRWFVSFQTEVKRDLVRVAQPGVAVGIDLGVKHLAVMADSHGEIRYEPNPAHYDQALKLLRLLSRRVSRRRSPDRRTGQTPSNRWEKANAERNRVHHRVANLRTEALHKLTTRVRTEYGTVVIEDLNVAGMLRNRRLARKIADAGFGEIRRQLTYKGQRNACPTLVANRWYPSSKTCSDCGAVKAKLPLHVRVFDCDECPLVIDRDENAARNLAALAAAVTTGTGVAGDQDTVKVSKPRGADQKTRTTRPSRKAGPGRAGGATLPQPRQKETRDRTQAEAPALW

SEQ ID NO: 20311 - protein, 393 aa, Streptomyces sp.
VKRTFKYRFYPTDAQAAELSRTFGCVRKVYNLALVARTQAWVTRQERVNYNQTSAMLTAWKKTEELAYLNEVSSVPLQQALRHLQTAFTHFFGKRAKYPRFKSRKKSRRSAEYTTSAFRFRDGELRLAKMSEPLRIAWSRPLPEGVSPSMATVSQDAAGRWFVSLLCDDPGISHLPATDATVGIDAGLDHLLTLSTGEKITNPRHERRDRAALAREQRRLAKKEKGSANRAKARLKVAKIHARIADRRRDTLHKITTRLVRENQTIVIEDLTVRNMVKNHRLARAISDAAWSEFRSMLEYKAVWYGREVIAVDRWFPSSKLCSACGTPREAMPLNVRTWTCDCGITHDRDVNAAHNLLAAGLAVTVCGAGVRPQRSTPDGQSATKQKPSWREP

SEQ ID NO: 20312 - protein, 654 aa, Streptomyces sp.
MQLAEGETSRTACARAALRTGVDEESGEVLPVMVLVERVGWAADLVSGMVTDLLAGHWNSVDVDVLAAGVDAGGRKLPSNAWMACRRLGWTVAPPEGVKVNDRIVRMAQEQAGRTLRSVKWRADLTGGVIKTWPADPAKRTPEEWTAVRDAVPGGEHLPSSVVKSRTRQVAVFQQKHGRLPVDLFEAEAEPRTARMLLLAACDGQQATIERADEPGRVLLRLQLPTRPDPASYRDWTWVSCPISLPPTVPARAVLHLPAMRLRNGKVHADIPFTHAVPKASSRGHTVALGVDWGLNTLLSAGAVQRGSDGTITALGCGGMFRAAGVLAKQHRLRQYSERLHAKAAQYERLIGGAEDHALTVKHQVLRDEIGRVSARRSNLNDALAWSAARWTVDQAVAAGAGVIYVEDLRSMEARGMGRTMNTRLSQAVRGQIVDRMRHLAAEVGIAVVTVPARNTSKHCPQCLTSLRHRKAPDRLTVAGWKWAICPNLNCQYQGDRDTGAWRRIAARGLTHQTKAVADRTSGTMVIRKVVDKLETLAVVTPTTKTSRKDRSKTGPTRPRTTRPAPRRRRAPSPSHPQGRAGQRPEGHAHTDRRQLPRAAHRHQGVNTSVKHTHQPHRPRGAALGAGFHLHAHASPPRWAEPTPDTTSCMGSLN

SEQ ID NO: 20313 - protein, 494 aa, Streptomyces sp.
MGECVTVKSKAKAAGRSVKDPADAGRKYRLYPTPQQAQRLSEWGHTCRTVWNVALEQRIYAYRQRRIRLRADEQCRYLTRARHDLPWIGDLPSQAPQQVLKHLDRAYDSFWDAGHPAGFPRFKKRTARLAIPLPGQAVRVTRLNRKWACVRIPKLGDVKFRLTRPLGGRIKNASIRTDSSGRWYVSFGVHIGRTATPPNGHPPVGVDFGVKQTAYLSDETEPRLMPQTLTEGEKQRLTGLERRKERQIVQAKKHRGGRYSNRLRRTLRAIADLKARQARRRLDFTHKLTTDLAKNHGLVAIEDLRVKQMTRSASGTRAAPGVHVSQKAALNRAILDNLPGERRRQLVYKCPAYGSDLSLVHPARTSQTCGVCHLWDPASRVSRDRFICTGCGHTDDADHNASVVILRRALRGPAGTTSAAGHCGEQHAPAGHARPATPRTRAGRTREPLNPSSGTARLPVDIEGYKESQQVTAGRMSRKNRVSGHGRGTSKLTP

SEQ ID NO: 20314 - protein, 434 aa, Streptomyces sp.
MEIQHVKRAFKYRFYPTAEQAEELLRTFGCVRKVYNMALDARSLAWADEHRRISYAETSAMLTEWKKTEGLAYLAEVSSVPLQQSLRHLQAAFTNFFAKRAQYPRFKSRKQSRLAAEYTRSAFKWRDGRLTLAKMSAPLDIRWSRPLPDGAGPSTVTVSRDAAGRWFVSLLVGDPGVRPLPADGGAVGVDVGISSLVTLSTGEKVVNPKFERKDSARLAVAQRDLARKEKGSKNQAKARLKVAKIHARIADRRRDLLHKLSTRLVQENQLVVIEDLSVHNLLGNRALARSISDASWGELRSMLEYKCAWYGRELVAIDRFFPSSKTCATCGLICDELPLSVREWTCEGCGIRHDRDHNAAQNILAAGLAVSACGAGVRPQRSSSGRAVGNEAGNTMARAVGVPAPEGRGDVKRRTPGTRSSSRPGSTRCRAAHG

SEQ ID NO: 20315 - protein, 362 aa, unknown
  TnpB Polypeptide
VYNFYLAYNKERYNNGETFMSGKSFSVWLNKEYLPNHPDYMWMKEVSSKSVKKSIENGCSAFTRFFKGQSKFPNFKKKGKSDVKMYFVKNNPNDCFCERHRIKIPTLGWVRVKEKGYIPTTTKNGSRIKSGTVSCKAGRYYVSVLVDIPDTEKTQLNDFGLGIDLGIKDFAIISNGITKKNINKTAKLKKLEKQLKREQRCLSRKYEDLKECNKKMKGEATRQNIQKQVLKVQKLHHRIDGIRTDYINKTIAEIVKTKPSYIVIEDLNVKGMMKNRHLSKAVASQKFYEFRTKLEAKCKELGIELRIVDRWYPSSKLCHKCGGIKKDLKLSDREYICECGYRADRDFNASLNLRDAKTYEVA

SEQ ID NO: 20316 - protein, 421 aa, Aeribacillus sp.
MIRASYFIYKPNQMNEIILRQLCYASRKLWNVANFERRNWTKDSGIPYPNWYDQKKRLKNHFWYKNLPSQSAQEVLKVLQESWQSFFELKKSGGIENPKPPRFKHHNFNVKFLNNGFRIEGNRIRLSIPAKQKAYLQETYGIIEKFVYISIPKHIKIHHVKTVEVKPLKNGKYKIILAQKYDDVLMKEHSTKFMSIDIGIANALTCYDYKGNSHILSGRQWLAVERYFHKKIAHYQAISDAQQVAKGMKYPKKSKRVLQLYLKRKGQTFHILHCMTKKVVDLAVKQGVETIVIGDITGIRDQTNFGKKTNQKFHQLPFEKIVQMITYKAEEQGISVVKQSEEYTSQTCSVCKPYPAKEFAKRSNRKHRGLYVCKDCQSVINADVNGAINISKKYLKGLKAQSVVVLDTPTVYTFNGQKFIA

SEQ ID NO: 20317 - protein, 426 aa, Aeribacillus sp.
MKKVSYFTYKANRTNQIILYHLCYASRKLWNVGNYEKRNWSKEQGVPFPNWYEQKKRLKTHFWYKQLPAQSAQEVLKVLQEAWVSFFKLKESNGIDNPQPPRFKHQNFNVRFLNNSFKLVENNTKIRLPIPKAQKAFLKETYGLEESYLYIPIPKHIEIEKIKLIEVKPISRKEYTIYLIQEYKDVPLKQKNSTKFLSIDLGIANAMTCYDYQGKAHIISGRQWLSVERYFHKQIAHFQAIGFAQQCAKGIQYPKPSRRVLQLYQKKRKQVHHMLHCMTRKVIDIALQQGVETIVIGDITGIREQAKFNKKTNQKLHGFPYAKIIQMIRYKAQEQGIDVRLLTEEYTSQACSVCQMFPCEENAKPSNRIHRGLYVCNDCHTTINADVNGAINISKKYLKEIKALSQSVVVLDTPTVYTFNGQQFVA

SEQ ID NO: 20318 - protein, 384 aa, Aeribacillus sp.
MMVNKAYKFRIYPNKEQEILINKTFGCSRFVFNHFLVKWNNAYKETGKGLTYNSCSSQLTQLKKELTWLKEVDSIAIQSSLKNLADAYSRFFKKQNDRPRFKSKKNPVQSYTTKYTNDNIAIDDNKIKLPKLGWIRFAKSREVEGRILNATIRRNPSGKYFVSILVETEVQELPKTDSAVGIDVGLKEFAILSDGTIYSNPKFFRRLEEKLAKAQRILSRRKKGGSNWNKQRIKVARIHEKITNARNDYLHKISTGIVKNHDIIGMEDLSVSHMLKNHNLAKVIQEVSWSTFKAMIEYKARWYGKQVVTVAKNFPSSQLCSCCGYQNKDVKHLALREWECPVCHTHHDRDVNASINIKNEAIRLLNRRNCGDRLLNNRKNFRCS

SEQ ID NO: 20319 - protein, 373 aa, Aeribacillus sp.
MMVNKAYKFRIYPNKEQEILINKTFGCCRFVFNHFLAKWNDAYKETGKGLTYNACSSQLTQIKKELVWLKEVDSIAIQSSLKNLADAYSRFFKKQNDAPRFKSKKNKVQSYTTKYTNGNIAIIDNKIKLPKLGLVKFAKSREVEGRILSATVRRNPTGKYFVSILTETEVQELPKTDSAVGIDVGLKDFAILSDGITYTNPKWFRKLEDKLAKAQRILSRRKKGGSNWNKQRIKVARIHEKITNTRNDYLHKISTEIIKNHDAIGIEDLQVSNMLKNHKLAKAISEVSWSQFRTMLEYKAKWYGKQVVTVAKNFASSQLCSCCGYQNKDVKNLALREWECPNCHTHHDRDINASINIKNEAIRLLTVGTTGIA

SEQ ID NO: 20320 - protein, 376 aa, unknown
  TnpB Polypeptide
MDFNQTVPLAKDDIAEYDLIEILGLSEKLARKLTFGGSKELVELRVVPKGGIGFETIYIEGVFKCELDLAPSVLSNLLPKVLELKDNKKNEFYLNNLPTATNIIAGADLGLNNIISIAFGNGSDGVVVSNSRIEDKINLFDTKIDKLKAELTTERQKELQAKLEQAKKDNTKLSRAEIIELRTLQKAIYSNKKYRELMDNRFDWINNVLHDVSKGIVDILVKNKIQVLVVGRNKGWKDEVDLGKLFNRRFYQTAHLKLIQMLRYKCEEANILLVETEESYTSKRSFAKNTPLSIYGKADPQQIDNGGVRAKNVYKSDVDSRWSRIHADINAAYNIIRKVVPSFKVSLILSSKFVLYWVYRGLREFKFKLVRGSLAR

SEQ ID NO: 20321 - protein, 374 aa, Epulopiscium sp.
MIRGKKVRLYPTPEQENLFWQFAGTARHIYNFTLNRQIENRKAGGKFISDGEIRKEITQLKKTDKYKWLKEISNNVPKQAVKDCCNAYKRFFNKQAKIPKFKSRKKSKPSFYNDSSKLKVEKNKVWLEKIGWIKIAENIIPISPYKYTNPRIIFDGKYWYISIGLKKDFEKIELSQEVIGIDLGIKMLAVCSNGMKSKNINKTKIVKKLEKRLRRLQRKISNKYEMNKNGKEYAKTSNIIKLEKQIRLLFRKLANIRLNHIHQETTKIVKIKPSKIVMETLNIKGMMKNKYLAKAVQNQCLYEFKRQIKYKCENYRIEFVEANRWFASSKICSKCKNKKPILSLSERIYKCEECGLEIDRDLNASINLSNYKVS

SEQ ID NO: 20322 - protein, 533 aa, Chloroflexi sp.
MDLADRFGSEVDAFVGRLLGGDFLRFPSDRALRDGLLGKGYTSPHGLPARMWKMALSRAWDVVSSYWASLAKKVMAYVARGQAEGRFSRGQAKYALWLLSDPRRVQALVTGRCPDPPPRIRLTAAEQRQVRNRLRRAIRRERGSLPAFRSRRVVELDPCMYRVFEHEGRQYIAIQTTERGQRLVLPLKGQASISGNIRLVLTGERLAEVHVTREVRLRPAGERGLPGLTEALDFGITEVATDSEGRRWGEGLGKALKEMSAWLREKGEKRGRLRGLVRKYRERGELAKASRIEAENLGRKKWARKRERFRGQLLAIVSQALRAFMRDARPGLLVVEDLSGLRGKFRSPDLSRTVSLWCRHALRERLAQLAWAHGVCLELANPALSSQTCPRCGFVHPRNRRGDTFQCLFCGHGDDADRVGAVNLRARVQDPAIARWTPPGRVREVLTERFLRRLEGWEFDFPPEAATLSVLGGSGFHLTVPGAARETGRTTGGGPRGRHAAAVGGPGEPDRGRQHHPGQSGCETPVDATSPPG

SEQ ID NO: 20323 - protein, 417 aa, Micromonospora sp.
MDQRVAERSYGVSDEQLTPSPSWSLAGLRKAWNVAKPDVAPWWGEVSKEAFNTGLDALARGLKNWSDSRKGTRAGRPVGFPRFKSRRRTTPSVRFTTGAIRVEPDRTHVVLPRLGRLKLHESARKLARCLDNGTARIMSATVRRDAGRWHVSFTVEIERAKRIPARPKTVVGVDVGITHLAVLSTGELVPNPRYLVNAQQRMRSLGRSLSRKTGPDRRTGRQPSKRWERAAARLGRAHTRVANLRRDGLHKLTTQLATTHGTIMVEDLNVTGMLRNRRLARHIADAGFAEIRRQLAYKTGWNGGRLLLADRWYPSSKTCSGCGAVRTKLALHERKYTCEACGLVIDRDRNAALNLAALAAEYDTAGSGPVAARGADQKTRTCGQVAVKREPGTTPVGQTGTVLPQGRTIDRVRTKAH

SEQ ID NO: 20324 - protein, 379 aa, Clostridiaceae sp.
MLKTYRFRIYPTAEQIKQLEQHFRETRMIYNRLVERSNTEQPFKRESSTSVIKELRQDHLFLQNTPSVSYKHVLNNFHRAHQRCILLNRKLKYKSAHGRASFSLINRDQAILVDNKAVSIKGIGRLRAKMTRLIKGNILLATIVKTGSERYYMSILTKQPENKVVPLLQKEKLRCIGLDMGITHFLVRSDGQRIENPRYYQQNLQRLRRLQKDLARKQRGSANYRKQQIKIARFHESLVNRRNAFLHRESSKIVQENDIIVVEKLGIQDLLGDRRLSLQISDASWYRFLEMLAYKSQWYGKRMIQIDRYAPTTRTCCRCRSLTAKLPLQTREWHCPQCDTFHDRDINAAINIMIEGAKIYMKEHPQIQQKLIPVLSDRR

SEQ ID NO: 20325 - protein, 506 aa, unknown
  TnpB Polypeptide
LDGRIFCLQCRKCFRRDATKIYRKSRVGRWRQWVLKAYKYRIYPNSEQRIQIAKTFGCCRFVYNQTLAYRKEIYEKEKKSVSKTDCNNYCNRELKKDYEWLKEIDKFALTNAIYNMDAAYQKFFKEHAGYPKFKSKHDNHKSYTTNFTNGNIAVDFETGKIKLPKLKAVKARLHREYRGQIKSATVSQVSSGKYYVSILVETEHKELAHTNHNIGIDLGIKDLCITSDGKVYENLKIIKKYEKQLVKLQRQLSHKGKRSKNYYKTKKKIALCHEKIRNIRKDYLHKVSHEIISENQVIVSENLQIKNMVKNHHLAKAISDVSWYELTRQLEYKAKWNGRKYIKIDTFYASSQLCSVCGYQNPDTKDLSVRTWICPKCGAEHDKTTRLMLKLEFDGVIDMKIREVNENKKQFIALLLLADELPHAEIYVHEDDCTKQIDGFIGLNDDYIEGVFVKETMQSKGIGKQLLNHAKEFKSKLKLSVYQENEKAIKFYLREKLAYFVPVNTT

SEQ ID NO: 20326 - protein, 381 aa, unknown
  TnpB Polypeptide
MATVQKGVRVRLYPTEEQEVLIDKTIGCCRFVHNQTLADCKQSYEQTQHFPSKNERITNLVPLKKENEFLKEVDSTALQQSVIDLNSAFDNFFKNRSHFGFPKFKSKHNLKQSYRTPYNGGKADVLDNKHIKLPKVGKVKAKCFDMPTVYKIFSITVERTNTGKYYASICIETEVKPLPKTWKQVGFDLGLKDLLIGSDGTRYERPKYAYAFKDKLAKEQRKLSKMRTKLERANLNLDECKNYQKQKHKVAKLHEHITNCAKDFNHKLSIELVRNYDFIAMEDLNVSGLIKNHYLAYSIADVRWAQLVNFIQYKCLWYGKEFRQVDQFYASSKICSCCGTYHKDIVNSLSVREWICPDCGTHHNRDVNAAVNILNQALSVA

SEQ ID NO: 20327 - protein, 268 aa, unknown
  TnpB Polypeptide
MMREHLWVAKELWNELLAHTKRIYRDYGCFATRKGLREMVKHQGLYSQVAQELVDRLLDAIGQHFHFKRIGIKCGFPRLKSFNRMKSLCYPQSGFSIEGKKLKVTPFGSINIKLHRPIEGQVKTLSLKRESSDRWFAIFVVETPVVIPKTNNGAKVGIDLGLKHFAVVSDGTIIKNPRHLRKHEKRLEGLQRQLSKKRLRSRNWYKASHVLTRAHEKVANTRRDFHHKLSNRLVNKYSLIALEDLSVKEMSEQQYGKSIHDAGWSSLI

SEQ ID NO: 20328 - protein, 305 aa, Okeania sp.
VEIIDDGLRFSGPVGIVKAKLHRPIVRTIKTVTITMTPSGRYFASVLSKQQAEKPSPSTEGKVAGIDLGLKNFAIVHDGFKTSKHHNPKHLARHEGNLARKQGKLARKQKGSNSRDKARKLVARVHERVSNVRQDYLHKLSRKLVDNNQVMVVESLHLLDMVKNHKLAKAISDVGLGMFVNFVAYNLEKEGKVLVEIDRWFPTSKLCCNCHDQVDEMPLDVREWTCSSCGTRHDRDGNAAINIRAEGMRMLLVSGTGTATHGKEVRPMRGRKSEVKALPCEVRSLCYTRSGLASGTSPFSTPNFI

SEQ ID NO: 20329 - protein, 383 aa, Anabaena sp.
MTQSMSAKCKLIVPPSLCDEVDHTLNGFADACNQILEVAKRENCWNTSKLHHKVYKPVREATGLKANHVCQAIRRVIGNAKAVKQIHKFRPTSISLDVRTFVYKEETQSVGVTLMCGRVEFKLSIGGYQIALLRGQTPTSATLKKTKQGQYLINFVVDIPTQPTGKTPKVIGVDLGRRDIATTSTGKSWNGKQIQSVRDRVSSVRANVQSKRTRSSRRLLRRLSGRERRFQEWLNHNISQQLVQNAKRSNAALAFEDLTNIRESLNQKPRSKTERRRTNNWAFYQLRLFVGYKANIAGVPVVFVPPAYTSQTCSRCGGIHPIKGKSYRSGKSFKCGRCGFEHDADINAALNIAALGASVSSPESPGMSCQLQGQMSLFPISQI

SEQ ID NO: 20330 - protein, 492 aa, Haloferacaceae sp.
MARCDTFEVRPRSHRDTLLLLELLDASAACNNQVNYDRRQTLFETTDNADNRVSVSKLKSTVKQAVTQEEYRQQYIQILSSSTPQQLVQKNWEPWKSYFSLLSKYRDPNNSTVADRPSPPGYWKEDGKRTPRTVIRNDQYTLELGDRSRLEIPVGMDLKEKYGLGYHERVRLEVAGKPRWTGKQGRLEIVYDRDTETFTAYRTVGDEDNPPRRRDSYQPISLATTSSGETVVAAVDIGANNLAAVTTSQGNHRLYHGRPAFDTFHAHTERIAELQSILGDNVWSSKQIRDTYHTRGEQRNHAMDALIRDLGEWLAERGVTELIVGALGDVRKKHWSATVNEKTDLFWAHGRFRRRLDGVLEFEYDITVTEKSEAGTSSMCPACRSDDVHRSGDLLQCHSCGREGHSDIAGSVNFLQKHAAERIEIQTSGSMARPAATGEDTKVDGSQNSVPCLEWNDHAWTVEHDGHSTKEAPANQSTSHETGNVAPGVSDD

SEQ ID NO: 20331 - protein, 404 aa, Haloferacaceae sp.
VDDYLRRTAITRITVSDEQDAELLEATISDWQHGATLASQIGWRENEDSKYDLQQLAYSDVREETRLGSQHAILATHQAASALKGVNELKDKGGKVSCPEFTSPTIKYDANTLTLFEDNTLSLTTVESRVRCELVLPDDEDGYQYQFLNDDEWSVTESTLTARDGNYFLNLGFRKPNPFDDQESPAEDRTVLGVDLGIDNLAVTSTAQFKSGKKLVHDHDQFEQVRGGLQQTGTQSAHRTLVARGDREEQYSQDKLHRVSNAIVEEAVEHECSHIVFEDLEYIRERMPNARKFHQWAHRKLVQFVTYKAESLGVRIEFVDAAYTSQRCSECGHTSRGNRLVQARFECEKCGKVLHADYNAAKNIGWRFVRRGLKDSRRTGNSQLALKSGTVTPNRGFVPYSVVS

SEQ ID NO: 20332 - protein, 387 aa, Peptococcaceae sp.
MEETRTQVITIKLKLFEPTKAKQDMYQTMADRTTDFANRYLGVEKPMRPKSSADAKAFSEPLPAVVLCQAIRDIEAKKNAKSFKRLWPDFNNQKFRVEKETLQGGGAAWKVSFPTLEKRVGVPIQVEKYQVKYLELLLAGQAKQGTAQLIKCGRRWYIHLALTVSVKAEQKPPKYMGVDLGLIDLAVASILGSTLFFSGAELAYIRRHYANLRKKLQKKGAHKALKKLADKEHRWITAMNHMISRRLVEMARLHGVSVIRLEDLRGARWTKSQRKKQRKDAGRSLHSWAFFQLRQFIGYKAALAGIEVELVNPELTSLTCSRCGEVRTSRPAGRWYTCPRCKQSKHIDANAADNIAQAISGLAGECIQVPTTLRRKKTAKRTRTVAA

SEQ ID NO: 20333 - protein, 425 aa, Peptococcaceae sp.
MAKATKTIIKRLDSRKPEWFQETQQLFNQVAAFYFEVIQAHERVLEQKNKESLRVLEIITVTTKDNPDPIMPLPYEVPAMFRRAAINAALGSARSFYTTLRKYHTKKAQREAKGKKYNRRPPVPPREWNRHTTFYQGMMKGLGEDRILLKLYTGSSWAWVKFEMQGRGIPEGWNTGCPQAIVHKNIIHLHFPVETKIDKPQKVAKQVENPELRICAVDLNLGDRQAVGAILKSDGTEIARRFWKGGDFLQRRRNRLLGKVAVHRSEYGEILPEDVLDNVRLWDKVRNIEDYEAHRLSRRIVEFAQEYGATVIVFEHLVNLKPEKGRYSKRSNTKRAYWLKGRLFKYTRYKAWEKGIITSRVNPRNTSKLCSECGVEVYRHNEGEIPKEYRMGAPLFTCTNGHRGNADLNASRNIGAKLFARYKAC

SEQ ID NO: 20334 - protein, 366 aa, Cyanobacteria sp.
MRHVAKVRIYPDSHQQTSLAKASGCVRWLWKNSLAENNRVYKETGFGLSRTALNARLPSLKKEYPWLAETYSQLDQACMLNLSRALINFFEGRARFPRFQSKHGKQSLQYPQNVKLGVHSLYFPKIGWVSARIHRTFEGKLKTVTVSQTKRGHYYASLLFDDGRPEPQASTQGKAVGVDLGVKEFAITSDGSKFPNPKHLPKHESNLKRKQKNLSRKKKGSNRRQKARQKLARAHEKVSNARQDFHHQLSRKLVNENQVIIAESLNIKGMLGNHKLAKSIVDCGWGTFLNFVSYKAKEDGKTFLEIDRFFPSSKTCNHCLNLVDSLPLDVRNWSCRSCQAQHDRDINAAIKIRDEGHNTTETSTLQ

SEQ ID NO: 20335 - protein, 434 aa, unknown
  TnpB Polypeptide
VKKAITHLKLNRAHSGKLQKLDEPAAEYGRVVQAYVDWLIGHEVRQPNKYADIPEQDIPTRLSDRWQRCAWQQACGIVRSWYSNERQNPPILRNIRLQANANVVVIEPSATPTFDFWLRISTLEAGKPIRVPLTLYGRAKEVIAAFPKLCTGVTLNRRDGQWYAAFVVERRSSKPESKAVIGGDIGMVNIVSTSEGRRYGQMSPELRRRVERSAAKRRRNQKLNACLKRKGLPTVDLADHRAEAFARNEIGQALNHMMSDLPPGAAVAVERLTVKDMRRKSRQMNRALRASQLGYVRDKRKFKLDERGVRYRSVQPSYSGQECSQCGFPLPMNRRSQAEFERLWCGHIANADENAAANLAKRFGDEALNTLPFRDVEAALAGRFMRRFPDARRASAGRELQPGVIRLPRGKVVVAIEPPPTVNQPGQDPCHICL

SEQ ID NO: 20336 - protein, 394 aa, unknown
  TnpB Polypeptide
MKVYITYKSELDPNNVQRTALLRHANCARFAYNWGLQRKQEVWWMNQLPVPHIKTPTAIDLHRELNVLKRSKFGWMYDLSKCAPQEALRDLDSAFKNFFEGRAKYPRFKSRRSGVASFRMTGIIRAETSHIVLPRVGHVRLKERGYLPTQGHILFATVSEHGGRWFASIHMQVERNDPTLRAGEPVGVDLGIHHLAVTSDGTVVENPRALARKQRKVARLSKKISRKKKGSANWEKAVKRLRRLDLRIACVRKDAINKATTMIARTKPIIVIESLRPQNLVREHKLARSLLDASFGEFIRQMEYKCLWYGSTLIKADPFYPSTKRCSSCGNVKAGMARSERTYSCQVCGFVMDRDLNAARNLASVAASSVETVNACGECVRPEEPSGCESGSGL

SEQ ID NO: 20337 - protein, 404 aa, unknown
  TnpB Polypeptide
MYQSFKFRLYPFRNQGRELLRQQEELRFLWNYALEARQHAWKVEQKSLSYVDQCRDLARWRAYDKEGIGRVYGHVAQECLARLHDSFKAFFQHRAKYPHFKRECTSLTYPDSNGSASLIPGRNGTWRLHLSMVGDLPIEVHRKPHEGKVKTCTVKREGDRWYAILTIEVPDSVPPSVMPPTRPIGVDLGLTALATLSTGEKVEPPKFMRKAETHLKRQQRKLSRKVKGSQNWQKQKVRVARCHAKVRDQRRDFAHKLTTGWADAYDLIAFEDMDLRGLTRTRMSKSILDAGWGELRTMSAYKQRKRSQRYVEVPTKDTTQSCSICGEKADPPLTLKDRVFRCPRGHVEDRDVNAARNVLNRVLAIVRGGTPESTPVETGPTLVRKGRRVRSMKQEPPQALGVIA

SEQ ID NO: 20338 - protein, 420 aa, unknown
  TnpB Polypeptide
MYEEKNRKIRENGKATRERHSQMDCHVISAKVQENRLSRAKLEKLYRCFLEGKWLYNAVAASETLTLEDTKTVQVKVKDDFETREIKNLSSHMRQSVVDSARTNASNLSKAKKKGLKVGKLRFKKECNEIDLKQFGNTYSVKSHNKISVQKIGVLVVNGLEQINLDEVEFANAKLIKKPSGFYIHLTVYTKKQPQSNNEKEILGLDMGIKDQLTFSNGVKVNFYLEESEQLKGLVRKLSRQDKGSNQYKQTLNRIKRIYEHQNNKKNDVVNKLNSVLSKNYIICFQDELLNQWKHKKSKRKFSFGKQVQHGILGRVKDKLKKNLTNVMLESSVPTTQTCPECGCLTKHGLDKRKYHCNHCGFENPDRDAHSANMMVLLSGYGTYRSLNTDTVSTERMVGLLDNLSELGVVVTTNSMEACH

SEQ ID NO: 20339 - protein, 410 aa, Westiellopsis sp.
MLVLEAKLKGKQSQYNSIDEAIRTALFIRNKALRHWIDNKNIGKNDLQKLCAVLAAYFEFASKLNSMARQASADRAWLAVKRFYDNCKAKKPGKKGFPRFKKRGHSVEYKTSGWKLSNDRKYIMFSDGFNIGKLKLVGTRDLSFYSIKQIKRIRIVKRADGYYCQFCVDVERTELHQHDGKQVGIDVGLEFFYTDSEGRTVENPRLLRKSEKSLKRKQRQVSKSKKHSYNRHKAVKKLAKKHLKVSRQRKDFVVKTARALVQSSDLVVYEDLQVKNMLKNHHLAKSISDASWSLFTDWVDYYAKVFDTWAIAVAPHYTSQDCSVCGTRVQKSLSTRTHKCHCCGTVMHRDHNAAIMILNKGIKSTVGHTGSKGNPQNSPIQSANFVGTLKASGQNDLYLGGETPAFKLAG

SEQ ID NO: 20340 - protein, 445 aa, Westiellopsis sp.
MTFRLYPNKQLEQSLGYHRKLHKDLYNAAVNNRFTQYQKFNQSVSYFEQQNCLPAFKEVWIEYKEINSQALQATLKRVDFAFERWFKGLGKRPRFKSIRHYSGWTYPAKTGYSVESNGENGYITLAKIGRIQMRGKAKYWGTPTTCTIVYRNGKWYASITVDVLNQALKPKVLPTGAIGIDLGCKAALSITDGENHRQIEAPKFLRNAEKQIKKASKEKRRKRAPNRNKRIKASRRYKKATAKVSKITRKVGLQRQNWVHQVAAEIVSGNSFVATEKLEVKNMTSKAKRGKRKKQKAGLNKSILDVGFGMLRSTIKYKVEQIGGVFVEVPTKKVKPSQTCPKCGHQHKKTLDIRVHECSVCRYVQDRDIAAAEVMLYWAKGNLTGFGTSLADSESPSSTTSTSKRKQAGSMRQLGAKKSQKSKSTGLVSETQTYFVEVWVVHSDK

SEQ ID NO: 20341 - protein, 420 aa, unknown
  TnpB Polypeptide
MRALKTKMRGLNKSQFKRLRELTAHAKNLYNQSLWILREAFDATGKYFSYPQMDRAMKQVANREGEINYKLLKAKVAQQTLRRVDQNFKSFFQASKDFKKNQSKYKGQPRPPRFKQKRYDNLIFDYQAFKVKGTLVLLEKGLEIKLPPSLVGKTIKQIEIIPKHHLFQAVFVYEEEVQNFKLIEPNDQIMSIDLGLNNLATCVTNGLIKPFIIDGRRIKSLNAYYNKRKAKIQSELEKSRGIKWSHKLQSLTDKRNARVNDYLHKATADVIKTCLTHNISKVVIGDVAKSLDHINLGKKTNQNFVNLSLGQFVDKLSYKLGQHGIKLIVANESYTSKASFLDGDKMPKKYDKEAKPIYSGKRIKRGLYRSKDGTLINADVNGAYNILRKGDSKFSFSSFLKRVGNNVKEWLHPTERIFIS

SEQ ID NO: 20342 - protein, 404 aa, unknown
  TnpB Polypeptide
MPVKGVVFCLEDGLPIEARFLLEDFRLAVNNAIRAGLQARVTSRNALTRLAYKDFRKEYPKMYAQHLVSAFEVAGSALKNHRRRVRKGNAGRVPYIRRLFMKAENQAYKLDRANGVIDLPIRAGCHVCLELVLSDYQRRYLEDHSYALGSLTVFTDRVIIAFRKGAPKPYVPESALSLDTNERSLDGVFAKGGDVKTVKAEFSDIATIQQRHHDRRKRLQKKKAHDRRTSRMLCRREGRREHHRIEYRLHQLANAVLSFAENQKSAIVLEDLKGFKPIRNKELNRRLSLWPRRKLHQIIEYKAQWRGVPVVKVDPRYSSRTCPICGRIQDSRMGAEFVCECGWHLDRHINASLNLLQTAISKGMAGGLRFNPGAFQHDVMMILYDPERGARSEPNGTSGTCVVT

SEQ ID NO: 20343 - protein, 382 aa, Planomonospora sp.
MLSRTFGCVRVVWNQTLAWRHRRWHAEREPANVPQANAFLTQLERTEEFAWLNEVSSVPLQQVLRTQQRAFVNFFEGRARYPRFKSRTGRQSAEYTRSGFRWRDGRLWLAKTDTPLEFVWSWPDMDPATIDPSTVTVSRDPDGRWYVSLAVDVADPEQAPATGTAVGVDLGVKDFAVTSGGEKIANPRHLERKARNLARYQRRMARKQRGSANRAKARAKVARAHRKVRDARRDFLHKTSTRLVRDHDVIVIEDLAVENMVRNRSLARAISDCGWGEFRRLLEYKTTRYGRRLIVIDRWYPSSKTCSACGHLLAALSLNTRHWTCPGCGTRHDRDVNAAKNILAAGLAVSACGADVRHPGSSRVRSAVKQETQPARGGIPRL

SEQ ID NO: 20344 - protein, 337 aa, unknown
  TnpB Polypeptide
MPKLASYFECQTHLAKKLRNSANFIIRNLRTGLKKDPVDRTSNENEVIETVRIGIEMANEKLQKDVDRLTKQLQSLPASDPARTKIQKRIENKQKNHPIMPTSDHWMLTYETLDAVMKNTKNPDYYAMPSQANQQVLRKVLKDWKSHFELLASYRQNPGKFKAQPKQPGYIRTPYTTVTFTNQVAKRSDIKGKMHITFPRCLVPLCVGKPEGSYVRTEVKPCYGGYMVYVTFQDAVKIPEVPTNPTRILGLDPGLDNFLTALTNFSATPFIIDGHWLKSINQNFNRRRAALMSELTKGMDSTKSVKNSARLNRISKKRACRSTTFSIRQLTISWISA

SEQ ID NO: 20345 - protein, 423 aa, unknown
  TnpB Polypeptide
MQLAERHLIKPSHELYDTLDDLTFKAKNLYNHGLYLYRQSYFEHKKSPESPILSWVDIDKSLRKQGHEDMRALPSKVANAVLKNLGETITSYWKLVRLKREGTLSQNPKLPSYLHKTDGRYPLSFNYQTFGAKRGFNNELFLCPKGLNLPIPTKVTNPKQVRIVPNHDNFIIEVIYDAQERAPKSTSKYAGIDLGVDNFATITFTTHNPPLIIKGLELKSINQGYNRLIAKTQELLPASQKTSKSIHRLWSRRSWILKTKIHQMTAFLATLFDEMQIEKVFIGKNAGWKQNLPFGKKVKQRFAYLPYETFIEQLKYKCQLRGITVVLQEESYTSKASFLDGDDIPVYGEVDNPKFSGRRIKRGLYRSGDGRLINADVNGSYNILRKGLMNNHLPFNVDNPLIQPLVVKGIGEESNDKLVHLYM

SEQ ID NO: 20346 - protein, 446 aa, unknown
  TnpB Polypeptide
MLTRNENKRNIIINEKGGEFCMKVQRVYQTQINENHLMYNTITDCCVKSKNVYNYGNYIVRQIFIITSKLNNNQPINQDQQEFLKNINIKVDEYNEFKLINFRKKQVKGKYMGKQFKSIKYFDKDNRKCDYDFLDFILKDTECFKKLGSNSSQQTLRSLINSWLGFFEGIKEWKKYPDKFLGRPKIPKYKDIKTGKYPLFLCNNQFKIKNDYLYFCWKPLKPFNNTFKINTTEYSKLVQLRFIPRNNIYVMELVYEKEIPDTNDLENSTKICGIDLGINNFATLTNNVGAKPIIINGRIIKSINQFYNKKKSKIQSKSKKINNKNWSNKLDQLSVKKSNKIKYYMHCASKRIIEYCKCLDINTIIIGKNNEWKQNSSLHKKVNQTFVQIPYENFIKMIQYKAEEVGIKVILTNESYTSGTSFLDNELPIKQNYNKKRMSIIINANF

SEQ ID NO: 20347 - protein, 428 aa, unknown
  TnpB Polypeptide
MLCGFRGLEHSVKIKRVCRVKRVKTQVLKIDPQPIFTEIQQASASVWNECLYQMDRYQWHRGYPHAHDHFWFGDDCEGWMDKQLTKSQPLHSQSIQHVRKTYFKSWRSYAALKKSGGITSPKPPQKTKRYLSTRWLKSAIHFKDRLLSLSMGAGRDRLEIPLPKKFDASKVHLISTIDLVYDFGQWGLHFTYTDEIKPESPGKGVCGVDVGEIHPLVSNDGEHTEIYNGRYIRSLYRQRNKVLAEFSRAMSRCDRHSKRWWRLARWKWKRIRKIDNQIKDALNKHTTLFVNRCVSRGIGTIVLGDLTGIRKRIDYGKSANQKLHQWAFGKLTTLITFKAKKLGIKVKTISEAYTSQTCPSCGERNKPANRNYQCACGFTYHRDGVGAYNIRRKYLGRLGDPVVADMGSLPMKMAQPLGFRLEVPVASS

SEQ ID NO: 20348 - protein, 329 aa, unknown
  TnpB Polypeptide
MKQSVADSVKTNVSNLSKAKKHGLKVGILQFKKECNEINLKQFGKTYVIKSKNKIRIEKIGVLVVNGLEQINLNEAEFANAKLIQKPSGFYINITTYSKKQTQSNTEKEAIGLDMGVKDQLIFSNGVKVNFYLEESEQLKGLMRKLARQTKGSNQYKQTLHRIKKIFEHQNNKKNDVVNKLNSVLSENYIICFQDELLRQWKRKKSKRRFSFGRKIQHGILGRVKDKLKQNPSNVMLESSVPTTQTCPICGCLTKHSLDKRSYHCNNCGFENPDRDVHSANMMVLLSGYGTYRSLNTDTVSTERMTGFLDNLSNLGVVVSTTNSMEACY

SEQ ID NO: 20349 - protein, 163 aa, Microcystis sp.
LDVGLKVFYANSDGETVEIPQYYRKAEKRLNRLNRKKSKKFRKGQPQSNNYQKARKRYARKHLRISRQRRGFVEKEALRVIKSNDFIAYEDLNVKGMVKNSKLAKSRTHICPHCGYVEDRDINAAINILKKGLSTVGHTETNTLGERFPLVWLDTSCQIKETQ

SEQ ID NO: 20350 - protein, 724 aa, unknown
  TnpB Polypeptide
MCIAFYLSHVIIANIISTIVIVDTMRTVKHKLKPLSLEQKIQFLALARAYQFEKNYWSDQLLDGSTDEINLKNLYTYQQIRNSKNLTKNNYYSHYNLPVRYCTIALKEAYDLHIRTYEAQIAFLKRDLNNKIYKFSYANTGVAMSSSTEPNISEDKRESVAADKAKTMLLNTFKEFLYFATNSLFYNYKTFRTFEEDFYSKKFRKARIYQRIYPILQKLFYKAVGKDVFQLNDDDELSQLRLQENIEILNQFLLGEAKAACSETEYLEKLLHYYCNCLVKAIVKFRNYKPIQSQINPTITLDGGCYKLYSQYDEAAKKNRWFLDIMSMEVGKRIKGLELTGFHHAKKIMKHKKYPNLILSFDRTDMTYYAHFTFGAFDTHSSHKARKTRKASKKQRKLNLCQRSQVSECSGDTKSIQYKLTNDKVNFFYKKHTKKMANASLLMTMFTVGGDFGVTENYTFSDGWVSGRKQGKILHYISNSTKNSVAGLQRISEKGFFGVEKNNPTGQRNHKNNCFNHNQLLRNINENYRKKQRKYNSFLQNYKYLLANEIIEHFTTDSVYGQYSNATHENPVRLVFESLDYTSLGFDANQKRQINLIKGILNVLEEKIKLHALPIEIIYVHPGYTSQNCPNCYLVAKANRNKAESSFRCQHCGFTANDDERYEGLTKVVQRSDLPSKDDFIASRNIAERPSTVPDSTRLRLRDVKDRLMFLHDSVKVSCKMFNH

SEQ ID NO: 20351 - protein, 359 aa, Thermoplasma sp.
LNYYVYIVLKTLQIKLLPDEKQKEALIDTFVRFNEACNFVSRIAFDKKIFNKVFLQRIVYRDIREKFGLAAQLAVRVIAKVVETYKADREHFHEFRDFGSIVYDQRILSFKGMDEISINTVHGRIRIPITIGKYREMPFERIRGQCDLIRKNKQFYLMVAVEVPEEPLVEAKDVIGVDMGIENIAVDSTGKYYSGEEIKDVRKHYSDLRSRLQSKGTKSAKMHLKKLSGKESRFVRNVNHVISKEIVQKANIYIHNSWAFHQLRSFIEYKAMEAGIPVIVIDPKNTSRECPVCHTIDKRNRPERSRFRCISCGFEGEADFVASLNIRNRAAVSQPIVAGAIFGHSTLPAASSEALARSS

SEQ ID NO: 20352 - protein, 373 aa, unknown
  TnpB Polypeptide
MIKAFKYRIYPNLLQTEQLKCIFGSVRYVYNLGLETKISAYTSARVNLSCFDLNKQVTELKQTEQCSWLKDSPSQALQMSLNNLDNAYTAFFKGKGFPKFKNKHSKQSFQLPQHVKIDLENSKIFIPKLKWVPIIIDRTFEGIIKTCTVSKSTTGKYFISIQVDTGIDGPTKPEIDENTTIGIDLGIKDLAILSDGTKFENPRWYKKAQKQLRIEQRTLSRRFKKGQKEQSNGYKKQKLKVAKIHEKIKNQRVDNLHKITTSITKKYNTIVLEDLNVDGMMKNHCLAKAIQDVSWSEFRRQLEYKTEWYGKNLIFIGRFEPSSKTCSNCGIINKELTLKDREWTCKCGIEHDRDINAANNIKNFGLRNKIKHV

SEQ ID NO: 20353 - protein, 443 aa, unknown
  TnpB Polypeptide
MPNPKKNMGVQQILLHPDKETEALLQYLCEQSGKVYNSGVYFARQTFFKTGKLLTGKYDLDFEPSVAKTQTAQSLPSTPMQQTLRSVTESFKSFKELRSMHFKGNLHFQPKAPAYLKGSKLFKVAYPNSGGQKPKLIDGMLRFSLGLTVRRWFGVSEFFLPMPSNLVMAAVKEFTILPKNGSFYLECSYEKPRTKADVNQDEALGIDLGTSANIAACVDTLGNSFLVDAFDLKAMNQLWNKQVSTRKEGKPEAYWDSWLDKATRKRNHQMRDGVNKAAKMIVGHAIKNGIGTVVCGWNEGFKADANMGRVNNQKFVQMPLAKLRDRIKQLCESNELRFVETEEAYTSKASFLDGDSLPKFGEKPDGWKASGKRVRRGLYQSADKSRVNADLNGAANILRKVASNLGLDLGRVGRRSLTTVARIKLWVKPTTQLLSAESQSLQR

SEQ ID NO: 20354 - protein, 706 aa, unknown
  TnpB Polypeptide
MNGTLTGSAHGRIVTATDPGTDRPLGLPAVREWLGWLCAIAGELACPVLAAHGNPADVRLFASGKTPDGGRLPQKAYKALESLGWAAPVPAGLFVPSRVRRMASEHAGRTIRSSACQLELSEAMLGCWPQHIDLDQLRTKPGMVLVRNTRRHIRKYFKTQDIPLDQPLAVPVTVSEVWSPGQVRQVADLSVVDGEYATLIRRGSRLHITLLLPTQTRPACRADWSPVRLELSGFTHLLTVEGARASWPTFHLDRGGLVKVEIPIMQPVPLRVPLDQICRVYGYDWGVNRLLTGLFVTRDQDGPWTANRPRHFNPAGMSALYHRQRQQGQYLRGKRNRNTQLLTGLEPDSSAAAHLLKAVDRASTENRRVSDKMTRGNGETARLAARWAVSQAVAAGAQAVAVEDLRDMEPIGMDRRNRTRMSAQVRGILIDELARACAKAGLWLLVVPARGTSSFCARCGSPIRHIKAPNDRRAGWSWGMCTGPGCPNQGDRDHLAAGHIGGRTITLLGMLGRPGVIRSRDGVKVTLGYPASPGKTKPPAAPTNPTSTSTSASASGAVTATLAQVAPVVAEPAEPAVLVPGLRVCKVPRHPRVLPRVKKARIPHKRRDRPERRPLCDISKSRGGPLAEPPTRRPASMLGHRSAGAQPRQQLRGPHQGHDHDPVRRDRLIRACDGLRYAYRRHLRASPNRQTQTALTARIAVSTQTH

SEQ ID NO: 20355 - protein, 94 aa, Clostridioides sp.
VIVVEKAYKFRMYPNKNQQELINKTFGCCRFVYNKYLAKRIDVYKKHKETFTYKQCSSDLTNLKKELKWLKEPDKFSLQNALRDLDNAYKKFFK

SEQ ID NO: 20356 - protein, 396 aa, unknown
  TnpB Polypeptide
MIVLEFKLAGAACQSAALDEAIRTTQFIRNKCVRKWRDERGIKPYDLNKYCAVLAKEYDFAGKLNSQARQAAAERAGAAILRFYKNCREKKPGKKGYPAFQKDCRSVEYKQTGWKLDEARTRLTLTDVFKAGTFKLKGTRDLVGYALDQIKRVRIVKRADGYYGQFGIDATRQVSTEAIGHAVGIDLGLSHFYTDSKGATVENPRHLRRSEKALRRLQRRVSSKVKGSKNRSKARERLGRKHLKVRRQRKDFAVKTARALIMSNDVIAYENLKVANMVRNRRLSKSISDAGWRAFVTWLEYLAHVYGKVVVAVPPQYTSQECSGCGARVKKALSERTHVCLRCKMVLDRDHNAARNILALGLHRLEQTTAGHAESHAWGQSALYPPEVPLADKAAG

SEQ ID NO: 20357 - protein, 412 aa, unknown
  TnpB Polypeptide
LQQVVKAIAFQYEPNKSIRPLLGKFRMMINHAIWVGKKRGTHGRFNLIRAVYEDFKRYDLHTHYTLSACEVASAILKNKRRSHRAPIARRLTLKLDNQTYRFQSDSLRIPIRPREFLNLKLRVGSYQRRFLNDASLRTGSITLTETKVIIAFTKTQLPPAEHHGIIAYDTNELSLDGVASDGLKIEPIHVDLRRIAKTRANHFQRRRLLQNRLAHCQRKLKTKLVLDRGLERKRIDAILHQVAKTQIRMAKERNARVILEDLKGVRQSVNRQVSRTNPHNGKLQKMPLHSKSLKRRLNTWPFRRLHTFIEYKANWEGVGVSYVPARNTSRTCAKCGCLRIGHEGEQDPNARQVFQCPECGWTCNRHLNAALNLLKTQDEGRWFSPDRYPNEVMTARSEPTGWKSSPQPLTKT

SEQ ID NO: 20358 - protein, 432 aa, unknown
  TnpB Polypeptide
MARVTRTIIVRSVKLPRKMFRVFVELEGMYRNMVEQLVMYAVRNWVKSFTRLKALKYHEMRSIYSQLPSHYVYTACQDASTRAKSFLRLKKLGLAGRGYPEVRRISIWLDDHLWKPNGYTSIKIATHKGRIKVEFDPHKQYWKYINRRWKLTSEAKIKLDKKNKQLIVYLTFVKKIEERKRRGYLPVDVNENNVTILADGVASLFETGTKKLVLGYYYHRKKVQEKYDKLYGKRSRIKKKVLRKLKERRKKHDIKWKIANLIVRTACEKQYAIVLEKLGRKPASNMIRRIKDKQLRHRIFQASFKGIQRTIKEKAKEYGVPVIYVNPRNTSKLCPIHASPINYDNSSRIGKCSKGGGLWHRDVVACWNLFLKALRGDGSIAPSPAELNVDVSRMLFGTKATHDPIALPRGLWTRWKSLPQIQHATVLNKMRR

SEQ ID NO: 20359 - protein, 437 aa, Glycomyces sp.
MDVVPGRYAFVVHLRYTYRVYPTAPQRSALTRTFGCVRTVFNDAVAARRKAHSQGLPYPSTAVLDKRLITEAKRTPERAWLAEVSTVPLQQALRDCHAAYRNFFDSVKGKRARAGVGPPRFKRRSQRQAARYTRNGFALRANGRLYVAKIGDLKVAWSRDLPSEPSSVTIVKTATGKYFASFVVAVNDDAERLEPIADPEAECGIDLGLKDFAVLSSGRVIENPKFFRRMERKLKKAQRALSRKERGSANRAQARVKVAKVHEQVRNRRDDWLHKQVKTLVGESQALYVEDLNVRGLSRGRGAKSVQDAALGRFLVLLEAQAARTGRTFVKVDRWFPSTRLCSACGSLTGPQGLADLGIREWACGCGAFHVRDRNAAINIKREGQRLARAHQVAAGQAETVNACGQDIRPDSSGRPGNPRKKQKQEPTRTRLAPASR

SEQ ID NO: 20360 - protein, 258 aa, unknown
  TnpB Polypeptide
LCHAKIHEVNRHQDPIQLRLHRKMKQGGKLKSVTVSMEPDGKFYYSILMEYPKVVVSHTIHPENSIGLDMSLPNLYVDDQGNTPNFPKPYRTMEKRIAAVQKRLSRKEEGSVNYEKERKKLASLYAKSKHQRNDFLHKLSCQLTDTYDIIGTEDLDMSAIKRSLHFGKSVSDNGWGMFTTMLQYKAEKKGKVLVKIDRWFPSSKTCCQCGHIHKELKLSDRVYICPICGNIMDRDHQAAKNIRQEAIRIWEEFQTALS

SEQ ID NO: 20361 - protein, 427 aa, unknown
  TnpB Polypeptide
VNLLALAYLTQRQQIKHLSKKEYLALRELCSFAKNMYNVALYNIRQHFFNTGKYLNYYDNYHLAKENENYKLLNSNMAQQILKEADGSFKSFFELLKLKKDGKYDAKVKIPKYLPKNSYFSLIIGQIRIKDNGTLDIPVSREFKKLNRKTSITIKVPSNLKGKKIKEIRIIPKYNARFFEIQYTYETELKGIQLNIDNVLAIDFGIDNLATCVTNSGKAFIIDGKRLKSLNQWYNKQHSKCQALRDKLLGANRPLTKKEIQLIEKRNNRVRDYLNKSARLIINYCIDNDIGTLIVGRNKQMKQKAHMGKANNQTFVQIPISELMNKLKYLCEYNGINYVEQEESYTSRADFFSNDYIPIFDEKDTTRYTFSGKRITRGQYKSATGMVLNADINGALNIMLKSRLGGSKLTILQSRGNLDMPVRIRVS

SEQ ID NO: 20362 - protein, 432 aa, unknown
  TnpB Polypeptide
VSEATKTVVVRSTPLPRKVFRVFIELEGMYRNMVEQLVLYAVRNGITSFTRLKALKYRELRSLYPQLPSHYAYTVCQDASTRAKSFLKLKKRGLTRRDYPEVNRVSIWLDDHLWRLKSLMSIEIATHKGWVTIELEPHKQYWKYLNGGWRLASEAKVKLDKKNRRLIVYLVFKKCVEMFKPRGFISVDVNENHVAVLVDDKAFLFETGFRDIVLGYYYRRKRIQERYDKLYGASCRARGRILKRLKERRKKSDLKWKLANIVVRVAREKQYAVVLEELGEEPAKEMINNVKDDQLRHRIYQASFKGVQRAIEEKAREHGVPVIYIDPKNTSRMCPVHNAKIVYSNGCRIGRCSKGGELWHRDVVACYNLLLRARVGNGSNAPSLRGLSLDGSPMPLGSTATHDPTVVTRTLWARWKSLDKTLKNPKIKGMTI

SEQ ID NO: 20363 - protein, 360 aa, unknown
  TnpB Polypeptide
MTTHRKVYRFQVNPTPAQAEQLYQMAGAKRFVFNWALARRKDHYAEHGEGLSAKVLSADLTDLKKRPDTEWLKGVDSQLLQQALKDVDRAYQNFFDKRSRFPRFKSRKRETPSFRIPQRVKVENGKVYVPKVGWVKVRQSQDVDCKTKSATFKRDATGKWYVTLTAEFEMPDVPLSPARAENVVGIDLGLKDFAVLSTGERIAPPPHYRLLERRLAKAQRRLSRRQKGSKNRDKARAAVAKVHLKIRNQRGDFLHKLTTSLIREHDGLCIEDLSLKGMARTKLSKSVLDAALGEFRRQLEYKSVWHRKHLAVMDRWFPSSKLHMVCGALNDALTLSDRTWLCGCGETMHRDLNAAENIRA

SEQ ID NO: 20364 - protein, 432 aa, Calothrix sp.
MLKVVKVRLYPDAQQQQSLAQAFGCCRWLWNYCLNLMNQTYKETGKGLSGYEVKKIIPQLKKEYEWLTSTYSQCLQQACLNLGVAFNNFFEKRAKYPRFKSKHGKQSIQYPQNVKISTSLNLDPERSRRVKVADSYLSLPKIGDVSAIIHRPIEGKVKTVTISKNCSNQYFASILFDDGIDEPSPNTDGKAIGIDLGLTHFAITSDGSKFDNPRILNKHEKNLKLKQQQLSRKQKGSQNRIKARKKVARVHRKITNCREDFLHKLSRRIVNENQVIVVENLNVKGMMQNHCLAKSIHQVGWGMFCTMLKYKAEMEGKVYQEVDRFFPSSKTCHVCLNQVGSLPLNVRFWTCEHCHTKHDRDVNAAINLRDEGLRILTCQSPQVGKPAHGAGSSGTGDKACRPDVSRSKGGRKKSTTALSVGQEAYSVREASL

SEQ ID NO: 20365 - protein, 537 aa, unknown
  TnpB Polypeptide
VPAKTPSDKNNGKQSRKKENDNKRALTVKLNPTRDDQIYLTSLIKTYTAIANKLNKDAFAKFKELTSNGEIRNIADLKDIKKEFNWWFNEYYKTQRRWITDNLGSNIADQLFKFLTAQYSNFFANYENFFKHKMEGRPSFPSLPELFQIRDRGVEVDFDKKILIIKLKGKQLRLKFQSDRLLYQGDPGSVTIKKVDGKFYAYIPFDFNPKIEEGKKAAIDIGLVNFLATVTEDGDVILVKAKQYTYTYSKYKDRIKELDRMIGNIRKHTLKMYVYPPKSFTYYHFLGFTNDRRIRKIIISLYTSRYDDKRGKKKKLTREDMTNIVKEIHKVNYRLRVRRLNFMKTIGHIKLFPKKSRYMNDVFQDLPILHKLEYERRKLYEKRDRTLRHIRRTAINALLRILKQRGVTHIVVGYPRYINKNRNELTVNLFQYRKTINDLKIIGQRYGMKVEELEEYGTSITCSICGQEHKSGRIERGLYKCEKTGKTINADVNGALNIFYKAFSKMPKQLKKTETIKLTFTPLQRNVTLSPLYYRKL

SEQ ID NO: 20366 - protein, 335 aa, unknown
  TnpB Polypeptide
MPRYWKRNGRRELSIIVRNDCYSVGDEYLYLPKRLKLRYKGELKWNGKQGRLEIVYDEVDDVWRGFMTVKVEKPPPKGGKKPLYIDLGVINLTTTWFEGLKQPIAFSGRTVLSDWWYWTARISKEQSKLARTNGTKTSKKLRKLYRIRQKRFRHAVNAMVKRIVEGAHQLGISKIVLGRLKGIRNNNQNGKANAMINNFWSFNYIVKRFKERAEEYGIKVEEKSEYGTSSECPFCHSKGTRRHRGLFYCGKCDIAMNADVVGALNIARNDGTIIPSPSWGRDNWVVAHPLLLTWDGMRWKPRRAVKNRSMNTPEARISRLQPWRVSNAFEIPTKP

SEQ ID NO: 20367 - protein, 391 aa, unknown
  TnpB Polypeptide
MRRTFRYVLRPTARQSAALAAMLDDHRELYNAALQERRDAWRMRQVSVCYGEQSAQLRDIRRADPDGQGRWSFSSQQATLRRLGRAFDAFFRRVQAGRTPGFPRFKGAGWFDTVEWPSDRDGCRWDSTAGEHRLYLQSVGHIRVHQHREVRGRVKTISVKRDNQRWYVLLSCDDVPPEPLERTGSVVGIDLGVKSFLTTSDGVHVPNPRHLEHCASRLAAAQRALARRRRGSTRRQKARAQVAGLHGKVRRQRLDHAHKVALDLVRRHDVICHEALRIGNMSRSARGTMAKPGRNVPSKAGLNRSILDAGWGVFLRILASKAESADRELIAVDPRNTSITCPDCGHAVAENRVTQAKFQCVRCAHEAHADIVGALNVLRTGLVRRAAATAA

SEQ ID NO: 20368 - protein, 403 aa, unknown
  TnpB Polypeptide
MSRYRLLPTPAQQAVLRDHCGHARYVWNLAVEQHSHWHPGRQGAPGYLEQARQLTQARAEHPWLAAGSQTVQQQALRDFAQAMTAFFDPANPAGRPSWRKAGRDEGFRIVGRGQQWDVRRLSRKTGEVWVPKAGWVRFRWSRAVPAGAKSYRVTMDRAGRWHVAFAVIPDPLPAPGNGQAVGIDRGVAVSAALSTGELLHAPALTARERTRLRRLQRTLARAKRGSNRRSRVRHAIARLKARESDRRKDWAEKVSTDIARRFDVIRVEDLQITNMTRSARGTRADPGRNVRQKAGLNRGILGSGWGLLVRRLQDKAPGRVEKIKPHYTSQRCSACGQVDRDSRESQAVFRCTACGFAGHADVNAAINIAAGHPTHLPIPLHWRGGDGATRPVNREPHLLLQSA

SEQ ID NO: 20369 - protein, 401 aa, unknown
  TnpB Polypeptide
MVVMKSAYKFRAYPSKEQKTILNHQMLLSKQLYNLLLERSKEHFKDTGKTFTKYDMNKWIAKFKKEHPEYNEVYSQVLQNVADRLSKAYKNFFRRVNEKRSGKKQKIGFPRFKSFVSSLTYPQSGFKIERKRIDLSRIGRINFVNHRDIEGEIKTLSIKKTKSGEWYITIAVEKEDVIPFTNGKGMVGIDLGISKYATLSDGSIYQNKGISKAERNSLRRLQKTISRRIKGSSNRRKAVRRFARYSEHISRIREDYLHKLSYNLVHSYSFIAYEELKIANMVRNHHLAKSISESSWGNFTQMLQYKAESAGCVAVGVNPQYTSMTCSECGNVQDMPLGKRIFNCESCKMSKDRDLNASINILKRATAGHAGSHASGDFASTPQKEDASRIVESGTITSVVS

SEQ ID NO: 20370 - protein, 338 aa, unknown
  TnpB Polypeptide
MWINYHPLQWVVVDYTYPAYYKKNLFRNFDPIRQTIELKVFKNGDWVFEVYQLKTSDCTYYQTHLIGKKQNVPIIQKKGRRFYATFSYEENVPLVPEESISKICAVDLGLGTDATCCIMDQDGTVYARKFISFSEEHDRLHTQLGRIKRNQKRGSRHNKTLWRKVSGISQDIADKTVKAILDFGNEHGVDVFVLEYLDFKGKNIVKRAHFWRYKRIYKVLAQRAHQYGLRIARVNARYTSRLAFDGSGWSKRGREITPETPYALMEFPTGKTYNADLNASYNIGARYFIRHLLKTVTETQRLALEAKVPQVAKRSTCTLSDLINLRSEFVALASKTQA

SEQ ID NO: 20371 - protein, 411 aa, Okeania sp.
MKLVERHVITKSHYLWSACDHKAFLSKNLFNLANYHYRQHFFENKKKLNFNELDHKVSKSDDYQALPTKVSKQIIRRLDSAWSSYFSALKAWQKQPKKFLGKPKIPKYKHKTKGRNILPYPNESIYKKTLKKGICHLSMSEIKIPTSQTEIIEARIIPKSSCYIIEIVYEKSEETTENKQIAGVDLGVNNLIAVTTNQTGTSPLLIKGRPLKAINTFYNKQRSFLQSQLKTNQNKSNSHRLKKLTHKRNCRVENYLHTASKRVIDWCVNHKIGVLIIGHNQSWKQEIKLGKKNNQQFVNIPHYKLIEMLRYKAQLRGIKVIITEESYTSQSSCLDGDDLPKYGENKPKFSGKRVTRGLYKTRKNKLLNADVNGSLNIIKKVIPDVFDQGIKGLPFNPVVLDPLRMTKISGF

SEQ ID NO: 20372 - protein, 438 aa, Bacillus sp.
  misc_feature (188)..(221): Xaa can be any naturally occurring amino acid
MLINKAYKFRIYPNKAQATLINKTIGCSRFVFNHFLSLWDHAYKETGKGLTYGTCSAKLPAMKKEFVWLKAVDSIAIQSSVRNLADAYTRFFKKQNSAPRFKSKKNNVQSYTTKQTNENIAVVGNKMKLPKLGLVRFAKSREVKGRILNATVRRNPSGRYFVSLLVETEVQELPKTNSYIGMDVGLKXXXXXXXXXXXXXXXXXXXXXXXXXXXXXXXXXXSGRYFVSLLVETEVQELPKTNSYIGMDVGLKDFAILSDGTTYKNPKFFRSLEEKLAKAQRVLSRRMKGSSRWNKQRVKVARIHEYMTNARKDYLDKVSTEIIKNHDVIGIEDLQVSNMLKNHKLAKAISEVSWSQFRTMLEYKAKWYGKQVIVVSKTFASSQLCSCCGHQNKDVKNLNLRKWECPSCLTHHDRDINASINLKNEAIRLLTARTAGLA

SEQ ID NO: 20373 - protein, 478 aa, Moorea sp.
MYKTIPVKAVFNDEEKAFWLFQCENANSLWNCAIYYSKQKHYSWLEQQVEAYTTYWKEDVLRYGWRTYKCGVKYAELCKELKENPHYKAMAAQSAQQTLKSVAESITSYNQLVGLYYKGQVDRPRLLRYRKKGGLAAVTFPRQALTYKEGLFYPSISKESKSELLTEIALEAPYFFDPDWVKEVTIRPYLGQLWIHWVIDDEKQPIEDNPNLDYSQAWSFDHGGDNWLTGVSTHGKSLILDGRKLKSMNQGYARLVAKYKTGKPEFYWDTNLDRVQRNRNNQMRDAVNKAARFIINRCLNDRIGNIVIGWNERQKDSINIGRRGNQNFVVIPTKRLIKRLEQICPEYGIKLTVTEESYTSKASYLDEDPLPKHGEKPSGWQPSGKRVRRGLYKTKEGYLVNADCNGAGNITRKVAKQLGLDLTKMGRGALTLPHRYDIFNSLKKSYRMSCVREASHGKTAATSHPHRIPRVSTGGDVN

SEQ ID NO: 20374 - protein, 297 aa, Moorea sp.
MIIIEFKAYGNPHQYLAIDEAIRTVKFIRNSCIRLWIDNKGTGKYDLSKYSKVLAKEFSFANELNSTARQAAAERAWSSISRFFENCKKKVPGKKGFPKFQNHCRSVEYKQSGWKLSPDKKSFAKRRLCRITFSDKKGIGKLKLKGTWDLWRFDKNQIKRVRIVKRADGYYIQFCVSVDVKEQLEPADATLGLDVGLKELYTDSRGNTEPNPRFYRAGEKRLKFYQRRVYRKKKGSSNRKKAINKLARQHLKISRQREEHAKRLVRSYRKKSAAFIVGRLCIKGGRFCCKAVGQARQ

SEQ ID NO: 20375 - protein, 358 aa, Caryophanon sp.
MGQTIMINIKLLPTKEQATILEEMSKSYITAINELVAEMVHAKQLLKKTSKNVFVPLPSAVKNQLIQDAKSVFNKAKKTNYHCIPVLKKPLCVWNNQNYSFDFTHISLPIMVNGKAKKTPIRALLVDRENRNFTLLNHKLGTLRITKKNHKWIAQISVTIPTIQKAGMRIMGVDLGLKVPAVAVTDDEHVRFFGNGRQNKYMKRKFRSKRKELGQKKKLKAIRTLNNKEQRWMKDQDHKVSRAIVEFAKEQKISVIRLEKLANIRQTARTSRKNEKNLHTWSFYRLANFIEYKANLVGIKVEYVNPAYTSQTCPQCGEKNKAQDRNYKCKCGFKKHRDLVGAMNIRYAPVVDGNSPSA

SEQ ID NO: 20376 - protein, 366 aa, Eubacteriaceae sp.
MRKGIKFRIYPNREQRNLINKTFGCCRLIYNRGLAMRNEAYENGKKIGYSQTSAMLTELKKSEDFVFLKVVDSIALQQSLRDLDRSFVNFFQKRAAHPIFKSKHNRHQSYRTINQRENIRIVGRYIKLPKLGLVKIRQSMEVEKINNVTIEKTPTGKYFAVLNVEFEPELRENHGGVIGIDVGIKEFYSDSNGNVQPNPKYLERSMRKLVREQRKFSRKQKGSNNRNKQRVKIALIHEKITNQRNDFLQKQSTMLIRENQTICIEELKVRNMMCNHKLAQHIVSASWSKFFDMLVYKSVWYGNEIVKVPTMYPSSQTCSCCGYKNPLIKNLAIRVWECPNCHTAHNRDTNASINILKKGLQMQSTR

SEQ ID NO: 20377 - protein, 246 aa, Halogeometricum sp.
  misc_feature (215)..(218): Xaa can be any naturally occurring amino acid
SDDGNNPPGYRKCGDDHPRSTVTWKQKGIKHDDKHGQLRLSKGFNLKVGRSDFILAEYETRPDVQVENIQQVRGVWNGDEWVLHLVCKVEIPVETAPGDNTAGIDLGISNYLAIDYEDGANELYPGNVLKEDKHYFTREEYQTEGENGPSKRARKARQRLSRRKDHFLHTLSKHIVERCVEEGVEKIAVGDLSDIREDENGDSRNWGASGNKKLXXXXRRVSTSVSATTSPSTTKTAPRSCIRGTC

SEQ ID NO: 20378 - protein, 457 aa, Frankia sp.
VSTVLQAYRYALDPTPAQLVALGRHAGAARFAFNWGLARVKAAMDQRAAEATYGVPEAERTPVPWTMPTLRRQWNDAKGEVASWWPECSKETYSAGLDQLACGLKAFSDSRKGRRKGRRVGFPRFKKRGKARDSFRYTTGAYGPDGDRHVKLPRIGRVKVHEPMGALIGRLDAGTARLRGATVSRTAGRWFVSFTVQVARDLPDAPSRRQRKGGTVGVDLGVRCLAVLSTGERVPNPKHLDAALGRLRRASRAYARSKPGSVGRRKRAAWLARIHARVAGQRRDGLHKLTTRLATSHDVVVVEDLHVAGMVRNRRLARGVSDTGMAEVRRQLTYKTTWYGSRLIVADRWYPSSKTCSGCGWRNPSLTLSDRTFVCQDCALVIDRDYNASLNLRRFATGAGVAGDPGAYAPNARGADRKTPPAGRVAVKREPRTARAGKTGTAARRQAAAELMIAHDH

SEQ ID NO: 20379 - protein, 390 aa, Lentibacillus sp.
MLIKKAYKFRIYPNPKQMELINKTIGCSRFVYNYFVGKQKGKDTYWHIVNEMVQSGQFSQNNWKGEFFHKNKAIKALTELKQNYPFLKEVDSIALQKSVEMVNDSYTRYYKKQNGEPRFKSKKNPVQSYTTKFVNGNIQILDKKIKLPKLGFVRFAKSREVKGRIMNATIRRNPSGKYFISILAETEVEHLEKTDSKVGIDVGLKDFATLSDGTIYGNPNFLRALEEKLAKAQRILSRRQIGSSNWNKQKIKVARLHEKIANARKDMLDKISTEVVKNHDVIGLEDLSVKNMLKNHHLAKAISEVSWSQFRTMLEYKAKWYGKQVVTVAKNFPSSQLCSNCGHKNKDVKNLALREWNCEKCDSHHQRDINASINLRNEALRLTAGTAGIA

SEQ ID NO: 20380 - protein, 319 aa, unknown
  TnpB Polypeptide
  misc_feature (178)..(181): Xaa can be any naturally occurring amino acid
LLKSYKTEIKPTTEQIQIINKTIGTCRFVYNFYLAHNKETYEKEKKFVSGMDFSKWLNNTYIQEYPEYSWIKKVSSKSVKQSIMNADKAFKRFFKRQSKFPNFKKKGKSDVKMYFVKTDAKVIISCERHRIKVPTLGWVRMKEKGYLPTNPNTHIIKSGTVSCKAGRYYISVLVEEQXXXXIQKQIAKVQKLHQIINNIRTDYINKSVNEIVKTKPSYVTIEDLNISGMMKNRHLSKAIASQKFYEFRTKLEEKCKAMGIELRIADRWYPSSKLCHECGCVKSDLKLSDREYICECGYHADRDFNASLNLRDVKTYKVA

SEQ ID NO: 20381 - protein, 395 aa, unknown
  TnpB Polypeptide
MYLTKRIRLLPTAEQEKLFWKSAGVARWSYNFFLSYNQEKYNEYLKDNTKEKFITEGDVRKYINNVLKKSTHTWLQEVSSTVMKQGVKDANIALQRYFNKISGYPKYKSRRKSKPSFYVNYYSLKRTINGFQGEKLGIIKTREPLPKIPKDQKYVNPRITYDGKFWFLSVGYKVKPKQVKLTDEKIGVDLGLKDLAIMSNKDNSYSKKYKNINKGYKIKLLKKRLKRAQRKLSRKILNNIESYDENRRPKYIRPLEDCRNIQKQIHIIQNLYKKLTNIRNNYIHQVTTEIVKTKPSKIVLENLNIFGMMKNKNLAKSIADSKWFKFRQQILYKSELYGIKVILADRFYPSSKTCSSCGSYKKDLRLRDRTYKCNECGLIIDRDINAAINLANYQI

SEQ ID NO: 20382 - protein, 394 aa, unknown
  TnpB Polypeptide
MPRYRLVPTATQEAVLRDHCAHARFVWNLAVEQQSWWRPGRASAPGYLEQCRQLTGARAGYPWLAAGSQMVQQQALRDFAQAMANYFGGTHDRPSWRKAGRDEGFRVVAVKPEHVRRLSRRTGEVWIPKAGWVRFRWSRVVPAGVKSYRVTMDRAGRWHVAFAAVPAPIPGPGNGEVVGIDRGVAVSAALSTGELLHTSGLTARERGRLLRLERKLARARRGSERRRRVKLTIARLKARETDRRKDWAEKASTDIARRFDIIRVEDLKIGNMTRSAKGTRGNPGRNVRAKAGLNREIMRSGWGLLALRLEDKAPGRVEKIPAAYTSQTCSGCGHRHPESRESQSRFRCRACGLTVNADVNAARNIAAGHAVTARGGDGVARPVNREPQLLLQSA

SEQ ID NO: 20383 - protein, 376 aa, Bacteroidetes sp.
MPEGPGSGEEDPLGDRSSQGVEPLEAGACPLVGGGLQVCAAEALRDLARAFHNWKAGRAKFPRFKRKKSFDDNKARFTGAIRVFARHIQLPRIGKVRSKEKTDRLLTLLSAGKARILSVTISREADRWYVSVACEVERPDPEPKEVGSEHDVVGIDLGLSAFAVLSDGTRIEAPRPLGKALRLLRRRSKALSRKQNGSNNYRKATLRLARLHRRVRNIRRDFLHKVTTELARTKPVLVIEDLNVRGLIRGRLSRSVADMGWSEFRRLLEYKCRWYGSRLIVVDRFFPSTQTCAQCGTAGRKLPLFERTFRCEQCGLELDRDLNAALNLWRCGLATLNGPTASSAGSDACGDSSGGGTVLWDGATSHGSRKQEEVRE

SEQ ID NO: 20384 - protein, 411 aa, Giesbergeria sp.
MLMAHRIALEPNNAQATYLARAAGVARFAYNWALAQWTQQYEACKLDASLPKPSQAALRRQLNAIKREQFPWMLEVTKNAPQMAIIQLGDAFKNFFAGRAKYPQFRKKGRYERFSLSNDQFSIDGCRIRIPHLGWVRMREALRFSGKILSATVSRVADRWFVSIAVDTPDNAHLPKAENQGAVGVDLGISALATLSTGESIAGPKPHKALLGRLQRLSRSLSRKQKGSSNRNKARAKLAKLHARIANIRSDALHQLTTSLTRRFHIIGIEDLNVRGMVKNRCLARSISDMGFFEFRRQLHYKAAMRGGQVVVADRWFASSKTCSACGHKLESLPLSVRQWKCPECGANHDRDVNAAINLKQVAESSAGDCQRMQSMAVCSVTACGEEGAGLGCKTQAKPASVKQEVIGRFN

SEQ ID NO: 20385 - protein, 387 aa, unknown
  TnpB Polypeptide
MIRAHKIRLNPTPAQVNYFAKAAGTSRFVWNWALAEWQRQYAAGEKPTAFKLKKQFNEIRRQQYPWTWEVTKNASDQPFLDLGKAFAAFFEGKAHRPKFKSKKKNKPSFYLANDQLELGDHRIWIPKLGWVNMAENLRFKGKITGARVTRTAEWWFVSITVEVPDEKASPRTSAVGIDVGLNRLATLSTSEGFENQAFLKTTLKKLRAANKRLHRRVKGSKNREKARKEVARLHYRITRLRDDVLQKLTSRLAACYGIVGVEDLNLKGLLKNRKLARAFSDAALGKLLNLLTSKVEQRGGQVIKVGRFFPSSKTCHACGWKWEDMELSDRVFLCQNESCAYYQFAQDRDHNAAHNILREALHLIGLLDQVVSGTGSDADVNSAVDLT

SEQ ID NO: 20386 - protein, 250 aa, unknown
  TnpB Polypeptide
MARRVKAIRATVSMKIALSEPLLVLVNNYVKAIRFTLFWLKENVPNPEEKGVLGKVHEELYEKLREEYNLPSKVAEDCYRDALSIYKGWYNSPKKGRFPRVYKPTVWLTPKASYNVDFERMNVRIASVGELLILGYPRNLKEYMSWRMREARLVIKDGKAFLKVVFEKPLDNVEPKESIAVDINMAEVVVGKDDKHYVRISTRLDEVHHWKSLAENLQGKYPRRWRENKRILHRIYSFHQKAKRIYGGLC

SEQ ID NO: 20387 - protein, 381 aa, unknown
  TnpB Polypeptide
VVTVQKGIRVRLYPTEEQEVLINKIIGCCRFVSNHTLEVCKNSYEQTGHFIPKNKRITNLVPLKEENEFLKEVDSTALQQSVRDLNSGMNNFFKNRSHFGFPKFKSKHDLKQSYRTPYNGGKADVLDNKHLKLPKLGRVKTKRFDMPEVYKIFNITVERTNTNKYYASICIETEVQPLPKTGKQVGFDLGLIDLFIGSDGTRYERPKFSYAFKDKLAKEQRKLSKMRTKLERANLNLDECKNYQKQKHKVAKLHEHIANCAKDFNHKLSRKLVEEYDFLAFEDLNIEGMKKNHKLAYSISDVRWSQLLNFIRYKCLWHDKKFIQVDRFYASSKICSCCGTCHKDIVNSLKVREWICPDCGTHHDRDVNAAKNILNQALRVA

SEQ ID NO: 20388 - protein, 243 aa, Halorientalis sp.
LASEEAALDVGANNLVACTTTTGQQYLYEGRDLFARFRETTEEIARLQSKLREGRYSSHRIRRLYRKRTRRRDHAQDALVRDLMERLYAEGVATVYVGDLTDVLSTHWCAEVNEKTHQFWAFRAFIERLSHTAEEYGITVEVRSEANTTRTCPVCGEQDDTDRDGDVFRCLCGHEAHADLCASRTFLEQQAGKEVGSMARPVRLKWDDHCWSEMPHSPERASPNEERTTRSTGNGKLASVGAA

SEQ ID NO: 20389 - protein, 377 aa, unknown
  TnpB Polypeptide
MSKGSNIHNKAIKYRIYPTEEQKVLLAKTFGCCRFIWNIMLNDKNEYYKANKSMLKNTPAQYKEKYPFLCEVDSLALANVQINLQNTFTRFFNKLCSYPNFKSKHMSKKSYTTNLVGNNIAVGDNYIKLPKLKRVKAKIHRTAPIDWKIKSVTISLSGSNRYYVSILYEYEETVVPITISEDKVLGLDYSTPNLYVDNNGNSPTSKLKYFKLSAEKLVKEQRKLSKKVIGSKNWIKQKQKVNKIHCKIANQRNDSLHKISTAITKQYDAIVIEDISIKEQIKSRKYKNYRKSTLDNGWYNFTTMLDYKLKEKGKKLIKLDKYYPSSQICNCCGNINTAINNDSIRKWICPSCGTFHNRDINAAINIKSEGLKILGIA

SEQ ID NO: 20390 - protein, 320 aa, Planktothrix sp.
MILYPKTQKPSELGSHLCENRVDRCSIKFEPIGDIPERPNYHRQSGELKQTKVLFPEYKDIYAQVQQQNLMRLDKAWQRWMVPDKTGKPGGRPRFKKSGGLRSFTFPQTNSEKAGAHIIGDNLKLSKIGVMPVVVHRPIPDGFTPKTCTLIKKADGWYASIVIEDASVPSPLSLDTHYQVAHKLCEKYDLIGLEDINIKGLAKTRLAKSILDAAWGQFSQILEAVAVKRGNWIVKVNPYGTSQRCSGCGKNVPKALSVRTHECPHCGTVLDRDHNAAINIKNLALNAVGLTVSACGSKRGYSACEAGIFICEEKKLTLYR

SEQ ID NO: 20391 - protein, 390 aa, unknown
  TnpB Polypeptide
MIRTYKYYLYPHRREKRLFEYLLAMSCNVYNMALEQRIKTYKETGSGITYNMQWAYFRELRHLDPDGIGMLNAGCMQQTLRRLDKAFKAFFRRVKTGGAPGFPRFKSKNRWKSIEFTYGDGCKLRFDDSGRALLYIQNVGEIKIKYHRDIPGDAKIKHVILKRWLGKWYVFFQVEMPECDIVAHGGPGIGIDMGIKSLLALSDGTLIDNPKWLRESLGDLRVAQRMVSRRKRGSSRRRKAALQVAKIHDRIANQRHDFWHKTTRALANTYSFIAIEDLNLNFMIRNHHLALSASDAGLGIFRQLLTYKVEETGSSLVAVNPAYSSQMCSRCNEIVKKDLSIRVHKCPYCGLMLDRDVNAAINILKSARTGRSCANVARSNSERSTRSSLL

SEQ ID NO: 20392 - protein, 394 aa, unknown
  TnpB Polypeptide
MIRTQKYRLYPHARQSRKMHYLLTLSRNVYNAALEQRIKTYQETGSGITYVSQSKYFGNLRRADPDGLGLLNFTCMQQTLRRLDKAYKAFFRRAKAGEEEPGFPRFKSSNRWHSFEFTHGDGCKLKFDDDGRALLYIQNIGEIKIKYHREIPFGAKIKHVVVIRKLGKWYVLFQIELPETEIAKHSGPEIGIDVGLHSLLALSNGTFVGNPRWLRSSLTELRVAQRRVARRKKGSSGKRAARYQVAKLHDHIANQRRDFWHKTTRNLADTYSLIAIEDLNLSFMTHNHHLALSSHDAGLGLFRQMLESKVEETGSLVIAVPPAYTSQRCSGCGEIVKKDLSVRVHDCPYCGLVLDRDHNAAINILDLAIRPARTGPSGLNVGDGAKRVLGSSLL

SEQ ID NO: 20393 - protein, 422 aa, unknown
  TnpB Polypeptide
MCYAASKLWNLCNYEKYNWKELGLEEFPNWYYQKKKWKNNFWYKILPSQTAQEVCKSLDQSWKSYTSLKKTGGIRNPQPPNNKKIPMPITYMQNGMKHNEEEIRLSLPITLKQMVKEADGFDKTFLFLRHKALSQVSNIKQLMIFPPQNGKCDAVLNYEIEEPKLFPDNGKYLAIDLGIHNLATCFDSANDKTFIVGREYLAICHYFHKEIAKAQSALAKKSISQDYILDGNGVYLDQGNTVAVSVESRYLAKQSQYTSKRLKNLYKKRNNSIQDYLHKLTKFITNYCVKNEINTVIMGDLTGIKNRITNRDKKYNQKLHELPYERIRILLKYKLACKGINFVLQNECYTSQCAPNAPSVERKYANKSNRVQRGLYVSEGNIYNADAVGAYNILRKYCDEHGIKKTFSIKGLTSVKVFKIKR

SEQ ID NO: 20394 - protein, 302 aa, Bacillus sp.
VDSIAIQSSVRNLADAYTRFFKKQTIAPRFKSKKNNVQSYTTKQTNENIAVVGNKIKLPKLGLVRFAKSREVQGRILNATVRRNPSGRYFVSLLVETEVQELPKTHSYIGIDVGLKDFAILSDGTPYENPKFFRSLEDKLAKAQRVLSRRMKGSSRWNKQRVKVARIHEYISNARKDYLDKISTEIIKSHDVIGIEDLQVSNMLKNHKLAKAISEVSWSQFRTMLEYKAKWYGKQVIVVSKTFASSQLCSCCGYQNKDVKNLNLRKWDCPSCRTHHDRDINASINLKNEAIRLLTARTAGLA

SEQ ID NO: 20395 - protein, 380 aa, Acinetobacter sp.
MNNPFLKAYKYRIYPNREQQVLIEKHFGCARFTFNWALALQQNYYEKYKKSLSRKEIQDQLVSLKKIPEFEWLNKVNSQSLLSSLLHVYTAFGNFFKGRAKFPKFKSKKIPQRSYQCPQHCTVSFTSGVLNLPKIKGIKTVFSRQFDGKIKTVTISKTATGKYYASILVETEVNLPVPSIIEVEKTIGIDLGLTHMLIQSDGDKVENPRYLKKAQKRLVIQQKIFSRKKKEAKNYRRQKLRVARVHEKVRNQRLDLHHKLTHKLICENQATTYAVEDLGIKSMVKNRKLAKSISDIAWGQFLTLLQYKAEWYGKNILRIGRFVPSSKVCAQCGYTMEKLPLHIRSWSCPDCLSVLDRDLNASMNIRNFALADVLGQFSTV

SEQ ID NO: 20396 - protein, 364 aa, unknown
  TnpB Polypeptide
MFKRTYRYRLYPTTPQAGALETQLGEACRLYNAALQERRDAYQKSEVSLNYYDQANQLKDIRAAGDLGLANFSASQDVLRRVDKTFKAFFRRVKAGLKAGYPRFKSRRRFDSYTFPSYGDGCRLTGTRLYLQGVGHIKVKLHRPVDGAIKTLTVKRECGKWYACFSVEVAAEALPVTNTQVGLDVGLTDFVTLSTGEAIANPRHYRTGQGQLRIAQRRVARRQRGGRNRRKAVVFLQKAHAHVQNQRADFHHKTARTLVDAYGVIAVEDLNIKGLASGMLAKSVNDAGWSGFFSKLAYKAAEAGRTLIPVDPRGTSQTCLCGAEVRKTLAQRWHQCPDCGLSAARDHVSAQLILGLGLSLLGLT

SEQ ID NO: 20397 - protein, 372 aa, unknown
  TnpB Polypeptide
MDLEDIKSKSKKIRIYPNQNQKSIFKNWFGAARFSFNQAIAYLKNPETKANWMSIKGELLEALPEWSNKIPYQIKSIAIKDACTSVLNAKKKFAITHEFQDVSYKSRKDTKQSCYIPKSAISELGIYHSKIGELKFTENIPDNWCDSRLTKENGRYYVCIPHKVQLPSICDNQANRVVALDPGVRTFITFFSENSCGKIGEGCFKRIFNLCLKIDKLLSSLSKEKLFFKRCRIKSLIGRTKWKIKDLISELHFKTANFLVKNFDIILLPTFEVSDMVDKSKRKISSRTARNMLSLSHYKFKQIIKFVANNNHKFVIDVNEAYTSKTVSWTGEIIENLNGNRVIKSNFDGQVMDRDYNGARGIFLRALRGDTP

SEQ ID NO: 20398 - protein, 447 aa, Lachnospiraceae sp.
MRTYSCYKVQIHGFNKVFQDTAKVYREAVDWYISLSLKEWDALILMNGSKQQLTYLETISIPTKKHPSVSNNFSKAFYKFPSYLRRAAINEAIGKVSSYMSNLAAWNSLSPVERKGMPSLPKAGYVYPAMYRGNCYVRIDDYTARIKVFIRNTWDWVTVTFRKSDVDYITRHCTGRKECVPTLRRRKKTWYLDFSFEENVESLPKTEVFHTTVLAVDLGIHSACTCCAMLSDGTVIGRRFMRLPQENDCLNRRTNRIRRAQCHGARGCSRLWDLARNAADDIAAKTAAFIIETAVLYNADVIVFEHLGVGGKKRGSRKMRLHLWKARCVQEMVKGKAHRSGIRISRVNAWNTSRLAYDGSGPVKRGRESEKTGGSYSVCEFTSGKIYNCDLNASYNIGARYYIREIIKSLPVKEGQRMQAKVPACVKRSTCTLSTLISLNAELYAAV

SEQ ID NO: 20399 - protein, 313 aa, Khelaifiella sp.
VSSKATKQAIMNGEKAFKKFFDGKASFPKFKKKKNQDVKAYFPKNNKTDWTIERHRVKVPTLGWIRLKEFGYIPVNSIVKSGTVSQKADRYFVSILVEEAINLDNKSYSEGIGVDLGLKNFAICNNGLSKKNINKTKTVKKEEKKLKREQRKLSRKYESLKLRNKKEKGEATRQNIQKQIVKVQKLHQRLTNIRTDYINKTVNELIKQKPSFITIEDLNVSGMMKNRHLAKAVAGQKFYEFRTKLILKAKQNNIEVRIVDRFYPSSKVCSCCGAYKKDLKLSDRVYKCSCGLSIDRDLNASINLANAKEYKIA

SEQ ID NO: 20400 - protein, 476 aa, Nocardia sp.
MSRHTTFRYCLDPTVEQQRALARHAGASRFAFNKSLDFVKTALGQRKTDPGHPVPWTGFSLINAFNGWKKTEAAGRVIAVNEDGVAEIEVTGLAWRDEVSQQVFEEGAVDCGRALTAFSDSRTGKRSGKKVGFPRLKRKHATIPSFRLRNKTSKSGRAGIRVGENGIQRSVTLPCLGTVRVRQDTRHLRRMLGKGRAKILFATVVFRAGRWQISVTTEAAELHSARQHRPPAGDGPWVGVDRGLSAFLVTATLDGSEVTRIDNPPKPLAAGLARQRRLAKSLSRKRKGSRNRKDAAARLARHHHHVANIRRHFLHQVANRLVKTHDRLVIEDLHVAGMLRNHRLARAIGDAGWADFARLLRYKQQWRNGAVVTADRWYPSSKRCSTCGIINHGLTLADRVFVCGCGFRADRDHNAAVNLAAWPLIRHQDSSRSPDPQAGGRVTNARRREGADRHPAGAGETSPEDAGTDGHATTAA

SEQ ID NO: 20401 - protein, 424 aa, Streptomyces sp.
MGRRYRLYPAEEQEEILTRWGHTCRALWNVALEQRRYLWRQRGVTLMGSAQCKQLAIARSELDWMADLPSECGQRVLASLDAAYLNFWNPDHPAGFPARKKRGDRTSIPFKGQYVQVRKLNRHWAEARLPKLGWVRFRLSRALGGAIRNATVSRDGTGWHIAFGIHTGRAPDAPNGRPGCGVDFGVAASAFVSTETTARLMPPTLTPAEQARLTHLERKKARQLSYAKKHNGGRYSNRLRMTMDHIARLRSRQANRRADFTHKLTADLAQNHGFVGIEDLRVKNLTKAAKGTMDAPGRNVAQKAGLNRSILDNAPGERRRQLEYKCRLYGSRLIPVPAVHTSQTCGHPACGMIDPASRPGCGRLFRCVHCGWEDDADHNASVEIEARARRTGGSVTNSTRSAISARVPATRRRRMREALPATCG

SEQ ID NO: 20402 - protein, 401 aa, unknown
  TnpB Polypeptide
MILSERHIISKNDSRYEELSALCHLSKNLYNATLYAVRQHYFETKKYLSYPKINKLFKEQNNVDYRALPAKVSQQTMKLVDKNFKSFFNLLKKKKQCNYSKSVRIPSYLDKDGFFPAIYTVQAISKQSLRENIIKLSQTCIEIKTHVNNPCQVRVVPKLCYIVVEVLYKVSEQALQKNNGRYCAIDIGVNNLAAVSSNVEHPFIINGRPLKSINQYYNKKTSYYKSILKKRNEKNTSNRLKSLVNKRNKKIDDYLHKASRLLVNQLANRSITTLVIGRNKDWKQDINIGSVNNQNFVQIPFYKFIRQLTYKCKLIGINVVETEESYTSKCSFLDNEDVCKHEVYKGKRIKRGLFRSSTGQLINADINGSLNILRKVVRNVPNGTNLIEACSTPSVFTVKLN

SEQ ID NO: 20403 - protein, 356 aa, unknown
  TnpB Polypeptide
MLKAYKFRLYPNKKQQEYFAKCFGCVRFIYNKMLEDKINYYKETGQMLHNTPAQYKEQFPFLKEVDSLALANAQLDLEQAYKNFFRDKSIGFPKFKRKKDKQSYTTNNQNGTIYIENGYIKLPKLKSRVKIKQHRQFTGKIKSCTISKTTTNKYYISILVEEEIKPLPKTDKKVGIDLGIKDFAVTNNGEVFENPKWLRKTEKRLRKLNKDLSRKKLGSKNWEKTRLLLAKTYEKLANQRRDYLHKLSSKIINENQVIVLEDLKVKNMLKNHHLAKSISEVSWYEFRQMLEYKAKWYGREIIIAPKNFASSQICSECGYKNSDVKDLALRVWECPNCGAIHDRDVNAAKNLLKLAM

SEQ ID NO: 20404 - protein, 541 aa, unknown
  TnpB Polypeptide
MPPQTTTNETRKPLRRAVAVELEVTRELNRLLYSVETTYLNIVREVVEYAVANNVTGANKLHGLFYRRYRLEYPSLNSQLIIQAIRQAVQIAKSFVERRKRGLADKPYPEVKNVSIKFVETTWSYEQFIKSIAPVRIAISPISTGKRGRGSRRFEAWLRPHRRFWRYWWLVLNKEAGLASTLTIKRKANKWYAVFVFELKPRQETPQAIVSFDVNENTIAVAKVDLPSTVGKVADWNRQYLMPQLYTIRTDFGALAKRYERVRNAIIERLKPGFASLNGKYVNITNTREYRKQVRKLREGDRKLGRVRCVASELTKTSALIVTEELGNNPQEEMIDGIGKDELRHRIKQTPFKALEKAVEDKALERGSKIFHVSAYRNSRVCPIHFTRLEKTDDWHTLYCPLGHYVDRDYASVMNMAWKITPESWTKCVWWNMKLEMNWREYGKSNPLIPYFMAKILHTTLRTFTASEQSPAVLARGKPMNPTGEADEGGGEETSHTLSRQGGGQTHITCELTRHAIERLELRAYELRNSGICQDDSSTRF

SEQ ID NO: 20405 - protein, 376 aa, Bacillus sp.
MEVMTMLLNQKYEIYPTGEQKQLLDRWLQYCRQTYNSALLDKQRKYHQSKESYTREDMQKQLKLDKKKYPFLKEVPSQPLQEVFLRLKKAFDSFFRKDTKYPKLKTYKDYNSMTFPQFGFNNKGHRYAMSFTDSGKLYNKKLGEISILLHRPLEGTIKQLILKRQGEKWYAIFCVERQALPLSIDQTNAIGIDVGLNKYVVLSNGLEYENPRFLRKKEKQLKKAQCKLSKRKKGSANYIKQVQLVRKLHEKVANQRRDFLHKLSYNFSKSYSVITVENLNIRNMVRNRKLSKSISDAGWGVFRNMLAYKCEKYGGAFIKVEPHYTSQDCSSCGERVKKSLSIRTHICTKCTTVLDRDYNASLNILKKGLEQLLVTN

SEQ ID NO: 20406 - protein, 393 aa, unknown
  TnpB Polypeptide
MTTTTNTYTRQDNPTSSYFHLPILLHPDQTAMDLLQHTQDTYRDACLDIVKFFEERNIDIAVFEKQYWEYRNKGKIHSEEDKSINQVKRISHQISYRLNQRFKLRIKYGQYPLATVMSAYRQAKNQHKEFNLEHSRHLSVRLIPGRSYDIHFQADNDADSFTCVLRIGKKVTVKFSLPAGIPLPPSSWKSKMAFLEYKHGTWMMRIAFRKPEITSFEQVSRIVGVDRGIINIATTYTPGNAKRYSRKEYLLDCGSSSPQDKGAQALAANIKIAREIVSQEPAGTVFVLEDLTFKDEERPNNWPYRHLEDMLTYFAALSGQWIYTCSPHDTSITCPVCGHVERANRLQNEHRFICQNCGYGADTIVDDDENAARNIYERGKANLRKEFGNTLST

SEQ ID NO: 20407 - protein, 585 aa, Streptomyces sp.
MAERSASGLRVLAPPRLVAPTGALSVRTRLRLSGRDAVVLRELAEYLSGLAARDLAERVALGTRHTAADFARRKRELSALTSSRWAGTITRGSNEQWQLARRAQAAHLASLTTEIESIERRLAIPTGGRDAESRVKGYATRRVRAAKQQRLHGLRARTARVAADAAAGWVHVVRGGKDLLRQRLHLDRSGRSLQDWQDRWWEARNRIEADGEAGKTYGNQTLRVGPDGVVVVKLPAVIAERHREQCDRFGRYTLDARCRFAYRDAEWRLQVEAHRAVGYTIRFDAGRCHLTASFTRVIAPLPVGGDDDARLVAALAGGVLGIDQNVDHLAFWRLDPHGNPVGRPGRVDMNAEGATSRRDALVRHACSTLIRAARSCGATALVVEDLGFVTGREQCGWSGRSGRRFRAQVAGLPHARFTSRLVVMAHRAGLAVIVVDPAYTSRWGAEHWQRSTSTRRVKTSRHEASAVVIGRRGQGLGARRRAEKSVPRRQTEEVGRSRVELRRPAGTETHRAAAWRFDSGSGRALRIADGPEDGVRDASGRRTVTAVQVAQDRSGRPADDPSGGGVKGRLDALSSSVRIRGAVVR

SEQ ID NO: 20408 - protein, 444 aa, unknown
  TnpB Polypeptide
MSIIRSDRLKIHADSTAQREALADTLALYRRLVRDLMTVALTHWPLVGPIDGNAVVPVIEKLIHATAKRPDVRYRYFQKRYYKFPSYLRRVAINDAVGQVRSYMSLYGDWLDGKRRHAHARPPKLTASTRTFPSLYGGQCIKLSDDGTHAFIKVRYRNDWVWMSFRLSGKCRYRGLGTAKSPLLTFNGKQWGLSLPEQFEPARPARTPTRVLAVDVGINTAATWAVVDTQGTVHARGFLRRSDKDRELRLMQRIRSRSRTQTRHGSRLPAGFCSRDHRRLKRLADNQTHQISRALIKLALANGCEAVVAENLKGWRPKAGRKGSPMKARFHRWFHRMLVDRLQSKAQEAGLRTALIHPRGTSAQAFDGSGPVKRDATHYSLCTFASGKRYHADLNAAYNIAARGLVYFQGNRRKPVARAGQPKSACTPRTPVTLSTLWLTARAA

SEQ ID NO: 20409 - protein, 372 aa, unknown
  TnpB Polypeptide
VDGYSYKFRIYPNAQQKSQINKTFGCCRFVYNYFLDQWQSQYKDTGHSPSRYQQRNDLPMLKKTLLWLKEVDSTALQSAVQNLDKAFQNFFRSIKEGDNRFGYPRFKSKKSYKQSYTSRCVNANIKVLEKAVRLPKLERVKCRISKKVEGRILTATVSRTSSGKYFVSLCCADVEMNLLPTTGAVAGIDMGLKAFAITSDGVEYPNHKYLTRSQKKLAKLQRQLSRKSKGSNRREKARIQVARLHEHVANQRQDMLHKLSTILVRTYDLIAIEDLVPKNMVKNHKLAKAISDASWSEFRRQLEYKAALYGKQVVTVDRFFPSSQLCSACGAQWPGTKDLSVREWTCPKCGAVHDRDVNAAKNILNEGLRLLA

SEQ ID NO: 20410 - protein, 247 aa, unknown
  TnpB Polypeptide
MFLSYLASGEAYQVEILKRNDKYYCHITFDLQKQKPVYTGHNGIIGIDTNPDGFALTMIDNKGNYKWHTYLKQHELLYARSNKRENLCGELVKRVILIAKTYSYGVAIEDLEFKNNKDVHSKFARIKHQFIYSKLLTMLESTCIREGIEIIKVKPQFTSKIGLYKYCHQYGMVVHNGAGMVIARRSYNFKEKVPKILKDKLVKDTNKFNKKNEWSKWNEINKNIKEKVGENPDLWLVNRKKILRLVS

SEQ ID NO: 20411 - protein, 412 aa, Streptomyces sp.
MVIVVQLRYSFRVYPSTGQRIALARAFGCARVVFNDALRVREQARAVGLPFVPSAELSKQLTVAKKTPERAWLGEVSSVVLQQSLRDLDAAYRNFFDGLRGKRPTMGPPRLKSRKDTRQAVRFTANAGWKITTGGKLRLPKVGDVAVKWSRSLPSVPSTVTVVKDSAGRYFASFVVETDPEMLPATDNVVGIDVGLTHFAVLSDGTKIDSPRFLRRAEKKLKKAQRDLSRKAKGSKNRAKARIKVARAHARTADARREFHHQLSTKIIRENQAVAVEDLAVKALARTRMAKSVHDAGWSAFTAMLEYKAALYGRTFHRIGRFEPTSQVCSACGVKDGPKPLSLRVWTCGACGTVLDRDINAAVNIAKAAGLAVSACGARVRPVLVPAQREETGTHPKPQPVTTGRHAGISVL

SEQ ID NO: 20412 - protein, 219 aa, unknown
  TnpB Polypeptide
LPHTTCKSITISRTADSWFIAFAYEQEHEPTLKQHLVVGVDLGIKELATLSTGVVFPNPKHYQTHLAKLKRLSKILARKVKSSKNRYKAKIQLARCHAKVANLRKNTLDQITTYLCKNHATIVVEDLKISGMLSNHKLAQVIADCGFHEFKRQLEYKAKKFGCEVIIADRWFPSSKTCSNCGHIQDMPLKERTYNCLSCGHSMDRDLNAAINLSRLVKA

SEQ ID NO: 20413 - protein, 365 aa, Clostridium sp.
VKELLKAYKYRIYPNSEQKLYLAKTFGCTRFIYNKMLADRIKSYEENKDLDIKKVKYPTPAQYKKEFPWLKEVDSLALANAQINLNKAYKNFFRNKSVGFPKFKSKKSNYYSYTTNNQKGTVYIQDSRIKLPKLKSMIKIKQHREFNGLIKSCTISKTPSGKYYILILVDTEKKQLPKIEKKVGIDVGLKEFAITSDGEFFSNPKWLRKSEKRLAKLQKDLSRKKKGSNNRYKARLKVAKLHEKIANQRKDFLHKISTQLINENQVIVIEDLKIKNMQQNHKLAKAISEVSWFEFRRMLEYKADWYGRTIIVAPSNYASSQLCSNCGYKNKEVKNLGLREWTCPKCGTHHDRDINASKNLLKLAI

SEQ ID NO: 20414 - protein, 367 aa, unknown
  TnpB Polypeptide
MSIKTFKVKHGMNFDEHLEKAYLVAVYALKQRQEQKKSPSTKDVKAIGLKSEISNQILRKYYLNKKLKSVKKSSVKLTVPHQNLKFNKENKNVFITCLKTNLNFWFDPTEIQKINQIEFDKKYAYISCSFPDEPETQEPETWIGIDLNSTSHSIVLANQKTGKVKKYGKQIPHIQQKYKKIRKHLQSKGVFSLHEKLKHRATNKVNDQLHKITKAIVLEAKQTSCGIKLENLKGISKKKTKKHHKESNFTLNSWPFYKFKQLLAYKAILSGVPVIEICPAGTSQNCSRCGIKGNRDRKLFRCEQRNCEHVDHADVNAAFNIALAPKINPVKNEINRRGNKALASPMPLTSPSGESFESKLAAEPHDF

SEQ ID NO: 20415 - protein, 404 aa, Planktothrix sp.
MFNLTYEFKLKPTQSQIATFEEWLEIHRRVYNYALAERKDWYQSRSCRVNACSLRSEYIISADAPRPTFASQCKSLTAARKENEYLKRVNAQSLQQTLRRLEKAFVSMWEQNHGFPRFKKPGRMRSFCFPQLGTNPLSNRYVKLPVIGAVKLHQSRSIPDSGVIKQARVVKRASGWYVMLTVQWDVSVPSPMPHGEAVGIDVGLKSFVATSNGLIVNRPKFFTDAERKLKLLQQRVERKHLGSNNWHKAQKKVAKLHEYVANCRKDWHRKLSHQICNDIGMLFVEDLNLVGLSRGMLGKHCLDAGFGQFFSILEQTCFKHGVYFQKVDSRKTSQICPSCHVETGKKELSERTHVCSDCGYTTDRDVAAAQVVLIRGLAAVGYTVKMLAEGKFAGIPMKQESSCL

SEQ ID NO: 20416 - protein, 297 aa, unknown
  TnpB Polypeptide
VKLPASLPSGKIVAVELGFRELRLTLSQTVAEPVSAGMNVVAADMGIIHLAVMTDGIQSSGVVGRGLRSLVQGKNRRLAIYQTALSKTQKGSRQNRKLRVAKARMLQRYRNQVHNLLHHAANQMLDFCQAREAGTLVVGDITDMPRNKRKQKKGSRRLNQGNSGNPLGQLYGYLAYKGKRRGIELVKQNEAYTSQTCPACGHRHKPAGRVYHCRQCGYVGIRDNVGACNQLNKYQNDGRIIAGNCTPPELVKYRRPVTLRRGVDRLTGGMLLDTTLTADAGSSGPGSHKPLCLRSVA

SEQ ID NO: 20417 - protein, 388 aa, Planococcus sp.
VPILSIKLPLFEPTHAKIHLYEDMRASFSEACNVAIRVKRENPESKASEIDRTLAPIQLPSTLRQEARKLACSRYADWKKHTKTKGFPQFRQKIAIPFNNQNWHLRFDNGFLKLGVPTADEGRLTVEKYVPLKTNAYTLFWVNYLLSGEMDETSNYYNPSINPAIQPKKGSGQLFCKKGTWYFSFALSFEMKGSLTSGKAIGVDRGLKAIAVAGDQTTGEYLLFSGKRIGHVRRKFSNLRRTLMQKKNQKALKRLKNKEQRIIHYWNHVIAKDIVAFAKTQGASIIKIEDLKGIRSMKRYWKRSDRNVNSWAFFDLETKLAYKAELAELVVQKVSPFKTSQECAACGTTLKTNRRGSRYTCSCGYRHNADVNASFVIAARPPISTAVN

SEQ ID NO: 20418 - protein, 393 aa, Lactobacillus sp.
MGVKRMIKTHKIKIYPNATMRKVLTSLFNYRRYCYNLALETWNEMYDASVILDDQSFRPSERKVRDELVANKQDWQYRQSARVLQLAVSDLAKAWQNHFNPKMPNHAKPRYKAKKRSKNVFKTDSAQVVNARLRLDRPCGVQAWYDIRLAEKPRWQGQLKLVTVVEEANGYYACLAIDVPTAVVEKRGQRVTGVDANIARFDYKAADGYQVVNTLPQRLLDLYQRITAYQKQLARKRIANPKHFRSNNYRTTRTKLKRDYQKVTRIQADLLNKFTTKLVSENDVIAIEDLDNLHMKMNKHLAKNLQRSLFGQFKQMMTYKCEWTATKLVLVDRFYPSTQRCSRCGYIKTGDEKIGLNGNRKHHTGHDDYVCYQCGAVMRRDENAIENLIQYAS

SEQ ID NO: 20419 - protein, 477 aa, Salinibacter sp.
MSNTVRKKHIEETDVVRAHRRAAGEVWTQVAWAWHFLNDEYDYYLPKGDAMALFGTAGYTTRVKEAWQDLPFGTPPEDLERNPFVNNAMRKAGVQQRQQVIRRFYEHVNTFFDEHLPRWKENGKDPDNRPRPPYKASRFARTDWVHTRIEKEGDTLRLKTGRGLDEITVDWPHPEPRSVQLVWDKHAGCPMLCPQYDDQKQDLPDGLIRDRLPKGDEVVGVDLGELYLATIYDGEEGVLFNGGRLQELRSLQNSEKAWFDQRIDRKEKGSNRFWKLVNAKKDRLKEIRDRIDDYLHKMSTRLVEECWDREAATIVIGDLTGILDGLDYGAEMNQRLHQWAFRQFAEKVEYKAERYGLEVVFEPERDTSKTCPQCGDKNPTSTRHYRCTSCGFECHRDMVGAMNIRAKYQDPDEWMSGHLEAVRATATASQEAQDTPTGEQLGLFERARSGRKRVTPSVESPVTVDYEPHMTCVLEDP

SEQ ID NO: 20420 - protein, 312 aa, Herbidospora sp.
MGRRVKRTYKYRFYPTSGQAEEFIRTFGCVRLVYNKALDERTRAYRSEGRKVSYADSSAALTAWKRSPELSFLREVSSVPLQQALRHLQPAFANFFDRRAGYPAYKSRKRSRLTAEYTRSAFRWRNGTLTLAKMDAPLAIVWSRPLPDDAQPSTVTVSKDSAGRWFVCILVEEEITPLAPVPATVGVDMGVTTLATLSNGDEIDNPKFERSDARRPARARRALARKSEGSANRAKARSKVARLTARTSDRRRDFLHKLSTRLIRENQVIAVEDLTVRNLVKNRPLARAISDASWRQLREIRARAPRDRSLVA

SEQ ID NO: 20421 - protein, 391 aa, unknown
  TnpB Polypeptide
MERGFKYRIYPNACQREQIARTLGCCRFVYNRALDVKKTAYSETGKSIATNDLIKMIPTWKRDPETSWLAQADSMALQQSIRDLDRAYKNFFRRVREGGKPGFPKFKSRRHARQSYRTNGGKVLDRNHIALPKLGTVRAKVSRPLQGRFMSVTVSLDAAGRYFATFLCTDVPAKDMPATDRKVGIDLGVETLATLSDGTKIGNPRHLKKYERKLAREQRRLSRRKGARRGEKQSTRYLKQRKRVARVHAKITDARTDALHKVTTMLADENQVLCMENLNAKGMVRNHHLAKAVSDASFGEFARLLEYKCAERGRTLVKVGRFYPSSKTCSACGHRLDALSLSVRSWDCPSCGAHHDRDVNAARNILAEGKRILSNTEGPAGHAGTVAAVVA

SEQ ID NO: 20422 - protein, 481 aa, Carboxydothermus sp.
MQTIQTKLVFVSFEDKQEVLDLMRRWSSCVRFAYNRLLEGYDRNTLKRELQKIFNLNSRYVDDAIMKAKSTLEANIELGTNPGKVIFGGRDLFERLRKRHINGKAYEKLKIKWQEKRKGNLYSRGDKSKKGNLNTRIEIDKNGTFLRINAGKRKYVYAKVQAGWKRGKNREELIQAICISGEPYSVELKLKNGSIYANFIVEENFPETKITGEKGVIGIDVNACPSNISWAETDEKGNLINYGEIPMPELESGNSDKREYFRWQYAYEMVKIAEQKGKALVIEKLDLKHKGKRGDFSGRKSRRIRHNFSYKSLLEKIKTLAKRKGIQVIEVNPKNTSITGMLKYAPQFMVTKDVAAAYVIARKGLGLEERIPANYIKLLNTLTVDELEELKEHVKKTVKNQQLKKKHLKEIKKAKKFIQSLESKPERVPRPLDGTSFSARDFWRVLKVAVVTPLSPEKVRRDFSVLKGLLIQGKWGDRMLA

SEQ ID NO: 20423 - protein, 416 aa, Microcystis sp.
MFVLEYKVKPKPNQIEAINEAIRTTQFVRNKVLRYWMDNQGVGKTELFRYNTALRKEFKFVDDLNSHACQTAVERTLRAITRFYDNCQNKVKGKKGYPKFKKHSRSVEYKVSGWKLSKDKRHITFTDKKGIGTLKLIGSRDINYYQPDQIKRVRILNRADGYYVQFCIKLDPRDTVKPLTPSQKATGIDVGLKFFLVDSEGHQIDCPNYYRKAEKQLNRLNKKKSKKYRKGKKQSRNYHKARKRYARKHLRVSRQREEFVKSVALRLVKSNDLIAYEDLNIKGMVKNRHLAKSITDAGWSVFRQWLEYFGDKYGKLTIAVSPHNTSQNCSSCGQKVQKSLSTRTHVCPHCGYTDCRDRNAALNILQKGLSSVGRTQPPPTPPTSGRARGGGEIPSWLVGEILLANGDSMNEESPSL

SEQ ID NO: 20424 - protein, 347 aa, Microcystis sp.
MEKAYSYRFYPTPEQESLLRRTLGCVRLVYNKALHLRTQAWYERQERVGYVQTSSMLTEWKKQEELDFLNEVSCVPLQQGLRHLQTAFTNFFAGRTKYPNFKKKHQGGSAEFTKSAFKFKDKQIYLAKCTEPLAIRWSRQIPESCEPSTVTVRLHPSGRWHISIRFDDPTIKPLPVTDKAIGIDLGISSLVITSDGDKVSNPKHFKKHYRRLRKAQKSLSRKQKGSKNREKAKIKVARIHAQITDSRKDHLHKLTTQLVRENQTIVVENLAVKNMVKNPKLSQAISDVSWGEITRQLAYKCRWYGRNYIEIDRWFPSSKRCSNCGYIALENAVKCSRMGLSRLWDTP

SEQ ID NO: 20425 - protein, 402 aa, Escherichia sp.
VKRLQAFKFQLRPGGQQECEMRRFAGACRFVFNRALARQNENHEAGNKYIPYGKMDSWLVEWKNATETQWLKDSPSQPLQQSLKDLERAYKNFFRKRAAFPRFKKRGQNDAFRYPQGVKLDQENSRIFLPKLGWMRYRNSRQVTGVVKNVTVSQSCGKWYISIQTESEVSTPAHPSASMVGLDAGVAKLATLSDGTVFEPVNSFQKNQKTLARLQRQLSRKVKFSNNWQKQKRKIQRLHSCIANIRRDYLHKVTTAVSKNHAMIVIEDLKVSNMSKSAAGTVSQPGRNVRAKSGLNRSILDQGWYEMHRQLEYKQLWRGGQVLAVPPAYTSQRCAYCGHTAKENRLSQSKFRCQVCGYTANADVNGARNILAAGHAVLACGEMVQSGRPLKQEPTEMIQATA

SEQ ID NO: 20426 - protein, 445 aa, unknown
  TnpB Polypeptide
VTTAILERTATSTTISQAYVYAFDPTPEQVNLLRSHIGGTRFAYNALLGLVKANWDENRQRKEAGEEVSSKDYLGTGHLDLQRLWYERRDVVAPWWAENGSSTYNYACLNLSKAFTNWRRGRAKFPSFKRRGSSGSVSIMSGAVRLVDSHHVRVSRIGDLKTYESTRKLLRHIERGTGKVMAATITERRGKWFIAFSVEVQRVVPATRPYEKVVGIDAGLSTLYTGATPDGEQVLRVANPHHTTFAEKRLAHVQRVASRRQGPKRGVAPSNRWKKANARVQKVHAGVANSRRNLIHETTSMLAKTYDLIVVEDLNVKGMVRNHSLAKHIFDASWGEFTRQLEYKTKWYGSTLIKANRFYPSSKTCSRCGTVKAKLSLDERTYHCEACGLSIDRDLNAAINLARLGLAGAHSVTGRGGEVRPDCQNLGMTAHPDEASTDTPLEVGA

SEQ ID NO: 20427 - protein, 445 aa, unknown; identical to SEQ ID NO: 20426
  TnpB Polypeptide

SEQ ID NO: 20428 - protein, 392 aa, unknown
  TnpB Polypeptide
VLAVKTVRQKHQASTYLLKLLDEFRRMVNACIAIGIEEDVSSLKTLSLKSYYRLSRDTLSYYRLGAISAATGILRNYRKAKRKNPRASFPIARKLMLTTCYGFKIQNDLLRVPLSPRQCVYVKLNTHTLRVLSGLNVRSVTLTPQSLSISYSKDPVEIKPEGYVGIDRNLDNVTVASTDQTVRRFDLSKATRIKSTYRFVKSRFKRNDARIEARVFSKYGEKQRNLVQPLLHNVSKRIVEDAKTKRYGIAMERLTGMRRLYRRGNGQSRNYRARMNSWSFGELQRQVEYKARWEGVRVVYVPARNTSKRCSICGYKTLESTQRQLWCPHCGAILDRDENAARNIAAGGLRFSPNGPPGEAVKGNPTTTVILRVDGGKLSQQPTTKTIRSMKT

SEQ ID NO: 20429 - protein, 220 aa, unknown
  TnpB Polypeptide
LSNAVGIDLGLIDFFYPSMGSPVKVPKYMRKKEKLVKRLQTKLSHAPKRTEKYYKVLNSLQKTHYRIKCQRNDFLHKEANKLLDSHNLIVHEKLNIRKMLMRPKPIQDKTSGQYLPNGANRKSGLNKSISDVGWGKFLNILNYKANERGKGIIGINPYMTSQACSQCGEIVKKSLSTRTHQCPKCGFSAHRDLNAAYNILRLGLESLGLEFVMPPIIGAA

SEQ ID NO: 20430 - protein, 410 aa, unknown
  TnpB Polypeptide
MKATIKIKLYPNHKKAQHLRQSLGNVRFIWNKLLEKEIELYQKEKKFIWYFDMCKEITKLRKEYPFLKKSSSYILQQIARKLHFALKNFVRHRDMLKFPKFKKKSRYEGILIYPKDFKITNKAIYLPKIGWVRFKDKVVRKKQWHEIIATAKQVWIKEEPDGFFAFIQYEKKIELKPSNGGVVGIDVGIRNTVTLSNGEVYKIDKDKIMQLVEKAEHLQSIIDKKMTINRKRGINYSKRVEYLRMKRFKILKKIRNIYQDFYHKVANHILNSHEYVVIEDLNLSELKQAKHENKKVEKKIHKYLQNISISRLFKILEYKAQLYERKIIKIDPKDTSKTCSNCGYVHHEMKLSDKTFRCPKCGFRIDRDLNASINILKRGLETLSPSSGHGEYRREMARFIPCLYAEPPSL

SEQ ID NO: 20431 - protein, 436 aa, Fervidicoccus sp.
MRRTNVVKLVVDKETHKKLKELGIVTAKCWNEVNWLRMQQFKKGERVNFSKTEKAVYEKYKHVLKVNTQQVARKNAEGWKSFFSLIEEKKEGKLPKWFKPRPPSYWRDKSGKYRLMIIIRNDRYEVDEDKRTIYLKDFKLALGFKGKLKWRGKQGRLEVIYDDARRSWYAHIPVEVENVAEAKGSLRASVDLGIANLATVYVEDGTWHIFKGGGVLSKYECYSKKISKVQKVLARHGQRTSRRLKLLYDKRRRFLKHALNSMVRKIMGELKKRGVGEVVVGYPKDIARNHGNKLTVNFWNYGYAIRRFKEIGEELGIRVIDVAEPNTSKSCSLCGDAHESGRVRRGLYKCPRMGKVINADLNGAINILHIPESQGAKSEGQLLARDRGNGLKTQPVVYRWTNGAGWARFAPTSYEVMKMKVVNHRPVSRPEGTLAL

SEQ ID NO: 20432 - protein, 424 aa, Halorubrum sp.
MKRVNTFEVVPQTENDRECLLRLLDASASLWNELTYERRQNYFDDGDVWDTSEYRGQYNGVVGSATVQQVTRKNSEAWRSFFALKENGEYANPPSYWGNEEDGRELRTYIRCNQYTIEWGKRSRLEIPVGQELKDKYGLGYHERLRLEVRGNPKWDGKQGRLELEYDELSDTFRAFQPVTVPDSRLDSPLASEKAALDVGANNLVACSTTTRSQYLYDGRELFGRFRETTDEIARLQSKLREGRHSSKRIRRLYRQRTKRRDHAQNALVCDLVERLYDEGVATVYVGDLTDVLETHWSVRVNEKTHNFWAFKKFIHRLACVCEEYGISLEVESEAWTSQTCPECGDHEETVRNEDTLTCPCGFEGHADLTASETFLREHSDCEIRPMARPVRFEWDDHDWSGKPHPHESPKEARTNPQVASVSR

SEQ ID NO: 20433 - protein, 417 aa, unknown
  TnpB Polypeptide
MAKTKARRANMDCRTFQIKIDSSHLNCTQREAIARMFLEVKWLKNSCIANSRFDREYLKELGGQVPVKTPAGIEIRSFKVLGGQLSQSVIAELKANLKTLAALKAGGHRVGRLRFRRQVTCINFPQYGSSHKINRERSRIKLANIPGWLRVRGLQQLPGEAEFANAKLLDRPDGLYVRITCYTNKQKQDFQPATAVGLDMGIKTHLTLSSGVKIDALVEESERARRLRRKMARQVKGSNNWHKTKRLLDRVLARQANQRNDIANKIVAELTKNEVIYFQDEPLKQWFKQDGYIRCGKRLQGSILGRVKAKLMAHPRAVMLNHNVPTTATCVCGHKTPHTPGKRVFVCPRCGYRADRDIHAAQNMIRLGQSLNVPAVERSRTLVDKPIRPTAPMNFSSIAAAGKVWVKQEAPTSSVLR

SEQ ID NO: 20434 - protein, 367 aa, unknown
  TnpB Polypeptide
VGVRQLRRAAIQAALGSVSSYYSSHKNWEANGKFGNEPKLQCDRFCFPTFYKTVMFSESNEPNQCYLKLYSKNDWVWVPIAMRATDVKYITKYWSHCEKSAPTLEKKYGKYFLRFAFVEKVELSETEIQDRRICAVDLGLNTDAVCSIMTADGTVIARKFINFASEKDHLYHVLNRIKRKQREHGSNSAVAMWRYAKALNNDIAKKVAAAITEFAVLYSVDVIVFEHLSFTGKKHGGSKAQKLSMWKRNSIQDYVEHKAHRCGIRISRICAWGTSKLAFDGSGALKRDETNRALATFASGKQYNCDLSASYNIGARYFVRELLKPLPAMVRSQLSANVPDVERRIQVTLATLKALYPELKKLSTQAA

SEQ ID NO: 20435 - protein, 340 aa, unknown
  TnpB Polypeptide
MLAERKELYEKYKDDKDELKEHPPKTYSMWKHEYQWLYEIDNLALANVQIQLQTAYRNFFRNKSVGFPRFKSKKSSERSYTTNNQNGTVRIECGKLKLPKIGFVKIKLHRDIPEGYKIKSVTISQNPSGKYYASILTEYEKDAPEIVPATEDNSIGLDYSSPHFYVDSNGDTADMPHFYREAEKRLAREQRKLSKMVKGSNNYKKQKNRVALAYEKVRNARADWQHKKSKELADKYSMVVVEDIDYRAMAKGLKLAKSTNDNSFGQFRNMLEYKLAERGKRLITIDKWFPSTKTCGVCGAVNSELTLADRAWTCPHCGAHHDRDLNAARNIRDKGLSMIA

SEQ ID NO: 20436 - protein, 393 aa, Acidilobus sp.
MSAGDEGELTLTVRMRVSPEPEQQQAVLDLMRRYRDALNYSVRTLIANRALSLGKAHRLLYNDLRERFGLSARAALDCYREAIAIAKSWLRNPKRGKVPTAKGLSMWLTHELGYRVKGDHVELAGGYRLRVIGWDRRYDSYPSREARLVFRDGEFTLYVFKRVPRPAKYAPKGVLAVDVNERQIVVGNSRVEARVETPVERALRYERLAERLQGKYSSTRYNAWLRRSGIRRRIRRFYRKARNIIEDWARRTAHIIVSLAKQGQLAVAREDLTGLVEGLRRLPKSHRTALIALGYRRLAFWLDWQAEKNGVPLFVVEPAGTSSTCPRCGAKLVEVGHRRLRCPRCGLEADRDTIAILNIERRTLSKMGGSLITPTAPQMTDVNPNRWGEPPHL

SEQ ID NO: 20437 - protein, 273 aa, Acinetobacter sp.
MPLPNLPTVSLIATGIFSIKLSTPRRARVNPIKTVFSRVFNGKIKTVTISKTATGKYYASILVESELELVASTTIQADQTIGIDMGLNHMLIQSDGNKVENPKYLRQAQNRLSIQQKIFARKKKESKNYQRQKLSVAFIHEKVRLQRLDLHHKLTHYLICENQATTYAVEDLGIKNMVRNRKLAKSISDVAWGQFLTILQYKAKWFGKNVLQIGRFVPSSKACSCCGYTMTKLPLSIREWQCPDCETVHDRDLNASLNIRNFALADALGHSAV

SEQ ID NO: 20438 - protein, 406 aa, Lactobacillus sp.
LVKLGRTIKLRLYPDTNQAEQFLAMSKEYQRLTNIVSQWIFENEFQLSWLKINHHLYKIFRQESELNSQMIQSVFRTVSARYKTVREQMRQHSYRYKNEEDKWIQVPRDLNWMVKPIQFRRLQADLVRQSNYSFVDKMQQISMTTLGKRTKLGFTNKGFEKYFTDDWKLGTAKLVHNRGKWFLHIGITKEVSDFNPKDKPQIVGIDRGLRFLATVFDSEGKTLFFDGQKVLRKRKKFQEIRRKLQSKGTRSSQKRLKQLAQRENRWMTDVNHRLAKTLVTAYGSHTLFVLEDLTNVTFNTDDLPKSLRSSHRSWSFFQLESFLIYKAQAIQSTVVKVSPVFTSQRCPKCGLIEKTNRHHDTHEYWCKQCQYRCNDDRLGAMNIKMLGQDWLNGVMHPKIKKPTTAG

SEQ ID NO: 20439 - protein, 384 aa, unknown
  TnpB Polypeptide
MRHVTRYRIYPSQKVEGRLFTGFARCTFVRNWCLENRVYVDSCLPDLKAEYPELKEVQSHVLQKVIHRIVASLRALRAMKAKGRKVGKLRKKWVHSMEYDSTGFRLTGNRLRLSKIGELRIELSRPVPGRIKQIVIKHTPAHKWFVAIISETPDTPVPTTGTRTVGIDLNLENFSTDTDGRVFPHPHNVRKAAQRLRRAQRKLSRAVEGSRNRRKQRVRVARIHEQVENRRNDFLHKWSRYYVDRYDLIALEHLTIRPMVESLDAKLRGRSQSILDAAWYKAREFIRYKAANAGKYVHLIEPAYTTQDCFLCGHREKKDLWQRTHACPICGYTVPRDLNAAQNILKRASVGWGTPESTLVEIRTATPPIPAVQVPVDETRISWL

SEQ ID NO: 20440 - protein, 695 aa, unknown
  TnpB Polypeptide
MVKEKPPDQMKCIKVPLNYVLKHKDINKNKISDAVIRANKIVINTLMFIKLYILTCIKENKDIPKIDKVFVNTAMKTVCKEHSVGRPASDSVKGLKGIMKTCYDSEYSPLLVSKDFDYKHLNTVLDYLTVDIVTMYENNIKQHFVEYVERFVNVKWKKKYLIKKIRNSKMSKDKKKERINKLCSQLRKIKNDLLEVSEKYKSDKSYHKWITKEKKKVIPIKEINKKGIYYDLKCDPQAYFLPMIYMTQEIEKEGETTKNVFPLRTELIPKHIRIDTTTLVHLLLRKEQGTKSSFLTKGNLKRFEDKIWEFFFRIERKCFHKKNYTFNKMIETDGISCSILLVRKDLEGRKFKPKVKINKEKYIDELDDYSSLKDKKIVAIDPNLSDLLYCVDGEGKDRNFFRYTQNQRKKETKQKKYSKILEELKTKKIYGKTIIEWETLLSKLNRKSLDLKEYKKYIKEKDKMNKKLFPFYEQELFRKLKLHGYTNRLKSEQKMLSRFSKIFGKPVNTIIAIGDFDQKKHMKYKEPVKGLGFRKLLRKNGYGVYLVDEFRTSCRCHNCTNICEKFRVINNPRPWKDDTLLCHGLLKCKTCNKLWNRDENSSINIYKLAKTAIEQKKRPIYLSRSDFNKKSLSKISKKFIDKFVSVGSNSKGSILDKVCMSPSHNQNLHGQKRSNLGKIKRSNKELKDHFKFPRV

SEQ ID NO: 20441 - protein, 524 aa, unknown
  TnpB Polypeptide
MITSKKSRLKIINPDDIIQNIDKPGFNNQLLQSDLSNKLWLPSKINLFDKELNKDSENIMNNSWFSCKKQTKNITNLSVKNTNNISLETQLRIKTIRLNLSKDFQKVIKNCIFVTRALYNKCIENCFKEENPLPINLKSLREAFNYNKKETNILPLNLKASFEKVPAIIKDEVLRDFIKAYNIQMDLFKKGKKKHFEMNYRRRKNCLQETIVIPHQQIKRNKNNDVLCFTKMWNNQIFGVYKEKLPNIIDHDCRLIMKTIGNNEKFYLAIPTAIEVKPKIKNFNVVSLGPGVKIFQTTYDTDGSSYMIGENDMDKIDNLSKKAQKLRDGNKTTWVGGSKEIINNKTKWVGGKKISKRAETPKEKKRLLKASAKVEYKIKNKIRDMHRKTAKFLCEKYDTVIIPNFRVKQMSEKKDENNNWKRNIGKETTRRMINWGHFSFRQLLIAKGAVTQTNIYVGTEEYTSKTCGNCFWINNNLGGKRELNCENCKCISHRDINAARNIMILNWSKSGLDLIRAPKLIFVD

SEQ ID NO: 20442 - protein, 419 aa, unknown
  TnpB Polypeptide
MRLIYKFYTRHTEQLDALFKVSNNLWNQALYVFRQRLDNDGIWLWYDDMDKIMKQTLNLNGECNYRLLKAQCSQQVLRTLDKSIKAYCKSIKDWKKHPEKYKAKPRMPSYRKRGGMFNLFYTKQSATIKNGQIRLSKDMLIAIPQWGKYGDKISKFNQIRLIPERDKVKVEIVYDKELVASDVDENKYASIDLGIDNLATMVTSEGCVIWSGKHLKSYNRYFNKKLTRLQSIKDLQGIKRSTKHIIALYDKRDKYFEDVFHKVSRQIVDVLVEKKIGTLVVGYNVGWKQNINMGRKNNQKFVLLPFARLISYLSYKCKLAGIDFIKHEESYTSKCDALALEEVCKHEDYLGKRVKRGLFRSSVGKIINADQNGALNILRKVVGDSEFVRITGSGHSLCPVRHCNPFNRSVRGIDKVLNK

SEQ ID NO: 20443 - protein, 396 aa, Kribbella sp.
MSAMSRFRLAPTPEQEVALLGHCAHARYIWNLALEQWSMWSAGRRSYPPRFVEQARQLTEARADNEWLRAGSQTVQQQALRDFDQAVMNFFGGTHRRPTWRKAGMHEGFRIVGAQAQRVEKLNRKWARVLVPKVGWVKFRLSKPLPDLKSYRVVRDRSGRWHIAFAVVPDSIPGPGTGEVVGVDRGVAVSAALSTGEQLLVPPLSPGEKRRLRALQQRLSRARKGSNRRAKTKAAIARLKAREADRRKDWVEQTSTRLAREFDVIRVEDLRIVHMTRSATGTVDNPGKQVRQKAGLNRGILANGWGQLVQRLEHKAAGRVERIPAAYTSQTCSRCGTRDREARENQAVFRCRSCKYTANADVNAAVNIAAGRAVNARGATAVRVAEKREPQLATSA

SEQ ID NO: 20444 - protein, 157 aa, Streptomyces sp.
VAQELAEAQRHLATFPQRTGRRTKAHRAAARKVANVYAKARRKRLDFHHKTARALIRDHDVIAHERLNTAGMTKTAAPKPDPGQDGAFRPNGAAARAGLNKSILDAGWGSFSPGWSHREEAEAGALVLLAARRRFPGPGHPHPRLQRIGPVLSRLDA

SEQ ID NO: 20445 - protein, 376 aa, unknown
  TnpB Polypeptide
LKTILKAYKYRIYPNKQQTELINKTIGCCRFVYNHYLAQRIELYKTEQKSMTYNVCANDLTNLKKQYEWLREVDSISLQQSLKDLDLAYQNFFRRVKNGEKEVGFPKFKSKKNPKQSYRTQNVNNNISITNNKIKIPKLGYVKFSNSRSFEGKINSCTISKTSTGKYFVSVLVTEDIQELPQNNNAIGFDLGIADYLITSDGEVVNNPKILKQYEDKIIKLQRQLAHKKKGSNRYKKQSKKIAKVHERIRNIRTDFLQKLSTQIIKENQLIVSEDLNVKGMVQNHKLAKAISDVSWSEFCRMIEYKSVWHDKIYHKIDRFYASSQTCNVCGYKNTDTKDLNVRQWICPKCNTNHHRDVNAAVNILNQGLKELGLTA

SEQ ID NO: 20446 - protein, 364 aa, unknown
  TnpB Polypeptide
MKKAYTKSPVMRRASRIFLNDANSGKAAIVRDFLHQCHDVTQYFVDLFWQREDFTADLGDLATVHRGRDRFGITTRLAQALAKQAKEVCRAAHANGTRKPRIRRWTTTLYSHFMTLEVFTGEHFDYALRLIGSGVPRLVLPVHSTKHLNGLLDAGWTRAKTVRLGWRKGRLFVECLLEKVRPALKTAGEVVGMDSNYKHGLVFSDGQTTGDTAYDTIQGFAKRQKHTHAHIKSLVGQALKQIDFTPIRVLCIEDLKHVKAFKRGTFPRRLNRRLSHWLYNFLAEKLANCCQEHGIRFERKHPWKTSQFCRFCQKWDRRNRRGDLFACRTCGHTDHADFNAAHNLAFLGLAGAYGLRSLQNAHGV

SEQ ID NO: 20447 - protein, 362 aa, Bacillus sp.
MLKAYKYRIYPTEEQRLFFAKTFGCVRFVYNKMLADRIHSYQESQKTIDKSVKYPTPAQYKDEFLFLKEVDSLALANAQMNLNKAYAHFFRDKSVGFPKFKSKKDNYRSYTTNNQKGTVYIENSYIKLPKLKTLVRMKQHRQFSGLIKSVTISQTPTNKYFASVLVEEKEHSFPKLDTRVGIDVGLKNFAILSNGTKYENPKWLRKAEKRLAFLQRSLSRKKKGSRNRNKIRLQVAKLHEKIANQRKDFLHKISNEITNENQVIVIEDLKVKNIQNNHNLAKAISEVSWAKFREYLDYKAIWRGRDLIIAPKNYASSQLCSCCGYRNKEVKNLNLREWTCPACHVHHDRDVNASINLLKLAM

SEQ ID NO: 20448 - protein, 359 aa, Mycobacterium sp.
VCVNAQTGQVWWPECSKEAYADGIAGAVDAYWNWQSCRAGKRAGKTVGVPRFKKKGRDADRVCFTTGAMRVEPDRRHLTLPVIGTIRTYENTRRVERLIAKGRARVLAITVRRNGTRLDASVRVLVQRPQQRRVALPDSRVGVDVGVRRLATVADAEGTVLEQVPNPRPLDAALRGLRRVSRARSRCTKGSRRYCERTTELSRLHRRVNDVRTHHLHVLTTRLAKTHGRIVVEGLDAAGMLRQKGLPGARARRRALSDAALATPRRHLSYKTGWYGSSLVVADRWFPSSKTCHACRHVQDIGWDEKWQCDGCSITHQRDDNAAINLARYEEPPSVVGPVGAAVKRGADRKTGPGPAGWP

SEQ ID NO: 20449 - protein, 423 aa, unknown
  TnpB Polypeptide
MIQLVKRFRIKPIAEVEDLCKLSNNLYNQSLYEMRKRGEEEGVWMYHRELREHMYGVTNLEGEINFKLMRRDIADYVVKQVSDNVKGFFKAIAKWKVHPEEFKAKPEFPKFHKRGGMNVVQVRYNHDCRINNNGEITFGCMPGVGIPIPQWGLYRERITKGCKMVRILPEKFFMTIEIVYNVELDNQTAAYDNVAAIDFGIDNLATVVTPKGCYLFSGKVLKSYNQYFNKELARFSSIKDKQSIKKGTKRTTAMYDKRNRYIDTFMHTTSKAIVDMLIEQNIGKLVVGRNKGWKQEVNIGKTNNQKFVQIPFYMLQSKLKYKCEMAGIEYVEQEESHTSKCDALAMEEIGHHERYAGVRMERGLFKSSTGRYINADQNGALNILRKNIGNKEYKEKTKDWSMNSPVRIKHPQMQSVIPAMGSR

SEQ ID NO: 20450 - protein, 402 aa, Escherichia sp.
VKRLQAFKFQLRPGDQQECEMRRFAGACRFVFNRALALQNENHEAGNKYIPYGKMASWLVEWKNATETQWLKDSPSQPLQQSLKDLERAYKNFFRKRAAFPRFNKRGQNDAFRYPQGVKLDQENSRIFLPKLGWMRYRNSRQVTGVVKNVTVSQSCGKWYISIQTESEVSTPVHPSASMVGLDAGVAKLATLSDGTVFEPVNSFQKNQKTLARLQRQLSRKVKFSNNWQKQKRKIQRLHSRIANIRRDYLHKVTTTVSKNHAMIVIEDLKVSNMSKSAAGTVSQPGRNVRAKSGLNRSILDQGWYEMRRQLEYKQLWRGGQVLAVPPAYTSQRCACCGHTAKENRLSQSQFRCQVCGYTANADVNGARNILAAGHAVLACGEMVQSGRSLKQEPTEMIQATA

SEQ ID NO: 20451 - protein, 419 aa, unknown
  TnpB Polypeptide
MQIIRSTKCSLRFATDNKHQQWRRFLVEYVRVVNLYIYQFWFNTPKNNNELNKCVLDTIGSTWITQRAKACAARQALGMVLGVRARIATARKNKEKCKTTPKKPVLRKLKAELSSLCASLSISKNAHGFNAWLHLSSLGDKISLDLPIKFHKHYHELAQIGKRCNQFTITEDYIQIAFEITVEPKLPPTGCAAVDSGINVLASVSTQEQYGTDVKEKIYRIKRCKHGSKGQQRARRALKQYIDITAKQVYTMEDLTLLVVEKLKNITKNTKKNKKVGRDTRYLLGSWNVRYWLNRLEMGCERNRVSFRTVPAYNTSTTCPSCRHRCKGNRKGVIFKCLKCGHEGNADLIASDEILDRFLKSKYGDGCTRLPSKLSGTRNNLASCGLFSQQDITTFELINEQARESSETIPEPIVPVSNT

SEQ ID NO: 20452 - protein, 368 aa, unknown
  TnpB Polypeptide
MKTLKLRIRDKHTAKLNRLSGSVNFVWNYVNALSYEHLKRTGKFFSAYDLNEYTKGSGELLGLHSQTIQAINETHAKARKQFKKAKLSWRTNNPNSKRKSLGRLPFKQSAIKHIATHQTGKKGLKSTLQLSLAKGQKLIIDLWDSYNLSLYQINTCELVQDSRNRWYACITVKDYPKTQCGTGSVGIDLGLKDSATTSSGDKLTIKQTLKYAKDLAIAQRAKNKQRVKAIHAKIKHTRQDLIHKFTTQLVKDNALIVVGDIQSNQFNSKKGKLAKSVYDAGWFELKRQLTYKCENAGCRFEIVNERYTTQRCSCCGEITANSPKGRKSLGIREWTCATCGTRHDRDINASKNILAVGLDRLVEGIPLL

SEQ ID NO: 20453 - protein, 369 aa, Nitrososphaerales sp.
MVRLETNDEEKAVILKTLEQFNLACNYAAPKGVYTSKYELQKAVYRELREKFGLGAQMVIRVISKVVEVYKRDKTAKPEFRSRGAIQYDRRNLSWKGLDRVSISTIKGRMTLKTRIGEYQKQHLCGKVVRGQVDLIYRNGLFHLAVVVDAPEETLYEAKNVLGVDLGIENLATDSTGEHFSGSKVDEVRKRYTSLRARLQARGTKSAKRHLKKLSGRERRFKRNVNHIISKALVGKAKRTESLIALEDLKGIRERVRVGHNQRERHNKWAFRQLRNFIEYKAKMAGVPLQVVDPRNTSRTCPRCGTINGRNRPERNRFRCVRCSFSEEADYVAALNIAKRAAFNQPIVAPSLNKVYEVAAISLPLGGRS

SEQ ID NO: 20454 - protein, 378 aa, Enhydrobacter sp.
MKTLKLRIRDKHNDKLNRLSGSVNFVWNYVNDLSYKHLKKTGKFFSAYDLNDYTKGSGELLGLHSQTIQAINETHAKARKLFKKAKLSWRTNNPNSKRKSLGWLPFKQSAIKHIATHQTGKKGLKSTLQLSLAKGQKLVIDLWDSYNLSLYQINTLEIVQDSRNRWYACITVKDYPKTQCGTGSVGIDLGLKDSATASNGNKLQIKQTLNYAKALATAQRAKNKRRVKAIHAKIKHTRQDLIHKFTTQLVKDNALIVVGDVQSKTIIQPRKKDKTPPKKRMKLARSVYDAGWFELKRQLTYKCENAGCRFEIVNERYTTQRCSCCGEITANSPKGRKSLGIREWICASCGTWHDRDINASRNILAVGLDRLGAGIPLL

SEQ ID NO: 20455 - protein, 318 aa, Enhydrobacter sp.
LGWLPFKQSAIKHIATHQTGKKGLKSTLQLSLAKGQKLIIDLWDSYNLSLYQINTLEVVQDSRNRWYACITVKDYPKQSCGTGSVGIDLGLKDSATASNGDKLTIKQTLKYAKQLAIAQRSNNKKRIKAIHAKIKNTRQDLIHKFTTQLVKDNALIVVGDIQSNQFNSKKGKLAKSVYDAGWFELKRQLTYKCENAGCRFEIVNERYTTQRCSCCGEITANSPKGRKSLGIREWICASCGIADDNSLEVPPDPFPNSEVKLQCANGSVVRPCESRSSSAPYSNTPLTLVLVRGVLLFSLPMRFIFGYSVNLILLVILR

SEQ ID NO: 20456 - protein, 387 aa, unknown
  TnpB Polypeptide
MVSVEKGFEYRMYPSQEQQLLLARTFGCSRWVFNHFLEEKIRVFKETKKHLNYSKCCKMLTALKTQEDTVWLAEVEAAALQQSLRNLDRAFDNFSKRRKQGVGFPSFKKKKSRKTYRTPAAKIVDDSHVWIPKVGLIKARITRPIQGRITSATIKQTPSGKYFIVFTCVDIPEPPKAKTGKAIGIDLGIASLITTSEGEKIEGVADNQKLDKKLAREQRKLSRKKKGSNNRAKQKIKVARVYEKIASKRKDHLHKVTAKLISENQVICAETLNVAGMMKNHHLAKSIVAQSFATVLGFLEYKAREKGKIFVQVDRWFASSKTCHSCGVKADAMPLNIRSWQCKNCGARHDRDINAAKNILSEGIRILNGTEGHSGTTAESFAVTLVE

SEQ ID NO: 20457 - protein, 380 aa, unknown
  TnpB Polypeptide
MKKGNEFRLYPKRWQEVLFARNFGCSRWVHNHFLEEKKRFLKETGKSLSYCKCSKMLTALKNQEDTAWLAEADSTALQQSLRNLDRAFDNFSKRRKQGVGFPRFKKKKSRKTYRTTTAKIVDESHVWIPKVGLVKARISRPVEGRIVSATIKQVPSGKYFIVFTCTDIPEAPKSKTGKAVGIDLGIKSLVATSDGEKVESVADTRKLDKKLAREQRKLSRKKRGSNNRKKQKIKVAKVHEKIASKRKDHLHKVAAKLISENQVVCAETLNVAGMMKNHHLAKSIAMQSFATILGFLEYKAGERGKIFVQVDRWFASSKTCHSCGVKANAMSLNLRSWQCENCGARHDRDINAAQNILAEGIRILNGTEGHSGTAALTVAA

SEQ ID NO: 20458 - protein, 403 aa, Nostoc sp.
MLVVEFKAKGKTTQYKAVDEAIRTAQFVRNKSICFWMDNRGVGQKDLYRLSKQLREQFPFVKALNSSACQAAIERAYSSIARFYDNCKKSIRGKKGYPKFKKNCRSVEYKTSGWKLSTTRKQITFTDKKSIGKLKLKGTWDLNFYQLEQIKRVRLIRRADGYYVQFLISVQAKVEMPPTGKTIGLDVGIKDFYTDSNGHSEPNPRFYRTGSKRLKLYQRRVSRKQKGSANRKCAINHLGRLHLKISRQREEHAKRLARCVIQSHDLVAYEDLRIKNLVKNHCLAQSINDVGWYQFRKWLEYFGVKFGRLTIAVNPAYTSQTCSDCGAVVKKSLSTRTHVCECGFVVDRDWNAAINILKAALGTTGHVGTWILDPNASGDSTSTHAGEILCEQVGSMNEESLQV

SEQ ID NO: 20459 - protein, 417 aa, unknown
  TnpB Polypeptide
MLKKMSEYEYHYGLKVRIYPSTKQKQIIAASSNASRFVYNKMVELGKEIAAFGKPSVYIKIVDERLAQLKELKSSTTVLKNRFSWLCAKEVDTLAIENAKQSYNKAWNMYRKVYNISPPNFHKKSYEEKYQTSAQYDKKKVSIATMSNGRCKFSKTHVNLPVLGRIRYVGSRKMTEKLLSMEEIRIGTITVMKDNCGDYYASFQLASDEPFVKEAPKTDSKVGIDLNVENFYADSNGVIVDNPHYYRKAKKRLIKAQRKLGKRTARAKKEYRPLKTAKNYQKQRILVARIAKTVMNRRRNFLHIQSTALINNHDLVVAEELRSRNMMKNHALASSIQDNGWRTFLGMLEYKAELYGKKFLTVNPKNTTQTCHCCGHIMQGEEKLSLSVREWTCPSCGERHVRDINAAINILQKGLVA

SEQ ID NO: 20460 - protein, 173 aa, unknown
  TnpB Polypeptide
MILAHKIRLDPNNKQSTYLAKACGVARFAYNWALDRWKTQYDAGEKVSEGKLRKELNAIKREEYPWMLEVTKCAPQLAIKDLGKAFQNFFAKRADFPKFKKKGQRDSFGLSNDQFSIKGKTIRIPNLGYVGMTEELRFDGKVMGNGLSPFKWKCPGPNLFTMAKAKLWEWIWV

SEQ ID NO: 20461 - protein, 213 aa, unknown
  TnpB Polypeptide
VDLGVKELATLSDGTKITGTKPHKALLSRLRRLNKSLSRKQGARKGEKKSKNFRKSQMKLSGLHARIANIRNDETHKLTSMLTEKYGTIGIEDLNVSGMSKNHRLARAILDMSFFEFRRQIEYKSKMKGGHVVIADRFYPSSKTCSDCGHKYTELNLSMREWTCPGCGINHDRDVNAATNLKNYAVSYMVSACGELVETAASMKQELNVTNQV

SEQ ID NO: 20462 - protein, 356 aa, Comamonas sp.
METTKTLKLRIKDKHARVLSAMAREVNTVWNFCNETSHRSIRERFKWLSAYDLQKLTAGYSKCEGVQIGSATAQLVCEEYALRRRQFKKAKLRWRVSNPKSSKYSLGWIPFKVGGVKYKAGQVVFAGHKLSLWDSYGLADYELRAGSFVQDTRGRWYLCVAVKVQVKPSTATGSIGLDLGLKEAATASNGQSIEGRFYRKLEAKLGIAQRAHKKQRVKALHAKIANQRKDMLHKFSTRLTKEYGAIFVGDVSSQKLVKTKMAKSTLDAGWSMLKTMLEYKSQQAGVVFEVVNESYTTQTCSCCGSIPASSPKGRAGLRIREWTCSDCGAVHNRDTNAARNILAAGLRRLEAGITVL

SEQ ID NO: 20463 - protein, 588 aa, unknown
  TnpB Polypeptide
MDAAALRIANEEERNQAKRRKNQQNDQEEDQEKQQPPAQKRLREELCDPSTYPNKKKKTESTTKEQAIPKRKFDEQPKGSPKRGKKRPREDTKEETENQKAKRIAKEKVELFRLENGVGRNGAQPKPSAKHVKDDKDTQTDTFQDNVSKPHAKSDQEKKPLIEFKVRNVRMFPTSKQRAILRKWFIGARWTYNRCVEIFKQYGTAGAKLNVMRQTTVNAGVHAGKPTEWVLGTPTEVREGAMRDVLKAIQSNFQKMRKTKDYSFELKFKDGKGSDSILISKKKCKLEAELLSAIKMEKHFKPNFDHDMRIVWKRNTGTFLLSVPVPIEQVCTDEAPHGLSPIDGVIALDPGVRTFMTGFDPSGKTFDWCGGDQAKLRRLQRHLRRLRRDIQSTEIRHHQRYRLRKAAARLEERIHNLVDEVHRKLTKWLCENYRVIFMPKFEISRMVQSKKLSTDTKRGLYVWRFHEFRQRLLAKAREYPWVQVFIVNESYTSKTCTHCGWFHEKLGSAKEFMCDNCKSKHGRDEGGARNILLRQLGLLLKDRLNAEAALSGRLPLGPSEVTPSGVTEEDVLLITQQKFEFIKNFEFK

SEQ ID NO: 20464 - protein, 440 aa, unknown
  TnpB Polypeptide
MQKRKFTVVTQLHEKNNREIIEYIESSRGEYARAMRETFYTIKHSDLNKSQHNTYLQNKYDILKRTANSIISDAQGRYNALKELKEYERKQTESKIIHLETEVIPTLVEIRNYNSAKLRLGRNVSLIKQRNLRRKIIAKKAKLNRLRQKLDNLNYQLDSGRLKLCFGTKQLLQKDYNRFIAQRDSQMSFIGAREESSCNLMLQLEYNSKNNQFRVKLRKDFGGYKLASDKYAYGKVYFNHHKKYLISILRSKASPLSYKIIKRNGRYYLHCTFEIQVEEFITRSTNGTIGLDFNKGFITLAETNQYGHLVRTRILPYRFKSGDKTKTDLQGVANHIVKLALQTGKDISIEDLDFKMKKSKTESKQSKKYNEMIHSLAYREFSDIVESVTYRNRVNLIKVNPAWTSWLAKQKYCPTMKLNVHVGASYVIARRGQGYKDTFK

SEQ ID NO: 20465 - protein, 379 aa, Proteobacteria sp.
LLARQGRPASPTTGRWPNGSWQHEASKADNSLPKPSQMSLRRQLNAIKHEQFPWMLEVTKNAPQMAIIQLGAAFKNFFAGRAKYPQFKKKGKSRDSFTLTNDQFSVDGSRIRIPNLGWVRMRETLRFTGKIMSATVSRVADRWFASITVDTQDDSHLPRSENQGAVGVDLGVSALAILSTGESITGPKARKALLSRLQRLSRKVKGSENRKKTKAKLSRLHARIGNIRNDALHQLTTDLTRRFHTIGIEDLNVRGMVKNRHLSRAVSDMGFFEFRRQLDYKAAQRGGMIVVADRWYPSSKTCSCCGHKLETLPLAMRKWACPACGSVHDRDVNAAINLKNLAVSFTVSACGEEGAGLGRKLKTKPASVKQESSSKATYG

SEQ ID NO: 20466 - protein, 176 aa, Clostridioides sp.
SNKPQFISNLKKSLNKLAKLQRELSRKTIGSLNRNKARLKVARLQEHIANQRNDFLQKLSTKLIKENDIICIEDLQVKNMIRNRKLSRLISDVSWSEFIRQLEYKANWYGRQIVKVGKFFASSQICNKCGYKNEEVKNLNIREWICPSCNETHDRDINASINILKEGLRLITIQNK

SEQ ID NO: 20467 - protein, 374 aa, Allobaculum sp.
MANRAFVYAIQPNIEQSIQCQKTFGSCRFVYNQMLDVQRQRHQNGEKYLSKFNANDYCNHELKNKFPFLKEIDKFALTNAIFHLADGYDRFFKRLGGFPKYKSKHKSRKSYTTNFTNNNIDIGDRYVKLPKLGKVKAIIHRKAPSDWLIKSATVSQNRDGSYQVSVLYEYEQVSASVAVKEVLTLGLDYASNGLYVDHNGNRCNMPRFFRDSADQLAKRQKKLKHKVVGSGNYKKQQKRIAKIHRHIANQRKDFLHKKSTEIANQYSCVCVEDLNMRVMANKGFGNGKATLDNGYGMFVNMLDYKLTERGGCLVKVDKWFPSSQICHHCGEKSSITKDLSIREWTCPHCGTILDRDQNAAQNIKIEGLRMLKAS

SEQ ID NO: 20468 - protein, 278 aa, unknown
  TnpB Polypeptide
LIFKLFAKFGEFVIFSARSFQIEFLDCKLEGKYLKLPKMTAVRMKLHRPISEKWKLKSVTVSREPSGKYFASLLFCCENQTAEKRPAEKFIGIDFAMQGMCVFSTGERAEYPMFYRNTEKKIAREQRKLSRCQKGSQNYKKQKKRVALCHEKIRNQRKDFQHKLSASLAESFDAVCVEDLNLKGMAGGLHLGKGVHDNGYGLFLSMLEYKLEERGKYLIKVDRYFASSKICSVCGKKKEELSLSDRIYHCECGYRMDRDVNAAVNIMNEGKRIFAECA

SEQ ID NO: 20469 - protein, 386 aa, unknown
  TnpB Polypeptide
MNLLMETKTVIKGYKYRIYPTKEQEIQISKTFGCCRFVYNQLLAKKIGLYKTEQKSLSKTDCNNYCNQVLKKQEEYKWLKEVDKFALTNSIYNLDRAYQNFFRRVKQGETPGFPKFKSKKDNRQSYTTNFTNNNIKVLFNDNLIQLPKLGKINAKLHREFEGKILFATISKTPSGKYFASFNVEVEYIISSKNEYAVGIDLGIKDLLITSDGEVINNEKLTYKYEKRLAKLQRRLNKKQKGSKNRNKQRIKIARLHEKITNIRKDNLHQISKQIISENKVVICEDLNIKGMVKNHNLAKSIHDCGWGELTRQLKYKTDWNNKIYYEINRYFPSSQLCNKCSYRNTDTKNLGVRFWICPECNTEHDRDKNAAINILNQGLKDLGLVS

SEQ ID NO: 20470 - protein, 411 aa, Okeania sp.
LLGLKSKIQKIASLKRKLKKLKNTERLHICFGSQKLFKAQHNLAENGYKTQDEWNVDWRKKRSGRFFCIGKSQPGCGTMMKVFSLQEDGKYQLQVQLPRPLQDKYGQKILTVFSVSNRNGRYRATDLDYAINNFKPITISIFRREHKQDNWYVHLSTYVQEIPVVHTKKNGCIGIDFNADSISVTYVKWDGNIEYLEDISREWKNQTTGQRQASIRNIVCQAVFLAEFFECAIAIESLDFSKKKAKMSGYCKVYNEMLSNLSTGIFRETLESRCRRFGVELIKVNPAFTSVIGMINYMAKYGLNSGTAAALVIGRRALKLSEKIPKCLLRPEDVNKHDWSHWRRVASFIKLHSIRRTQLFQWRKVLEGILTHSLWAETSCRRRQNFLCEYTLKQVSNEIICSHRWQMSSFV

SEQ ID NO: 20471 - protein, 196 aa, Ruminococcus sp.
MHCVNRIKKAQQHGNYKTPRLWAKAKGINHDIAIKTANCIVDIAVLYNADVIVFEHLDKNGKVRGSKKQKLKLWRSQEVQSIVTNKAHRLGMRVSHICAWNTSRLAYDGSGFVLRGKFGGFNTYELCKFQNGKTYNCDLSASYNIGARYFIREILKSLDENSRLLIEAKVPQCSKRSTCTFSTLVNLNAEIIAQTA

SEQ ID NO: 20472 - protein, 515 aa, unknown
  TnpB Polypeptide
MANSSTPSYTVTRRIYPEPWQADIINRKMDLGNRMYNNAVRHYKSVVEELRQDLWFIRNLEAWKACGEDDPGKEDFSNEVSACISAYGLDEYDIHAYMARGKNISNPKGLGINIIQKLGTALSHSVRKAVFSDTEIHFRRHGSTDTLEEKAARSGIIYKPEKDMVSFSGMRLRLKPVRKKDAYLARAMQGQIKYCRIVRDPFGAGYRYFLQIIMKGEAPDKVSMGAGSAGLDPGVSTMAVVGDSGAGFFTLAEGVEKFERAVRDAATVYERRRRLANPQNYNPDGTVKKDTKTFKQHWRRTKGATRALMELKSAYRKKASYIKNCHGYLSNRVVESCSVLIKEPMDYSALAKRARKLERQDKTSEIRQKDGSVREVRKYKKKKRFGSSIGRRSPAAFVKQLEDKLHRYGGLVYDVDIASFRASQYDHIEDTYKKPLLSDRFKLVGGHIVQRDLYSGFLLWNAADLVHSARKKCLETFPLFLEMQEKVLFDMMVSGDLTGNFGLKDMLAVNAVQAA

SEQ ID NO: 20473 - protein, 206 aa, Microcoleus sp.
LRKSAQKLARLQVKLASRAKGSKPWRIIKDKISKLHQFVARARLDFQFKTAHELCGKCDVLVAEDLSVKNLTRRAKPKTDIEDGNLVYLPNGQSAKSGLNKSMLDAAHGQFASVLKYVAWKLGKNVLFVDPKGTSQHCWNCLNKVPKELSERWHSCQCGESLDRDENSAKLIKKIGLSCESGGGTPSLKKAFAKKEKEACGLTVPS

SEQ ID NO: 20474 - protein, 407 aa, Nitrosococcus sp.
MKEIVRTTLIKVDLPFEAAKNTVIAWTEACNAVSCRAFENGKLSNAIKLQQLCYETAKSFGLSSQVAVSCIRQVASKYAAARTAKKTLSKPVYFRPCAVVLQGGKRGRDFSFTQQGLSVWTVNGRIKSLVYHGAPKLQAYVANWRLGDGRLFVRKGKVFLSVSFKHEAETISKPNDAVVGVDRGIKVLATVTDGQRQLFFGGGHTHHVRHRYAKTRASLQKKKARTGSRSTRRVLKRLSGRERRFMRNINHVMSRHLVDFARDTGNPTIAVEDLGGIRNGRRLRKQQRTDLNRWAFYELEQFIRYKADTFGMEVIGVDPKHTSQGCSRCGHTEKANRHQRRFLCKACGYELHADLNASRNIRLRGVLARQVLDEDGVLSITPEARPVDPGSKPGEGTGKPLALASGH

SEQ ID NO: 20475 - protein, 247 aa, unknown
  TnpB Polypeptide
VRRCALLLQLGARSVKKQYQAHKANPEKEPLPNECALRRQLNKIKRKEFPWMLEVTKCAPQFGIKQLGMAFANFFRNPKHFGYPKYKRKFRDDSFTISNDQFKLEDSRIHIPKLGWVRMCEPLRFENAKVLSAVISRQADSWYVSLTCELTDLSHLIPAKNQGRIGIDLGINKLATLSNGLEFEAPKPLKRLLGKTQEKAEKMFPSRPRQQEQVQACQGSCSSSSANRQHPQGCAPQADDIHCCQLL

SEQ ID NO: 20476 - protein, 339 aa, unknown
  TnpB Polypeptide
VGKEVRPTIKGKLVLSSAEDKAFLLYVMRNFKDAVDYAHSLLKKGLKENKIIKLLTSRILNNKWYSRSAYIRAKLYSEQPYLKLKKPQLYSVGVKAEKGNRNIRLMSTEIVLIKIPSATGKHRWLKAKVKFGRKHIPIIQELTNSNISYGAGICTKDSKLILYINIPLELYVKYMRKESKTKITEHIAGFDFNPDRINMVIIDRQGIMRDVRNEHFMEITSHGFPREKAVSLRRESLTKLVKYAREHGVKYYVIERLSKPKPKGNKTAKRKISKMALREFTQQMEVLVPKVEGELIKVNPAYSSISAKIIAGDLGLDVHTTSAYIVAMRGLKKIQKAAV

SEQ ID NO: 20477 - protein, 400 aa, unknown
  TnpB Polypeptide
MLLSYRFRIYPSKTIQAKLNEQLEICRWLYNRLLEEVNKARKEGRKINRQDTQALIVKLKEEKPELNKVYSKVLQMVNYQLWSNIKTLAELKRKGKKTGTLRYKTGNSFKTLNFNQSGFKIDFKRRKLVLSKVGEIPIKLHRKIEGKIKGVIIKRTKSEKWFALVQLEVVDETIPKTGRVIGIDMGVHHFATDSDGNRFENPKFLDKTIEKIRKIQKVLSRKQKGSKNREKARKRLAKLYEKLENQRNDFLHKLSRYYINNYDVVCIEDLDIKSLVENNRSHTLNRHILDASWSKFIQLLFYKAERANRRVVKVNPKNTSRICARCGKIIKIELKDRLFVCPYCSWEADRDYNASLNILNAGLGRPLAPVEREPLLRIVSYWEVITGQVLSMKQEAPCVS

SEQ ID NO: 20478 - protein, 399 aa, unknown
  TnpB Polypeptide
MLWLVLTRKAFRYRVYPTQDQEARVLRWESALRLLWNLALEQRRLGLSRTDKRYPTAFDQINDLTELRRELPWLADVPRNVCSQVLVELDKAFQRCFKRLGRLPRWKRKGKDFLGLCEPHPKTWRADGSSIRFPKLGTLRTVMHRPLEGTPKTCTLKREGDQWFVAIVCEIELADPIQRNAPVLAIDRGITQLLADSNGNLTANPKHYDRALKRLAHAQRAVSRKQKGSKNREKAKLRVMRIHRKVRRQREHFLHCLSSTIAKSNGVVVIEKLQVANMIRSNLARHIADAGWSRFAEMLKYKLGWSGGTLVEVPAQYSSQTCSTCGVVDAASRRAERFCCVACGYVDHADLNAAKVLKHRANRSVKPVDGILLEGTGRSGKEKVKLRVARRSPLKSSAL

SEQ ID NO: 20479 - protein, 382 aa, unknown
  TnpB Polypeptide
MIIRKGYKYRLKTDAETRQQFAQHAGACRFVWNKTLATNEHRYISNTPRIGFADACKLVKLWRESDEYGFLADVHSQALQQALRDLDRAYINCFEGRAAPPTFRKKFLDDSFRFPQGFKVDGSRVYLPKIGWVWFWKSRDIEGTIKNVTVSRRGEHWYVSFQTEIEVDEPVHPATAAVGIDLGVACFAALSDGQLIEPLNSFRKHEERLANEQRKLSLKVKFSNNWTKQKRVVNRVHQKIANCRHNFLHQHSTEISKNHAIVVVEDLKVKNMSRSASGTLEAPGKNVAQKFGLNKAILDQGWGMFRTFLEYKQGWRGGETIAVAPQYTSQKCAECGHVSRENRPSQALFSCVACGHRDHADVNAARNILAAGLVERLNACGP

SEQ ID NO: 20480 - protein, 377 aa, Salmonella sp.
MKRLQAFKFQLRPNGQQERDMRRFAGACRFVFNRGLALQNENHEAGNKYIPYTKMASWLIEWKSDTETQWLKEAPSQPLQQSLKDLERSYKNFFQKRAAFPRFKKRGQNDAFRYPQGVKLDQANSRISLPKLGWIRYRNSREVIGVVKNVTISQSCGKWYVSIQTEYEVSAPQHESTSMVGLDAGVARLQREMSRKVKFSNNWKKAKRKVQNLHSRIANIRRDYLHKVTSEISKNHAMIIIEDLKVANMSKSAAGTASQPGRNVRAKSGLNRSILDQGWYELRRQLEYKQLWRGGWVLAVPPAYTSQRCACCGHTAKENRLSQSQFRCQACGYTVNADVNGARNILAVGHVVLACGGMVQSGRPLKQEPTEMIQATA

SEQ ID NO: 20481 - protein, 516 aa, Ruegeria sp.
MARSTSPSYIAEFPLRTSAADERALEIRMDAARHIFNACLDESLKRLALMRQSKDWQRARTMPKTKDKKSNKERSDLFKACTKRFGFDSGSIQKHAEQCRDACWIGDHLGSHDTQTTSKRAFQAVEQFAFGVRGKPRFKGKNRLNSVEGKGDAVIRLRYIDEMPVVLWAGLCLPLRLDPRDVHGWQKQALQDKTKYVRVLRRTIKGRTRWFAQLVQQGYAPRKVKNPQGHGVVGLDLGPSTIAIASEEEAHLKRFCDEVDQLDKIIRQIQRAMDRSRRATNPHAFYEDGTFKKGARITVRSTGYIKLALEKAEVERRLAEARKRSQGELANLVLAMGDEIKTEKISYRSFQKNFGRSVGRRAPSMFISMLKRKAASAGAKVIEFSTVKTRLSQFNHVTGEYKKKTLSERWNYFPDEPRVQRDLYSAWLARFVERDMLDASQCDVHWAAAGPLLRRAASSKNQSASGMGSALNHALPGVRVDRPSQRAGRRNEAVDAVAKARATENSGSGSLRTPCL

SEQ ID NO: 20482 - protein, 106 aa, Clostridium sp.
MIEPTIIGTSVNLNKAYKNFFRDKSVGFPKFKSKKSNYYSYTTNNQNGTVCIENGYIKIPKLKSMIKIKQHREFNGLIKSCTISKTPSNKYYVSILVDTETNNYLK

SEQ ID NO: 20483 - protein, 403 aa, Okeania sp.
MLVREAKLLNGTLNQYKSLDEAIRTAQFIRNKAVRYWMDNQGVNKSRLYKLSKILASEFVFVNKLNSSARQASAEVAWTSINNFYRRCKEGVKKKGYPKFKKHSRSVEYKQSGWKLSDDCLLITFTDKFKAGKFSLYCNSETREDLFTLKINRVRVVRRADGYYCQFCLDVDRKESGNYTGNLIGIDLGLKYFYKDQNDNAVVYPQYLRKSEKKLKRLQRQLSKKFVKSKKPQSNNYHKARIRLGLCHLKVSRQRKDWAIKQARCVVASNDVIVYEDLNIKNMVKNHHLAKSISDASWYQFIQWLEYYGKIWNKVVVSVNPNFTSQDCSNCGHRVKKSLSTRTHVCPSCHTEICRDTNAAINILKRGLEAVGIEWNNSTVGHTETADLASYGGASLTETLGET

SEQ ID NO: 20484 - protein, 169 aa, Okeania sp.
LSFVVEIQPEVLLRTDSSVGIDLGIKTFATFSDGTKVDAPKPLKKRIKKYQKLSKSLSHKTKGSKRYEKARVRVAKFHAKLKDTRTDFLHKLSTEIIRENQTVVLEDLNVSGMVKKRCDPATTPVARERAPRDRKLSRAISDLGWRTFRTFLEGKAEKYGRDFRVISRP

SEQ ID NO: 20485 - protein, 421 aa, Okeania sp.
MYGFQQVLVGKNSELIAILKFLCEQSHKLTNMGIYYARQLYFKSKKTIGKFYLEKVYKNNNHYKVIHSQAAQQILRTLAESFRYYYGLIKAYTEGEITKIPRIPNYRKKGGMATFSYPKQGLKLKGNQIRVPLGKTCKRWFGLDCFYIYKPSNLEFNSLKELRILPINRCFYWEFVYEKEVTIPQLNQDNGLGIDHGLNNWLTCVSNVGNSLIVDGKHLKSMNSWYNKQISTIKENKPTELWSNRLAEITEKRSRQMLDGINKVIRIVINHCLENNIGTIVFGWNKRQKNEIKLGKKNNSEFVQIPIARLKERIAQLSQEYGIIFIETEESYTCRGEWPFAPTFLDGDYPPIYGEKLGAGARTQVPSKEAPTLRANDWKPSGRRTKRGLYRTGNNCFVNADCKVAANIIRKVSTKLGLDLS

SEQ ID NO: 20486 - protein, 462 aa, Okeania sp.
LKYRYKYRIYPNHIQITKLNQLFGCCRYVWNQSLAYCNQLYAGGQKKPSYVDLTKQFITQAKKELLWLKDVASTPLQQSLKDLDQAYKNFFDSCTGKRKGIQVKPPRFKSRKSRQTARFVGANYKICQDKIYLPKVGKIKIFWSRKLPSQPSSVTIIKDSYNRPSIASFVVETCAENLPKSGNSIGIDLGISTFATLSNGEKFKLSLPLKKNLKKLSRFQRKFAKTELGSKRRERARVRVAKLSYGMLHKHAKVKDISYGMLRKRTDFLHKLSTDLVRKYDTIVLEDLNVSGMVSYGMLRKRNRKLAKAISDLGWREFRTLTEAKCEKYGREFGTISRWEATSQKCSNCGFKGGKKELNVREWTCLNYGTLHDSLRLTGGYRDINAAINILEVIQPKTKVETTEAKVIETPVQLSLFNEVPEGHRSIIYRTRSHRKSSPKKDANGSDVSTRSESPIQLRLFD

SEQ ID NO: 20487 - protein, 372 aa, unknown
  TnpB Polypeptide
MKLTAKVKLQPTPEQHGVLLQTLETANAACNDISQQAWASQTFQQYPLHHLAYHAVRERYGLSAQMAVRAIGKVSDAYKLDKRTRRTFQPRGAFPYDDHILSFRTDEQMVSIWTLEGRQRMPYLCGERQRKLLEGDRGEADLCYIGGEFYLFVACEVETPAPEDVGGFLGIDLGIVNLAADSDGQHYSGEQVEDQRRKYQHRRRNLQRKGTRAAKRKLRQIAGKQQRYQTDTNHRISKRIVQTAQDTGRGIALEDLKGIRERVTVRRKQRARHANWAFFQLRTFVEYKAALAGVPVVAVDPRNTSRTCPVCGCVDKRNRPSQDTFSCVSCGYSANADTTAAANIAARAVVNQPNGLIAQGSAAQAAATSFPL

SEQ ID NO: 20488 - protein, 384 aa, unknown
  TnpB Polypeptide
MIKTHKIALNPNRDQIAWFYQQCGYAKFAYNSALSDFKKKLASDTFLSMYDLNKRFNHKKEAFDWTKAQDQRAAMYAVHNLGDAIDNWKAKRAKFPRLKKRGCKHSYTTDEQSVRIEGKRIKLPKIGWVKTFEELRFVGKIVSVTLSRTAHRWFASISVEVQPPLHRCPASSEFVDWFASIVEVGTPHEIDRSIYPTIGIDVGISTLATLDDGTTYENPKALKRYERKLKREQRKLSRKVFLSQNWYKQQRIVERIHYRIVCIRKDAHHKATTDILIGVSGMGIETLQITNLLKNRKLAKSLSDAALEGFLEKLKRKAETLGIPIYKADKFFASSKNCSSCDNKKEDLTLSDRQYQCDHCGTSIDRDVNAAINLRTLAAGYAES

SEQ ID NO: 20489 - protein, 427 aa, unknown
  TnpB Polypeptide
MVHAFIDKSTFVNRRMERRFRLMKLNQQVRLYPNKTMKRVLDSLCDYRRYCWNEAIACWNNQYEARLIGIPEDILNKLRRKTGDLTDEEQFLVNQYPSPSHYSVQNELVAQKEDWQYAHSSRVLQQAVKDLAHAWDFFFKHQDTAGKPTFKTRKAPKQGFKTDRARIHHGRLLLDKPHGYRGQWKTIRFKGVSIPDGKLTLCSVTRINGRYIATFTIEVEPNPSPRTGQKTAVDANVDHFDTTEGQTSLKPEVLNPLYARVRHYQRILARKRHRNPRAIHSKGYQVTRTKLQRTYERITNIQKDLLHKFTTSLYQQFDTIVIEDLDVKKMQMSKRAKNLHRPLLGQFRQMMEYKSQKFGKTLIIADRFYPSTQRCSACGFIKTGDDKITLSGNSKHGTGHNEYICYHCGYEDDRDHNAVLNLLALAE

SEQ ID NO: 20490 - protein, 250 aa, Trichodesmium sp.
LTKAAFKCKDGQVYINLGINSLVTTSDGAKVAYPKNLQKLHKKLRRDQKSLSRKRGKKSNNYQKARLQIAKIHALIKDSRLDYTHKLTTKLIRENQTIVVDDLAAGNMVKNHKLARAINDANWVELLRQLEYKAEWYGGTLIKIKRYFLSSKRCSNCGHVVEKLPLNIRAWDCPECASHHDRDINASINILAAGQAVSVWVATVRPEESKSQRASAMKQKALNTDAKESLAVSSIAAPGGCQLRIEFRKH

SEQ ID NO: 20491 - protein, 543 aa, Lachnospiraceae sp.
MAKPRAKQKTEYQTSMTRSVFLYGKPNKGKYETLRHIQDVYADLANQYITALTANDDYAMQLVKNDKKDSSVRKLEKSIRLKNVNSAFCQNAFDCAFTKLSNRLNAIRLDMYARAQSLFTQSQVLFAMCVMQKPQADMVQMMEDLKAAAGRQDRIDFYAKCADTIRGMKADAFAFEQKVFMDSYQSECLMYAVPHITREQVSLDSRLMRIEEATNIQAQYVIAITDPFTKGSRIVVPLTTSGNGLRRIKQYGMAGTVHYSVWTNGKIRVQASFNKHVEQPKTNKYIGVDTGIKDCFYCSDGRSIGSMDEVLRYYQTVVEPAFADLSDLRNKKTKILHYLHTHPSIPADVRAKLLQKVDLLEHMIRTANAPYRKKRGYYQRLSHEVADSVRKYVEHVDQNTVTVIERLDIREFHKSRKVNGMFSTFARGQLQQKLMDELNWHGKTFVEVEPDYSSQTCPVCGHIDAASRNGKTFRCTQCGHTDDADHNAAVNLKNRATDQEFLDICEQYKYDHDALQKAIRQLGEQRSAAWKKEHGPVHMRPAV

SEQ ID NO: 20492 - protein, 391 aa, Bacillus sp.
MLVKKAFKFRIFPNTKQVELINKTIGCSRFVFNFFLGKQKEKDAYWYIVEEMRQNGQLPSNNWKGPFFNKNESVKAVRELKEQYSFLKEVDSISLQKSVENLADSYQRYYKKRSKKPQFKSKKNKIQSYTTKYTNGNIAVLDKHIKLPKLGLVRFAKSREVTGRIINATIRRNPSGKFFVSILVETEVQKLPKTNSAIGVDLGLKDFATLSDGSIFHNPKWFRTLEEKLAKAQQILTRRKQGGSNWNKQRIKVARIHEAISNARKDYLDKVSTYLVKNHDVIGVEDLSVSNMLKNGHLSKAISEASWSQFRTMLEYKAKWYGKQVVVVAKNFASSQLCSSCGHKHKDVKNLALREWTCPSCGSHHQRDVNAGLNLRNEAIRLLTAGTAGIA

SEQ ID NO: 20493 - protein, 382 aa, Escherichia sp.
MRRFAGACRFVFNRALARQNENHEAGNKYIPYGKMASWLVEWKNATETQWLKDSPSQPLQQSLKDLERAYKNFFRKRAAFPRFKKRGQNDAFRYPQGVKLDQENSRIFLPKLGWMRYRNSRQVTGVVKNVTVSQSCGKWYISIQTESEVSTPVHPSASMVGLDAGVAKLATLSDGTVFEPVNSFQKNQKKLARLQRQLSRKVKFSNNWQKQKRKIQRLHSCIANVRRDYLHKVTTAVSKNHAMIVIEDLKVSNMSKSAAGTVSQPGRNVRAKSGLNRSILDQGWYEMRRQLEYKQLWRGGQVLAVPPAYTSQRCACCGHTAKENRLSQSKFRCQVCGYTANADVNGARNILAAGHAVLACGEMVQSGRPLKQEPTEMIQATA

SEQ ID NO: 20494 - protein, 373 aa, unknown
  TnpB Polypeptide
MQVKRHCAVKYRMYPNRAQAALIDRTIGCARFIYNQMLETRIGTYKATGKSCNPTPAQYKDRYPFLREVDSLALCNAQLNVAKAYRNFFRDPKHIGFPKYKAKHRNRQTYTTNNSNNNVTLDEGGRHLKLPKVGIVRVRQHKRIPEDWKLKSVTIEHCKNGEYTATILFEYETQALEPVRPVHIVGLDYSSHGLYVSSDGERADYSRFYRRMEPRLMREQRRLSHMVKGSGNWVKQKRRIAKLAAKVGNQRADFLHKTANRLAARYDCVGVEDLDMKNMSQSLTLGKSTMDNGYGMFRTMLAYKLERQGKQLVTVDRFYPSSQLCSDCGYRNKDTKDLHIREWTCPDCGVWHDRDVNAATNIMHETRRLMQER

SEQ ID NO: 20495 - protein, 314 aa, unknown
  TnpB Polypeptide
MPRYREKGGMFNLILSANAINIKKGFLTVPMSREFSKLHGGKQVKIPFPKRLEGKTIKEIRICPIYNGVYFKIQYCYLQEEEPQDVSVDKVLAIDIGLENLATCVTNTGTAFIMDGRKLKSINQYWNKQKAYYQGIANKQGQKKTHRLYVLTRKRNHRTQDYIRKVARYIINYCMEHRIGTIVCGYNGDFKRSMNLGKITNQQFTQIPFGNLRETLKGLCERYGMKYIEQEESYTSTASCLDLDEIPVYKPEQPYTGAFSGKRVHRGLYQFADGRMANADVNGAANILRKSKQNFDYEELCRGLLDSPLRIRIS

SEQ ID NO: 20496 - protein, 505 aa, Streptomyces sp.
VFLGSLAAADLAVRSRQGLAHDAASWAVRKRGLTGRSSARWAGSITKATHDQWALARRGQAAHLAWLRIQIASIEARLARPLGARADKRAGLVRGYASRGEWHAKSRRLHTLKDRLVGVEADRQAGRVRVVRGGKRLANTRHHLQAAGLDAAAWRERWRAERMFLTADGETGKRFGNETIRVTDTGQVSVKLPAPLVHLANAPHGRYLLDATVAFRHRGQEWRDRVTANRAVAYQIHHDTVRGRWYVTASWQRAAAPMLPLEAALARGVVGVDMNDDHLAAWQLDMHGNPVGEPQRFFYDLTGTAAHRDAQIRHALTRLLHHTRRCGAAAIAIEDLDFTDGTSREKHGRNKRFRRLLSRFPTAKLRARLVSMAAEQNVAIVAVDPAYTSRWGAQHWQKPLTTPRRKMSRHDAASIAVGRRALGHPIRRRTAPPPHHQSDGAGHRTAQARPEIRRREETRPHLAGPRTGCAPPGGGAKAGDQGAQHRSGHPAEQESWQHDSLPLSL

SEQ ID NO: 20497 - protein, 268 aa, Escherichia sp.
VKRLQAFKFQLRPGGQQEREMRRFAGACRFVFNRALALQNENHEAGNKYIPYGKMASWLVEWKNATETQWLKDAPSQPLQQSLKELERAYKNFFRKRAAFPRFKKRGQNDAFRYPQGVKLDQENSRIFLPKLGWMRYLNSRQVTGVVKNVTVSQSCGKWYISIQTESEVSTPVHPSASMVGLDAGVAKLATLSDGTVFEPVNSFQKNQKKLARLQRQLSRKVKFSNNWQKQKRKIQRLHSCTANIRRDYLHKVTTTVSKNHAMIVIED

SEQ ID NO: 20498 - protein, 472 aa, Oscillatoriales sp.
LESTKEISDVGNKASEKSKSFFPYWNEFSHEMSEWLSLPTKTDWQEEALTNANGTASKTGVNSWYRVKQTLVQNKKCLKTCLQSSTDRVVDCTDGDSIKLKSHKLRIYPSQELNKVWRKWLAACRYCFNQAIAMQRKKPLSKLQLRNEVMRGDLPEWVKETPCHIRQNAIFDAHRAFKASSDAKFRSIRDYSQTIKFNDSNFKKGTWYPSLTKGLTYHTSEIIPECDRGTQLVYCKGRWFAVFPLSVTAEPTDATGIIALDPGVRTFMTGFDGNKFLEFGGGDMGRIARLCQHLDNLMSRMSQATKQRRKRMRQAAHRMRIRIRNLVDECQKQTACYLTSNYRVIFLPTFESSQMVAKARRKIRSKTARAMLTWAHYRFKQTIKHQANVRNVNVIDVTEEYTSKTCTHCGHVHQKLGGSKVFTCPECGCSIPRDYNGAFGILLKALRDTASISYEGDSALVTLSGNSRASVA

SEQ ID NO: 20499 - protein, 379 aa, unknown
  TnpB Polypeptide
MMKTFKYKIYPNKTVKAKIDEILTTCRILYNNSLAERKQAYEERKESISYSQQQNALPQKKNDNEYLNSVHSQVLQDVLRRLDKAFDGFFRRTKAGEKPGYPRFQSKNHYNSFTYSQSGFSLEDSRLKISKIGEVKIKLHRQIEGNIKTLTVIRKNGRYYACFSCEIHPEELPATGAVVGIDMGLMAFVTTSDGDIVETPKTYRKAESALKHQQREVSRKVKGSNRRRKAVTVLSRQHEHVANQRRDISFKVAHSLLNQYDVIVHEDLNIKNMVQNHNLAKSIHDTGWGIFLNMLSGRAQTNAAKKVIGVDPRNTSQICSKCGEIVSKTLSDRVHLCPYCGLEMNRDVNAAINILKRGMVSICYDVRDGLSWMGISIPV

SEQ ID NO: 20500 - protein, 382 aa, unknown
  TnpB Polypeptide
MRFVKNLYIERNQEIYKTEKRFVSAYEFSAWLNNQYIEENPDKQWIKEAYQKAVKQAIINTETAFKRFFKGKAKYPRFACKSKQDTKFYFVRNGKNQPVKASRVSIQVPSMGWVHIKEKGYIPVKGIRSGTIEQRGGRYFISVLADVDLPNKQASEHDCAPAGGLGLDFGVKNPVMDSNGNSMKDIERTDQVRFLEKKLKRERRRMSRMWEANVKDKQYYTSGKKKGRLKSFSYKRPLRECRNYQKQRKVVQGILLRLNNIRLDIQKQMVAEWVRAKPAYIAIEDLNIKGMLKNRHLARSVSKRNFYRMRLLLTQKCAEHDIQLRLVNRWYPSSKTCNNCGHYKADLKLSDREFACPECGAKLDRDYNSAMNLRDTTDYIVL

SEQ ID NO: 20501 - protein, 165 aa, Clostridioides sp.
VIAVEKAYKFRMYPNKKQQELINKTFGCCRFVYNKYLAKRIEVYKNNKETFTYKQCSSDLTNLKKELKWLKEPDKFSLQNALKDLENAYNKFFKEKTGFPKFKSKKTNRFSYKTNFTNGNIMYLGQHIKLPKLGMVKIRDKQVPKGRILNATISKEPSGRYYVSL

SEQ ID NO: 20502 - protein, 299 aa, Geobacillus sp.
MNRLFFLPKSEHMCYTILIHDLLKGGSTMLRGQKVAFRASKADLERLRACNRESARVWNECLRLAKEHFLQHGRWISKSELQKQTKGRFHLHSQSIQAVCHQYLFARQSAQAAIQKGHRHVRYPYKPKTFFNTKWAKDGFTIHENGKITLSMGIHGGKREKPIIVYVSQLPQGTIKEIECCYDHGWYLAITYDNGQEAKAYQPGHAVGVDLGEIHTIGAFCENGQSLIITGRKVRSLHRLRNKKLAEIQRRQSKCQKGSRQWKKYERAKQYVLSKSERQLRDATPRFVSSTASFANAIC

SEQ ID NO: 20503 - protein, 316 aa, unknown
  TnpB Polypeptide
MRKLLKSFKTEINPTEEQKAKIRKTIGTCRYIYNFYLAHNKELYNKGEKFMSSNQFRVWLNNEYLPKHPECFWIKEAYSKAVTQAVNNGQAAFIRFFKHQSSFPRFKKKNRSDVKMYFVKNNPKDCRCQRHRINIPSLGWVRIKEKGYIPTTKDGYVIKSGHVSIKAGRYYVSALVEIPNNKIANSFNEGIGIDLGIKDFAIVSNGKTYKNINRSVRLKKLGKQLIREQKNLSRKYENLKKGESTQKANIQKQRLKVQKLHHKIDNIRTDHINKTIAEIVKTKPSYITIEDLNISGMMKNKHLSKAVASQSFMNSE

SEQ ID NO: 20504 - protein, 402 aa, Shigella sp.
VKRLQAFKFQLRPGGQQEREMRRFAGACRFVFNRALALQNENHEAGNKYIPYGKMASWLVEWKNATETQWLKDSPSQPLQQSLKDLERAYKNFFQKRAAFPRFKKRGQNAAFRYPQDVKLDQENSRIFLPKLGWMRYRNSRQVTGVVKNVTVSQSCGTWYISIQTESEVSTPAHPSASMVGLDAGVAKLATLSDGTVFEPVNSFQKNQKTLARLQRQLSRKVKFSNNWQKQKRKIQRLHSCIANIRRDYLHKVTTTVSKNHAMIVIEDLKVSNMSKSAAGTVSQPGRNVRAKSGLNRSILDQGWYEMRRQLEYKQLWRGGQVLAVPPAYTSQRCACCGHTAKENRLSQSKFRCQVCGYTANADVNGARNILAAGHAVLACGEMVQSGRSLKQEPTEMIQATA

SEQ ID NO: 20505 - protein, 403 aa, unknown
  TnpB Polypeptide
MGGTIYKALKIRVCPNKEQETQILKTLGSCRFIYNQMLAERIEVYENWKKSGEEKRVLYEHKYKTEREYKEEFEWLSEPDSIALQQARIDLSVAYQNFFKSLSGKRKGGAVGYPKFHKKGQKDSYRTLALSNNIDIDYERRKVKLPKLGWITYRDKRGGIKGTIRQATVSRSKTGKYFVSILFEQELVLPGVEITPNLKVKGLDMSLEKFYVDDLGNSPAYERIFRKNENKLAKLQRKVSKKKKGSNNRKKAQLKVNKTYEKITNSRKDFSQKLSSKLVKENDVIVVENLNLKAMAQCLNFGKSVNDLGYGAFLNQLNYKTLWYNKILIEADKWYASSKTCSKCGYIYKDLQLKDRVFLCPSCGFEIDRDWNAGKNLKHYGLKELGLGQPDVKPMEILGCQGH

SEQ ID NO: 20506 - protein, 287 aa, Rhodococcus sp.
VSFSVETTLPARALPPTGAAAVADRGVGGSLVGVDVGVKHLAVLSTGEMIENPKHARKQAKKLRRLEHRASRRVGPDRRTGQQPSRRWQRTQDQIRAVHTRIAAGRCDHLHKLTTRLVRDFDTVVVEGLNIAGMTRSGGAYKRGLNRALHDAGLAEIRRRLAYKTEWTGTGLHVADRWYPSSKTCSNCQVVKAKLPLKVRVFTCDACGYRADRDHNAALNLAALAAVVDGCASSASCGRDVKEARQKPTIRPATRRADGIAAGTPHSGERGRGNPDTHAECTKQHSA

SEQ ID NO: 20507 - protein, 483 aa, unknown
  TnpB Polypeptide
MQIGNRFRAYPDKTQSPILLQWIGAQRFIYNAKTQEDRYFRSFRRKFSAESSPIDQQYAQFRAESPWMSIIPGVVLRNGAVRWKQAYARYFAGLAKRPSLHKKTGEQSVWLTRELFRFVPETDAAGVTTHHLFIGTKKHPLGEIKIVAHRGFQPPASIHVSVHNHQWHVSFNYDDAVPEPSDTDTAAWLMQFSDAELLARTFGGDRGVAISLAGNHGETFNIDPVQKKRIEKKQAAARRWQRKIARRPRGSSNRKKAIRRVGTLRAYEARVRDDVAHKTSHTLVEDPKYLLYVFEALGVQRMTRKARAKPDPDHPGHWLRNGARAKAGLNSARLRSCWGRARTFTGYKARRKGKLCIDVSPNYTSQECAECGHVHPDNRVTQARLVCQACGHTDNADHNAARNIARRGVQLLLSGGWSPKAKKRCTVRRTGDPEIGADCAKSPARVLPAPATPVETKVSRRRRKASAHASLKQEWEAPPLEVA

SEQ ID NO: 20508 - protein, 404 aa, unknown
  TnpB Polypeptide
MITSYKGGEIMEKAYKYRIYPNKTQQQLIQKTFGCVRFVYNYYLNKQMQRFKDNEKLLSFYKLSSDLTVLKQNLEWLQEPDKCSLQNTLKDLSIAYDNYFRKMKQSNYIRYSDKKIKHFKEINKKLTIYDSDGHPKFKVKKDRYKSYKTTNTNNNIKFLDKHIQLPKLGKVKITDSMVINGRILNATISQEPDGNYYVSLCCTDVELNQLLKTNKSVGIDLGIVDFAIQSDGIRISNQRFFEQSEMKLIKLQRELSRKTIGSSSWNKSRIKITKLHKHIAEQRRDFLQKLTTEIVRNYDVIKIEDLSSSIMMQRKQNTNALTHTRNKHIEDVSWYEFRRQLEYKCKWYCKELIIIDKHYPSSQICHICGHRDGKKDESIREWTCKHCDSILDRDLNAAINILNF

SEQ ID NO: 20509 - protein, 394 aa, unknown
  TnpB Polypeptide
MIKSIKVMLIPNNKQETKMFQYAGAARFAYNWTLSREQENHKDGGKFISDNNLRKEFTIMRNSDEYIWLKSVSNNVTKQAIKDACNSYNRFFRGLSKFPKYKSKKKSKPSFFQDPIQIKFTGTHVRLEGFSSSRKKNKLKLNWVRLAEHNRIPFGKDVKYYNPRITYDGINWWISVGIETNDSTDIPKNDGIGIDLGIKSLAICSDNNIYKNINKIQKVKKIEKRKRRLQRSISRKYEMNKKKGKYCKTNNIIKKEKLLLKTNHRLTNIRQNYLHQTTSEIIKRKPSFICIEDLNVSGMMKNKHLSKAVQQQGFYEFRRQLEYKTNWNNIKLIIADRWFPSSKLCSCCGDIKKDLKLSDRIYRCSCGNIIDRDYQAALNLKIYGENVLINKSVA

SEQ ID NO: 20510 - protein, 321 aa, Salmonella sp.
MVGMKRLQVFKFQLRPDGQQERDMRRFAGACRFVFNRALALQNESHEAGNKYIPYTRMASWLIEWKSAAETQWLKDAPSQPLQQSLKDLERTYKNFFQKRAAFPRFKKRGQNDAFRYPQGVKLDQENSRIFLPKFGWIRYRNSRQVTGIVKNVTVSQSCGKWYISIQTEYEVSGPVHPSKSMVGLDAGVARLATLSDGTVFEPVNSFQKKLVILQRQLSRKVKFSNNWQKLKRKIQRLHSRIASIRRDCLHKVTTAISKNHAMIVIKGLKVRNMSKSAAGTVSQPGRNRDGMKCVVSLSTNSSGVGGLHTQASVARAVVIR

SEQ ID NO: 20511 - protein, 395 aa, unknown
  TnpB Polypeptide
LKTNDETESKLSRFCGSSRFVWNKALAMNLERLEKGQGILWYNELAFWITLWKQSDEYGFLEECPSQVLQQKLRDLDRAFRDCFDKTQPLKRLPVFKKKGKGDSIRFPQGLKTVGRRIFLPKIGWIGFHKSRSICGKVKNITISKKGERWYASIQVEQMVEIPGHPSDSEIGIDAGIICFAAFSDGTMIKSVNSFRRHQDRLAKEQRKLSRKKKGSQNWKKQKKKISGLHQTIANVRSDLLHKLSTETSKNHAWVYVEGLQIKNMSASARGTIQEPGSGVKAKAGLNKSILDQGWFKFKRQLDYKLSWQGGRLIEVDFRHTSQRCSCCGYTAKENRLSQADFRCLACGYEENADVNAAKNILTVGQTGVACQANHMSGRQQEPAGTREEVLPVAS

SEQ ID NO: 20512 - protein, 363 aa, Bacillus sp.
VQLARYYYRIHGKWINKSNLQAELKGLYPLHSQTIQAVCHKFLRAREGVRQARKTNKSIRYPYKEKFVFHPKWVDKSFVLEGRKLILSLGRWQGKQQTPLVLTLATVPTGVVKEVELVYDGRWHACLSYEDGINPVPIQDGHTAAIDPGEIHTIAAVNTSGQALVISGRKMRSIHRLRNKKVRELQILMSRCQKGSRKWRQYNQAKKYILSKSERQLGDLLHKTTRAFVNWCVEQKVGHVALGDVEGVQRHTSKRNKKRKRTRSKQVNQKLSNWSFGKLTKQLAYKLEAAGVSLSKENEAYTTQACPACGKRNKVRSRNYQCSCGYERHRDIHGASNILSEYLYGKFREVMLTSVTYLRPIQA

SEQ ID NO: 20513 - protein, 373 aa, Bacillus sp.
MDEEVKLMIVHKAYKFRIYPTEKQAILINKTIGSSRFVFNHFLSLWNDTYKQTGKGLSFNKCSKQLTQLKKEIVWLKEPDSIALQSSLENLSDVFDRFFNQQNDAPRFKSKKNKVQSYKTKHTNGNIAIVEHTIKLPKLGFVKFAKSREIEGRILNVTIRRNPSRKYFVSILTETKVKELPKTNSSVGVDVGLSDFAILSNGQKFHNPKFFRALEQKLAKAQQVMSRRTKGGSNWNKARIKVARIHEKITNARKDYLDKISTYIVKNHDIVGIEDLQVSNMLKNEKLSKAISEASWSQFREMLEYKAKWYGKQIVVVSKTFASSQLCSSCGHQHKEVKRLALRQWTCPSCGTDHDRDINAATNLKKEALRLIN

SEQ ID NO: 20514 - protein, 443 aa, Bacillus sp.
MNVGSAQPKAFGRGPLEFCRKKKGWNFPFVIDRNICSLYNDDKGGDLMYRTLKTGFTAPQSTIQQLFHIRRICGTIWNDCVQLARYYYRIYGKWINKSDLQAELKGLYPLHSQTIQAVCHKFLRAREGVRQARKTNKSIRYPYKKKFVFHPKWVDKSFVLEGQKLILSLGRWQGKQQTPLVLTLASISTGVIKEVELVYDGRWHACLSYEDGIEPVPIQDGHTAAIDPGEIHTIAAVSTSGQALVISGRKMRSIHRLRNKKVRELQILMSRCQKGSRKWRQYNRAKKYILSKSERQLGDLLHKTTRAFVNWCVEQKVGHVALGDVEGVQRHTSKRNKKRKRIRSKQINQKLSNWSFGKLTKQLAYKLEAIGVSLSKENEAYTTQACPACGKRNKVRSRNYRCFCGYEQHRDVHGAANILSQYLHGKFREMMLTSITYLRPVQA

SEQ ID NO: 20515 - protein, 391 aa, Bacillus sp.
MLVNKAFKFRIYPNKKQTELINKTIGSTRFVFNFFLGKQKEQDAYWYIVEEMVQNGQLPTNNWKGKCLNKYETVKSVRELKKQYTFLKEVDSIALQKSVENLADSYNRYYKKQNKYPRFKSKKNPVQSYTTKYTNGNIAVIDKHIKFPILGLVRFAKSREVTGRILNATIRRNPSGKYFVSICTETEVRELPKTNSAIGMDVGLKDFAIISDGTTYSNPKFFRTLEEKLAKAQRIMSRRTVGGANWYKAKIKVARIHEKIVNARKDYLDKISTEIVKNHDIIGMEDLSVSNMLKNHNLAKAISEVSWSQFKTMIEYKAKWYGKQVVTVAKNFPSSQLCSCCGYKNKDVKHLGLREWECPKCHAYHDRDINAGQNLKNEAIRLLTVGATGIA

SEQ ID NO: 20516 - protein, 483 aa, Bacillus sp.
MAKAKTSSYILEFELIVQSARNKVILDKKMRIGKSIYNACLGYCLKRLKAVKADKEYRTLLKEPSSKVRNQRLREIERSHGYSEYQVHEFAKSPKYHFGKALGINEVQKLATRAFQSVEKVHYHQAARVHFKKKFDDMSIENKSNNTGLRKKDMKILWGELELDFKVKRNDDYALEGLCDRTKYVRVIKREIRGKQRYFVQLVQEGLPPKKYNCEPKNDDSKRVGMDVGTSTSAIVSEENVMLVELAPDCTPDYKELRKVQRAMDRSKRASNPDNFDKNGVAKKGRRTWTYSNRYIQLKAKRKELYRKLTVKRKQSHEQLANEILALGSDIRVETMQFQSLAKRAKNTTRNKKNGKINKKKRYGKTIAHRAPAMLISIIDRKLRYQGRSIKKIDTYSTKASQFNHATQTYAKKQLNERWNDIQGLAIQRDLYSAFLIGNTHDNLDSVDVDLCNDQWKKFVALHHLEIERLRQSSNKTLSWYVA

SEQ ID NO: 20517 - protein, 443 aa, unknown
  TnpB Polypeptide
MGGSKMAKVKKLRGVQQNQVYTDSQTEAVLTYLCEQSNSLYNCGVYWSRQIFFKTKRIISKYDPIYEVGGNIHAQAMPSVAAQQTLLSVSEAFKSFKGLRELWFKGELEDKPKPPNYRDSGGLFKVAFPNIGAGKPTLVGGMIRFPLGLQVKRWFGLKEFLLPLPKNLDFAKVKEFTILPKNGVFYLECTYAMEELETDLDPDQALAIDFGTSSNLMACVDTLGNSFLVDSRQAKAMNQLYNKRVASRKKGKPLDYWDSVLDGFTRKRNHQMRDMVNKAARLVSDHCLASGIGTVAIGWNDGIKDGCNMGKKNNQQFVQMPLAKIKTRLEQLGTLYGFRVVQTEEANTSAASYLDGDSLPEHGCKPDGWKASGKRSKRGLYRSGDGSLVNADLNGSANILRKVARNLGIDLSRLGRRCLTTVSRVKLWVAPKSNSCLKESHWL

SEQ ID NO: 20518 - protein, 302 aa, unknown
  TnpB Polypeptide
MIVIKGYKTELNLNNHQKTACKKHCGAARFAYNWGLAKKMAAYNLTGKSPSAIDLHRELNVLKQGSLSWLYEVSKCAPQEALRDLDKAYANFFRRVKQGDKEVGFPKFKSRRHGLGSFRLTGSIKVFERSIQLPRLGKLRLKEVGYIPTYGVKILSATVSEQAGRWFVSVQVEQQVNEPLPNSNEIIGVDLGIKAMATCSNGLIFDNPKPLKAKTKQLKRWQKRLSRRVKGSQNRKKAQRKVATIHARIANIRSNALHQATAKIVAQKPQAIVLEDLNLKGMVKNHKLARAISDVVVCSLNF

SEQ ID NO: 20519 - protein, 464 aa, unknown
  TnpB Polypeptide
VNISTGRKRASVPSICGVLPPNERQPQRAQMRCNSFEQFWMRWNRCRKYNRLHAHSSSGLNLPKPAWDKEVRHPMAQSQNGIIIRNTTIKVRLYPTPAQATLFDKTFDCCRYLWNRMLTDQARFYAETDVHFIPTPAKYKKSAPFLKEVDCGALISVHQNLRRAFQRFFDHPDRFRHPAYKKKKHCKNSYTIYCQYYRSGNGASIYLTDNDIRLPKAGIVKARLYRKPLHWWKLKTATVSKSPSGKYFCSLTFEYAVKPPKAVQPTVETTLGLNYSLSHFYIDSNGRAADAPHWIQHSQDKLGRMQKRLAQMQRGSKNYEQQLHRLQCLYEHIANQRKDFIHKESRRIANVWDAVCVKDTDLVEMSQTLQLGNVMDAGYGQFRTYLQYKLERMGKSYIVVEKYFPSAKTCHFCGAVNDALAADARRWRCPSCGAVLMRANNAAENLRNQGLAQYYANQGRRIPA

SEQ ID NO: 20520 - protein, 485 aa, Streptomyces sp.
MKQFKPQPGFTVLAHKLALDPNTTANRHLHSHGGAARAAYNWAVAYITAVWWQRKAEQSYGIAEDQLTEWRSWSLPSLRKAFNEDKRTNPRFADWWGENSKEAYNTGLAGAAAAFDNYAKSKSGRRKGRAMGVPRFKSKRKAHLTCRFTTGTIRIEPDGRHVTLPRIGRVRLHEDASRLRALLDAGHMRILSATARLHRGRWFVSFQVEEKHQLVKVARPDAAVGIDLGIKTLAVLADSGGVLGEEPNPRHLERAQKQLRRAGRVVSRRQGPDRRTGQQASKRWEKASRARNKIHHRVANLREDTLHKMTTRLAREYGTIVVEDLNVAGMGRNRRLSRRVADAAFGEIRRQLTYKTRRRGTRLVVADRWYPSSKTCSRCGVVKAKLPLGMRVFVCENCGLVIDRDANAGHNLAALAARTTGTGVAGDLDLVKAKSKPRGADHKTRGTRPRREAGTGRAGGAIPGPRAGAETGDRQQDTGAQFVLW

SEQ ID NO: 20521 - protein, 464 aa, Bacillus sp.
VWDESEIGQGMAFAILIDRKLSISFDTPQKLLYDEYITKEVKKMTIYLTQSNQIRGLSKEQFKQLKEMCYYAKNLYNVGLYNVRQHYFTEKSFLEYESNYYVSKTNENYKMLQAGVSQQILKVVDRSFKSFFNLIQKAKNGEYRFQDIKIPKYLKKDGLFTLIFSTNAIHIKDGYFRVPVSRLYKKMNPEHKDILIPFPSRLEEKKIKEVRIKPRNNGQFFVIQYVYEQPYETVDLDRHKALAIDIGLNNLASCVDTDGASFLVDGKKLKSLNRLYNKKKARLQSVAMKQGVKYTRQIDTLTLKRNNQVNDYIKKTARIIIDYCLENKIGNLVVGYNKDFKRNTNMGKKNNQQFTQIPFGNLREQLFNLCERYGIEYVEQEESYTSKASFFDNDKLPKWNPSDETKHVFSGKRVKRGLYRTSTGYEFNADINGALNILHKSNLLDTSILQARGRLARPVRIRVT

SEQ ID NO: 20522 - protein, 368 aa, unknown
  TnpB Polypeptide
MNKAVKYRLYPTNEQEIMFAKTFGCCRKVYNLMLADKIASYKDTKSFGKQTPAMYKSDYPFLKEVDSLALANVQLNLQSAIKSCFDKSRKRQNGFPKFKSAKHSRKSYTTNNQKGTVAIVSDWYIRLPKIGKVRAVIHRKPDAGWTLKSAAISQDSDGKFYASILFEYDAVIPVVPVSDNAIGLDYKSDGLYMDSNGHCPTGHKYYRQNQERLAHAQRKLKHMMVGSNNYRKQQRRIAKIQKYTTYQRMDFLHKESTKIANSYDIVCVESLDMKAMSNIGFGNGKATLDNGYGMFLNMLAYKLADRGKHFVKVDQWYPSSQLCSCCGRQKKMTLADRIYRCDCGLTINRDYNAAINIKNEGLRLLKTA

SEQ ID NO: 20523 - protein, 130 aa, unknown
  TnpB Polypeptide
VHEKIANQRNDFLQKQSTMLVRENQTICIEDLSVKGMIRNHKLAKSIASVSWAKFFEMLEYKASWYGNELHRVPTMYPSSQTCSSCGYRNPRIKNLSIRIWECPKCHAVHDRDTNAGINILKKALQMQSA

SEQ ID NO: 20524 - protein, 413 aa, Halobacterium sp.
MEKRRTVPIALNVDSHSAALLEDTVDEFLWAANYVTRHAFDGEYVTTSKTTLHDDTYEDVRDETALHSNHVQAARNKAAEACKSVVEKWKQGKKGSMPHFTSPHLVYDHRTATFHDEYVSLATVDGRIEADYVLPDEERDTPHAEYFFSDEYETTGAELHYSNGNWMLHIHCKTDVESDTPEQATENGTVLGVDLGVTNLAVTSTGSFWTGDEFDHWRREYETRRGSLQQCGTRWAHENIQSVGRKEEGRFTITLHRISNDLVAEARTHGCSVIAFENLTDIRERTGASWGHKWAFNRLYEYVEYKAAEYGINVAQVDPENTSRRCSTCGFTHPDNRDREDFECLKCSYENHADYNAAKNIGLRYLRRNQTGSGGGAPVGVRLNSGTLNANGAYDPPAEDSARAGVHAESPPL

SEQ ID NO: 20525 - protein, 406 aa, Streptomyces sp.
VSHKQGFRVELAPDEQQQASLGHHCGLSRVVENFCLETVRKKWSQRAAEESYGITGENLTKVPWSAPALEREWRAAHPRRYPWFAENRLSSRIPKEACRVRAAGFSNYLKSRKGDRRGPTMGFPVWRKRKHGSRFRYDADRAKPLGSRTVRLPAIGDVATREDMSWLTDRMATGRARILGATVREQAGRWWISFQLEIDRDDINERHQTDDDAPACGIDLGLKTFAVIKNSDGRSEEIHAPKPLKAALRALNRANRKLARSAEGSNNRARARRRVGQLHLRVADRRRDFLHKTTTRLTRTKSAIAVETLNVRGMVRNRRLARAISDAGFAEFVRQLTYKADWYGSTLWKADRWFPSSKTCGDCGRINRALVLADRTWICPGCGGIHDRDDNAAGNLLDAMLSDTSG

SEQ ID NO: 20526 - protein, 404 aa, Helicobacter sp.
MQITKGFKYRIYPNKEQQKLINHQCFIYNQAYNICLNIQQEQWNKNKDLDKKDRIYLRASEIDTKVKLALKQRELSYKSVVTQQARINANRALEQALKDKNKGFPKFKNSKIAKQSFNWNNQGYQIKEYSNPKFKTFCLMNTPLKMRYHRELPKEYKLNQITITKNHNKYFIALSITYNRHVKTIEKETLKLDSCVGIDLNIKDIALSNGALIKTHSKELNTKKFDLAFKRLQRKQSRRIIKSKKDKTKLGSNFKKTQQKLNKIYERSSNVKKDSYHKITSRLIQEFDLIVVEDLQTKNITKRAKLKNVKVKSGLNKSILNTSFYQFSQYLEYKAKHNGKFFVKVNPQNTSKTCSVCGNIKENLTLKDRTYLCEKCGNISHRDINAANNILKRGLESFGLGISL

SEQ ID NO: 20527 - protein, 421 aa, unknown
  TnpB Polypeptide
MLKEKNEKIRDTIKATRDRRSQMDCRVFCVKIQENRLSKTKLEKIQCCFLEGKWLYNAVVASETLSLEDTSCVQVKVGDNFEGRKIKYLSSQMKQSVVDSVKTNVSNLSKAKKKGLKVGSLQFKKECNEINLKQFGKTYKIKSHNKISIQNIGVLVVNGLEQINLDEVELANAKLIKKPSGFYIHLTVYSKKQPQPEISKEVLGLDMGIKDQLIFSNGVKVSFYLEESEQLKGLTRKLSRQVKGSNQYKQTLNRIKRIFEHQNNKKNDVVNKLNSVLKTNYIICFQDELLNSWKRTKSKHRFSFGRKIQHGILGRVKSSLKKNDSNVMLDSSVPTTQTCPKCGCLTKHDLDKRVYHCNHCGFENPDRDIHSANMMVLLSGYGTYRSLNTDAVSTERMISLLDNLSNLGMVVSTNSMEADYI

SEQ ID NO: 20528 - protein, 421 aa, unknown
  TnpB Polypeptide
MSEEKNLKIKDTLRATKERRSQMNCRVFSVKVQENRLSHAKEEKLNRCFLEAKWLRNAVVATDSLSLEDTSHVQVKVKDKFETREIKNLSSQMKQSVVDSVKQDVFSLSKAKKKGLKVGRLQYKHECNEINLKQFGNTYRIKSQNKISVQNIGVLVVNGLEQIDLDEVEFANAKLIQKPSGFYIHLTVYTKKQSQPETYKEVLGLDMGIKDQLTFSNGIKVNFYLEESEQLKGLMRKLSRQVKGSNQYKQTLTRIKRIYEHQSNKKNDVANKLNSILKSNYIVCFQDELLNQWKHKKSKRRFSFGRKVHHGILGRVKDNLKKNKSNVMLDSSVPTTQTCPECGCLTKHSLDKRKYHCNHCGFENHDRDIHSANMMVLLSGYGTYRSLNTDTVSIEKMISLLDNLSNLGVVVTTNSMKADCL

SEQ ID NO: 20529 - protein, 442 aa, unknown
  TnpB Polypeptide
MPKKVKKRIYKDRSNIITLTERHVISENHVLFEECDKLSFLAKNLYNATLYVQRQSFFNSNSKFLNYYDVNKIFTTGNQVDYRMLPAKVSKQVQMLVDKNFKSYFALLKKKNKGDYDKPVKIPRYLDKTKGRFVVPYPKDALSLKNKGFVKLSKTGIVIPTKINSNSITGARIVPKGNHYIIEILYDVVKQEIEPSYDRVAFIDPGLNNLMTITSNVFNPILYNGKYVKSINQLANKMNANEQSKRKPWKVNATTNNEHRIKQLLAPKLDKGTSKLERSIWSKRSNRINDYFHKVTTDLMNHLVSYNIKTVIFGHNIGQKQDIDLGKFTNQNFVNIPLTKLISMLEYKCQLAGINFVVNEESYTSLCSFVDNEVVGKHDNYQGKRVKRGLFKTSNGLLINADVNGSLNIGRKYLTSIGHYSEELHNELLKYMVNPRRINIQI

SEQ ID NO: 20530 - protein, 295 aa, Halorubrum sp.
VPPPERRRSRGSRPTRVPPYGWTFRREDTGYDAQSVRSLTTRRGRHRTRLAVRRPSLGDETDRGTGRKRVGGARSRARSPHPDSPSPTPSPFSTIQGDDYDHWCREFEKRREEMQQRGTQAVHNALLRLGKREEAWRKQYIHTVANEIVSEAVEHDCDVIAFEDLSDIRERLPHAKWHHMWAFRRLYEYVEYKAPEQGVSVEQVEPNHTSQRCSRTDCGFTHEDNRHGEHFECQKCGYEVNADYNAAKNIGVRYARKQRHSLRSSPKSGSGDAQVDVRVNGGTVNGESYQPIAGD

SEQ ID NO: 20531 - protein, 260 aa, Halorubrum sp.
VKKETTGDWFISFGLETDEGDLPEKPDVDSLNADNSVGVDLGILNYIHTSDGTTVDWIDLEDEYERLYREQRKLSRKEHGSNNYENQRQAVAKVKRHIRQKVLDYQHKLTIWLVTEYDAVFVEDLNVAEMLQGDGNARNKQAAAWRQFITLLEYKGELYGTHVVQVEAAGTTKECATCGVETAKPIWVREHSCPSCGFECNRDANAAMNILQRGFAELGLGWPESTPVETVLPTDTTRVSAKRVVETGRPTLNEATPVAE

SEQ ID NO: 20532 - protein, 354 aa, unknown
  TnpB Polypeptide
MKQVVVVKLVPESEQAASLLRTLEAFNAACNWIASVAFLERTANKFKLQKFVYQEARDRFGLSSQMAIRAIAKVCEAYKRDRRILPAFRPHGAMPYDQRIYSLTGLDSASLLTVDGRVLLPMRFGQSQAAMLDRKRGQADLLYRDGEFYLSISVDVPEPVPAESSEFLGVDLGIVNIATTSDGESFAGRGVQNVRARYSRLRAKLQSKGTKSATRLLRKRRRREQRFQRDLNHRISKALVARAKGTSRGIALEDLKAIRERVTVRRAQRRVIHSWAFHQLGSFVEYKARLAGVKVVFVDPRNTSRTCPECGCIDKANRPNQSQFSCVSCGFSANADENAARVIATRAGLPCHAA

SEQ ID NO: 20533 - protein, 395 aa, unknown
  TnpB Polypeptide
MVKIKRTYKYRIYPNRGQKSILETCLNACMVLYNDCLTERRDAWKTSHKSINYYDQANQLKEIKTFDDELKEVHSQVIQDVLKRVDKAFKNFFRRIKEQKEEPGYPRYKQRTRYNSFTYPQKGFKLEDKKLILSKIGSVNVKKHRGLPEDANTKIKTCTIERDLDRWYACFSVEMEIEEPNHESIANSIGIDLGINHLITLSNGDTEDNPKYLSKSERKLSRKQRKLSKSKKRSNNRSKRRFGVAKIHRKVREQRTDLLHKISRSLVNTYDLIVFEDLKIRNMLKNHHLSKSISDVSWSKLTNFVSYKAEEAGRRVEFVNPKNTSQECSNCGKIVKKSLDQRVHKCPFCGLVMDRDQNAAINILKRGLKRVGQELSEFKPEDFSKRRMIQEAPML

SEQ ID NO: 20534 - protein, 402 aa, Escherichia sp.
VKRLQAFKFQLRPGGQQEREMRRFAGACRFVFNRALALQNEIHEAGNKYIPYGKMASWLVEWKNATETQWLKDAPSQPLQQSLKDLERAYKNFFQKRAAFPRFKKRGQNDAFRYPQGVKLDQENSRIFLPKLVWMRYRNSRQVTGVVKNVTVSQSCGKWYISIQTENEVSTPVHPSALMVGLDAGVAKLATLSDGTVFGPVNSFQKNQKTLARLQRQLSRKVKFSNNWQKQKRKIQRLHSCIANIRRDYLHKVTTTVSKNHAMIVIEDLKVSNMSKSAAGTVSQPGRNVRAKSGLNRSILDQGWYEMRRQLEYKQLWRGGQVLAVPPAYTSQRCACCGHTAKENRLSQSKFRCQACGYTANADVNGARNILAAGHAVLACGEMVQSGRPLKQEPTEMIQATA

SEQ ID NO: 20535 - protein, 680 aa, unknown
  TnpB Polypeptide
MPPTSDGDSVRTVGCALVKLVPDPAHLQKIRDAVATTHKATILASELLNLHIRRALDHDPTVDLSCCFSANWVLNAYNEVTSTSRKGGKFDAALRATRETCMPAFFPPPRGATQQCLLYDARNLATVATTNVWMHFSKRVLSHVRNKFALDEEAYKALSKDQRRHRKLELMQVANDICRVPGSNHQSPAARHVWVAAERARLGIDVAVGDWKGKQLLYHLKAKPHRFLNCMRIMSAEKEAAGGKAFGLYPIRRTNVPRHARFDQKALRDILGLGRSDYIKQKAKERRKRKRDADDCDMPADDDLNLPPLQANGHGYESDGDGNAGPSSAPPPKPTKSRRTKAEMEAEQMGLFAGIVDLRAAGVQRRQRFDFAFTTDGVCARVQMRAKETDSTATLCSMPKRGVWAIDQLKHATRLDEMHVVGVDPGKRELVNCVDMDDAKGCSPVRYTLKQRQRDLRSRQYADEAQREKPQDVKDAEAGLAGFNSRTSALVAFRDYCAKRHETLDECLAFYADIGHRRRRWKTAIKTQKSEERLYKGLEKLRKDSRPLVLAYGSWGMVAGRPGMASNKGNAPCIGVGLMRKLARRFVVAPTPEAYTSKTCCRCLGVCGPWLEIEEKMGKKIRGLRRCTQRDCMIPLNRDKNGATNIGTNFARLMANQPPIRSMTDEDLAFHRASLCMECE

SEQ ID NO: 20536 - protein, 372 aa, unknown
  TnpB Polypeptide
MNKAYKFRLYPNEEQEILFSKTFGCVRFVYNKMLAERKDIYEQYKDNKEELKKHKNPTPAKYKAEFEWLKEVDSLALANAQMNLQTAYVNFFRCKNVGFPKFKSKHKDRNSYTTNNQGGNIRIKNKKVKLPKLGWVNIVQHREIPSNQEIKSCSISKTPSGKYYISILVEFEQYVQPKEKNNVIGLDMDMKNLYTDNQGIRAEYPIFYRQTLEQLAKEQRKLSKMQKGSNNRNKQRIKVAKLHEKVANCRKDFLHKKSRELVNQYNVIVIEDLNMRAMSQCLNLGKSVADNGWGMFTTMLKYKLENEGKYLVKVDKWYPSSKTCNDCGEINHELQLSDREWICKSCGIIIDRDYNAAKNIREEGIRILSLVA

SEQ ID NO: 20537 - protein, 380 aa, unknown
  TnpB Polypeptide
MIKGFKTKIYPNQEQKEKIIKFCNASRFSYNWSLNVESDNYEQGNKFLSGYDLAKIFTQFRNQEGNEWLKEIPACTTKIAIFNCAESFKNFFEKRAKYPKFKSKKHSKMKCATRYDRMTIEEKRIKLEKLGWIRTVKGRIPVGNDIKYSNPALEYDGIDFWFSVGVEIIDNQDNDKPKTEAIGIDLGIKQLGTCSNEMKLDKPDIKKQKKKLKRLQKQASRHYQKMIEESKRTKIKFSQIPKSKNLLKLEKEIKKLHIRINNTLTTNIHEFTTKLIKLNPEAIVIEDLNVIGMMKNKHLSEKVKEAKFYEIRRQLEYKSKWNNVNLILADRWYASSKICSECGNKKDKLSLSERIYICEECSCIIDRDMNAALNLKKLAI

SEQ ID NO: 20538 - protein, 457 aa, Okeania sp.
LLLKYKYKLKPHKSQTVIIANWLELARRQYNYRLAERLNWFEATRTPVNACPLNVSVVPVERIYQNVPEFRIQTRDGRKKDSNGHPITKKGDKHPNIINGYVVWETVQLADLAQTKKLFPGYKSMHSQVLQDVIQRVQTTMDNFTKPDQNGKTSGRPKFKGKHYYNSFSYPQLSNTNIVKNANGRYCVNLPKIGLVPLVFNRPIPIGFKVKTGTLIREADGWYVSFTIEDKSVPLRRGEIQPTKENSKGIDLGLLHYVVTSDGEFIGVPKFFRFYEHRLSKLQGRLAKKHKHSKSWKILKRKIAKLHQLIARQRWDWQFKLAYHLFSNVSVIFVEDLQIASLVRRCKAKLGDNGQFLPNGQSAKSGLNKSLQDAAFGQFVQILEYVGWKLGKKIIKVDPKGTSQHCWECLNRVSKSLSERFAARHERHSCPECGQELDRDYNSPTPLAPLPGGDGGG

SEQ ID NO: 20539 - protein, 415 aa, Dinoroseobacter sp.
MIQRGYRYKLHPTDAQKELFNQFAGVCRLIYNLGFEQRREHWRQFHRANGKNISYVTQARELTALRAEYDWIGAVSQTCQQQALRDLDRAYQNWFKGNARYPSPRKRGRNDSFRFQGREVQTRKLNAKWSEVRLPKIGWVRYRDTRPLVGKVNNATISLAPNGWHISFSLAIEHDAPANIAPSVGIDRGVANTLALSTGERLSLPARLGDIERSQRRAQRVLSRRKRGSKRHANARRRVATLSARRARIRKDWHHRASLDLAMRFGNVVLEDLNTKGMTASAKGTIAEPGRQVRQKAGLNRSILNQGWHIFETLLSYKLEERGGHLCKVPAHHTSQTCSECGAVDRKSRESQARFTCQYCGHAEHADHNAAKNILRRNTASMDMEEGHWLSCEVSTQTGQITPPENPPPLGGGRC

SEQ ID NO: 20540 - protein, 439 aa, unknown
  TnpB Polypeptide
MLLGMKQVITAKLKLHTDTAQFQALRHTQLAYREALNMVSRYAFAHGKMSNQQALQRACYEQIRTEYGLPAQMAYNVPRQIGATYKALWTKVKANTLFRTAGHTRKRYQGLDQPPKYVAPTLTYNYHRDFSLKAEQQVSLLTLDGRIIVPYTGYDRPVALLQQGAHIGAAKLWYDKPRKRFYLLVSLEVAVADPTPETHQRIVGVDVGQRYLAVATDTQNSTTFYSGKGPHAQADHFARLRKRLQQQGTRSATRRLIVVSGRERRFKQDRNHVISRRLVDACPHSLIGLEDLTPIRERTKRRHGRKASQKQRKANGHASQWAFAELHGYLAYKAVLAGSMAVKVDAYHTSQACPRCGYTSPDNRPEKGLLFTCQVCHVTLHADLVGARNIALRTLLARQDWVRTGALSERPDVSSDEAKAAQRQRYAEVRWSSDTSPAL

SEQ ID NO: 20541 - protein, 412 aa, unknown
  TnpB Polypeptide
MFLTYRYRLLPTKQQHRSLEAILESQRQLYNAALEERIDAYRKAHVTRSYFDQLKALTEWRRDDPEASALPANVQRATLKRLDEAYKAFFRRVKSGGKPGFPRFRGKGRFDSFGFREFRGILLKAGRLRFKAMPGALRVHLHQLMPPEAVIKSCIFRRDLKGWVVGLLAEVPTPSLREGARTVGIDLGITTFAALSDGAMIPTLRAARSAQRRLRTVQRTLARKKRGSNGRSKALNEVRRCHSATARRRSDHLHQASARLVRDYDVIAIEALQVKRLARSSLAKDVHDASWAKFISLLRYKAAKAGTRLIEVDPRNTTQNCSGCGVKVPKELGDRQHECPHCGLSVDRDLNAARNILNRAGVGAGLRNVAGYGMRAGGNLGVATGSGQETLASAETLPINSIWLHLFPRRCA

SEQ ID NO: 20542 - protein, 457 aa, Halomonas sp.
MTTVTRILHATSLDLSRLLAMCRTMGFIRADLWRRYGALGTVGKSASAVRKEITQGGWHTDLPLDGTVRAESTKDVINDILTYKAAAKHKVRRAVAARTTDETERKHLYTLLKQDKWLEDTYLHRMMRKHFRHGKSQCSNQFVVRSDKHSERIIDGQLVITLHLSKKVGGSITLYTTTSGKNVSLEKKNLRVIVREGKVEIHYAYEKPPGRPHGDKVMGVDKGYTEAFTDSQGQHHGESFGQVLTAYSHQVSATGKARNRLHVLEKKHRAAGRIAKAERIRANNLGKKKQVARRQRTQQHLRTIAYQAAHTIMDEAALLASEDLTQPIAGKVQWRDYNRRMSHWAKGVLAQALDEVSQQRGTRHDIVNAAYTSQMDSITGRLEGERRGDKFYRANGDVIQADVNAARNVLARLDDPDITRYMPHGEVKRILLGRFSGATERQEARVVCQHGMSTGCG

SEQ ID NO: 20543 - protein, 412 aa, unknown
  TnpB Polypeptide
MTELTKTLELKLVQPNGHKRRKLRETREAYQQALHDAFDAGCTTQTEANDVVVNYDLSGYAKNALKKYVPQLTTTYDAGELHDDHPVRFTNEGLRLDHKPENAIEWYVKIPHHEDYHLWMPAQPNPEQRNWLEALHAGDAEMGESRLFERDETWYLHVTATRNVGDSSEVAAEARTPIGVDIGEASLVTVCHRDDHGSPTAPKLWAEEGKTVRRLRKAYFTATRRLQERGSERIAESYGDDLWTQIDDVFHRVTCEVVEYAEYVENPVLLLEDLTHIRESMDYGEYMNRRLHGWGFAKLHAQIRYKAVEKGIPVEMVNPRNTSKECHACGEVGYRPQQATFKCTNDDCWLDEYQADVNGAVNIADRYLSGESRSREHESDDDSAEDGARLTAPQDSQADADTQQATLGTDAS

SEQ ID NO: 20544 - protein, 223 aa, Escherichia sp.
  misc_feature (183)..(193): Xaa can be any naturally occurring amino acid
MHQENTMLPRRISVSLFIDQSIIWPVKRLQAFKFQLRPGGQQEREMRRFAGACRFVFNRALARQNENHEVGNKYIPYGKMASWLVEWKNATETQWLKDSPSQPLQQSLKGLERAYKNFFQKRAAFPRFKKRGQNDAFRYPQGVKLDQENSRIFLPKLGWMRYRNSRQVTGVVKNVTVSQSCGXXXXXXXXXXXGKWLPGWLSGKTPLKRNGLKIRPHSHCNSH

SEQ ID NO: 20545 - protein, 286 aa, Moorea sp.
VIILEFKAYGKDSQYTAIDEAIRTVKFIRNSCIRLWMDNKGTGKYDLSKYCKILAKQFPFANELNSTARQAASERAWSSIVRFYDNCKKKVLGKKGFPRFQKHCRSVEYKQSGWKLSPNKKAITFRDKKGIGKLKLKGTWDLWRFDLKQIKRVRIVKRADGYYVQFCVAVEVKEELTPSKRTIGLDVGLKEFYTDSDGNAEPNPRFYRAGEKRLKFYQRRVSRKKKGSSNRRKAINRLGRHHLNISRQREEHAKRLVRSYRKKSAAFIVDRLCIKGGRFCCKAALF

SEQ ID NO: 20546 - protein, 420 aa, Acaryochloris sp.
MMVMFQMTFRYRIYPDLEQEQQMLNWLETCRKVYNHAVRERKDWINSRKCQIDRCSLQSEYIIPADVSYPNYYAQKKALTAAKNDFPLIKAVHSQVLQEVIARVESAFAFMKERGFGFPRFKKFGQFKTLNFPQLQANPLRATQIKIPKVGLMPIVLHRPIPEGFEIKSLRVICKHSGWYVTLCLQADVSIPNVPPHGNAIGIDVGLSYFLSTSDGEQINRPRFFDKLHRKLELLQHCLKRKQKRSITRAKLIQKIGRVHEQIAAGRLDWQFKLAHHLCDRAQMIFVEDLDFRIMAKGMLGKHTLDAGLGQFVNQVLPWVCFKRGVYYGKVDPNGTSQTCPDCRARVKKDLSARIHECHECGSVKPRDVASGQVICARGLSGVEIASGAEVSGALETLSRQLASKLESLKSDLEKPVLYS

SEQ ID NO: 20547 - protein, 419 aa, Richelia sp.
MLTMNYRYRLYPDATQEQQLIEWMEICRGAFNYGLREIKDWCNSRKCAIDRCSLEKEYILPADLKFPGEIDQLNKLPSSKKEFPRLGAVPSQVLQQTIKQLHRAWEYFQARGFGFPRFKKFGQFKSLLFPQFPENPVTNFHLKLPKLGAIRINLHRPIPAGFALKQVRILRKADRWYASINIQCNVKVPTPMPHGHPIGVDIGLEKFLATSDGILVKPPKFFKQLLRQLKLLQRRLNRKQKRSFNYEKQRLKVARLHHKIDNTRKNFHFHQAHKLCDAGDSIFMEDLDYRVSAKGMFGKQMLDAAFGQFRTIVKYICWKRGKFFAEVDARGTSVECPNCGVNVKKDLSIRVHNCEHCGYIKDRDVAAGENIRNRGIKLISTLGHSGMETACAEGLPGIEATQSRQVSQSRKGATRKLKK

SEQ ID NO: 20548 - protein, 379 aa, Firmicutes sp.
MSKDTHDCKVMRNYKFRIYPNRGQQRKLLQWLDACRYIYNTALAMRKEAWKKEKRSVTRVEQQVWLKEAKQLKDNHFLRSLHSQVAQEVLFRVDKAFKNFFRRVKNGETPGYPRFKGRGRYRSLTYTQFGNGLGACFKNGKLRLSKIGLAKIKLHREIPGTIKTVTIKHDNCGRWYAVFSVEMELEAKAHSGPKVGIDVGIEKFAACSDGKTVANPRHLQKTEKRLRHAQKALSRKQKNSNNSRKQKLKLAKLHARIRNQRRDFLHKQSRKIANTYSLIAVEDLNVRGMVKNHHLAKSISDASWSEFLAMLCYKAEEAGGRVVKVNPRETSQQCSSCGTKVSKDLSVRIHRCPSCGLVLDRDVNAARNILARALASEVA

SEQ ID NO: 20549 - protein, 388 aa, Pisciglobus sp.
MKIHKAYQFRLYPNKEQSILINKTIGCSRFVYNHFLNQWKETYKETNKGLSYGKCSAQLPTLKKQEETEWLKEVDSIALQSSLRNLSDSFDRFFKKQNQYPRFKSKQNPVQSYTTKSTNGNIAVLGNQLKLPKLGFVRFAKSREVKGRIFNATIRRNPAGKYFVSLLVETEADPIKKTGSSVGIDVGLKDFAVLSDGTIYKNPKFFRSLEKKLAREQRKLSRRKVQALKTGHQLSESKNYQKQRIKVAKIYETIKNKRMDYLHKISTEIVKNHDIIGIEDLLVKNMVLNRKLAKSISEVSWAVFRTLLEYKAKWYGKEVVAVARNFPSSQLCSECGYQNKAVKNLAVREWACPNCHTHHDRDLNASINLKQEAISLLASKTVGTTGLA

SEQ ID NO: 20550 - protein, 406 aa, unknown
  TnpB Polypeptide
MENWLEMLCAQYNYRLAQRFNWYDETRCRIDACPLVCSIVLVEEIFRDIPAEYINEHGYINWKALQQGDLPNTKVERPWYKEIHSQVLQDCIHRVDKTFERYISGDKNGKRSGRPRFKSRSRYRSFTYTQAKQDCIDGNRITLPKIGKVRIVLHRPLPDGFKIKTATVIHKGDGWYVTLSLQDDSVPTLSPDIDFSKVVGIDVGLKDFLVTSDEDIVSIPQFARKTERRRKLLNKSLNRKKRKGTKRRQKAGKRLSKHYLHVARQRKDFHYNIAKRLLDNYDVIAHEDLNIKGLAKTHLSKSILDAGWGNFIAIVACKAESAGKTTVAVNPNGTTQNCSNCGVKVPKTLKDRVHQCTCGLEICRDLNAAINIRKLAEGLPVGKARGDLSDSRSMKREALTGLLAVS

SEQ ID NO: 20551 - protein, 392 aa, Brasilonema sp.
MGNKAYKFRIYPNNEQSVFLAKCFGCSRFVYNHFLRVTTDVYAESKKSLRYKEWAKLLVALKSEFEWLKEVNSQSLQQTLKDLESAFVRFFKKLGGFPNFKKKSNRQSFRVPQHFSIDENGFIRLPKMTPIKMVIHQELLGTPKNVTISKTPSGKYYASIVTEQDIHHSPLNGSKIGLDLGLKDFAITSKGEKFENPRYFQKSLRRLKIRQRRLSRKQKDSNNRAKTRLTVAKIHEKVANQRQDYQHKISLKLTCENQTISAESLNIKGMVKNRKLAKQISDVAWGNFLTMLEYKGDIYGCEIHYVDRFFPSSKRCSNCGYIKEDLTLAIREWECPECSIVWDRDVNAALNLMLFSESKILLEEEKFTPDQLVERLGMNRSTGSGQEAPSVP

SEQ ID NO: 20552 - protein, 358 aa, Nostoc sp.
MFAIKRELKLNNVETSLMRGNAGFKRFVYNYGLELLTASWSFEGVKASDSKRIDAIKKVFTQVTIQKPEYAWMRLYPSTVYQSAFIDLKNAFSRWRKGLCGFPKKKSKKKGDSFTVYKTSGIYAEIGQPAIAFTNRVVINAGSLIKLPGLKQLRLKERIDFICSSQTFTVSRTADKWFVSFMLDAQKIPPIFHPIISIGVDLGVKVLATCSDGTFYDMPITTKKAKTKLGKIQWRNRNKVLGNKKLKIKASNNARIHYTRLAKQHARIGNIRQDTTQKMTTDISRKASVIRIEDLNVQGMISNHKLASAVSNNCFYEIRRQLTYKQPFYATRVELVDRWFPSPLDVFILWSYSTDGIK

SEQ ID NO: 20553 - protein, 514 aa, unknown
  TnpB Polypeptide
MRGGFLMLELVQISKNQVSRLNKKSCSKNTPTQKLSLILPQLLTFNEKDLKPYWNKQSQEIQSILWLPHKTDSHGVDLNSSDGLLNFQEVESNHWKRILRPINSIPKSLSVLLPASAIPTMVKGQQRDGVKATVSKKIRFYPEKESLYHEMLTLYRRAYNLAIECYINNFYQDESGNWRDLRSEIRAICQKEQEDKEAVFNSNVVNEAVLSAKESFKSVIKHNEKVKNSGRSNYASLHFKSRKMVVQSFILDRMPKGLNPASKTLGKIYLTEKVPTESIGKKCIITYNKGRWFIQVQKHVQTSSDIQGSVECVAVDPGVRTFATCYSQKEVIIAGDDFTKNVLFPLMKKVDKLLSQKKKLENTNQKDKQWYQDRLKYLNKKINKLKCKKDDLLLDLHNRLAYELVTKYDVIFLPSFETKKMSNRQKRNINRVTTRQMLDLNHYQFKKRIKWYADKYGKHVVDCNESYTSKTCSWNGKIDNRLGGKKIISDGQISVDRDINGARGIFIKQLIKAT

SEQ ID NO: 20554 - protein, 471 aa, unknown
  TnpB Polypeptide
VNFDKMIVEPNGFLTTYRITNRKEDAKMRLTTSYKMKLTGDFKALENSLAIYRKALTYLIPIINNSWKELSQYEFSNQKYNQIEKWIHSTQNNQAQFDFDQEFPKLPTYLRRSAISKALGIVSSYRSKLANWEVNQEGQTPKLQLVHYEYPAYYKKNLFKNFDPIHQTIELKVFKNGDWVFEQYGLKQSDCTYYKHYLAGLKQSIPIIQKKGRRFYVTFSYEEEVSFVEEESISKICAVDLGLNTDATCSIMGQDGTVYARKFISFSKEHDRLHTQLGRIKRNQKMGSRHNKTLWRSVSGITQDIADKTVNAILDFGNEHGVDVFVLEHLDFKGKNILKRAHFWRYKRIYKVLTQKAHKYGLRISRVNARYTSRLAFDGSGWSKRGREIAPDTPYSTLQFATGKFYNADLNASYNIGARFFIRHLLKTVTVTQRLALEAKVPQVAKRSTCTLSDLINLRSALAVITAKKQA

SEQ ID NO: 20555 - protein, 240 aa, unknown
  TnpB Polypeptide
VLQLKNLIRLKIIYIILGVEKVGYSFKKIRRLLNNDDFFIIAIDVNKKNLAVLGIRCEGRKLIKEDSFFRYIYIDKYSQVILFSDETSFKEKRKASAKISKRLCRHIIEIAKEIEKEKALKVVIVVEDYKAIKLGNISDFYLKKEIFYFRDFLRHFATELIRTAKSEKILIKALHPHKTSSKCPTCGSNLEFHQGRQAYCPNCRYIGDRDYTATLNLAKRLVKNLFINRTYSSVARVYRT

SEQ ID NO: 20556 - protein, 410 aa, Lactobacillus sp.
MAELNYHYGLKMRLFPSSEQKRLIDNNINASRFAYNEMVAIDKELYSLQQIKIPITIVQDRIAYLQRRKNNTQLLFAIHPWLAGTGVGTDVIDQARRAYQSAWRLFRQVHRSGVPVFHRKRDDGSYRLPTRYTKTALGLMCGSNRFLNKKHVVLSGLGKIRVSGSQKRLFDYADAIRVGTITIRRDATGRYFLSMQLGSDTPFVQATKPAQSAVGIDLNTDNFLTDSTGNVVTNPRYYRSIKGRLAKAQRKLARRRLRAKKEHRALRDAKNYQKQRVLVANLQCNVANRRNAFLHLVSTTLIKNHDIVVAEELRSKNMLRNHALAMSIADVGWRTFLGMLVYKAGLYGRSFVTVNPRNTTQTCSACGFVMTGDQKLTLADRKWTCPHCGAFHIRDHNAAKNILARGLAVK

SEQ ID NO: 20557 - protein, 216 aa, unknown
  TnpB Polypeptide
  misc_feature (216)..(216): Xaa can be any naturally occurring amino acid
MRTVKIKLLPTIEQENHLISISKTYIKTVNEIVSEMVDAKKSLNLTSKDVSGLMPSSVKNQVIRDAKSVYRKSKKLGIVPILKKPVCIWNNQNYNVNERSIDFPLWIEGKCIRIEVKAVFDDYQRTLLKNAIKFGTLRITQKSGKWIAQIAVEDPALITVHTDVVMGVDLGLKVPAVAKTSDGKIKFFGNGRMNKFFKRRFHAFRKKLGKAKKLSX

SEQ ID NO: 20558 - protein, 525 aa, unknown
  TnpB Polypeptide
MFTSKYHNHIKETNIKHLLHTASNIKNQLSQYIYDHKHLLLSSLGIKELKENYKTATSSILLAWNVQKEHYLLVDLYANSLKKHMQNLDIKLQDKIIIQYYSKDTKYRKKGDTKLFKLTYRSTKLTKFVKYLIYLDHTKDIKDQLKHNEVIYALYEYYESKGLIDRIVKLAYSKQQRLLSKLKLIQFKKYSSLILDYNINKARIDYMQDNKFYQYWFVFRMRKDGIEYRLPLQHNNSYHENKKLIAREFYINLSPKNNSKINIATTCEADKPHFKPFNKVIGMDLNLKNNFASLSDSFVLDYDRNYMKRTVDALKALDKIGCQNLTNTQMQKLKKIHRQLEWYVSLLIHKLIEYLNSHSITDIVIENLLLSGKFGINEEFDIKYSRLSKLLHLSKVKDLLKRQAEKHGIRVHITPSHYTSQTCPKCGFISRDNRKTQESFKCVNCGYESNADLAASQNIELRYTSDVLRSKLHNIDEYGRLVPKKLNRYQVKAILNSYYASLPTAAPRCGQDTEQADGDFVKGDE

SEQ ID NO: 20559 - protein, 453 aa, Erysipelotrichaceae sp.
MYRSITVQVKPDSTLFEWCDRNAHCANNLYNAALFRERQLMFASKKNIHELSDNELSVMSEVEFSLLDMNKPKSVPPSGVISYTILDAVMKYNNNPDYNAEGFPKHCAQNVLKNVLQDIKSYFESIKDWKNNPEKYNGMPKFPHYKRKQGITSFKSSNIECKIHLTKRGNYYCSLPKTKATVQLGKKIPGKLIEVHVTPMHGIYQMSFVFDDGTNAPVFTEHERIIAVDPGIDNLMAVTNNCGLPCILFNGKPLKSVNHLYNRQISNIISENTKGTTDRFVPTPHYQKVTLNRNNRVKDFLLKSAKILIDWCVENRIDTIVLGKNVGWKQNTDMGSVTNQNFVQIPHAQLYKIIMYLADREGISVIEQEESYTSKASFLSSDAIPSYRKENQKYSFSGKRIKRGLYREVNEREINADLNGSANILRKAFPDAFREDPDFNNIWVVRHPDIVLA

SEQ ID NO: 20560 - protein, 300 aa, Methanosarcina sp.
LSVFISRRTKQVEPAFTRFFREKNGFPKFKSKKNSIQSFPIPQHYSVDFEKNTIKLPKIEPVKAVFHRKFEGELKTATVSRTCKGHYYISILVEDGNELPTKQKYSESTTVGLDVGIKDFAILSTGETIENPNYLKNSLNRLKVLQKRVSRKQNGSKNRVKAKHRLAVLHDKITNQRNDFQNKLSFKLISENQAIALETLNVKGMVKNHHLAQAISDSAWSSFVTKLEYKTEWYGKTILRIGQFEPSSKVCHVCGYHNSNLTLKDREWTCPDCKTKHDRDINAAINIKKFALIDQNLIGL

SEQ ID NO: 20561 - protein, 1068 aa, unknown
  TnpB Polypeptide
MRPRKGRCRIEIMKANIAYKFELMPTREQKRIFAQAVGCRRFVWNKAIELQKRCLEQEVPFLKYTELAGRLVLWKKEDDMLWLQEAPSQALQQCLMDASAAIQAFKAKKKGFPKFQARGDGDSFRIPQVRPTDWDEANGRVRIPKAGFVRFRKSRPIQGKIKQMTVSVEWGHWFEGSAQAPAAGIRNACVLHGGVLDLRDRAAAVVPEGAFLLRIKEAHDVGGVVGERVEVDLKEFRGREVLVHAFACAEEHPARECPVGLPAVENADVLTLLKNARRHPGIGRGHRTLDHRADLALGNERAPFGRGAAVFSINRHGPEVRLLQALKKLLMAVERGKIALVGVERHELINGDRVERGRDGVPGFAKAHAGKRRVGERGRTGARDHVAGLGHLAFFVHLTCDGVKKKHSPVACVDFLHLFCGGGNREHGQLDRFGVFVRDRSGDFGLSGINYMLHRQVGHGDDAHDVLVHRMRADHDGGAVRVRDHAFDLEVRLVELSDGALVEEILDGVVILENGFNNREVPTKHVQLGLGAVIPLRLGLLDLVPGVFVEELPRLGCDLFRLVVVFGKNQAPEHQEEPVGIPALFGQGFKKAPGLFHAVFLAAEATLEDLTCGRHGDELAKHAPLRLDVIDESVNHRHVTILLETFDDVREELQPRVDGKMLLNVPVKEQARSQGCGMARLLPVTFQLEQTADEREPDEVAVLVVAGNIQNCLKLLRVLHVKCGTRDEIKLDAAEVVERNRRRHFENRALALVTALILAAHPLDALGLRQVECVVPRRFVAEPVASGDCGTAHDRESQHAVAVLKVDHRVETVLKRFDHLGLVAQPAQNDGRNLVGPGRRPSCHEVETESLEGLAEVLLEEFMILFLLEEALEGPCLGHVTKNERVFHLLFKSELVEELFGLVFLVFIQGTDDLKGVLASLHQAAKIISVGVAFDLRQAHGCLEVCGSVVDLVPEQVRFRTEKMHQTALAAAFKDVQTDPVEVVDVGAVLREAEFHGGGSDPGNDDVKSLKHHVLGVGLLESSGQVAVGLLPLNDLQGFLPVKRPAGGVPGYPTSRHSMSPFLIAVVD

SEQ ID NO: 20562 - protein, 455 aa, Polaromonas sp.
MKVTRTLQANVPPELTSICKVTGFVRADIWRRFGALGNAGKSGLDIRNEITRGAFYTGMAVDGTIRAETTKDVVNDVLAYKAAAMRKVRQAVAAHTQDNAERKRLYSLLKKDQWLQDNFLHRQMRKHFRHGVSHTANQFVVRSDRHCSEIVDGKLVVIIRVAKKYGDDIRLVTTTRGKNVNLTGSNLRIIVKEGCTEIHYATEKGQGRACGDRIVGVDKGYTEALSDSDGQAHGLKFGSVLTDYSDKTAATNRYRNRLHALEKKHRQAGRAAKADRIKRCNLGRQKIDTRRQKAQMHLRTIAFQAAHSVVDKAAVVVSEDLTSPIAAKQQWKEFNRRMSSWAKGTLADALDSVCTQRQARHVLVNAAYTSQMDSLTGLLQGKRVGDKFYRENGDVLQADHNAALNVLARLDDNEISRFTPYQEVRRILLARSPAQLSVNGLELGEPSRQPSADKL

SEQ ID NO: 20563 - protein, 413 aa, Polaromonas sp.
MKRLQAFKFELMPDGGQQQGMRRFAGARRFVYNRALDIQKANYAAGGKFIGYVDMANRLPEWKRAFEWLKESPFHTLQQSLKDAERAFKNFFEKRAGFPRFKKKGSGESFRFPDAKQFAIDQANSRIKLPKLGWMRFRNSRDIVGTAKNITISQAGGKWFASIQTERELEQPVPIATSAIGIDVGIARFATLSDGSFVAPLCSFKKHEKRLAKYQRRMSRKTRFSKNWHKAKRNIQKVHTTIANARKDFLHKTTSDLSKNHAMVAVEDLQVRNMSRSAAGNAEKPGKNVAAKSGLNKAILDQGWFEFRRQLEYKLAWRGGILIAVPAHHTSQTCPCCGHVAKANRQTQAKFECVDCGYQNHADVVGAMNILARGYRAAACGEDGSGLARKRRAKPASVKQEPTEVTMQEPAHA

SEQ ID NO: 20564 - protein, 474 aa, Polaromonas sp.
MSSFQSGVRFLALPNPQQAATLRRWIGCQRHIFNAKVEEDRLFVAQRRMMLREDADAVIRTPLDRLYAQFKDDHLTPWLSDVPSQVLREGTYRWFNTKQRQLKGLAKAPRKRSQRDFNSVMLCSDLFEFTEDGRLILGTAKFPVGRLHFNAHRPFGHPKMITLRESAGRWFVSFSYEQSVDTVENAGKDSQLLREPHELAYELGLLGEKEVAALTLGIDRNVADNCVATSRGDFFLPEAVMLERIARKARGAKRQQKRLARTKKGSANRRKAAARVARKYGYKAEVLRDFAHKTSLALSDSGAKLIVFEDLKIQNMTRRPKAKQDNSGRWLRNGRAAKAGLNRSILSSAWGRIRVMTQYKAARRNVLVGFVRPHHSSQECSLCGHTHPENRHGAAFLCQRCGYAQHADLNAATNIAARGVTLLRSGELETPPKAKKRVAVKRRTNSGSVRPGVSVEHLQDAASGLAPGTPRTML

SEQ ID NO: 20565 - protein, 411 aa, Polaromonas sp.
MQRLQAFKYELMPNGGQQRQMRRFAGACRFVFNKALALQKTNHAAGAKFMNYVALANKLPDWKQEFEWLRQAPSQALQQVLKDLERAWKNFFERRAASPKFKKKGQREGFRFPQGFRIDQPNSRIFLPKLGWMRFRNSRDIVGTAKNITISQAGGKWFASIQTEREVEQPIPVATTAIGIDVGIARFATMSDGSFVEPLHSFKCHEQRLAKYQRRMSRKVKFSKNWHKAKRKVQKVHTRIANVRKDFLHKTTSAISQNHAMVAIEDLQVRNMSKSAAGNADKPGKNVAAKSGLNKAILDQGWFEFRRQLEYKLAWNGGVLIAVPAQYTSQTCPCCGHVAKANRKTQAKFECVECGYENHADVVGAMNILARGYRAAACGEDGSGLVRKRRAQPASAKQEPAEATRCEATHV

SEQ ID NO: 20566 - protein, 411 aa, Polaromonas sp.
MKRLQAFKYELMPSGEQTRHMRRFAGARRFVFNKALALQQAHHASGGKFIGYFAMGKHLTAWKQESPWLKESPSQALQQSLKDLDKAWKNFFAKRASFPRPKKKGRGESFRFPQGFKIDQPNSRIFLPKLGWMRYRNSRDILGTVKNITISEAGGKWFASIQTEREVEQPIPVATMAIGIDVGIARFATMSDGSFVAPLCSFKKHEKRLAKYQRRMSRKTRFSKNWHKAKRKVQKVHSRIANARKDFLHKTTSALSKNFRVVAVEDLQVRNMSKSAAGNADKPGKNVAAKSGLNKSILDQGWFEFRRQLQYKLDWNGGILIAVPPQYTSQTCPCCGHVAKENRKTQAKFECVDCGYENHADVVGAMNILARGYRAAACGEDGSGLARKRKTKPASVKQEPAEAAMQEATHV

SEQ ID NO: 20567 - protein, 411 aa, Polaromonas sp.
MKRLQAFKFELMPNGGQQQSMRRFAGARRFVYNKALDIQKANYAAGGKFIGYVDMANRLPEWKKEFEWLKESPSQSLQQSLKDSERAFKNFFEKRADFPRPKKKGRGESFRFPQGFEIDQGNSRIKLPKLGWIRYRNSRGILGTAKNITISQSGAKWFASIQTEREVGQPIPAATSAIGIDVGIARFATMSDGSFALPLNSFKKREQRLKKYQRRMSRKVKNSRNWHKAKRRVQNIHIHIGNARKDFLHKKTSDLSKNHAMVAVEDLQVRNMSRSAAGNAEKSGKNVAAKSGLNKSILDQGWFEFRRQLEYKLNWSGGILIAVPPQYTSQTCPCCGHVAKENRQTQAKFECVDCGYENHADVVGAMNILARGYRAAACGEEGSGLARKRKTKPASVKQEPTEVTMREAAHV

SEQ ID NO: 20568 - protein, 411 aa, Polaromonas sp.
MLRLQAFKYELVPSGEQTRNMRRFAGARRFVFNKALALQKVNHGEGKKFIGYLEMARHLIAWKQEFPWLKESPSQALQQSLKDLDKAWQNFFARRAGFSRPKKNGRGESFRFPQGFKIDQSNSRIFLPKLGWMRYRNSRDILGSAKNITLSEAGGKWFASIQTERELEQAVPTTASAIGIDVGIARFATMSDASFVAPLCSFKKHEKRLAKYQRRMSRKTRFSKNWHKAKRKVQRIHTDIANARKDFLHKTTSDLSQNHAMVAIEDLQVRNMSKSAAGNADKPGKNVAAKSGLNKAILDQGWFEFRRQLQYKLDWNGGILIAVPAHYTSQTCPCCGHVAKENRQTQARFECVDCGYENHADVVGAMNILARGYRAAACGDDGSGLARKRRAQPASVKQEPAEVTMQEATHA

SEQ ID NO: 20569 - protein, 411 aa, Polaromonas sp.
MKRLQAFKFELMPGGGQQRDMCRFAGARRFVFNRALDIQKANYAAGGKFIGYVDMANRLPEWKKEFEWLKEPPSQSLQQSLKDSERAFKNFFEKRAGFPQPKKKGRGESFRFPQGFRIDQSNSRTFLPKLGWMRYRNSRGILGTAKNITVSQTGGKWFASIQTEREVGQPIPAATNAIGIDMGIARFATLSDASFVEPLDSFKKHEHRLKKYQRRMSRKVKNSRNWHKAKRKVQNIHTRIGNARKDFLHKKTSEISKNHAMVAIEDLQVGNMSKSSKGTAEAPGKNVAAKSGLNKAILDQGWFEFRRQLEYKLAWSGGILIAVPAHYTSQTCPACGHIAKENRQTQARFACVDCGYQNHADVVGAMNILARGYRVAACGEDGSGSGRKTRTKPASVKQEPAEVTMREAAHA

SEQ ID NO: 20570 - protein, 542 aa, Polaromonas sp.
MSERPVFTYQTRPALDAAQAVMLDAYAELYGRAERSLFAALQAGGKLNDLKRDFLSRFGITARQFNAVRIGLEGKIDSIRQRRPELIAEAQARIKKALKVIARLTGKAPGSDKLHQKKRRLALLQSRLSAMQGDHESGKTRLCFGSKKLFHAQFELQANGYDSHEAWKKDWTAGRSSQFFVLGSKDESAGCQGCRAAVAGDGSLKLTLRLPDALSGQGKRLTLIGIRFAYGHSQIVAALCTSQHVTTKTKAGVAMVKRTGTALSYRFVRDAKGWRVFVSVHAKAVKVSTSAGMGSMGVDVNADHLAVAETDRFGNLIAARRIDLHTYGKSADQAKALIGDAVGALVMQARTNGKPVVIEKLNFQKKKAELEAVNRKQACLLSSFACNSIASGLKAAAFRAGVEVIEVNPAYTSVIGAVNHARIKGVSVHQGAALAIARRGLGLSERSAVSVGLVPTGNGGHVTFELPVRNRLKHVWSFWSKVRTNLKAAHAAHFRCGDHQKDPPPLAPATRSLGAIWSSTAQFRGANRQHNCSADVLEDVPW

SEQ ID NO: 20571 - protein, 355 aa, Polaromonas sp.
MILVYRYRVKSLTGLLNQQSRAVNFVWNFCNDRQKDALRFGRPWHTGFDLNKLTSGASRELGLHSGTVNAVCEQYAKSRSQKKRPWLRYRGKKSLGWVPLKGRELKREGDAFRFAGNTFRVFNSRALPAGKIKDGTNFSRDSRGHWFLNIVIEVQAVAADVRQPVKGVGIDLGLKDFATLSTGEKIKTQRIYRGAEQALAVAQRANKKKRVTAIHAQMAHRRNDFHHQLSTRLVREFDYIAVGNVNAAGLAKTTMAKSVLDAGWSSFRSQLAYKAVKHGAWFEEVSESYTTQTCSDCGALPDSRPKGIAGLGIRNWVCSGCRGVHDRDVNAARNIVKKFGSRAGHGTPAVGIPLH

SEQ ID NO: 20572 - protein, 456 aa, Polaromonas sp.
MLTLFKRQAPAFMPGSERSGCSGLPCYFTRQWLMSIRSALKPAASTFAHCAAVSRMDRCSSFSLAGFGGLPMGFFKVSIPSLSVIQKHLQEICLCESITPVKTIKTLKLRIKDKHASALAAMAREVNQVWNYLNELSHRSIRERQKWLSAYDLQKYTAGFSKCEGVKVGSATVQLVCEEYATRRRQFKKVRLNWRVSNPKSPKRSLGWIPFKKGGAAYRNGQVKFCGLRLGLWDSYGLSQYELRAGSISQDARGRWYLNVCVEVEARKSAGTASVGIDLGLKTSAVCSNGDALASRIYRQYEPALAMAQRAGKKDRTRAIHAKIANVRKDAMHKFSTRLVKENAAIFVGNVSSQALIKTKMAKSVLDAGWSTLKTILQYKSHQAGIVFEEVSESYTTQTCSCCGVIPASSPKGRAGLGIREWACSDCGSVHHRDTNAAKNILARGHSRLAVGIPSL

SEQ ID NO: 20573 - protein, 368 aa, Polaromonas sp.
MKLVANIKLTPTPEQAEALRATLERCNEACNWLSEQAFATKTTRQYDMHKSFYAQVRERFGLSAQATVRCIAKVADAYKIDQKTLRVFRKHAAQPYDDRILSFKPDDIVSLWVLSGRTKVGYVCGDHQRKMLVYRKGEVDLMLVRGQWYLAAVCDFDDPALLTPGGMLGVDFGIVNIATDSLGKQHSGAAVEAYRARYAKRRTTLQSVGTKAAKRCLRKMSGKQRRFHKHENHCISKSIVATAERSGLGIALEDLTHIRARAKAHKEQRKRLHNWSFAQLRGFVEYKARQAGVLCESVDPRYTSQQCFACGHIARQNRKSQSKFLCVACGHGDHADHNAAGNIASRATVNKPMFAHLYVPGAVESPLL

SEQ ID NO: 20574 - protein, 332 aa, Tetragenococcus sp.
VKVLKAYKFRIYPNEEQIQYFIQTFGCVRFTYNQLLYARKKALQAGDYETRLTPAQLKKDYPFLKQTDSLALANAQRNLDRAFKNYFSKRAGYPKWKSKKSHWQSYTTNNQKHTIYFIGEELKLPKLKSLVKANLHREILREIKSATISAKNNQLFFVSILCLENVMSLPKTGESIGVAYCSENLVQMSSTNVFLSRKSNSYYQLKTAKKRLELRAKLAKKRKVLLSQAKNYQKQKRKVQKLYMIIDNQKNDYINQLTYFLVKNYDYIYLEKHPKFSENAKFSETDWQHLLRKIQYKVSWYNKQLAFVVPDTKESEEKCFAIEQLGRQLTTS

SEQ ID NO: 20575 - protein, 269 aa, Methanolobus sp.
MEQFNKACDYISKIAWDNRVFGKVAIQKIVYYDVRGKFDLSSQMVVRAIGKVAESYKIDKSILHSFKKHGAIVYDQRILTFKTSDEISILTLECRERINIKYGTYRPLEVKRVKGQADLIFHNNTFYLMVVVDVPDDKEIDPVNVIGIDMGIINVATTSDGIIYFGKKCTSVREHYSKIKAKLQSIGTYSAKKHLKRISGKERRFKKDFNHCVSKYIVQTAKDTGRAIAIENLNGIRSNSTVSKAVRASIGKWAFNELGSFIKYKAVLN

SEQ ID NO: 20576 - protein, 380 aa, unknown
  TnpB Polypeptide
MTSFTRTLRFKVRSQSHVWLNAAANEVNFVWNWCNEVSSKAASPYYGPPKWLTGFDLNRLSTGAAALMERIGADTIQRVNCEYAVKRRQCRKTKLRWRVTRGPRRSLGWVPFKATSLRRAGCALRFCGKTIRVFEAKRLEGVTWRQGCFAQDAVGDWWLCLLVRVSGTEKPAPCPGVGIDLGLKSLACTSDGDRLDGARFYRDLERKIARAQKSAHRRRAKRLHRRAASRRRDALHKFSRKVVDRYQQIIVGDLSITKLRKTRVAKALFDSGLGMLKNFLEYKSQQAARSFSVVAEGDTSVTCSLCGCLSGPRGVNGLIVRQWVCVRCGARHDRDANAARNILRRAQAWAPVCGNESASTYPSSEVATYGLPEWVCEMAA

SEQ ID NO: 20577 - protein, 271 aa, unknown
  TnpB Polypeptide
MTASRIPSLVSTSTMPARTSASKIGDIPIVLHRPIEGNLKTHTIRRSATGKWYACFSVEYEPAPAREKDTVVGVNVGLESFPPFSNGEKFEDPGFFRTDEKALAKTQRELSKTEKGTPERKKARKIVARIHERIANRRLDFAHQTSRQLVVRFGTIVFEDLNIKNMQKNHHLAKSIADVAWNQFITVTENKAEEAGSRVILVNPRNTSQQCSRCGMIVKKTLSNRVHSCPHCGLVMDGDQNAGVQHYEIGAAISRVVSRMPPTREGGAVTL

SEQ ID NO: 20578 - protein, 462 aa, unknown
  TnpB Polypeptide
MSATIPSQLHRTARIRLRLTRRQAHRCYQLLRSAGDVWAWLLDTNRQRLQQGERPITNYQALCRELARTNGFGELSTVGARSVLRRYAEAWFQAAKRRDQQKAGFPRRKRGLVPVRCYHGTFTIQGLKVRLPVRRGQPELWVRLARPLPYPPELVRAVTLLADGGRLWLAVTAAVPVQKHDLDPNRVAGVDLGIIHPYAVAAQEIGLLVSGRALRAESYLHLVDQKARQAKAASHAPRPGQHGSRRWRRHRAQQRRAEARHRRRIHQAQHEAASQVIAFALQQRIGTLAVGDLRGITDRNVGRVQNLRLRRWRRTHLLQVLRDKAEQAGILVRLVDERGTSSTCPTCRQRVPKPSTRQFSCPHCKFQGHRDLVGAFNVAAKIDGGSTSTSLPVLVEHRRAGIQPTRRDRRRHLHDRRRRRSCLAPGHPGSTAVPPGCRSSRALLDQARDEDQATPSNRAAVA

SEQ ID NO: 20579 - protein, 397 aa, Rhizobium sp.
MPNRAYKYRIYADPQTAEFFARCCGVVRLVYNIALEQRSSFWRQFRKAEGKTISYPSQARELTAIRAEVPWVAQCPIDAQQQALRDLNQAFRNFFAGRAGYPKPRRKFVNDALRFPSSRVGAIAVLNAKWARLRLPKIGDVKFRDTRPISGAVGNVTVVREASGWHIAFSCAFEHETPENDNPPVGIDRGIVNTVALSTGEMHAMPPTNLDDRHKQWQRTAARRNSRSKRQAKARGHAARIAAKAARQRLHWQHVTTTRIARRFGAAVLEDLKIRNMSASAKGTVEEPGKNVARKAGLNRSIRAAAWYRFERLLTYKLAFLGGTVVKVDPRYTSVTCSKCGSRDKANRENQAKFLCLSCGHADHADVNAAVNILLAGTLPSAASETSGGSRGLERAA

SEQ ID NO: 20580 - protein, 417 aa, unknown
  TnpB Polypeptide
MRSAYRCRAYPDEAQQQVLARTFGCVRVVWNRTLAARQARYATERTGTSYAETDRALTAMKRDPDLAFLNEVSSVPLQQTLRHQHQAFTAFFGRRARYPRFKSRHSRQSAHYTRSAFSLRGGELRLAKTGGPLRFVWSWPDADVTGLDPAMVIVSREPDGRWYVTFTIERADPEPLPPAGHAVGVDLGVKDFAVTSDGDKIANPRHLERKARNLARYQRRLARCRKGSANRAKARAKVARAHRKVRNARADFLHRASTRLVRSADLIVIEDLNVSGLLRNRKLARAISDCGWGEFRRQLQYKAELHGRTIVAVDRWYPSSKTCSGCGHLLTGLSLSTRQWTCPSCHARHDRDINAAKNILAAGLAVARSSPGDACGADVRHSGSSRAQSAVKQEPQPATAGIPVLQAGNSQSLIIGP

SEQ ID NO: 20581 - protein, 347 aa, Micromonosporaceae sp.
VKKFCPQPGFVVQAFKFALDPNVSQEAALRSHCGAARAAFNWAVGWVTAAWWQCKAEATYGLAADELTPWRSWSLAALRKEFNWVKHTDPRFASWWGENSKEAYNTGFANAAAAFDNYARSKNGKRRGARMGMPRWKKKHKARLACRFTTGSIRVADDRHVTLPVLGTLRTHEPTVKLRTRVQAGTARILSATVRWERGRWFVSFQVEAKRDITRVARPDAVVGVDLGVKVLAVMADSTGQIRYVDNPKHYEGEQKRLRRLSRRVSRSQGPAVHDPRTGKTAYREPSKRWVKANACSATADSPARSATRDSERFAVSSRTRASAKLAPRWWRRVGIRRRRPARRARQ

SEQ ID NO: 20582 - protein, 486 aa, unknown
  TnpB Polypeptide
MSKEKLLTDFIKSVKDNGVSKSDISLIEDSIGEKFITSIHNINSITTERSTFGSDEVMRITHNYIVDIKSDEKVFSYSDILWLHNRMLSYLGNVKCALEDINKNYSEKTKNTMLTESLFFSMSDGKAFNIFYNNTTIESYIRYIITDIASKLDLQINQHVLKDNDKLTVIKDYFNNDYKNLNNDSKDVPYFMGLDLGVVNFATVSFYTANRDKNYVISGKTLKSRINNLDIKIDKKKKELCIDVIKTIQSKKDKKEVLTRQELNLLNEYYKSIYENKIISVSQERKSNISSDFIHKLSKCLIEECMSKEIKVIVVGKNKGWKNEINNGAKNNRAMYNFPHAKFIETLKYKALLKDIVVIEVEESYTSKTSFIDNEELRVFNNDEERNLTQGDKSQLSKGKKKLLGKRINQKFISKEKKVIHADVNGSFNIVRKVLLNFSYKEEIINLSYELMEISNYRKRKLFNFYKTKEINKVKNENLTLNEHCG

SEQ ID NO: 20583 - protein, 433 aa, Lactobacillus sp.
  misc_feature (356)..(432): Xaa can be any naturally occurring amino acid
MNATMPFTDWQCSFLRLPCSYDTFINIIISRFAMDTVYSYDMLPSSKRRWQLMAKTMAQLPYHCGVKVRVFPSTEQKRLIKRNSDASRFIYNQMNDMTNDLFWLKQVKIPITIVLNRIADLTERLRNPSTAISNIHGWLNHPDFDSLMKANAIKNYKTAWKLFRQVHQAGTPKFHKRGYTQTYQTSCLYGAKVAVPTMRNGSVRLNDTHHLQLPKLGRLRFKGLPSKILDQADDIRIGTTTISMDAVGHYFVSLQMGSGHPFAAKQRVTKSKVGIDLNLDNFLTDSNGQVIANPRYYRMIKGKLAKAQRKLSRRARRAKKNQQRLSESKNYQKQRLLVAKLRLKVANKRKNFLHHXXXXXXXXXXXXXXXXXXXXXXXXXXXXXXXXXXXXXXXXXXXXXXXXXXXXXXXXXXXXXXXXXXXXXXXXXXXXXS

SEQ ID NO: 20584 - protein, 406 aa, Thermogemmatispora sp.
MAQVQRTIPLLLPADEDLRETLAVFQRVQQQLSAPCFNGGRPLSAVGLQRACYHEVKGQLNAQMTCTAIRLVAAAYQSACSNRHPPQRPFQFRRRRALFLIGPRGRDARLCDGTLSIWTVAGRKRLPYQAPEAFQPRLAQAKTIDSLTVLERNGRLLGRLTITLEVPDPQPLPPSDEAAGASRVVGIDLNETNAVVAVDGQERVLFVSGKAVKVRNRRTAKTRARLQRKLAAHKAQHRDTRSVRRVLKRLGRRQRHRTQTFAQTVAKRLVEWVPPHAVLVFEQLQVPPPQQEQVRGRALRRRLALWQRGLVRRWTEQQAQERGLCVVEVNPAYTSQICSQCGQRGNRRRHAFTCPQCGYQEHADINAARNIRDRCTQLRLSGLPSTSPEARAYTAAGKPLAEAGDS

SEQ ID NO: 20585 - protein, 407 aa, Chlorogloeopsis sp.
MIVYEAKAEATIEQLLKVNEALRTALFVRNSCLRFWMDGHAKNGYDLNKYTKVLSDNPAFPWVSKLNSSARQAMAERAWAAISRFFENCKNKVPFKKGFPRFRKLQNRASVEYKQSGWSLSQCRQYITFTDKFGIGTMKLRGTRDLNYYQLKQIKRVRIVRRVDGIYVQFCIDHERKEQLEPTGKSLALDLGLTHFYTDSDGNKVENPRLLRKSEKTLKKAQRRLSRCAKGSKNRAKARIRLGKKHLKLQHQRKDWCVKLALCVIMSADIVAYEDLQVRNMVRNHKLAKSISDAGWSIFTQWLEYFGKVYGRVVVAVPPAYTTIDCSNCGQQVHKTLTTRTHHCPHCSYTACRDWNASRNILNKGLELFRNTDGQSGIYYASGESDLCLYKATSTSKSSRRKRKIQQ

SEQ ID NO: 20586 - protein, 366 aa, unknown
  TnpB Polypeptide
MKTTLQVKLLPSPAQHAALLETMHGFNAACTSIAGSAYEQRLASKFKLQRLLYYEVRQRFRLSAQLAIRAIAKVVEAYKRDMSKQIAFRPDSAVVYDERILSFQGLEAASLTTLHGREVIPMQMGDYQRVQFHRAQGQADLVLVKGTFYLLVTIDTPAEPPMTPERFLGVDLGIVNLATDSDGHPYTGTEVEKVRQRCMTHRMTYQATGTKAAKRRLKKLAGKEARFRRVVNHTIAKKLVAYAKDTKAALSLEELTGIRDRMTVRKGQRNKQHAWSFRQLRAFLAYKAQRLGIPLVCVDPRNTSRTCSCCGFVEKRNRRSQAEFSCLRCGLACHADINAARNLATRAGVTRPALCAPRRGQLAFAW

SEQ ID NO: 20587 - protein, 442 aa, Escherichia sp.
MVKNLALVFGDKDQVNMHQENTVPSASDISFFHRPKYNLPCETTTAFTFRLRPGGQQEREMRRFAGACRFVFNRALALQNENHEAGNKYIPYGKMASWLVEWKNATETQWLKDSPSQPLQQSLKDLERAYKNFFQKRAAFPRFKKRGQNDAFRYPQGVKLDQENSRIFLPKLGWMRYRNSRQVTGVVKNVTVSQSCGKWYISIQTESEVSTPVHPSASMVGLDAGVAKLATLSDGTVFEPVNSFQKNQKTLARLQRQLSRKVKFSNNWQKQKRKIQRLHSCIANIRRDYLHKVTTTVSKNHAMIVIEDLKVSNMSKSAAGTVSQPGRNVRAKSGLNRSILDQGWYEMRRQLEYKQLWSGGQVLAVPPAYTSQCCACCGHTAKENRLSQSQFRCQVCGYTANADVNGARNILAAGHAVLACGEMVQSGRPLKQEPTEMIQATS

SEQ ID NO: 20588 - protein, 466 aa, Streptomyces sp.
MGGTAEKPKAVRGEEAARIKREALGIGDRRKHRTRKATAPKSHAKEADTHHRFYRFRFYPTGEQAGQLQRTFGACRWVYNEGLALRSEAWERHRVRVGFAETCRALTGWKRRADTTWLAEVSSTVLQQALRHLDQAFGRFFQGGTEHPQRKRKGRSGDTATYVRTGFRWAEDPEAPGTGRITLAKQSRALDIRWSRALPAGVTPVRLSVTRDRAGRYFVSVLVEERIAPLPAALVPGSREPRAVGVDVGLASLVTLDDGTKADHPRLLKRYAQRLTRLQRELHRKVKGSGNRNRVRQKIARLYALITDARQDMLSRLTTRLVRENQVLVVEDLSVVTLLRAARGTGRGRKARLNQAITDASWGELLRQLRYKCEWYGRTLVIVDRFFPSTRRCSACHYRGPKLDVSVREWTCAECGVLHDRDVNAAVNLRDEGMRLYWLVESRLPPGRKTAAVIRASESEECSLLV

SEQ ID NO: 20589 - protein, 405 aa, unknown
  TnpB Polypeptide
MQLVEQHCISKGDSRYEVIDRVAFASKNLYNAALYEMRQAFIHHNRRIYFKELYHLMKSHEAYQALPAKVAQQVLKLLDKNWESYVEGVKAYRLDPSKFLGHPKLPRYKEKQKGRNILVFSVQAVSRKGLKKGIVQPSGVPIEIQTMHATINQVRIVPRGGYYVVEVVYEQEAKQADVETSLVASVDLGINNLVALTSNKSGFVPRLINGRPIKSVNQFYNKRKAELQTLIAPDTHFTHRMERITNKRTRCINHYLHTASKRIINLLVSEKIGVLVIGKNPLWKQETNMGKRNNQQFVMVPHARFIAMLTYKAELVGIQVIVGEESYTSKASFLDNDPIPTYGKLKEEPVFSGRRVKRGLYKAANGHKINADVNGSYNILRKVAPDALRGKGVEDVAVHPIRFHV

SEQ ID NO: 20590 - protein, 382 aa, Nocardia sp.
VQLRYNFRVYPTPGQRIALARAFGCARVVYNDALAARETARRGGRPYVTDAELSKALTDAKKTPERAWLSGVSSVVLQQALADLNTAYRNFFASIGGKRKGARVGPPRFRSRRDHRQTIRFTKNARFQVTAGGKLRLPKIGDVTVAWSRELPSEPSSVTVVRDAAGRYFASFVVQVDDQPLPQVGSEVGIDLGLSTFAVLSNSKTIAAPRFLRQAERRLRKAQRVLSRKEKGSKNRVKARVRVARAHARVADTRRDWAHKYSTRIIRENQAVYVEDLCVKGVARTQLAKSVHDAGWGMFARLLEDKAYRYGRHFSKVDRWFPSTQLCSACGASGGKKPLHVREWTCTCGTTHDRDLNAARNILAAGRAERLNACGETVSPAA

SEQ ID NO: 20591 - protein, 405 aa, unknown
  TnpB Polypeptide
LSSKNMSKREKPKKEKKPTRSYQFRLYPTRKQEQKLEGWLVVCCETYNAALDERKSAYRMVGVSLSYEDQCAELPGCKEVRPELAAVPSQVLQDVVKRVDLAHEAFFRRVEEGEKPGYPRFKSRFRYHSLTLKQFGNSFKIHEAARSNRGKLEVAKLGQIKMVLHRQITGTPKTAIVKRTPTGKWFVTITVELSEKDLQEKRLPPSKEEAGLDVGLKTFAYLSTNEEIANPRFFREDEAKLARAQRKLSKAPKGSHERTKKRKVVARTHERIANRRKNFIEQEACKLVARFGFIAVEALVVRNMVKNPKLAKSIADASWSMFFTRLQAKAEEAGRQVVRVNPAYTSQTCSACGHRQPMPLSVRVYECPHCGLVIHRDHNGSLNILENGRQACGRAGRVIPEAPGL

SEQ ID NO: 20592 - protein, 450 aa, unknown
  TnpB Polypeptide
MSNVFTITTELKLNREYNQLTGKYISDYIEIFNKIQRLTFHRIKNYHIKNGKITLEDRNIIHAQLKEEFNLTSRAIDAILSNMLGCHESIKELKEFERKSLERKISAFEKELTKLKDERTLQRVSLNNNSKDFNFTKYKNLKIKIYWKQNKLNTKKQKLKNLETEIKTGKYKVCFGTKDLLQKDYSKFVKKRDSEIYFLGRAGDKACNFNFQVEYNSKINQFYFRIRKEIDLEDDKFVYGQFNFNNKNYTNLLKNLLRTKESALTYRIKIKNNRAFLQIIYNLKHNKDLCVTRNSYGVVGVDFNKGFVSVSETDKYGNLINTFNIDYQYSKGNQTTSDFQNIATKLKDYCLNTGKDLVIEKLDFTKKKDNLISKRGEKYNEMLSSLAYSKFYSIITSKCAKNRIFLHKVNPAWTSWIAKQKYCPKMKLNIHSGASYVIARRGMFLKDKIN

SEQ ID NO: 20593 - protein, 496 aa, unknown
  TnpB Polypeptide
MKKKKVHWKSFNINMPSELMPIYDFLQNELNFILSNDETRALLDKIDLSKLRGDVWRDMRDSLKFRIKDWPLHNKTWHSYILFENLRREIKSKQEAIIIWNELVKNDFNINEELFNSLHKLNLYPTRSRIANIKRSNKMPELTRSAIFSLDYTISSNQFFRMKTNNICEIKVGKKDWIEYEIVFPSSIDERFTGEIAKPRFIKRKRDGKYIGICSYIYEVGNYKLEDKILGIDIGKIKLFSSVILDKKGGISDEFINTTRTQETEYKINRLYENKQVLYNKIKTYEELRLTSLPKYEVWKNLYSSISNKIINTKDYQAKLLSSEIVKLALEQKCKTIHIENLSWLNSQGGKWNHSQIHSKIIEKASMYGIEVNRVSAFNTSKEHPITKEVGTTQDRIIEFTTGKIDRDLLAAINIALRSTNIKLKKSLPKKTKPKRVKSKSNKKEIKEKVNKLKGNGQIVSFLMNVLDSTIQVELGVRPLSEVLPCNSLIGYYNKL

SEQ ID NO: 20594 - protein, 399 aa, Kerstersia sp.
MRRFSGSCRFVFNKALALQKANHEAGGKFIGYVAMARHLTAWRNGTETPWLKDAPVHPLQHALKDLERAYRNFFAKRANFPRFKKKGQHESFRYPDAKQFKLDTGNTRIFLPKLGWMQLRLSRALLGKPCNATISQSGGKWFVAIQTEREVRQPVPQATSAIGIDMGIARFATFSDGSFLAPLSSFQKHEMRLRRYQRAMSRKQKFSNNWHRARRRVQATHTCIGNARRDYLHKATSAISQNHAMVSIEDLQVRNMSHSARGNADQHGRNVKAKSGLNKAILDQGWFEFRRQLEYKLAWNGGILVAVPPQNTSRTCPCCGQVAKDNRRTQALFLCVACGYEENANVVGAMNILRAGHARLACGEDVSRARPEAARTKARRAASAKQEPAEATHSSPLPL

SEQ ID NO: 20595 - protein, 417 aa, unknown
  TnpB Polypeptide
MLLPAGSPGTGPWRRSRRTRTSGRPRPPTASPSPTGSGRCPSSRWPGCGPRRSRRLHRAPGSTPPGRSVRTAGRRERARGVPDREASLPTVQGRHRDRARFTVRDGLALEAGRVRLAKYGWVRIAAGCPAQARLRRLLRRGHATLQHITVTRHSDGRWYATVNFTREARVPIAQRAAPAGPVVGVDRGVKTAAVVATAHGKVIAEVPASRALRDRLRQVEHRQRAVSRSQRGSANRRQAVARLGRAHARAAGVRADALHRFTARLAREHGVVVVEDLATKNLMANRSLAQAIGDQGWGELARQLGYKTARHGGRLIVADRWFASSKTCSACGAVRPKLTLAQRTYRCGEDSCGYVADREVNAAANLAAWGEHTLGICPCVTQAGDRHPGGPSAEPVRHACGGVGVSRGRPGRGGAAR

SEQ ID NO: 20596 - protein, 311 aa, unknown
  TnpB Polypeptide
MVYDKRSATFYRNKVSLSTVNGRVECEFELPSDSPTPYEQYVLSEEFEFRASTLQYDAVDDKFYFHITTRKYDSDGDGDPSEVSEDTEHQTVLGIDLGVNSLAVSSTGRFWQGDDYDHWCREFEKRRGELQQRGTQAAHNAVRRLGKREEAWRKQYIHTVANEIVTEAVEHDCDVIVFEDLTDIRERLPQAEWHHVWAFRRLYEYVSYKAPERDISVEQVEPNHTSQRCSRTDCGFTHDNNRRGERFCCQKCGYEVNADYNGAKNIGMRYARKRTHRLRSSPKSGSGDAPVDVRINGGTLNGESHQPIAGA

SEQ ID NO: 20597 - protein, 554 aa, Dorea sp.
  misc_feature (102)..(174): Xaa can be any naturally occurring amino acid
MVKAIKVMLIPNNVQKTKMFQYAGASRFAYNWALAREKENYEKGGKFISDSELRKEFTKLRHSEEYAWLLNISNNVTKQAIKDACTAYKNFFKGLQKFPRFXXXXXXXXXXXXXXXXXXXXXXXXXXXXXXXXXXXXXXXXXXXXXXXXXXXXXXXXXXXXXXXXXXXXXXXXXMLIPNNVQKTKMFQYAGASRFAYNWALAREKENYEKGGKFISDSELRKEFTKLRHSEEYAWLLNISNNVTKQAIKDACTAYKNFFKGLQKFPRFKSRKRSMPKFYQDNVKIQFSNTHVKLEGFSSSRKANKQKKNWVRLAEHGRIPTDVKYMNPRISFDGLNWWISVCVEFSDCKETLNDDGVGIDLGIKDLAVCSDAVKYKNINKSQKVKKLEKQKRRLQRSISRSYEKNKKGESYCKTNNVIKKEKLLLKRNHRLTNIRKNYLNQTISEIVNRKPRFICIEDLNVSGMMKNRHLSKAVQEQRFFWFRKQLEYKCSDKGIQLIVADRFYPSSKLCSCCGNIKKDLKLSDREYRCACGNIIDRDFQASINLKAYGERFAS

SEQ ID NO: 20598 - protein, 364 aa, unknown
  TnpB Polypeptide
MALKAHKIALRATEEQRAWFAQQCGYARVAYNYGLSDFKDGLSKDEWRSARTLRQRFNAAKREKFNWCSACDQRAAAYAFENLDEAIKRWRSGQNKFPKYKKRSYRQSYTVEGAKVKMEGKHIRLPKIGQIRMFETLRFEGEIRKVTISRKAHRWFVSILVDTGTPNTPRDTRGLPVVGIDVGINTLATLDDGKRYENPRPLKQYERKLKREQRKLSRKVFLSNNWYKQKRKVERLHYRIACIREDTHHKATTEIVKSASAIGIETLKVTNMLKHRKLAKALSDSALGGFLEKLRTKAETLGIRIVQASQFFASSKICSNCEHKKEGLTLSDREYQCSECGTSIDRDQNAAINLRTIACGSHEM

SEQ ID NO: 20599 - protein, 565 aa, unknown
  TnpB Polypeptide
MTTPEFIMLDLGMVFEEQSGTAAFECLDDVCRRILWLEADEHVHMLWHDFQLFDGHIVQLRDAQQDVFHLLHELRCREGWVPILRHPDQMKVEIVDVSTLIDCIWDALFSFHVYHILLFYYSDILLVRQSHMLYNRSRKEANKMEHKKMADYAYHYGLKVRIYPSQQQKEMIRRNADAARCVYNEYVAVNKEIARFGRRSIYIDFIEKRIEALRERIRTVTALKDRYPWLRHPDIDAQSIANARQNYQHAWKQFRAVHHAGVPNFHKKTSVESYQTNPHYSKGTEISLFTSNARFLDKHHLMLPKLKRIRFQGSRKILDRLFAMKEVRIGTITITKDGLHRYFASFQLGSDEPFVKASPKTKAEIGIDLNIENFYADSNGEIMANPRYYRKQKRRLANAQRKLSHRIIRAKKEHRPLREAKNVEKQRLLVARLTAQVMQRRKDFLHRTSATLIKNHDLVAAEELRSKNLLKNHALAMSIQDNGWRMFLSMLTYKAALYGKNFVTVDPRNTTQTCHACGHIMSGKEKLTLKDREWICPKCGIHHLRDVNAAKNILARAKAKLVSMH

SEQ ID NO: 20600 - protein, 410 aa, unknown
  TnpB Polypeptide
MLLCKKIRIEVSEQDATTLDFMQGKCRALYNWHVMNLRDGAKWNFAEAKKSLQESKRYDPELQHVYSKLLHEVYFRLDAAMKAFFRRVKNGETPGFPRVRPRHVFFTLCYPAMYIKIDGNLLTLPTGGGGKHGPKTYPNIVARLTESVPADYKEVAISRDARGNYFASFPAEKPVEQCNTDGVVAFDLGMKTLATGVNEQGRFYTVGGFKGGRWYNRQLDKICSKRDKCKKKSRRYIYLSKVYKRVSSQKRNKQRDSLHKASHLIARRMVERTVVVGDLSQRQMVTKQHQEHNKHLNRAVYNEWGLYTFIEMLTYKCQLYGKDLQFLDERNTSKACSGCDNLQAMPLWKRTYCCTKCGLVMDRDENSAVNILKRYFARRGPHTPGECGVVQADQSSVEVTKISCENQVQE

SEQ ID NO: 20601 - protein, 380 aa, Ruegeria sp.
MKRGYKIRIYPDQQQADALSVQFGLARWVWNHCLAEKSQAWKEEQRSLSQSAQIKALPVLKAQEETSWLGEGDSQVLQQSVIRLHEAFDKFFNKGHGYPRFKKKHGYQSITYPQRVRVNRSDGVIFLPKIGWVNAVFHRPFEDGDVIKQVIVSRSETGKYHASISIDNPKVQAPELAEELNEDEIVGLDLGIADFASTSEGAKIPNQRFVKRAEKNLRRKQKSLSRKKKGSANRAKARRAVAKAHERLANTRRDFQQKLSRQIVDENQAVVVETLKVKNMMKNKRLSKHIADVSWSQFVSFLEYKLNWTGKRLVKIDQWFPSSKTCSSCSTIMNDMPLDVRQWNCPNCGVSHDRDINAAKNIKIEGVRLLQAEGLFVSAC

SEQ ID NO: 20602 - protein, 418 aa, Ruegeria sp.
MFQTRSITYKLYPNKAQEEIMVRKHLMLKDLWNAALEERISAWKKEEKKISLSDQEKALKEIRVDVGGWKGLIHTHEAQTVLKRLDLAFKAFFRRLKKGQKPGFPRFRSADRFSGWGYKEHRNGFKLEMREGWRHGHATLYGVGRMRIRGVARTPGRILKADVSKTHNGWRLNVVVETDCAVRDEAQGPAVGLDWGVSEFATLALDDGSFEAVPNPRHLNEEAEQLREKQQKLSRLARARKISKRASRKARKALARQHAKVAARRKDFLHKESARMAARHPVIATEELQVRNMTGSARGTMESPGRMVAQKAGLNRSILDTAPATFLNMLRYKAEEAGSKFLEAPTRKLKPSQRCPSCGTVKKKSLAQRQHVCSCGCQLGRDQAAALVLLNWGLEQISQSDQPETINPAGTVGDQAAA

SEQ ID NO: 20603 - protein, 597 aa, Rhodococcus sp.
MTGPGTTAPRQFAFTTRPYGAVDDATGEPIGLDDVDTRVGWLLDLITAAGAELVSRLWLPATFDVLAAGRDRQDRRLPVQGHAAAARLGWNPIFPDGVYVPSRVTRVVTAQVMATLRTLAYRDAAITALSARFDPATGRLTALTAAADYVPAGFAQGVRRQLVARSRRDGGVPPGRLRITDLQGPPRMAAMAQLSAADRQLAQITVADRELVLTVKLPTCPTPAGRAQWRSVRLTAAIPAHLHERTIIDWHLPTLVLDRKGLIWRCAATEMVPAADLTTGTVAAGVDWSPSTLGAAAIVAEGPVGLSSDYRGWTYDDRGLGIKLARLQAEGQMLHAKTARLTRLAATAPPEVRAELEAKIVVLDAHRTAVGAKRGRINRELAFHFARQATDYAAAAGAQVIAVEDLTTLETRGHGRVNNNRAAQSARRKAVAALTHTAAGLGITVVSVPARGSSAQCPGCDEPLSRPGGYHTAWCPDCLVGGNRDHLAGVNLAKRALLGKGKVTRRRGQLPAVRVAEHAPVRRCRDKNGPTPRRPRHRRVRHCLPSTPQRLGVTPKQHVPAPQASVWDTVKPTPPHGDTGSRDTRPSPAFATPVADV

SEQ ID NO: 20604 - protein, 624 aa, Rhodococcus sp.
MDDVTAVPASLFGPFSGRCGRNRINDGVSTTPRQFAFTTRAHVAVDDATGEPIGLDDVDIRVGWLLDLIAAAGGELMSRLWQPATFDVLAAGRDRHDHRLPTQGHVAAARLGWNPRYPDGAYVPSRVSRVVTAQVVATLRTLAYRDAAIAALSTRFDPATGVVAPPIGSGDHVSAGFARGVQRQLVARARSSGGAPAGRVRITDLQGPPRMAAMARLSAADRQLAQITVADHELVLTVKLPTSPAPAGRAQWRGVRLTAAIPAHLHRRAITDWHLPTLILDRRGLLWQCAATELVPADDPESAAVAVGVDWSPSTLGAAAITTENPEGLVSDYRGWTYDDRGLGIKLARLQAEGQLLHRKAARLTQLAATAEPEVRALLEEKIAVLNEHREAVGIKRGKINRELAFHFGRQVTDYAAAAQAQLIAVEDLTTLETRGHGHVNNNRAAQSARRQAVAALAHTAAGVGITVVSVPARGSSAQCPGCDEPLARPGGYHTAWCPGCRVGGNRDHVAGVNLAKRALLARNKPTRRRGQLPAIRVAEHAPVRRCRDKNSPTPSRPRHRRVRRSLPTVTPRMGVTPKQHVPAPQASVWDTVKPTPPHGDTGSRDTRLSQAPATPAADSMRST

SEQ ID NO: 20605 - protein, 601 aa, Rhodococcus sp.
MADAGLTALRQFSFTTRPYLAVDDATGAPIGLDDLDVRVGWMLDLISGAETELISRLWQSATFDVLAAGCDSHGRKLPMHGHVAAARLGWTPHYPDGVYVPSRVTRVVTAQAVGTLRALAYRDTAIIALSARFDPATGRIAAPTTAAEYVPPGFARGVVRQLTARSHRTAGAADARLRITDMQAPPQTSAMARLSAADRQLAHMTVTDAVMTLTVTLPTTAAPTARAQWRRVRLTAAIPPHLHRRPISEWHLPTLVLDHRGLLLRCAATEAVPAADLTSGTTAVGVDWSPSTLGAAAITADYPEGLVSDYRGWTYDDRGLGIKLARLQTEGQLLHRKAARLRRLAATAPPEVRAQLDAKIAVLDGHRTAVGIKRAKINRELAFHFARQVTDYAADAQAQLIAVEDLTTLETRGHGRVNNNRAAQSARRQAVAALAHTAAGIGITVVSVPALGSSAQCPGCDEPLARPGGYHTAWCSRCRVGGNRDHLAGVNLAKRALLGRNKATRRCGQLPAVRVAEHAPVRPSRDKQGPTPSRPRHRRVRHSLPTAPQRLGVTPKQHVPASQASVWDTVKPAPPQGEAGSRDTRPSRTPATQVADSMRST

SEQ ID NO: 20606 - protein, 233 aa, Rhodococcus sp.
VKRIVVVKLVPTADQFAALESTLVLCNEVAGVAQSRGLRSRRALQVALYPMVKTRGLSAQPALHVLRKVADAYATRQANLTNGNYGRPGSTRYTAVAGTAVAFRPYAAQPFDDRCLSWQMDVSTVSIWTTAGRMRGVRFVCAPWQRTLLAARKGETDLVYRDGHFYLYATVDEPSPKPAPPPDTAEGWLGVDLGIVNLAVTTDDDPATLDVRWSAPVVGSRWKTCRVSATGYG

SEQ ID NO: 20607 - protein, 598 aa, Rhodococcus sp.
MADTGFTALRQFSFTTRPYLAVDDETGAPIGLDDLDVRVGWLLDLISGAEAQLLSRLWQPATFDVLAAGCDRQGRKLPMQGHVAAARLGWTPHYPDGVYVPSRVTRVVTAQAVGTLRALAYRDTAIIALSARFDPATGRIAAPTTAAEYVPSGFARGVVRQFAAHARGAADARLRITDVQGPPQTSAMARLSAADRQLAQLAVTGHELVLTVKLPTCPAPAGRAQWRSVRLSATIPEHLHGRAVTDWHLPTLVLDRRGLLWRCAATEIVPAADLESASVAVGVDWSPTTLGAAAITAENPDGLSSDYRGWTYDDRGLGIKLARLQAEGQLLHGKAARLTRLAATAPPEVRAQLEEKIAVLDEHRTAVGIKRGKINREMAFDFARQVTDYATDAQAQLIAVEDLTTLESRGHGRVNNNRAAQSARRKAVDALTHTAAGVGVTVVSVPARGSSAWCPGCNEPLSRPGGYHRAWCEQCKIGGNRDHVAGVNLAKRALLGRNKTTRRRGGLPAVRVTEHAPVRQSRDKHAPTPSRPRHRRVRRSLPTVTPRLGVTPNQHVPASQASVWDTVKPTPPHGDAGSRDTRPSPTPATQVADSMRST

SEQ ID NO: 20608 - protein, 376 aa, unknown
  TnpB Polypeptide
MKIMKAYKFKFEPTKAQAAQLAIEFGCARFVWNRGLIERDYAYKNWDVSLNSNDLSRHITQYKKTEYPWLCDATAGVLNQKLIDQDKAFDNFFKGRAKFPKFKKKSHAQSIRYQLDQRIVLNNFRAGELLKLPKLGELKVKWSQVPGGIPKMVTVSKSASGKYFVGFMCEVEQGLMPMTGKVVGIDVGIKDVVVTSDGFHSGAPKYTYYYQRRLKKAQRVLSRKKKGSNGWKKQRIVVARIHETITNSRKDFLHKLTTKLVSENDVICVEDLNVSGMLKNRKLSKAVADVGIFELNRQIEYKAQWYGKEVVKISRWFPSTKTCSSCGEIKPMKLSERVYECGCGLSLDRDLNAAINIKMAGLAMSGAIYQPEKVAA

SEQ ID NO: 20609 - protein, 305 aa, unknown
  TnpB Polypeptide
MGDGDMENMRRVVAVEVEDSPPELYAVEEPHRRIVEEVAAYVAERGRLEKEKYNEIYRKFRKLYPLPSQLIQQAMNQGVEIGKSFLEAKRNGQVHRPRPEVRRVSMRFAKDSWSYKKVVGSAAPVKLTLSLPGGRREVWIKPHRRFWLYWWKTLTGEAELASTLMLKRRRNKWYAVFIFDVVSKSEPPAEVAAFDVNENSVAVAGVSLLATVDRAASWNRQYINPAVYLIRTDFGRLAKRYEAVRNAKLEELKRKYQYAGKDEEERRQNVADTREFRKFTRRLRERRRKEGRVRQVAREATKAPP

SEQ ID NO: 20610 - protein, 386 aa, Brevibacterium sp.
MKMVKRAYKFRFYPSPKQAQLLNQTFGCVRLVFNLALQARTAASESNRCNLSYADTSAMLTQWKRSRELAFLNEVSSVPLQQSLRHLDSGFKRFWKRQSAYPRFKSKRRSKASAEFTVSAFRWDDKQLRLAKMAEPLDIVWSRSLPANAVPSTVTVSRDRADRWFVSNLVDETLAEPPAAKSNAVGIDLGLESLAVLSTGEKIDNPRHERRDRTRLIRAQRRLARKQKGSANFSKARVKVARIYAVIADRRRDHLHKLTTRLVRENQTVVIENLSIQRLRAKGGRRKTGLNRTMSDASWGALRSMLEYKSRWHDRNLIVIDPWFPSTQLCSQCGAVTGPKSLDVRAWTCACGTHHDRDVNAATNILAAGLAVTVCGDGRRLVRGHA

SEQ ID NO: 20611 - protein, 382 aa, Sporolactobacillus sp.
MLIQKAFKFRLFPTDEQAVLINKSIGCSRFVYNHFLDCWEKTYQQTGKGLTYNSCSKALTQLKVALPWLKEPDKFALQNSLKNLSHAYDRFFKKQARHPRFKSKRNPNQAYKTCFTNKNIEVADQSIKLPKLGWVRYARSRQVEGRLLSAFIRVVPSGKYFISLVAETEVKELPKTGKVVGIDLGLLDFMTLSTGEKITHPKFGCSMEQKLRREQRKLSHRYEGAKKRMLKQKNLTLMDCANYQKQKIKVAKLKEKISNRKTDFLHQWSTKLVKNHDQLVIEDLNVNGLLKNHRLAKAISEVSWAEFVRQLTYKAKWFGKEVIKIDRFFPSSQMCSVCGHRDGKKALYIREWTCPQCGAHHDRDVNAAINILNEGLKNPIGI

SEQ ID NO: 20612 - protein, 387 aa, unknown
  TnpB Polypeptide
METITKTCKVKLDIPEERKPDILETFKQYNDALNFAIEQAWKPEKKIINKSKLHKLTYYPLREKTQLPANFICSARNKACDVIRFNIIKWHNYKKASKPLFKPFSAIQLDKRTLTIKDRSCTFSTVNGRVKADYFLGNYQKQILDDPNYDFRTATLTFKNGNFFLNITIVKPALVKKPETVMGVDLGIKNIAVTSTGKFFKSGLLNDSRRQFREKRASLQSKGTRSCKRVFKRLSGRENRFSDWVLHNVSRQIVNEAINHNVEIIAFENLTDIRERVNQWRKKERAKVNLWAFSKLQQYVQYKALEAGMKTIFVESKYTSQRCFKCGHIEASNRNGFNFVCKRCNYSINADYNASKNIAFKVLSGKSPDWAGLPRKLALKTKRFAYV

SEQ ID NO: 20613 - protein, 409 aa, unknown
  TnpB Polypeptide
MDLTLRFRAYPDNDTASEAWRHIDIHRQIRNHAVRDYYHAPRDDRPTAYDQHSKLTEWKQQWPTFAEVSAHAAQQTVSQIQKDQTVLREHRKNGRKTGRLKWQGSGEFRSVAYQSEGFNVNHTTGQDFGTLTLSKIGDIPIRAHRDLPDTENVKRAILKKERTGDWFACLVVEAEPAKKPDPAEIDPEDCVGVDLGILSYIHTSDDLAVDCLNLDDEYEQYAREQRSLSRKERGSNNWEQQRQSVARAKRRIKRKVLDFQHKLSTWLVKEYDVVAVEDLDVKPMLETSQSAKNKQDAAWSQFLDLLEYKGEMYGTHVVRVDARGTTKACNECGVETSKPLWVREHSCPACGHTEDRDLNAAKNVLDRGLQSLHVGAGRSESTPVQTVLPAFTSLRVDAKDVVEAGSPAA

SEQ ID NO: 20614 - protein, 367 aa, Fusobacterium sp.
LEKAYKFRFYPTKAQIKKLNSTFGCVRYVYNHFLGLKQELYKTEKKSMSYSKCSKELTVLKKEKEWLKDVDKFSLQNSLKDLDRAYKNFFSGKGYPKFKSKKDNRKSYRTNYTNNNIEFLDKWIKVPKLGKLKIRDKMKPQGRIISATITEVPSGKYYISLCCTDIEVEKLESTNKNVGIDLGIKDFAITSDEALIENPKYLQKSLNKLALLQRELSRKPKGSSNRNKARIKVARLFEKITNQREDFLQKLSTKLIKEYDIICMEDLQVKNMVRNHKLARSISDVSWSEFVRILEYKAKWYRRTIVKVDKFFASSQMCNYCGYKNEEVKDLSIREWTCPICSTVHNRDINAAKNILKEGLRILGISA

SEQ ID NO: 20615 - protein, 492 aa, unknown
  TnpB Polypeptide
MATLSYCKGLPTPERELNALGCTQLEMFLNAYTPIFHRAACETVQSLQSGNAFSKSAWNTHLQQAHGINKRHANGVISFAAGAVESAKACRANHIKTLAGQLKSTLVWIRKSQKKLKDGQKFYAKKNWQHSKTGCRFPLSCSLQYRSTNWQTLKFQIHHKQRKAYLLTRKIQCLKVAPIRVSIPRGHALIVGSKDETMGNQACQWDGNQIKIRVPQCLELRFGKYVTSEIGGFPRKVNRLPELGAKTWQFYRKAKKWCVTVQFTPLPVKRISRHSACGAIGIDMNPGSIGWAYVDRDGNLKAHGKIPLQMGLPSGKQDAQIVDACLQLVNLAKLYACPVVCEELDFSKKKTQLREKGRKYARMLSGWAYSRFYELLNSTLSNRGVYWMAVNPAYSSLIGLVKYLKMYGLGSDEAAALVVARRGMRLSENMPIPITASLSVKSGQHVWGLWNQLNKHIQQLGMKRHCFYSASNWGSLVKQSGLQSLNCKPQGA

SEQ ID NO: 20616 - protein, 427 aa, Streptomyces sp.
MTTERACEKRQSGHRARLVLTPAQVVLMDGQAHAARTLWNLLHDWWTMLPRDKRSLTAADAAIRQARKEIDWLAQLPAQAAQAVLKTYFQAWKNCWERRAGAPGFKARFRTVMSMDIPQGRDLRITRVHRRWGMVNIPKVGRVRFRWTKDLPVGKRATAGNRITGARLVKDALGWHIAFRVQSLEPRPEPHTGPEVGIDVGVSVPLALSDGTTFDHHAWLPGKEQAKLGRLERRAAHRKSFRKQGERTSHRLRTTYDQIAGLRARAKRRRLDWQHKATTAIAEKYGTVVVEDLNITNMVKSAKGTMETPGKNVARKSGLNRAISQEAWGRTVELLTYKTARHGGTVRKVPAPGTSQRCSMCGCTTPGSRESQAVFACKNPDCGWVGNADHNGARNILHLYRMGLALIPAAGRAVVRRARHVKPATVR

SEQ ID NO: 20617 - protein, 230 aa, unknown
  TnpB Polypeptide
VHIASFEKRRSMQRRASKSKKAGRVLSKYSRRERNRAGKHQLEIVRVIRSVAGVVGLEELKKQGMFTRSRVWNRRISRSDWRSIAGILMGRLGEIKVEELDPYGSSSFCSRCGWHNRDLNGAEVFVCSGCGLRINRQLNAVINLYMRLRFGYKEKWVGGRKRVELWMEGASQRREWWDSIVLPSLVGGCVLTGAERSGANEPVRSLYDAVKPKLHYAYDRYADAYLPMPT

SEQ ID NO: 20618 - protein, 223 aa, unknown
  TnpB Polypeptide
VENLVTTSDGVVVENPKVFDKVERRVRTLQRTLSRKRKGSRNYEKARKKLAKMYEHVKNLMNDYIHKVTSWLVEQYDEIYLEDLDIKEMVEDSESKALRKHILHADFSKFMSHLSYKASRAGRRVAKVDPRNTSRTCARCGYVKKDLTLADRMFVCPRCGWVADRDYNASLTVLRAGSGLPLEPVDRRPLLYIPFSEGVYSKFPGRSRKSSPRGGDAPPVRTG

SEQ ID NO: 20619 - protein, 369 aa, unknown
  TnpB Polypeptide
MGNKAYKFRIYPNDEHRKFLARQFGCSRFVYNHFLRLTTDLYAEAKKSLRYKDWARLLVELKTQFEWLKEVNSQSLQQTLKDLESAFVRFFKKQGGFPNFKKRSNRQSFRVPQHFSIDEKGFLKLPKMTLIKMVIHREIQGTPKSVTISLTPCGKYYASIVTEQNISHAPLNGDKIGLDLGVKEFAITSRAEKFENPRYFQKSLRRLKIRQRRLSRKKKGSNNRVKARRVVAKVHEKVAQERLDYQHKISLKLTCENQAISVEDLNIKGLVKNRQLAKQISDVAWGNFLTMLEYKGDIYGCEIKYVDRFFPSSKRCSNCGYIKEDLTLKIREWECPSCYKFWDRDVNAALNLMLFSQIKNTPGSGEIYA

SEQ ID NO: 20620 - protein, 401 aa, unknown
  TnpB Polypeptide
MVIFEYKLDGTKKQYGAIEEAIRIGQFIRNKCLRVWMDERGICKNDLQCYCAVLAKDYPFATRLNSQARQASADRAWFAISRFYDNGKNRKPGKKGYPRFQHDNRSIEYKTTGWKLEPDGKHITLTDGCGIGRLRLVGNAKQQIAAFPPEQIKRVRIVHRADGYYVQFGVKAERAIVHQPTGKQAGIDVGLKAYSTDSEGNTVDNPRHYRKAEQKLKRLHRGVSRKQKKSQNRKKARKQLARAYLKVQRQREDFARKTASTLVSSHDLIALEDLKIRNMVRNHHLAKSMHDAGWGTFLSWVKAYGLMHEIPVIAVAPQFTSQECSACGAMVKKSLSVRTHICTSCGVVLDRDHNAALNILAKALERTLGHRATSSSSEEGNASGQTASPRLSLRKTSKRAG

SEQ ID NO: 20621 - protein, 435 aa, Streptomyces sp.
MSRFRMFPSREQEEQLLLHCAHARYVWNVAVEQHSHWRRWRKSAPGFAEQCRQLTEARRDSEWLGAGNADVQQQALKDFAKAKNARFASGFGEPTWRKKFRHEGFRVIGTDRTPEYDEDGTPKLNAKTGKQVMGRSVVVQKLNKRWAQVKVPGCGWVRFRLTRPELPAAKTFRVTFRNGQWHAAFAVIPHPIDAPATGSVIGIDRGVTITAALSDGRTLNCPQLTAKERAQIRKHQRRAARAPKGSDRKTAEYAKVARLKGREADRRKDWCEKTSTMLARTYDLVRFEKLNIKNMTARAKAKPDPDQPGQYLKNGRAAKAGLNRAILAQGWGLLRQRTEHKAPGRVEDVPAPYTSLRCSACGWIDKNSRKSQAEFVCSSCGFTCNADTNASINVAAGQGGIPRPRRTAGAGGTTPPTQRSNVREPQPEWVGIPLF

SEQ ID NO: 20622 - protein, 172 aa, unknown
  TnpB Polypeptide
MGLCKKAEYGAVPQNSYGDHEICRRVSGDVIVFEYLEMQGKISGNKKQKLHLWRKRDTQKLCEHQAHRNRIRVSRVSARNTSRLACDGSGAVVRNQENHSLCTFRTGKQYNCDLSASYNIGARYFIRELLKPLPGTGRSSLEAKVPAVKRRTSCVYADLRKLYVEVNNLKAA

SEQ ID NO: 20623 - protein, 311 aa, unknown
  TnpB Polypeptide
  misc_feature (2)..(9): Xaa can be any naturally occurring amino acid
MXXXXXXXXNVLMPKSKKDNHQSFSIPQNTLVDFENNYINIPKIKTNIKCKLHRKFYGIVKTSTISITPTGKYYISILVQLEETIPNKKSINENQAIGIDLGIKTFAVLSNGIEIENPKYLRKSINKLKKLQRKVSKKTKGSNNRLKMVKQLAILHEKVSNKRNDFLHKTSHYLVTNYDTLCLETLKASNMIKNHKLAQALSDIAIGNFNNMIDYKAEWYGCNILRIGQFEPSSKMCTCGVINKELKLSDRVWKCKSCGTTHNRDLLAANNIKHFAFLKNNTVGTTEIKACGDDGLLLSMKQEAQYPLGSE

SEQ ID NO: 20624 - protein, 374 aa, Bacillus sp.
MIINKAYKFRIYPNKEQEILIAKTIGCSRFVFNRFLTRWNDTYKETGKGLTYNSCSAELTQLKKEFVWLKEVDSISLQSTLKSLADAFTRFFKKQNDAPRFKSKKNKVQAYTTKHTNGNIAIVGNKIKLPKLGFVRFTKSREVEGRILNATVRRNPSGKYFVSILVETEVQPLEKTGSAVGVDVGLKDFAILSTGEVFSNPKWFRKLEEKLANAQRILSKRVNGSSNWNKQRIKVARIHERITNARADYLQKISTEIVKNHDIIGMEDLQVSNMLKNHKLAKAISEVSWSQFRTMLEYKAKWYGKEVVTVSKTFASSQLCSCCGYQNKDVKNLNLREWDCPSCGVHHDRDINAGQNLKNEAIRLLTVGTTGLAY

SEQ ID NO: 20625 - protein, 412 aa, Streptomyces sp.
MVIAMQLRYGFRLYPTGPQRSALARAFGCARVVFNDALRVREDARAAGLPFVTSGELSKRLTASKKTPERAWLGEVSSVILQQSLRDLDTAYRNFFDGLKGKRPKTGPPRFKSKRDTRQAIRFTANAGWKITPGGKLRLPKVGDVPVKWSRTLPSTPTTVTVIKDSAGRYFASFVVETGPEEVLTPVRPEVGIDLGLGHFAVLSDGRKVDSPRFLRRAEKQLKKAQRSLSRKEKGSSNRNKARVKVARAHARVADARREFHHQLSTKLIRENQAIAVEDLAVKGLARTRLAKSVHDAGWSQFVTMLEYKTSRYGRTFVRIGRFEPTSQVCSACGVKDGPKPLHVREWTCGACGTVLDRDINAAVNVAKAAGLAVTARGAQVRRGLVPAQRVEAGTHPEPHPTTARQTGIALL

SEQ ID NO: 20626 - protein, 470 aa, Bacteroidetes sp.
MIRTYVHKHKINNEKQNIVRSVVVAYRATCAAIAHAQWRTFFEGDFFNKMADVKNISSKLSERYKRNCCYQVVGALKSFISNRQNDFSKIVYASSLNAETKKHLFQINRRKLWFAKTDDNFTVEELFLARKIFKKILSRHRKPSFRYVNMQLNSNVAQITLSDKKESPEFHYWIKLSTLESGKPIMLPILENAYFEKLGGDLCESVQVNFKDDEIVVALVKDVPEKKLSFQMESLAIDIGLRNLFALNTGDIMGRNFIDTLKYYNKIISKLSANRQRQGLDVKSKKYNSLVRKLRAWIRNEVGRLLNRIVKRYAPKKIVIERLDFRNQGLSRWMNRLLGNFGKGEIIRKLKTLKEEFGIDYQEINPAYTSQQCPNEECGYVDKSNRLTQDKFVCKCCGLKGNADVVGAKNHLARSSDKYLSNIFLPRKKVLEKLVMRFLERQSCHRSLANGLLAGNIYFREARVQPKLVA

SEQ ID NO: 20627 - protein, 462 aa, Bacteroidetes sp.
MESSKNTGSRIGAEPMGITSLNPSTQVITAKLKLHPTPEQKLQIDKFFLAYRDGLNYTSNVAFANNKMSNANKIQKIVYKDLRAKFGLSSQVSCSVCRQVSATYKGLWTKVKDNALKLKTGKAKRRYKGLDSAPKYISRTATLNYPRDFGFKKDGMVSVQSLEGRLTVRYTGYKKHLDYITAGAQIGEAKYYYCKSSKQYYLLVSFHAPAPVVTADDIRKIKGVDLGQRNLSVTEDTGNKISFFNGRSTLHKSNKYQIQRKSLQKKGTRSATRKLVSLSGRERRFKADVNHCMTKQIVEKDIIIGMEELTGIRENTAHKRRRGKRASEKQRRANANYSKWAFAETQNFVAYKSNLVGAVFVKVDADYTSQACKCGHTSKLNRPNGSVMFKCVKCGYNLHSDIVGTRNIKYRTILIWQDYLRTGVLVRTPNVSSNEAKAERLKRYSELRWSLDASSLALAVSI

SEQ ID NO: 20628 - protein, 201 aa, Streptomyces sp.
VTGSDVRRAFRYRFCPSDVQAAELSRTFGCVRKVYNLALAARTKAWTRQERVNYSATSAMLTVWKKTEELAFLNEASSVPLQQTLRHLQRAFTNFFGRRARYPRFKSRRKCRRSAEYTASGFRFRDGKLTLAKMCEPLGIVWSRPFPEGVKPSVVTVSRDVGGRWFVSLLCDDPSLTPLGANGTSVGIDVGPDHLLTLSRP

SEQ ID NO: 20629 - protein, 399 aa, unknown
  TnpB Polypeptide
MLRGIQIRLLPTPEQEQKLWNHVNGFRATYNWGLAEQMRRFEQGEKHLSEYDLRKIFRKHRKTDEQLSACDANALCMAIFDLSNAYKRFFKHHRENPGEKFSKKKLEHFKRIGKSVTNYDLIAHPKFKSAKRANKTFAVQNDTLNFYGGKGVSISGVGKVQYKTQDKLPLGYKQAKFYNPRVSYTNSKWILSFAMDVQGAEYKLNDYGMGIDLGAKVTAVVSCNGKHTVYKNINKNKRIKKLAQKKKRLQRHVARQVVGSKGQKSTYKQIGRIETRIANIRKDFRHKMTTEIVNQLPKVIVIEDLNINGMMKNQHLAKAIGEQGLYTIQNYLTYKSKNRGITIQKANRWYPSSKRCSSCGNIKKDLKLSDRKYLCHNCGMIKCRDCNAADNLEALAMLA

SEQ ID NO: 20630 - protein, 375 aa, unknown
  TnpB Polypeptide
MYKGFKFRMYPTNDQEKIMNTNFDNKRFIYNHYLDKAKTSNQINTKQNIFDYSQILKPTSTSLQTLDIKIAYTTLYSLENNFKKLNNLEIMKFKSKYNKNSYTISSNKSINNPNIILDLKRKTITLPHLENIKIRGYKKLKEIKGRIINVTISKEPTGKYYVSVLYELTNVNPIKNPKNIVGIDIGIKQLLTLSDGTTYENIHIQEKYRKRIKRKQRELSRKIKGSKNYYKCKKELAILYSKLKNIRKSYIHKITKSITDEYDIITCENLKTKEMIIQGKTNNLSSKINDATFTEILRQLSYKAKIKGKKFYQVDTYYPSSQICSRCDNQDKKYKDLNEREYKCVKCGQALDRDFNSSINIMFEGLKLYIKSYAK

SEQ ID NO: 20631 - protein, 366 aa, unknown
  TnpB Polypeptide
LDLQCELYNAALEERRGAWHWERRSVSYVDQCRTLTALRDVRPEVLTSGVIVCRGTLRRLDWAFTAFYRRCQAGQRPGYPRFRSRSRWDSLQWEDRDGWRLDPATKRLHLMGIGGIKARLHRPIRGTPKAITVRREGRRWWVTIRCVDVPAEPLPPTGRQVGIDLGVTVLVATSDGTLITNDRHAQRAAHRLARAQRDLATKQRGSQHRRRAVERVAAAHRRVRNRRADTLHQLSRRLVNDHDLIVHEQLAISNLVRRPRPRPDGAGGYARNGAAAKTGLNRCIHDAGWGQFLTMIAYKAESAGRTVIAVDPRNTSRTCADCGQISAGNRRGAVFKCQGCGHEAHADTNAAINVLRAGRAQQHTAA

SEQ ID NO: 20632 - protein, 373 aa, Microcoleus sp.
MVAKSLPSTPMQQTLMSVTEAFKGFKELRTLYFKGQLHFRPKPPGYLKGSKLFKVAYPNSGGLKPTLINNQLRFSLGLTVKRWFGISEFFLPMPSHLDFSKVKEFTIVPKNGAFYLEVSYDVELQQHDLDNNQALSIDLGTADNLAACVDTLGNSFLIDARAMKAMNQLWNKKVATRKEGKPSGYWDNWLDRVTRKRNHQMRDGINKAAKLIVEHCLKHGIGNLVIGWNQGFKSNAHMGKLNNQKFVQMPLGKLKDRLNQLCNLHGIRFTETEEAYTSQSSFLDGDSLPKYGEKPPEWKASGKRIKRGLYQSGDGTVINADLNGSANILRKVVSKLGVNLNQLNRRCLTTVARVRLWVLPKPALSVESQRLQT

SEQ ID NO: 20633 - protein, 327 aa, Nocardiopsis sp.
LSAQPTVRVIGKVCDAYTTRQANLKAGNLGRKGSPRRQRATSTPISFRLDAAQPFDDRCLSWQMDARTVSIWTVSGRMKNLDFTTSPEQLKLLTEYRQGESDLLCQDGQWFLASTCEVPERVENPDPAGWVGVDLGIVEIATTSTGDRFAGRHLNRQRRQQSELRAKLQAKNTKSAKRVLKRLRRREARRARDVNHRISKRIVERAERTDHGIVLEDLRGIRGRVRQAKQQRSMLHAWGFAQLRDFIAYKARRVGVPVLVVDPAYTSQTCSECDHTSRRNRPTRNRFVCRSCGVVLHADVNAARNLAHRGGVAWAAGRRSTAPAPTR

SEQ ID NO: 20634 - protein, 408 aa, unknown
  TnpB Polypeptide
VGTAGNVSAETIRRYIERSEHVTQRRYAMMRTASIRLEVNAKQAAALAALRSAYADACNALVPLVREHRLWNRVGLHQRGYHGLRAATPLGSQMCCNAIFTVCKAYRGQRQLGRIKTDSPVPQLRFDRASVHLDKRTYTLKGECVSLYTLDGRITVSLRPGEHQQRILASGRPREAELVLRRGIWFFNLIVESGEVKPVASGPVMGVDVGENTLAAHSLGKVFGGETLRDQRDRYLALRRRLQSNGSQSARQKLRQVSGRERRRVKHINHETSRAIVTAAVAAGVAKITMEDLTHIRSRIKAGKRMRARLHRWAFRQLQTFVAYKAQTAGIAVEFVDPAYTSQTCSCCGQLGRRARHRFVCELCGLRAHADLNASRNLARIGGTAVPPRAAVNTPDVENVGQEIHVLQ

SEQ ID NO: 20635 - protein, 354 aa, Bacillus sp.
MTKHNIAYKFRLYPTVEQACLMSKTFGCVRFVYNRMLAERKEVYEKYKGDKEQLKKQKLPTPAKYKEKFEWLKEVDSLALANAQLNLQNAYKNFFNGQNEFPTFKSKKNRKSYTTNVVNGNIRLVNGHIKLPKLKMVRIKQHREIPRDHIIKSCTISMTPTGKYYVSILTEYEKKIVQKEVETVVGLDFTMGELYVSSEDERANYPRFYRKMLNQLAKAQRVLSRRIKGSGRWNKQRNRIAKLHEKVANQRKNFLHHRSKELVDNFDVIAIEELNMKGMSQALHFGKSVADNGWGMFTSFLAYKLHEQGKQLVKIDKWFPSTKTCSGCGNVKNMSLSERIYSCICGVSLDRDHT

SEQ ID NO: 20636 - protein, 250 aa, Salmonella sp.
IPAIEAQLHREITGTLKSITITRSATGKYYAALLCDDGIEAPAKPTLVSTITGLDTGLSHYAIKSDGDKVANPRHLINASRNLRRKQKALSRKKKGSANLRKARIHLAGVHERVANARADFQHKLSRTIVDENQAVIVETLKSANMMKNHHLARAIGDAGWSGFISKLEYKAAEKGVHVVKLDQWFASSKTCHCCGHKMPEMPLNKRIWQCPECGVEHDTRYQCSHQYPAEGHTGITGGGSRRLCSWRPA

SEQ ID NO: 20637 - protein, 287 aa, Escherichia sp.
  misc_feature (76)..(76): Xaa can be any naturally occurring amino acid
  misc_feature (147)..(147): Xaa can be any naturally occurring amino acid
  misc_feature (179)..(179): Xaa can be any naturally occurring amino acid
  misc_feature (213)..(213): Xaa can be any naturally occurring amino acid
  misc_feature (278)..(278): Xaa can be any naturally occurring amino acid
MRRFAGACRFVFNRALALQNENHEAGNKYIPYGKMASWLVEWKNATETQWLKDAPSQPLQQSLKDLERAYKNFFQXRAAFPRFKKRGQNDAFRYPQGVKLDQENSRIFLPKLGWMRYRNSRQVTGVVKNVTVSQSCGKWYISIQTEXEVSTPVHPSASMVGLDAGVAKLATLSDGTVFXPVNSFQKNQKTLARLQRQLSRKVKFSNNWQKQKXKIQRLHSRIANIRRDYLHKVTTTVSKNHAMIVIEDLKVSNMSKSAAGTVSQPGRNVRAKSGLNRXQQKPRNDSH

SEQ ID NO: 20638 - protein, 374 aa, Nostoc sp.
MKTLKFKLYQHKRNKFLKASINAAGVIYNHCIALHKRYYRMWGKHLNCAKLQAHIAKHRLRKEFWQSVGSQAVQDICQRIEKAYQLFFKHNKNGCCPPGFKKVKKYKSFTLKQAGYKFLGGNRVKIGSRVYQYWNSREIEGKIKTLTIKRTPLGELFMVIVVDSTDEPEIKFTTGKIAGFDFGLKTFLTCSDGSKIESPQFFKQSLNVIKIANRYQSKKLKGSSNRERARKNLVRAHEDIANRRTDWFWKLAHDLTDRFDVLCFETLNLKGMKRLWGRKVSDLALRDFLDILEWQALKKGKQVVYIDQWYPSSKTCSCCGHVIDTLDLSVREWRCPSCQSVNGRDDNASKNIQAVGASMVRLGDVSRATSAIAV

SEQ ID NO: 20639 - protein, 496 aa, unknown
  TnpB Polypeptide
  misc_feature (146)..(147): Xaa can be any naturally occurring amino acid
  misc_feature (167)..(167): Xaa can be any naturally occurring amino acid
MTSAAEDHAFVELHRTHLHIDDAIGDWDGKPLLYHLKAAPHRFVLPMALMSKFMEQSGGKAFALYPLRRSLVPRFVRFDALGFQKAMQAMKNEREGRRVRKKNSDDITFANSLNYRAAGVAQRWRLEDGFCTDGVSARLQQLQGPXXSLLRQRVEKADTQRRKQEGXKRKREEEKASGAERKAKKPTKKPAKKAPTKPKDVPLPLAHLPTRGMWAIDEIKHLTRVEDADGQRRNIHVVGIDPGKRELIVATDSDDPRSHPVRYTLRQRQKDMRSRQYADESRRSVPLGVHRSLQALSHFNSRSSSLRSFHKYAKARQQCISECLEAFSDLSHRRRRWKTYIKGQSSEESVYAKLRAMRTDDRPLVLAYGSWGLVAGRTGACNKGNPPCIGVGLMRKIARRFLVVPTPEQYTSKTCHRCFGECGPHPTMRTSKNKEIRGLRVCQDESCRSHLNRDTNASRNIGLQLKRLLQDKGPIRQLSDRDLEFNRHQLCLGCEE

SEQ ID NO: 20640 - protein, 358 aa, Bacillus sp.
MSQTVTVKIKLLPTKEQALTLTEMSKTYISTINDLVSEMVKEKKNTKKTSKNIDVSLPSAVKNQAIKDAKSVFKKAKKTKFETVPVLKKPMCIWNNQNYSFDFTHIYLPIMIDGKAKKTPIRALLVDKDNRNFNLLKQKLGTLRITKKSNKWVAQISVTIPTVKKTGVKVMGVDLGLKIPAVAVTDDEKVRFFGNGRENKYKKRKFRSVRKALGKKKKLNAIRNSKNKEQRWMKDKDHKISRAIVNFAKENKVSVIRLERLANIRQTTRTSRKNEKNLHTWSFYRLSQFIEYKANLEGIEVEYVNPAYTSQTCPRCSEKNKAQDRKYKCKCGFEKHRDIVGAMNIRYAPVVDGNSQPA

SEQ ID NO: 20641 - protein, 389 aa, Paenibacillus sp.
VIRCVKTAFRTSKADLDRLFACNRISAEIWNQCLSIAKNYSLLHDGKWIGKTELQTSLKNQFPLHSQSIQAVCHKYLFARESARQAKNQGLNTKYPYKNKKYFNTKWVDQSFKIKGNRVQLSLGIQNGKRQEPIQIIVADMPDAEIKEIELVYDRKLMVSLCYEDGKVAAANDGSEVAGVDLGEIHSITATTTANQSIIITGRKARCIHRLRNKKLAEIQKLMSKCKKGSRQWKKYKRAKTYILSKSERQLHDVIHKTTRQFVQWCNENNVREVVIGQVEGVERHTKKKKRKTVTQKLSNWSFGKIRKQLEYKLEEHGTSVKMVDESYTSQQCPCCGRRKKTSTRIYICSCGYKEHRDVHGSKGILSKYLHGEIRYLGETKSIKYLRIA

SEQ ID NO: 20642 - protein, 218 aa, Bacillus sp.
CEVKEVKPNSILNAVGIGIDLGIKDFAVRSDGKTHKNINKTVQVKKIEKRLKREQRSLSRKFENIRKRGEQPVTNKRANINKNILRVQQLHARLANIRLAYVKSIVNDVVKTKPMFITVEDLNVKGMMKNKHLSKAVAQQCFYAFKTWLSTKCREYGIELRQVDRFYPSSKICSCCGQKKSDLKLSDRVYTCDCGNVMDRDLNASINLLQAKKYTILT

SEQ ID NO: 20643 - protein, 288 aa, unknown
  TnpB Polypeptide
MWKLLKSFKTEINPSEEQKVKIHKTIGTCRFIYNFYLAHNKELYNNGEKFMSSNRFRVWLNNEYLSEHPEYSWIKEAYSKAVTQSVNNGQTAFTRFFNHESAFPKFKKKGRSDVKMYFVKNNPKDCRCERHRINIPSLGWVRIKEKGYIPTTKDGYVVKSGTVSMKADRYYVSVLVEISDNKIADNSNAGIGIDLGLKDFAIVSNGKTYKNINKSARLKKLEKQLIREQRCLSRKYENLKKGEVTQRANIQKQKLKVQKLHHKIDNIRTDYINKTIAEIVKTKPSYII

SEQ ID NO: 20644 - protein, 240 aa, unknown
  TnpB Polypeptide
VRKINRAVKIRIYPNKEQITQIEKTIGCSRFLYNRMLADKIRYYQEEKKMLKNTPAGYKKEYPWLKEVDSLALANVQLNLEGAFRKFFREPGVGFPHYKSKKHSRKSYTTNMVNGNICLQDRFLKLPKMQPVKIKLHRMIPEGWKLKSVTVSREPSGKYFASLLFDCENQTAEKRQAEKFLGIDFAMHGMCVFSTGERAGYPMFYRNAEKKLAREQRKLSRCEKGSRNYQKQKKKGCIIS

SEQ ID NO: 20645 - protein, 421 aa, Cyanothece sp.
MILTFEYRIKPNQKQAECINQWLELLRRHWNYALGQRLDWLRRTRCAIDRCSLISETIGEIPEKVNYYTQQSDLKQTKTLFPDYKNIYCEVQQMNLQRLEKAWKRWLVPDKKGKRGGRPRFKKAGQLRSFSFSRVNHPKAVIKFQNNCLWTKKWGAIPVVIHRPIPESFILKTATIVKKADGYYVCITAEDETIPNVIPIDNIKSAVGIDVGLKEFLTTSQGKTVAVKKIYRNRQKHLARQQRKLARKNKGSKNYEKQQKRIALTHQKIARYRKDWHYKTAHWLVNNYDFIACEDLNIKGLAKTKLAKSILDVAWGNFLTKLEAVAVKRGVWFVKVSPHGTTVNCSSCGHKVPKTLSVRLHECPKCNLTMDRDENAAVNIIKKALQIHGVGLIPSACGGLVSGQPVKQETSGTEYMQLSLF

SEQ ID NO: 20646 - protein, 311 aa, unknown
  TnpB Polypeptide
VQTLCLKYRLFPTKEQTRKLEDTLETCRLVYNSLVNDRVFQHETLRKSPSRYQQQKMFPQWSKDFPEVKAVYSQVLQNVSVRVDLAFRAFFRRVKAGETPGFPRFKGKGQYDSITYPQSGFKIGDSTVSLSMFGKPVQIKAKLHRPVIGTVKTCTIRRYGDKWFACFSVIKSLVEQEDDFLPKFKDAVGLDAGLNSFLALSNGEFVTNPRFFRKDEKALAKAARKQAKTKKGSKPRRKANKVLSRIHERIRNKRHDFVHQTARRLVNRYGIIAIEKLNVKNMLGNHCLAKSISDASWSMFRSVLTSKADTK

SEQ ID NO: 20647 - protein, 392 aa, unknown
  TnpB Polypeptide
MKAYKTEILPNKQQIELIHQTFGNTRYVYNQFIKLNLKRIKEKESVISGYDYSKMINNDPDRPDWLKKSPSKAIKQAIMNGNKAIWDFLNGDKGEPKPKKKVKDNSFYLIGTIKVERHRIFLPKLKWVRLKEFGYIPNTIKSVTVSMKNGRYYVSCLSHEAKDERVPTSEQGIGIDFGLKDQFITKNEIIPSINHSTKVKKLEKKLKQKQRALSRKYEGNMVDKVYYKTGKKKGQLKSFEWKRPLNECKNIAKQRLVVNKLYERLTRIRTDYNQKSLQSILKQKPRFVVIEDLNVKGLMKNKHLSNSISKAQWYASRMFLKNQCEKLGIELRLVPRFYPSSKLCSGCGYKNKGLKLKDRSWTCPECKIVHDRDVNASLNLEQCQTYTILTAV

SEQ ID NO: 20648 - protein, 357 aa, Okeania sp.
MKSFKTKLKLNNKQKTLLAKHAGVARHAYNWGLATCISEYETTKKLKSAITLHKRLVAEVKSENPWYYEVSKCAPQQALRDLERAFKNFLTIKGRGFPKFKKKGKKDSFYLEGSIKILKGNYIKLPRIGIVKTYEILPSCRVKNVRISKRAGNWYVSFKYDLELTPLPHPKSRAVIGVDVGINALATCSDGSKFANVKAYRQAKKRLVRHQRAVSKKVIGSKNRRKAVKKLAKLHKKVADIRADTLHKLTSWLAKNHSTIVIEDLNVSGMLKNHKLASAIADCGFYEFKRQLTYKCEWYGSKLVIADRFYPSSQICSNCGHQQKMPLNLRTYECSQCGFETDRDFNAAVNLKNYVNQ

SEQ ID NO: 20649 - protein, 190 aa, Fusobacterium sp.
MSDYTKVENLKLTKEYEKKLKREQRKLSKRCKLAKGSDKKLSDSKNYQKQKKKVAKLHNKIKNKRKDFINKLSTKIINNHDIICIEDLNIKGMLKNHKLAKSISDVSWSEFRRQLEYKANWYGRIIVKVPTFYPSSKTCSRCGNIKEELLLSERTYHCECCGLEIDRDYNASINILRKGLEILKEQEKVS

SEQ ID NO: 20650 - protein, 342 aa, Streptomyces sp.
MCQRSSCNSPFATSTPPTRTSSTASRASGRAARPDLPRYKSKKDTRQSIRLNTNAFCLQGDGTVYVAKVGNLKVTWSRWLPAAPTSLTVTKDSSGRYFLSFVVDTEPDILPELETDAGIDLGLSAFAVLSDGSKIDSPRFLRRAEKKLKRLQRELSRKAKGSKNRAKARVKVARQHTKVADRRRDWHHKASTQIIRDNQAVYVEDLAVSGLGRTRLAKSVHDAGWSAFVGMLEYKAVKHGRTFAKVDRALPSSQACSACGFRDGPKPLHVREWTCGACGTAHDRDHNAARNVLFEGRRIAAGRAETPNACGAPVRRAHVPAQRDEAGSPRKGQKTQAGIPEL

SEQ ID NO: 20651 - protein, 399 aa, unknown
  TnpB Polypeptide
MILRKAFKFRLREKHPCEYGVFHRFAGCCRFVWNKALALQIEQLNKGKRCLSYPEMAEMLVQWKKKHPFLKEAPSQALQQRLMDLDRAIKDAFDPKSPKEFPQFKKKYKSLPSFRYPQGFDISGSRIFLPKFGWARFFKSRKITGTAKNVTVSLSGKHWYVSIQTEQTVEEPVHGSSLSVGIDFGVKRLLTLSDGTYYMPLNAYKNAMGKLAIAQRKLSRMVKRSSNWIKQKRTIEKLHIRIADARRNYLHVISSEVSKNHAVIVLEDLQVKNMTASAQGTEDKRGKNVRQKAGLNRAILDQGWGELKRQIEYKQKWRGGLTIFVDPAYTSQECSACGHVSPENRPSQELFYCEKCGYTANADENAAKVVKSRAGHARVVCGSNGAAMPSEAETNRVIA

SEQ ID NO: 20652 - protein, 424 aa, Paraburkholderia sp.
MQRLQAFKFELMPTGEQVHKMCQFAGACRFVFNRALALQVERYKGGEKKLGYAGLCKQLTEWRNSTDTPWLADLHSQVGQQALKDLERAYTNFFDGRASFPRFRRKGERDSFRFPQRVEVDCANGRVRLPKLGWLRYRNSRAVPGEVRSATVSLHAGKWYVSILTTREVEASVPHGPAVGIDVGITRFATLSDSTFIAPLNSFRKHEQRLAKYQRRMGRKVKGSANWKKAKARIQRIHARIANVRSDFLHKALATISKNHAMIAVEDLKVRNMSKSASGTLEAPGRNVRAKSGLNKAILDQGWGEFRRQLEYKTAWCGGFFVLVHPRNTSRTCPCCSHVSAENRTSQAKFLCAACGYENHADVVGAINILSRGSAALRDEGQDTGDASPGCACTARIACGEPVQSGRSVKQEPAEVTMHTVSHA

SEQ ID NO: 20653 - protein, 399 aa, Paraburkholderia sp.
MILAHRIALDPNNAQAKYLACAAGTARFAYNWALAEWKRQYESHKADPTLPKPSQTALRRQLNAVKREQFPWMLEVTKCAPQLAIIQLGEAFKRFFSGQNRYPTSRKKGVDDRFSLSNDQFSVDGSRIRIPNLGWVRMRESLRFVGKFVSATVSRKADRWFVSITVKVPDVSHLPKAKNQGAVGVDLGISVMATLSTGEKIPGPKAHTALLDHLRRLSRGLSRKQKGSANRRKARAKLARLHARIADIRSDALHKLTSDLARRFDTIGIEDLNVRGMIANRRLARSIADMSFYEFRRQVKYKVDMRGGRVILADRWFPSSKTCSDCGHKVEAMPLNVREWVCPSCGSVHDRDVNAAINLKKMAASSAVSACGEEGSGRARKRATKPASVKQEPDSNLAA

SEQ ID NO: 20654 - protein, 379 aa, Lactobacillus sp.
MTMKTFKLRIYPNVTQRIQFERNFGMCRFVWNELLNMQTKRHENGGTYLNEFKMNYLLKPLKQEYPWLKEADSTSLLGVSHNLHLAFQKLFKEHAGYPRFKSKRFARHAYRSNAVNGNIAVVDDTHIRLPKTGVIRFRAGQLPVGKIKTATVIRSNVGKYYVLVVADVENASWHKTDAMVGIDMGITDLAITSDGMKYATKRFDKAMAKKSHYWEKRLARRRRQAEQEIAWDKHLKVQAPRQLSDFKNYLKAKTMVAKYSEKVANQRRDYLQKISTELVTQYDVIKLEDLKIKGLLRNHNLARAIANQAWRELRQMLEYKADWYDKKVIAVSPNKTSQRCSVCGYDDGKHELAVREWTCPQCHTHHDRDINAAKNILVS

SEQ ID NO: 20655 - protein, 500 aa, unknown
  TnpB Polypeptide
LDLNGELLDSSTVLARFASEVQGISGYATFVVRNDLKLGSDLEQVGAIQPAVAGRRAGVTMPDFLVTGKSGRSRKEFLVQHNVVTSYRSWQERISAANGASSKYVSQGWKRTVNASAPTYGEDTINLGAVDKQYAVIENNPFTDGEIVLKMVIQGEWYRLIFNFDNTRFREGKVTLPVVKIENGAPVFIFTVVTDNPVIQFSGDYTIGVDAGINNYATVVVRNSQTGEKVQESTLSQRVHSLWNSVRASERQMKQLRKKAKSLLYDRQARMSALGEAQFHREAASRKKRELAILAAQEIAYLSYFYDNAVVAVEDLGWVSNTMQNGRWNRGELAQWLTHYVAQNGGWVVSVNAANTSQVCHLCGSKVTHPVHKISYCPEHGEIDRDVNAAANIAARAVPRVTKARKTRAKNCKLQKKRAFLKTPPARGSLRYPSRDRTKNHPTPKRKKRVVREVNLPPRPARVNMDTVLADQDASSILGTNTAAIKEGYITCRYRLYNPN

SEQ ID NO: 20656 - protein, 537 aa, Methanoculleus sp.
MLRQDGSGQKISEFVELIKEWEMHFYVPNDSVRIICYEMGEDHTDSRMAGQITDRTHLAYAIAYGFKYFISTDTLIKSYQLPHALTKYGFRIMGRGAPLLFVGGGIGPPHITIHFHPAEIFFMPGECQPRRCMQSVTKLRLFASPDERRMLFATMERYNAACNAVSPVAFSERQFSNIGLQKRLYSHVRETFGLSAQMAQLAIRKVAGSYRSTKEAIKEQNKVLAALGKPLKTLTELSFREHGAICYDARVLSLGQNRVSIWTLEGRIKLRYSKPAYFPAVTTVKQTDLVYRDGAFWLYATVETPDTEPAEPTEYLGVDLGVVNIATTSDGEAFSSAATEKVRQRYGRLRGALQKTGTRSAKRKLRKIAGREHRFKTDTNHVISKQIVCAAEGTKRGIALEDLNGILLRTTVRHDQRERHHKWAFRQLRSFIEYKAQRAGVTVQVIDGAYTSQQCSVCGFVHPDNRLTQTAFRCLACGHTENADLNASLETSLPGPPSTGLLRSAPPTPGERWNRKPTKSMVPPTASCPRLKSGVVD

SEQ ID NO: 20657 - protein, 419 aa, Methanoculleus sp.
MQLTRKIRIYPTAEQEAVLWELSEINRKLYNRALNERREAYAAGVTGVNYIKQQNDLPGLKQEWPELRFVNAKVLQMTLKTLDANYKSFFELRKNGDEDANPPGFKGRHYFTTMKHNQSGFKVTNDAIRLSHNLPDQGELSFPIPEREFGVVKQVEVFRDCNGKWYLAVVEEVIPLTPVENGQYQAWDLGVIKQTAVNSQGKFIEVQNSRPDRYWNPKIEAVQSQRDHCRKKSKDQKPSRRWRRYNAVKRKMERKRSNQLNDFQHKQSKKLVENTKAGTIIIGDLSVKKMPKSKSATRQMNRSTQGTGYLARFAGFLTYKAILAGKQVIEIGEEYTSKTCYCCGKIHAEMTVRDRVMHCDCGTVLDRDRNAAINIMLRYLSQNALWTGYREFTGNLRQTGLRVPAIPRHSQEAPCASGG

SEQ ID NO: 20658 - protein, 392 aa, Methanoculleus sp.
MLRRYQYRLYPTKDQEVLLAKHLGCCRYVYNWALNLKNTAYHDEGISLSKYDLMQQLPALKEELPWLKEVNAQSLQQSIHHLSRAFTNFFEGRAEEPTFKKKHDPEQAFTVPQAYTVDFQQGTVKLPKIGTLKVKYHRAFAGTTKSATVIRKSTGRYLISIVVEDGKKAPKPTDPIPDQTVGIDLGLSHYAVLSTGDAVANPKYLRNAQVRLAVLQRRLDRKQKGSQNRNKARLKVARCHQTIADQRQDFQHQLSSRLVRENQALAVESLNVDGMMKNHSLARAISDAGWGTFLAMLAYKCREAGKTLLRIGVFEPSSKTCSVCGYRKADLTLKDREWICPDCGTTHDRDLNAASNIKQFALARRRISAIEPVDPLPMGRGMKQEAPCVSGG

SEQ ID NO: 20659 - protein, 391 aa, Methanoculleus sp.
MLRRYRYRLYPTEDQKTLIAQHLGCCRFVYNWALARKNQAYHDEGISLSKYDLMKQLPALKAELPWLKEVNAQSLQQAIHHLSRAFTNFFEGRAEEPTFKSKHRPEQSFTVPQSYTVDFERGTVKLPKIGVIKVVFHRTFTGTVKSATVSRTSAGRYFISILVDDGRRPPKPADPVPEQTVGIDMGLSHYAILSTGDAVENPRYLQNTQKRLAVLQRRLARKQKGSKNRNKARLKVARCHQKIADQRRDFQHQLSSRLVRENQALAVESLNVDGMVKNHNLARAISDAGWGTFLSMLAYKCQEAGKPLLTIGVFEPSSKTCSVCGYRKADLTLKDRAWTCPDCGMHHDRDLNAAINIKQFALAGAERAEEPVDPLPVGRGMKQEAPCASGG

SEQ ID NO: 20660 - protein, 195 aa, Methanoculleus sp.
VANPKYLRNAQTRLAVLQRRLARKQKGSKNRNKARLKVARCHQKIADQRRDFQHQLSSRLVRENQALAVESLNVDGMVKNRSLARAISDAGWGTFLSMLAYKCQEAGKTLLKIGVFEPSSKTCSVCGYKNQNLTLKDRAWTCPDCGTTHDRDLNAAINIKQFALARRRISAVEPVDPLPVGRGMIAGKPARASGG

SEQ ID NO: 20661 - protein, 398 aa, Methanoculleus sp.
MIVSYKYRAYPDAAGEARLHEALDTCRWLYNTLLEECNTARENGSSLTMQETQARIVTLKEEHPALKEVYSKVLQMVNYTLWSNIRALSETKKNGRKIGKLRFKSAARYRTLNYNQSGFTIDCEGEFITFSKIGTIPFSMHRPYSGEVKGVLITRSGDEWYVIIQADQEVAAPRREGRSVGIDVGLNSFAVDSDGRVIANPRFSERSRARLKKLQQRVARKQRGSKNRENAKKKLEKAYAHITNQKNDFLHKLSRRYVDAYATICVEDLNVKYLKENGKSRGLRRSIHDASWGRFLAFLSYKAESAGTEFIRVDPRDTTQMCSNCGRIVKKDLSVRVHECPYCGFVADRDYNAAVNIHRVGMEQPLEPVERIPLHHISVMQVLSMKQEAPPKRRGVVH

SEQ ID NO: 20662 - protein, 402 aa, unknown
  TnpB Polypeptide
MITYCAKLELEEGDDQKLQHTLELHSLAWNEISKTLFKTGVVQQAVLHKKTYRNIRKMFPEIPSQVIIKARMDCRSAYKTARSSDVPVKEPMIRRNLAMRLDTHLFLLKRGDDGSLLAMLTVSGNKWNRIKAKIVTYPKLLEMMRYEMADPLVFKRNGRFWLAMSFRTPEATHVPDHCIGIDLGVKRLAVTSEGQIINLPILAKAKRRVRYLKSILQSLKRRQGRRRNKSARRKLKTVRRKERNISKEMSHRVANQILTTKATTLILEDLTGLKKKNNGRRNDNRLSQVPLFETRRILTYKAQALGRRVETVNPAYTSKDDYRGLQRGERKGCRYYASDGKILDADHNAAINIAQRWTVQNDLPISFTVPLRGRQTLWAGPGQRAECGGPLCRKPAALAAGG

SEQ ID NO: 20663 - protein, 148 aa, unknown
  TnpB Polypeptide
MQKGSANWRKQKLRVARIHEKMKNQRKDFHHKAANGLVERYDCVCVEDLDMRGMSRSLKLGKSTMNNGFGMFHALLSYKLEDRGKRLVTVGRLFPSSQLCHECGYRFSGTKDLSVREWTCPSCGRTHDRDVNAALNIRDEGMRLALSA

SEQ ID NO: 20664 - protein, 419 aa, Scytonema sp.
MLVLEAKLEGRKEQYEKLDEAIRTARFVRNSCIRYWMDNRDIGRYELSAYCAVLAKEFEWADKLNSMARQASAERAWSAISRFYDNCKKKVLGKKGYPRFRKEQTHGSVEYKTSGWKLSADRRYITFSDGFEAGTFKMWGTRDLHFYQKKQFKRVRVVRRADGYYVQFCIDQERLEKREPTLKTVGIDVGLNHFYTDSDGQTIANPRHLRKSEKSLKRLQRRFSKTKKGSKNRAKFRNKLARKHLKVSRQRKDFATKTARCVVMSNDLVAYEDLKVRNMVSQRVGRVPRLEATGEPVRVRNRHLAKSISDAAWTQFRSWVEYFGKVFGVVTVAVPPHYTSQNCSHCGKVVKKTLSTRTHTCPHCGHTQDRDWNAARNILEKALRTAGHVGTNASGEIDQYLGEETPPSKSTRGKRKPGK

SEQ ID NO: 20665 - protein, 412 aa, unknown
  TnpB Polypeptide
VTKLTETLELKLVEPNAHKHRKLCETKRAYQDALEAAFNADCTTQSAANDVVVNYDLSGYAKNALKKYVPQLCGGSYDAKELHDDHPVRFTNEGPKLDHKPQNAIEWYVKIPHHDDYHLWLPATPNPEQRKWLEALHAGDAKMGECRLFDRDGEWYFHIVTTRDVDERQAPSSAETPIGVDIGEAALLTVCHRDERGSPTAPTLWNDDGKTVRQLRETYFTATRRLQQRGSERIAESYGDVLWRRIDHILHTVTSEVVAYADRFDNPVLVLEDVTHIRENMDYGAFMNRRLHGWGFAKIHAQIRYKAAEKGIHVETVNPAYTSKTCHCCGDQGYRPDQATFKCSNSECWVSEYQADVNAALNIADRYLSGESHSREYTSGDDSAAEGGRLTAPQDSQADADTQQETLGTYAS

SEQ ID NO: 20666 - protein, 435 aa, Ktedonobacter sp.
MKQIMTAKLKLRTSPEQFRALRQTQLVYRDALNHVSHCAFEYGKMSSGRVLQQDCYDEIRVQYHLPAQMACNVPRQVGATYKALWTKVMQNAALRKAGKTKKRYKGLDQPPKYVSPTLTYNYHRDYSLKEDAQVSILTLQGRVIVPYTGYSKHVALLQQDAHIGAAKLWYDKPRKQFYLLISFEVEVADPTPETHKGIVGVDVGQRYLAVSTDTNNHTTFYSGKAVRAKADHYARLTKRLQKKGTRSATRRLVVISGRERRLKQAVNHAISHRIVTSHSHSMIGLEDLTLIRERTKHKHGKKASKKQRRANRHASKWAFAELHGYVAYKASLNGSMAIKVDAYHTSQACPKCGYASPDNRPNKGLVFVCQNCHFSLHADLIGARNITLRTLLTRQDWMSTGVLSIRPDVPCDEAKAANRQRYVELRWSTDTSPRL

SEQ ID NO: 20667 - protein, 372 aa, unknown
  TnpB Polypeptide
MQTVSSYGVEIRKQNIPIRQTLKIYRQAVSYLTEIYEQVWAELKMIPEAKKRFNAAEHLVHTTKKNHAHFGFDIRFPKMPSYLRRAAIQHALGSYRDVMYREGTEGKDEAYLKLYDGHDWRWFRVCLSHTDMEYLRRNWYGKKASAPTLEKRHHKYFLRFSYIEEVTLTQTPVKEQIICSVDLGINTDAVCTIMRADGTVLGRKFIDFPSEKDRMYRTLGRIRRFQRKHGSAQAGERWAYTRRLNIELSRKIAGAVAEYAWENHADVIVFEYLEMNGKISGSKRQKLQLWRKRDIQKRCEHQAHRKGMRISRICAWNTSRLAYDGSGMVLRDWRNHSLCAFQTGKRYNCDLSASYNIGARYFIRELLILMAA

SEQ ID NO: 20668 - protein, 411 aa, unknown
  TnpB Polypeptide
MVGQVVRSLPFPVESLPAPLRTLLAEFRLLVNRSIRIALRENIQSRFRLTGAAYRTLSAAHDVYKQYIPSAFEIALSVLKAHRKRLRRGRRTSVPFMRRLMLRAENQSYRLDRETGRLRIPIRGAEGVEFDLPVSDWHRSYLSDASWGLGSLTVTPNRIVVVVRRGAPKPFEPMAAIALDTNETSLDGVAANGGDAALVSMPFPDVRVLQETHFRRRRRLARKKAHDRRLMRHLLNKEGRRERNRVRQRLHRVSKAVVAAAREGRAAIVLENLTLHGARVRSRRMNRRLSSWPRRELHRQIEYKALAAGVPVIKVNPAWTSKTCPACGARRRDRVGKDFVCLVCDWEMDRQHNAALNILKSALASNEALARAVRFQPGALRHDVVSPLYDLPAREGAREEPSGVESQSGVA

SEQ ID NO: 20669 - protein, 425 aa, unknown
  TnpB Polypeptide
MLRAYKYRIYPTAEQKVMLAKTFGCCRYAYNWARSLKEKAYKEGGEKISEFDMNARVRHELRETAPWLAEVSSKAIEFAIADLYRAYDNFFAGRARYPNYRNKHDRQSYHDRGHISVDFKHGMISIPKIKDIPCVFHRRFSGRIKQVGVELLPSGKYRISILVDDGHALPEKAPIDPDKTLGIDTGLMHFAVLSDGQTYEPTREAKHEKRKLKLLSRRLSKKEKGSRQFRILKRRIARLHEKVANRRTDRIHKLTHYLASENQATTICVEDLNVKGMTRNKYLAYSVQDAAIGEFYRQLEYKCAWAGKNLIKIDRFAPSSKRCSHCGHIYKGLKLSEREWTCPECGTHHDRDLNAAINIKHFGLCANETLPSVRRKVTPVEQPLVDDRSSEPKKLHRCYTARRERADEAGKVKGKRALMPEILSN

SEQ ID NO: 20670 - protein, 365 aa, unknown
  TnpB Polypeptide
MKQTIAVKLEPTAEQAAALRETMQAFNRGCDHVAAVAFEKRQANKIAIQPFVYGSLRADYGLSSQMAIRCIAKAIEAYKRDKNIQPTFDSLGAIVLDDRLVSFKGLSHVSLLTLGGRILVPMRFGAYQAARIDRAKGQADLVLRGGAFYLHLTIDLPTPPPIEPTGGVLGVDLGIVEIASDSEGNQYSGAAVKAVRLRVKEHRRQLQKKNSRSAYKRLQKTRRRQSRFVRDTNHVISKELVQRASAQSKALALEDLQGVRGRANGFGRQMRWLLGNWAFDQLAQFIGYKAEAAGITVVLVDPRNTSRACSQCGHCEKANRKSQAEFLCLNCGLDTNADSNAALNIMARAEQSDGLLFRPPPASLA

SEQ ID NO: 20671 - protein, 251 aa, Bacillus sp.
MTKQNKAYKFRLYPTEDQAHLMRKTFGCVRFVYNRMLAERKEAYEKHKDDKDQLKKQKLPTPAKYKAEFEWLKEVDSLALANAQLNLQTAYKNFFRGQNDFPTFKSKKDRKSYTTNVVNGNIMLLNGHIKLPKLKMVRIKQHREIPQGHIIKSCTISMTPTGKYYVSILTEYEKEIVQKEVETVVGLDFAMDQLYVSSEDERANYPKFYREMLDRLAKAQRVLSRRTKGSGRWHKQRIRVAKLHEKVANQR

SEQ ID NO: 20672 - protein, 372 aa, unknown
  TnpB Polypeptide
MQKGVKFRIYPNREQEKLINRIFGCCRLVYNKGLDMRKEAYENGEKAGYNQTSAMLTELKKQPDFEFLKEADSVALQQSLRDLDRGFVNFFEKRAGYPKFKAKHSTQTYRTINQNDKIHIVGGYIRLPKIGYVKIKQTMEIGHINSATIKKTPTGKFFVVLNVDFEPEAREIKNNSVGIDVGIRDFCTLSNGDKEANPEHIKKNLKKLRREQKRLSKKQKGSNNYGKQRIRVATVHENVSNQRNDFLQKLSTRLICENQTICLEDISVKDIIAETQNSDACRKQKRNMNRSQYDVSWAEFFRMLEYKAKWYGNTIIKVPSDYPSSRICHSCGEQHEKLSPKIRKWKCPACGETHDRDINAAINILNKGLEIA

SEQ ID NO: 20673 - protein, 398 aa, unknown
  TnpB Polypeptide
MVDVVLAVPFSYERNETVQKLLEDFRDMINFCIDEAIENNVTSYAKLRKLVYEEWKKRWDYSTHFCHSACKIASSMLKSWRKKVRKGEAKPPKAKKLFIRFDPQLVKFEGDRLRISIKPRQFTYVHLKYGEYQRKFIEEWRKGKLKVGEITMNEEKVIVPFRKKIDLTNPKDYIAIDVNESNITGVSSNPHVLRIEHGLRTVHTTYFEVRRRIQKLSKYKPITSKRLMEKYSGREKKKIHDLCHKIAKVIVDFAKEHGFGIIMEDLKGIRNRIRYNKNLNRRLHSWNFKKLQFFIEYKAKLNGIPVVYVNPYKTSSLCPRCGGKLAPNGQRLLKCKKCGYENDRDIIACLNMLRMRGVPVPPECLLMKLRKERNSSRRLNVTAYSLNHLEERTEITPD

SEQ ID NO: 20674 - protein, 311 aa, unknown
  TnpB Polypeptide
VSNTWPTRIRSSSRKKGNHPRFKSKRNPVQSYTANIQGNSQFPEVSIVGNRLKLPKLKWLRFAKSRQVEGRILSATIRRTASGKYFVSLLVEHEISELPKTGSSVGVDVGLKNFAILSNGTVYQNDRYFRTLEKKLAREQRKLSRRQRIALNKKVRLSEAKNYQKQKRKVARIHEKIANRRTDFLHKVSTEIVKNHDVIGIETLQVKNMQQNRKLSKSISEVSWSEFHRMLKYKAGWYGKTVVKVGKTFASSQLCSSCGHQHKDVKHLELREWTCPNCGVHHDRDINAGMNLKLEAERILASSTVGTTGLA

SEQ ID NO: 20675 - protein, 404 aa, unknown
  TnpB Polypeptide
MKTLKQHIRKLETKDFEKLSEMTYSSRKLYNCALYLINNHFKETTFYLGYTQVYHLMKGTEHYKALNAKMAQQILRLVDKDFRSFFALLQKKNRGEYKEQIKPPRYKTKGSRFNLILPVDQISIIKNKLKITKNLKIPFNYKILGKIKQVIIKPSKINNYFTIYIQYEEIPIVDPELNKLNYLSIDLGLNNLVACISNVGHSFIMNGKPLKAYNQFYNKQKAKIQSELKTKNDKNWSNKLERLTLNRSNYINNYLNQTVAHLIKQCLNLNIGNIVCGYNELWKQEINIGKKNNQNFVNIPHGLFKQKLENKCKEYSIKFIQQEESYTSKCSFLDKESVEKHETYLGKRVKRGLFKTSTNKLVNADVQAAANILRKAVPKAQWVDGIEGCIVSPVKLKHCFNLQR

SEQ ID NO: 20676 - protein, 396 aa, unknown
  TnpB Polypeptide
MRLTEQIQIKKTANLSYLCHLSKNIYNVANYYVRQEFFYLGSWLRYYDLWYMLKDKEVYQKLPSQTAQQILRLVDKNWKSFFNSLKDWKAHPRKYQGRPKPPKYKKKNGEFVSIFTNQQCRIKEGYLYFPEKVVISPIKTRIKNQLHQVRLVPRGLYCIVEIIYEKEVKNLKLNKKRILGIDLGLANIVTMVNNAGLQPAIIKGGIVKSTNQFYNKQLASYKSVKDKLGIAFETRRIQKLTKKRNNKINDQFHKISRRIINYCADNNLGTIIIGYNRFWKQKVNMGRRNNQKFVQLPYFKLISQIQYKSKLVGIDVIIEKESYTSKCSFLDNELIQKHKNYAGKRINRGLFRSKKGIILNADVNAGYNIIKKVIPNAVLVDEIEGIGLYPYSIAIS

SEQ ID NO: 20677 - protein, 203 aa, Cyanobacteria sp.
VEEIKLPCTAREVGIDLGLASLAVGSGGEKIAPPKFLGSALRQIGRLQQSLSRKMKGSGNRQKARLLVARAREKENPNVSGMLKNRRLAKSISDAGWRMFRTLLQYKAVLYGCEVVVIGRWEPTSRRCSSCGHLDGKKSLSVRTWTCSACGAAHDRDINAAKNILAVGHTERLNACGAQGKSSLLVLGCEAGTRLDQRVPCTV

SEQ ID NO: 20678 - protein, 377 aa, unknown
  TnpB Polypeptide
MLKAFQFRLYPAKAQQTKINKTLESLRWVYNETLALRKNSWEQERKTVSLTQTNKLLTQWKKQHPELNDVYSQVLQDAQVRVDLAFQAFFRRVKAGDEKAGYPRFKGYRRYDSLTYTQFGFKLQANKLTLSKIGTINVNMHRPVEGKIHRITVRRASTGKFFVSVITEVEAKTVPFKDGSVVGIDVGLESFATLSNGEKIPNPRFFRVEEAELAKAQRKLSTEKKGSEKWRKRLKVVQRVHERIRNKRSNFIHQESRKLVNRFGVIAFEDLNVKGMMQNGNLAKSIGDAGWSMFVNAIKSKAEEAGSKVVLVNPNGTSQACSRCGLIVKKDLSERTHRCQCGLELDRDLNAAINILRLGLESLGLKTIEAHDLQSWE

SEQ ID NO: 20679 - protein, 338 aa, Okeania sp.
MFKSGQLTQKPKPPKYRKKYGLAVVSYPARWVKLVNEMLKFPLGKQVKAWFGIDHFLLPMPLNLDFKQIKEFRFVPRNNCFYLEFVYDQPEPKKGQLIAENVLGIDPGLNNWLTCVSNVGKAFIVDGKKVKSQNQWYNKQVAKIKAGKPGDYWDDNLAAITEKRNRQMRDNVNKAARFVVNWCIEHQIGTVVFGWNKRQKDSINIGKKNNQQFVQIPTAKLKARIAELSEQYGIKFVETEESYTSKASFLDDDFLPTFGEKPKRWEPSGKRVNRGLYRSSTGKLINADANGAANILRKVSTQLEINLAKVCRGVLMLPQRYKLDNLTQKYRQQCVAWQ

SEQ ID NO: 20680 - protein, 296 aa, Okeania sp.
VNDSLAYCQQRYKSGEKKSTNSELQKLFITKAKKTEEREWLSEVSNIPLQQSLNDLNRRGERPFAPTNFFKSTQGKRKGRPVRPPKFKSRKSKQTARFTKGGFKVSQHKVYLAKIGRLKTIWSRELPSEPSSVTVIKDSANRYFLSFVVEIQPEILPKTDNSVGIDLGIKTFATFSDGTKVDAPKPLKKRIKKYRKLSKSLSKKTKGSKRYEKARARVAKFHGKLKDTRTDFLHKLSTKIIRENQTVVLEDLNVSGMIKNRKLSRAISDLGWRTFRTFLEGKAEKYGRDFRVISRP

SEQ ID NO: 20681 - protein, 430 aa, unknown
  TnpB Polypeptide
MRQVERHWIKEGHELYSICDDLTFKAKNLYNAGLYHIRQSIFERNKFQEEEKPSVLSWIELVSQFRKEKQSDMLELPSKVSTNILKTLGSSISSYYQLLKCYHDKSNLSVTSKPQLPRYLHKTEGRSVVEFTNQTISKKRGLNGELILCPKDFNLVIPTKVKTPKSVRIVPKLKSFVIEVIYEVEVSPLKQTGNYAAIDLGIDNLASITFSDGTNPLVVKGAQLKSINQGYNRLIAKAKSKLPANQKTSQGIHRLWRNRELKLQSELHKVTSFLSLYFDEMAIEKVFVGKNQGWKQEISLGKKTNQTFTQIPFTTFISQLTYKCSARGIEVVEQEESYTSKASFVDQDEIPTYGKGNEKFAFSGKRVSRGMYRMKNGFLLNADVNGSYNILVKGLLALGKSLDREKVSFHTRSLKNWQFVANKDLLLQYM

SEQ ID NO: 20682 - protein, 209 aa, Paenibacillus sp.
VRVAFVYRLYPTREQMRTIHFTLERCRLLYNRLLEERILAYKTEGKSLNYDQANTFNERKQHIPALKQVHSQVLQDVAKRLDKAFQAFFRRVKHGETPGFPRFKPQQQYDSFTYPQGGHAIKGNKVRLSKIGDVKTKLHRQPQGKIKTCTITVKNGKYYACFSFEVDPQQLPVSDEKVGIDLGLLHFAVTSDSTTFEAPKQLRRNEMSS

SEQ ID NO: 20683 - protein, 369 aa, unknown
  TnpB Polypeptide
MLKAYKYRLYPNKEQEVLIQKTFGCCRFVYNQTLAHRKEMYETKKESMNKTSCNNYCNQVLKKEHEWLKEVDKFALTNTIYNMDSAYQKFFKEHTGFPKFKSKRDNKKSYSTNFTNNNIEVSFGDSRIKLPKLKWTKVKIHREFTGKIKSATISQVPSGKYFVSILIETEHISMEPTGCMIGIDLGIKDLLITSDGEKIDNLKLTKKYEKKLAKEQRKLAHKVKGSKNWNKQRIKVARTHEKIHNTRIDNLHKISHKLISENQVIVSEDLSVSNMIKNHNLAKSILDCSWYELTRQLTYKANWNNRQYIKVGRYFASSQICNVCSYVNKNTKDLSVREWTCPECGTKHDRDINAAINILNEGLRLLNVA

SEQ ID NO: 20684 - protein, 467 aa, unknown
  TnpB Polypeptide
MKDDNVITKTQRIKINSLEYPTQDWDEFSKIFEILQKETILASNKTISVCNVYNALGKEDGEKWLFDTYGTEKIRNATYQAAKRSCKFQYSGSVSTIKENIYKNYFSGKNSWKKKIEAGEGNPPMTYTDTIPLFVRGDATKVECLNYERGFYSFQSSFLSPIAKKEGFDYVTYEYDENNKKKKIKHHIDVNETRLKFRFTVKKNSRLEELISSFMKENSEYKFGDSQLLRKKNKKTKRWDYWFMLAYSCPKQDPGKKLDENRVMGVDVGVVVPAYASINDMTYKKIPIGDNTIHKQKILDEKLRAEKQSAITYNLRDGHGRKTKLDGFDGAGHKSRNRQKTKNQVWAKKIVQEAIKYGCGNIYMEDLKGLKQQEKENRYLQNWDYFGLQTEIENHAHEYGIVTAKVNRFGTSQKCPCCGLRDKKNRPKGKMGQAYFKCIQCGYEDNADHVAAINISRSNPIKDSIRR

SEQ ID NO: 20685 - protein, 230 aa, unknown
  TnpB Polypeptide
LVSYGLHWYLSIQTEYEVDLLAHNSTSIVGIDMGIKHFATLSDGTIYASLNSFKAKAQRLAKLQRQLKNKNKFSNNWKKIKAKISQCHEDIGNARKDYLHKVSTEISENQAIIIIEDLRVKNMSKSSKGNSEKHGKKIAQKSGLNRSILDQGWSMFATMLEYKQDWHGGTVLRVPAHHTSQTCPCCRHVAKENRLTQAEFVCVDCGFSENADLVGAMNVVAKGHALLANQ

SEQ ID NO: 20686 - protein, 450 aa, Weissella sp.
MKIEKLPKTIESVYVRRYRVVASQEQIEHHAQNMRTQKQLWNFGNKYLEKTYGRKHLNRPYPNNKKQKNYVINAIKTMFINEKHNLNRWNAKIVGLHSQGANEFLKTLLINFGEYRKSLYRASKMTAQEKLDYLNNVYGNNSQRRSWYQKGSLNYLHLHNSFMTVSLPNNNQVEVVSNHHIKIQDYGELQVVENISNLRNSTIVITKLKRKNNGQFELQLVFKRQIVRVEPTTKVAGDWNMTNNKVFHTSNDEEIYISNNVVTKADTLERQINDMKSKRDRSVWLGVNSRRIARMNDKIKYLNIKRENVLDEHYKQLAHILMDDYDVVVIEDLNSMNMRTKKRRTRNINHKLAMIKPHRMTKFIEMLANSTGKTLIKVDAYKTSQVEYGTAHEEKHDTSIREWVSTFTDKLINRDLNASWNILAWGLNPEHHIKLKDYPHLKASSLVTIN

SEQ ID NO: 20687 - protein, 408 aa, unknown
  TnpB Polypeptide
LRERLKRQWIELRQGTLVSIGSKSDKGNRLTRLENINGQLHLRITTGNREFIYAKVLREPSNSKDKWITFMAMLLESWQTQNYFAYTVELKLRDGEVYGSVSFELPTPEVKCTKENGVIAIDTNASPIHLAIAEVSKTGELLSYQTISLHHLLGLSQNSKDHQEWILAHKIVDIAIQRNKAIAVENLKKLKKGMRGDGKATLRRRLHHWNAKKFLQKLKRVATLKGVEVIEVNPAYTSVIGMLKYAPQLNIDKDVAGAYVIGKRALGFREDMPENYEKLLKDKAYLEFALKRYEEREKELTELIENESNEYKRNALKSEPRNIQNSKKLLVNLVQSLQSEPSGCEGAYGRNSEQGRVAKTTLKSAWQVLKVALLFPVLERRILLSSREGAWDRVRKRLVPLEAGGTSR

SEQ ID NO: 20688 - protein, 369 aa, Anabaena sp.
IYLSLTPAQKGIIKQWFGVSRFVYNTTIKLLQEKGETKASWKAIKTDILKNLPDWCKSVPYQIKSIAIKDACKSVSNTKKKYKNDGGISKCRFRSRKQPIQSCYIPKSAVLEKGIFYTILGEVNYKEALPQDFGDCRLVLAYGDYYLTVPQVSPRLDTDKQGRFAALDPGIRTFLTFFSEDSFGWLGNSANIKIQKLCFDLDKIVSKISQAKCIQKKRLKLAATRLRGQIKNLVSELHKKTAKFLVDNFDVILLPTFETSQMSKKGKRRIRSKSVRQMLTLSHYQFKQFLKHKAFEYRKVVLDVNEAYTSKTVSWTGEIVKNIGGCKTIKSLFANNIMDRDLNGARSRSVPQEGIFLCAMAHATQTCIG

SEQ ID NO: 20689 - protein, 365 aa, unknown
  TnpB Polypeptide
VKLTAQIKLQPTTEQADALKRTLETANAACNYISSVAWQNKTFGQYKLHHLVYADVRAKFGLSAQMTVRCIAKTADAYKLDRETERTFKPTGSIAYDERILSWKIKLSIVSIWTMDGRMSIPFVCGERQRELLQTRQGESDLATANGNYFLFATCNVEEPSPIEFTDVLGVDTGIVNIATDSDGEVHSGKTINNVRSRHRRLRQKLQRKGTKSAKRRVRKLSGKEQRFGKWVNHNVSKRIVAKAQHTGRAIALENLEGIRDRVRVRKPQRATLHSWSFHQLRTFIEYKSQRAGVTVILVDPRNTSRTCPSCGCINKANRRTQSNFTCVTCGFSGLADHIAAGNISSRGVVNRPYVPDRLGQSSGF

SEQ ID NO: 20690 - protein, 410 aa, unknown
  TnpB Polypeptide
VIKISNLTKTIKLRINVTPEQVELFRQMTEQYRQACNFVSQYIFDNEFDLAYLSLNRALYAEIRSQFGLKSQMAQSSIKTAIAKYRTVKQQLFQNPYRYKDKSGDWNLVAKTLEWLWKPIFFKRPQVDLVRVKDYSFVNEGKNLSINTFGGRVKCSFFGEHFAKYLDGSYDLGTAKLVELKGLWYLHIPVTKEVEDFEKENVRHVVGIDRGLRFITVSYDEQGKTEFVSGKKIATKRRKFQEVRRQLQSKGTKSAKRRLKSISGRENRWMSDVNHQISKTLVQKYGENTLFVLEDLTGVAFEESNLSRGTKQNYELRSWSFYQLEQFLSYKARENKSEVLKVSAKYTSQRCPKCGTIHKENRDHHKHLYSCQCGYKSNDDRIGAMNIQLLGTMWISGDNHPRYERITASE

SEQ ID NO: 20691 - protein, 353 aa, unknown
  TnpB Polypeptide
LTIKLCRRHRLPSRYFVYWTRTGNLFFASIKDWKGHKDKYLGRPKMPKYKKKDGRFVLVLTNQNCKYANGKIKFPKNFKGFEVVPEFSKLPTEDTDSGRVFQSFQQVRFVPDGTNIIMEIVYAIKETPQMQDNGKYASIDIGVDNLISMATNDGTFPMIINGKVPKSINQYYNKKLAHLQSVCKQTTGNNSSKRIRRLTAKRNRKIDDYLHKASRIVVDRCVEQNISTIVIGKNKNWKQESKLSKRVNQNFVQLPFARLIQMIEYKAKEYGIAVILTEESYTSGTSFLDGEAPTKENYNKSRRVHRGLFKSNDGKLINADINGAFQIMRKVFPNVSANGIEDVVLRPVTVVAA

SEQ ID NO: 20692 - protein, 360 aa, unknown
  TnpB Polypeptide
VRAIKAIEFRYSASDDLACLFDDFRLMCNDAIRIALKEQPKTRFALQKLVYSRLKEYGLHTHYILSACEVAFAIYRNKNRRGSNAYVKRAFLKLDNQSYVLNHLILRIPTTPRNFIYLTLQGSEYHMSHIDDPTLKNGSVTVLANGIVIISFSKEVVEIEPLGNMGVDVNERNVTTSDTLGSTLVFDTSNIVDIKERYKAIRSKIGSRTGRDCRIAKSLYSKYGKRESHRTKQHLNILSRTIVEHARRSKLRIVMEKLTGIRKLYRRGNGQGTFYRGRMNSWTFREIQRQLEYKARWEGLPIAYVSPRYTTRNCSKCGSSQTFEERTVICSSCRRIEDRDVNASRNIMMACAVPQVRPSG

SEQ ID NO: 20693 - protein, 384 aa, unknown
  TnpB Polypeptide
MLQAYKYRMYPSREQGTLLMKQIHACRFVYNHSLEQKIRAYEQEGRKLSCFDLNNHLPALEEEHPWLKDVNSQSLQSANKNLDNAFTRFFREKKGFPRFKSKKNPVQSFQVPQHYRVNFEHGRIKLPKIGEIKTIFHRFFTGKVKYATVSVTSTGKWFISILVDDGNPEPEPSLISPGTTIGIDVGLTDFATFSTGENVANPRHLESSVQRLKVMQRRVSRKVKGSKNRQKAIQKLARCHEKVANQRNDFLHKLSNQIVSENQAIAVESLNVAGMQKNHNLARSISDVSWSTFFTMPEYKCRQYGKTLLTIGRFDPSSKICSKCGYLKWDLSLSEREWICPDCDTHHDRDINAAVNIKTFALQVQNLVGVSGAERAVVPVDSPQ

SEQ ID NO: 20694 - protein, 330 aa, unknown
  TnpB Polypeptide
MKAFKYRIYPNKAQQVLLQSTFGCCRFVYNKTLDIRKTAYETDKTKLSKFDCINRMTALKTEYMWLRDVPAVCLVPAVCNMDAAYQNFFKSGKGYPKFKSKHRSCKSCKFPSSHCAVLQDISRLKLSKIGLVKYKKDREFVGTLRHIVVTQENDGKYYASCLVETGVAAPKPQSVDASTTVGIDLGLKDFIVTSDGCKVPNPRFYATIDRRIARLQKHEARKTKGSKRRARIRLKINKLYSKKRNLIKNYIYHVAKTLLRESQTLVMEDLNIVGMVKNHSLAKSLQNACWGELRRVLEYKSQWLGHNLIFIDRWAPSTKTCSCCGFHNLR

SEQ ID NO: 20695 - protein, 186 aa, Pseudothermotoga sp.
MKRLHRQLSKKQKGSRNREKTRIRLARYIEKINNVKNDWIHKITHKIVSESQAGKIVVEDLNIKGMLKSEKLAKYIHWQSWNKFIVVLNYKAKRNGIELIKADRFYASSQRCSVCGYVNKEVKNLNIRKWVCPVCGTEHDRDINAAINLTNYVLSQEKVGQELSEIKPVDHALAAERKVNSSVTMG

SEQ ID NO: 20696 - protein, 415 aa, unknown
  TnpB Polypeptide
MKQPEPGTNSTAKKGYSITTWRLHLWCDHPEWLRNTQEFYNEIATFYYNLLLKHEELWNLGSQQTLRELEILSIPGRGGRIPEEPLPWEKIPLYFRRAAANEGIAMAKSYIGHLHQGNFRRAEKLNAAVTYYKGMYRDFSNREITLRVWSGKKWFWMHCRLSGREFPENASLMSPSVVFEYKYDMLHVPVKKESGNTATIKQRMKEDCNILSIQFTNSDAFAVGSVLNCQGQEQAVKFWGGGREYSHHCRRILEKIRKSQQATAGKQKGKADQKYWMHLKHLSEHYGHQVSSQIIGFALEQQASVIVLPRYDQKYSRNVMKGAGNWKPLHLSTRIRQYLGYKAWEKGILVIEVHASGISTTCAKCGGKLLTTDSRTGICCCENGHQGNRYLNAARNLGRKCLIQFGKLEQPETEK

SEQ ID NO: 20697 - protein, 215 aa, unknown
  TnpB Polypeptide
VTTTTGKGMVVTGREIRALKRQQLMSQGEIQRKLKKCKPGSHRYRRLWYALERIGGQIKRQVRDLRHKASRQVMDFCQQEGVQTVFIGNPHGVRDQDAGRHHNQRMARWEYGKDIDYIQQKCQQASMTSFTGSERGTSSRCPSCGNWKKPKGRIYACRRCGFVGHRDIVGSVNMHPLAFGSRISYPAWLTYRRPGPARVRRRNEQPLPVARAGTS

SEQ ID NO: 20698 - protein, 230 aa, unknown
  TnpB Polypeptide
MWEQVLLLTGSILNPLTNGITNTSAPRSLSVVEVQCRQIATIKEGRPQGFWSKKLASITEKRNRQMRDAVNKAARLVINHCLENCIGRIVFGWNKGQKDGIDIGTKNNQKFVQIPTAKLKERIYELCELYRIQFIETEESYTSQASFLDGDIIPVYGEKPDNWKPSGKRIKRGLYRPGNFAPINADANGAANILRKVAATLGLCLEGVSSGASTTPVRVHYWAACESPSL

SEQ ID NO: 20699 - protein, 462 aa, Phenylobacterium sp.
MSALSDGGAVRAVRSLGPTSRRAVSSTSWPRGRSRMGATIHRSFAYRLHPTAAQAERLRQWIGATRFVYNLCLEQRRDFWRQYRRQTGRHLTWAQQSQEVSELRRQVDWLADVPRDALERALRDLDAAYRAFFAGRNGYPHPRVKDARGVIQFISRDLAVKRLNARWSAIRLPKIGWVKFRDTRELRGRWLSVAVSHYAGQWRVSLAHEIARAVSTPVQSSVGIDRGVTVFAALSTGELIDGPNVGRKAAASLATAQRRLARKKKGSNNRRKARLRVARLQARVAAARKDFLHKISTGLAKSHGVVVLEDLKVRNMTASARGTVETPGRNVRAKSGLNRAILDQGWGMFRQMLAYKLEERGGYLLTVNPKDTSRTCSACGVVDADSRDGTRFACRACGHDAHADHNAAINILRRGTPLVPVELASAFNEAGTAIADADSPPRPLQKRTAPQPPSRDNAGGGG

SEQ ID NO: 20700 - protein, 399 aa, Microcoleus sp.
MKHAVKVRIYPTDEQQVALSKAFGCARWFWNNSLAQTNRLYKETGKGLSQQGMNDRLPGLKKEFEWLAEPYSQVLQSVSLNLSRAFINFFEGRAAFPNFKSKNGKQSIQYPQNVKITDEGLKLPKLGVIKAKIHRVFDGKLKTVTVSVAPSGKYFASLLFDDGEPDLEVSTEGKAVGIDLGLTHFAITSDGSKFDNPRVLKKRAKNLKRKQQKLSRKVKGSNTRKKARRIVARVHEKIANTRKDFLHKLSRKMVNENQVICVENLAVKNLVKNHNLAKAISDASWSEFTRILQYKAGQDGKIYQEVDRFFPSSKTCSVCLNRVSSLALDVRSWQCQNCETKHDRDLNAAINIRDEGLRILALGTSATASGGKVSPKVGRRKSSVSKAHPREAGSLLHTA

SEQ ID NO: 20701 - protein, 407 aa, Rhodothermaceae sp.
VYLTRKLKLGKAEQLDCLAERTGVLWSQITKWHWRFVRRQGHWASKPAMQRWLCRGYEGLHSQSAQAVADSFYDALSSWWSKREAYPDAKPPYKQKRFFKTVWKSSAIRVRDGKLRLSNGRGSDPIVIRWQWPKPKRVEIGWDGEQYELRAQFKIEAQFKIEAQVQPKGDKVAGVDLGEVHLATTYDGEKTLIANGRHLRSLRRYQNKLKARLDAKIDRKKRGSNRWWKLVRSKRKQLSKIRNQILDVLHKQSTRLVDALHERGVSTLVIGDVRGFREDLDYGAQSNQKLHQWTYAKFRHMLEYKAELRGMTVETVSEAYTSQTCPNCQERHKPSGREYRCTACGFEHHRDGVGAINIRAKYLGSAPVVGVMASPTGLRFAPHAVCSSLSGIGLEATFEGEKEPHDL

SEQ ID NO: 20702 - protein, 235 aa, Helicobacter sp.
MLITYKQKLYKNDKNRRIDTLLRRYGVFYNHCIALHKRYYRLFKKYLKLNDLQKHTTKLKKTHRYAFLKTLGSQTLQDLTERIDKAFKKFFKKQAKLPRFKKVANYKSFTFKSQVDKKTGLNKGVGFEIKDNVVSFSGYGYKFIKTYALIGKVKTLTIKRDNMGDYFLCLVCEIEDKPKPAGGNSVGLDFGLRTFLTGSDNTKIESPLFFSKYLPLIRACNRSLSKKKRGSHKTA

SEQ ID NO: 20703 - protein, 391 aa, unknown
  TnpB Polypeptide
MTQKAYKYRFYPADEQAHNLACTFGCCRVVYNWALKRRTVAWFQNGQRMSYNDLSQALTELKKQEGTHWLQEVSSVPLQHSLRHVEKAMVNFFEKRAKYPKYKKKHNKQSATYVNTAFVWNGSTLTLAKQKEPLHLVWSRPLPEGCKPSSVTITKDKSGRYFISILVEENIQPLPMTDKAIGIDLGLKSFLITSDGETIDNPKYYARYEKKLAKRERKKAKKKKGSKNRNKARVKVARLHAKIADTRRDFQHKLSTRMVHENQVMCVESLAVKNMLKNHGLAKAIADVGWSEFVRQLEYKAAWYGRTVVRIDRFYPSSKTCSACGHLLEDLPLGVRAWVCPECGTCHDRDINAARNVLTAGLAARNVCGGTVRRGRRKSGHAGTIEAESTL

SEQ ID NO: 20704 - protein, 502 aa, unknown
  TnpB Polypeptide
VSRTYPRVPYAAFDKDGKPLNLDDVLNGVKADAELVAHYALQEMTEQNLALVTYFDRLKPSGAGYMMGLKLPIEVKKQFKSGSSRLERMFREQVVSNLRSWAARVEVMTQTYPKYVSAGWKRTASKSKPTSMSPRLALSATDKGYYYKNFSVTPERISLDMVVRGSWVTLHFPTPPQLLESGCEPGVPDIWINKSDRVMFGFCGKTDPGRPEFSERYVVGVDLGVTNPAAYVVWDTEKKEVVERSLLGQRARSLNNKIKRTKTQVASLQKKNRSEEAVSHREHLSNRRRELSILIAQELADASFKYDNAIVSFEDLSHIKNTMKHGRWFRGEVYRRTRDMVEADGGRVMKVNAAYTSQRCHVCQSDLDMSDYSQPRCTTCGITHHRDLNAAANIAQRANVKKACETRKKHATKIKRVRRSKCHIKPLKHPGTKNRPTPKAPQNQKKTHTLTRAKEVSVRMCPADTSVSVVDHDTWFQTISGTTNPKDNLSTANTVDVVYLKE

SEQ ID NO: 20705 - protein, 511 aa, unknown
  TnpB Polypeptide
MPSKNVISRTYPRVPYAAFDKDGGPLVLSEVLDGIRQDAELVAHYALQEMTEQNLALVTYFNGIKPADAGRQMRLFLPAEVKKQFKSGASRLEKMFQEQVVSNLRSWVARVEVMTQTSTKYVSAGWKRTASKSKPSSMKPRLALSAADKQYREMSVTPERICLDMVVQGKWITLHFPTPLQLLEVGCEPGVPDIWIDKNDRVVFGFHGKTDPGRPNFSERYVIGVDVGVKNPAAYVVWDTENKEIVERSLLGQRARSLNNKIKRTKTQVASLKRKGKDEEAVSHREHLSNRRRELSIFIAQELADVSWRYGNAIVSFEDLSHIKNTMKHGRWFRGEIYRRTRDMVEADGGRVMKVNAAYTSQRCHVCQADLDMSNYGSPVCESCGITHHRDLNAAANIAQRVNVKKACEIRNKRATKTKRVRRSKCQIKPLKHSGTKNRPTPKAPQNQKRRTRTRNYPPLPSKEVSKEVCPADTRVSAVDHMEWFQTTSGTTNPKKNLSTANAVDVVYHKE

SEQ ID NO: 20706 - protein, 495 aa, unknown
  TnpB Polypeptide
VPYAAFDKNGKPLDLNDVLSGVRKDAELVAHYALQEMTEQNLALVTYFEGIKPAEAGRQMNLKLPVEVKKQFKSGASRLEKMFQEQVVTNLRSWSTRVEVMTQTYPKYISAGWKRTASDSKPTSMSPRMALSATDNCYHRNFSVTSERISLDMVVQGSWVTLQFPTPPQLLEQGCEPGVPDIWVDKNERIVFGFCGKTDPGRPKFSERYVVGVDVGITNPAAYVVWDTEKKEIVERSLLGQRARSLNNKIKRTQTQVSSLKRKSKDEEAASHREHLSNRRKELSIIIAQELADVSWHYDNAIVSFEDLSHIKNTMKHGRWFRGEVFRRTHDMVEADGGRVMKVNAAYTSKRCHVCQSDLDMSNYSEPRCNTCGITHHRDLNAAANIAQRVNVKKACQTRNKHATNTKRVRRSKCRIKPLKHPGTKNRPTPKAPQNQKKTRTTTQIKKEVSVRMCPAESRVSAVDHDMWFQTTSGTTNPKENLSIATTVDVVHLKE

SEQ ID NO: 20707 - protein, 509 aa, unknown
  TnpB Polypeptide
VSKSTVSRTYPRTPYAAYGKNGEPLDLKEVLDGIRADAELVAHYALLEMTDQNLALSTYFDRLKPSGAGYMMGLKLPVEVKKQFKSGASRLEKMFQEQVVTNLRSWAARVEVMTQTSNKYVSDGWRRTASKSKPTSMSPRLALSATDKGYYYKNFVVNPECISLDMVVQGSWVTLHFPTPPQLLEKGCEPGAPDIWIDKNNRVVFGFHGKTDPGRPKFSERYVVGVDLGLTHPAAYVVWDNEEKQVVEKSLLGQRARSLINKIKRTQTQVASLQKKNRSEEAVSHRQHLSNKRHELSILIAQELADASWHYDNAIVSFEDLSYIKNTMKHGRWFRGEVYRRTRDMVEANGGRIMKVNAAYTSQRCHVCQSDLDMSDYSQPRCTTCGITHHRDLNAAANIAQRVNVKKACETRRKHATARKTRKSRCHSKPLKHPGTKNRPTPKAPQNRPKTHARTHPPLPYREVSVRMCPADTRVSAVDHDTWFQTTSGTTNPKENQSTSIVDWFYPKE

SEQ ID NO: 20708 - protein, 412 aa, unknown
  TnpB Polypeptide
MGTFVRYAFNMSYRTIEIAWTPRTTTEWATFTASRKEAARLWGDLVKRHHRIRRLGWKWPSKARWQRWARGRYPGLSAQSAQSAQAAQQIIGEFCEAVDSCRQLRRNGQTEARYPWRTPRYHDVVYTNQDARIRDGRLVLPHGTSGTLRIRLPETVSLPGRLIEVRLSFGVVRLICEVAEVPHPQQTIIGVDLGVNTLIAATDGTKVFLVRGRGVKAVIQWRNKTLASIQQAQSSKTKGSLRWKRLQRRKYQMLGKTKRQVRDATHKATHAVATAFPGATCYVGEPFNDAAQRASHKLAQQVSQVCTRKIISQLDYKTAGAITLDEAYSSQTCPVCGERSTHRRIYRCPHCGATGPRDAVGAINILSLGQHDVMLPGRSLPPAQQVKYLRPWPHTGRQPRSSSGGHPACSSA

SEQ ID NO: 20709 - protein, 400 aa, unknown
  TnpB Polypeptide
MKYKAYKYRIYPTKRQEVLIAKHLGCCRFLYNYALDKKVKAYQKDKTNISRYQIQAELPTMKKSEKYCWLSEVNSLSLQAALANLDSAFVKFFREKKGFPKFKSKKDNRQSFSIPQNTRVNYDEGKVYIPKFKEGIKACFHRKFEGCIKTSVITRTPTHKYFISILVEVNEQDAKAKPISESKAVGIDLGIKTFAVLSDGTEIPNHKYLKRSIKKVKRLQRSLSHKTKGSKNRERARIRLARAHERVSNQRNDFLHKVTHKLVSEHNTICLETLAASNMVKNHHLAQALEDVAISSFNTLLEYKAKEHGVNILRIGRFEPSSKMCTCGYINHNLTLSMRRWSCPVCGVTHDRDLLAANNIKRFAFHNIYTAGTAGIKACGDMSKDTCAAHEAHESRSVYG

SEQ ID NO: 20710 - protein, 217 aa, Haloterrigena sp.
MRTKGTLVLDYGQVKQERQRYHTITTRCQEHGKTSIHRKLGDKEERFTEWVLHRLSRAVVEFAEQFSNPVIVFEDMSGIRDEIQYGTYMNRRLHKLPFHKFEKFVSYKATWREIPTDTVDTYYNSKTCSCCGERGYRQGRRFCCTNDECDVVQDHADRNASVNIAWREKVKLNGNNTNYRTHKPQPQVQLVRLSGSGRVSRPTSSRSLAEQGVLAHG

SEQ ID NO: 20711 - protein, 578 aa, unknown
  TnpB Polypeptide
MDIVRTQRYSLKNTFPAEMEKTVEVYRLAVEALSRVAFTEWGFLSLLETQNDRRHGLEKLVHSTGPRKVRGENRITAGNKARYACFDWLFDNLPAYYMRSAIDDALGVLASHVTRYRKWKKERDRVILSAESPSILKRKLKKFARPPTFQPITRKCPVLFRGNGKKVRKAVGKNRLLKERIAGVQSDPGGTILWLESDLAAIKLFDGKSWNWRCVRLKKPKKERFKTEDGWTEMSPTLVQTGGTHEIHVPMETKVVLKEEGVTDKTGFVLAVDLGLNTRATASIVGSDGAIHGRFFIDLPQETGCLDHLLGEIAQRYRASGQPQDGRKTCVAEWDKVGRYSDEIAQNVSAQLVKIARDNGCQVIVFEHLGKLQIPRDFYGARRLRKKLHFWLQGKIQKLTKEKGHVHGIRFSRVLARETSVNAFDGSGGVKRNGSKKIARFQNDIQYDADLNASYNIGARYWIREWFKKYPKTAKDLGVDAHPQAGGSPTSKAAVRKTEVAGQGKACPASDTPDRLTAAGVPVARHRQVLASLISLVNWVGGQAATTVRGRIHATTERLPGQKKSAVKGSPVQNAAGV

SEQ ID NO: 20712 - protein, 484 aa, unknown
  TnpB Polypeptide
MVPPAPDGGSAAGSPRPTVPSGQHSGGAVLEARENQCGERFASVFHAEHQVQVQQVHAVSAGSRSDTTSHARIVAGRRYRLAPTNAQEARLSAWSGTVRALWNAALEQRRTAWRDCGVSVGLSEQCRDLTGARAVIPWLADVPAQTAQQTLRDLDRAYGAFFAGRARFPRWRSRHRPAGLRFPQGVEIRRLNRRWGEVRLPKLGWVRFRWTRPPGGTIRHATLTRDALGWHVSLCVELDQQTAPANGGPAVGVDRGVVALAATSDGELIAPSFWTAGERKRRKRLEQQLARQRRGSNRRRRTVRQLGQLRARSARRRQHHLHELSHRLATTKGLVAVENLQVQAMTASARGTVEAPGVNVAQKAGLNREILERGWGELHRQLAYKTRWYGSQLIEVPAAYSSQTCSQCETIDSGARESQARFRCRSCGHTENADVNAARVILGRALGPHQQQQHMARGRRVTARGDLADRRSVKRERSRQTVAA

SEQ ID NO: 20713 - protein, 322 aa, unknown
  TnpB Polypeptide
LRLEVAGQPRWTGKQGRLEIVYDRDTETFTAYRTVGNGDNSPRRRDSIEPSLATTGSGEEVVAAVDIGANNLAAVTTSQGDHRLYHGRPAFHTFHTHTKRIAELQSKLGDDDWSSKQIRRVYHKRGEQRNHAMDALIRDLGEWLAELGVTELIVGALSGVREKHWSTTVNEKTHLFWAHGRFRRRLDEVLDFEYGIPVTEKSEAGTSSTCPACESVDVHRCGDLLQCHSCGCEGHSDVAGSANFLRKHASERIAIQTSGSMARPVAARENTTADGHYSQVPCLEWDDSEWTVKHSGLSTKEAPANQSTSSETGNVAPGVSDD

SEQ ID NO: 20714 - protein, 240 aa, unknown
  TnpB Polypeptide
VRLKQHREIAGVIKSATISMTTTGKYYISILCETEILPFPKTNSNVGIDLGLSHFAIQSTGEKVGNEQFLKKFSKKLAKEQRILSRRALLAKQSGKNLSESMNYQKQRIKVAKIHEKIANMRKDFLNKLSTEIIKNHDIICIEDLSSKNLMKNHRLAKAIGDASWSEFVRMLEYKANWYEKQVSKISRWYPSSQICSDCGFTSGKKELHIRERMCENCGSHHDRDINASINILHEGLRLA

SEQ ID NO: 20715 - protein, 443 aa, unknown
  TnpB Polypeptide
MQKRKFTVVTQLHENNNTDLIEYIDTTRVLYAKAMRETFHVLKRVEKFNKSSYNTYLQNKYDITKRTANSILSDAQGRLNALTEHKKHEKSQLIRKINHLENSVIPKLVTKRNYNNVKLQQKSPVSLVRHRNLRREIVTKKSKLNRLKQKLENLNHQLETGLFKLCFGTKHLLQHDYEQFVNQRDSQISFVGSKTEKACNQILQLTYNSKNNQFEIKLRKDFGFKTAKGDDKYVYGKVYFRNHKDKIISILRQCNSPLSYKIIKKNNRFYLYCTFEIHVCDEDFITHSSYGTIGLDFNKGFVTLSETNQYGHLVQTQFLPYRFKAGNKTKTDLQHIAKHVVTLARSTGKDICIEDLNFKNKKAQTESKSGKTYNDMLHSLAYQQFMTTIERCAYRNVVYVNKVNPAWTSWLAKELYCPTMKLNVHTGASYVIARRGQGFKDSV

SEQ ID NO: 20716 - protein, 303 aa, Haloferax sp.
MTCILSQVSESFKNSLRRSPAGTANDATETREQTRRSTANTATNTRETVTFKAAGFKLDTKYERVRLSKGSNLKEYWSDFILCEYQTRPDVDLSTVESVQQVRAVWTGDEWELHFVCKVNIEVAESPGEKTVGVDLGVCNFAALAFENQESELYPLNCLKQDDYYYSKHIARCDDSASAGVQAHANKTLGAPPHALKHIVQRCIDEEVGTIVVGDLSGIREDEENGESKNWGKHGNLDLHSWAFDRFTSMLKYKAEMEGISVEQVSERDTSKSCSCCGRSETRTALNVGCTCVMSVNWWRTRT

SEQ ID NO: 20717 - protein, 556 aa, Citricoccus sp.
MSTKAYFSNRIYKNTLSNSVVEAIRDSLSRFNRAKQFVLNTLVKEKRSGQSRREKSIHVHVKEKYQLDDYYANSAVQAAKAQLKRLDELKKIYIENKSAQIRSIKRKLKQERSRLTTLRKIKTSFIKDKPKFPKHAREQKQGNYFVVSYKKKTDIYYHAYQFEHTYLDPTIQQRKTRIGFLTSRLNRKEEELKQLRTRIPSVVFGSKKRFKSQHTRDFYIDNHDAWLEEWQQSRYHKMILSGRKDAANGNFVFNYDTENKQLHFKTPSGVFINMEQVHFPYGQDKVASAIQTQQNCKNKKKYGKPIAWSLEDHGDYYIIKCMMDVEANSQTNYSKSDGVIGVDCNVDHFAIANINAKGQLLSSCTLPFKLEGKTSGQITKIIEAEAVGVVDIALKANKPIALERINTTTSNVSNPYGNKKANRKMAMFAYKKMIAAIKSRVEKIGVTVYEINPAYTSQIGKMKYMKRFGISIHQAASYVIARRAMGFREKLPPVLRALLPEKMIGAHHWAQWRYVSNHLKKVHTHAFYLSELFDVDRFHKTGEFFVSGALGPLDVG

SEQ ID NO: 20718 - protein, 210 aa, Citricoccus sp.
MNFGWVTAQRLFLPFLFNKEIESVVGLDFAMDGLFVDSEGEKANYPKFYRQMLEKLAKEQRKLSRKKKGSSNWNKQRIQVAKIQEKVANQRKNFLHHQSKKLATKYDAVVIEDLDMKGMSQALRFGKSVADNGWGMFTSFLQYKLQEQGKQLVKIDKWFPSTKTCSNCGSVKEVKLSERTYQCTCGLSINRDYNSALNIKKEGIRLLASV

SEQ ID NO: 20719 - protein, 351 aa, Citricoccus sp.
MLLNQKYEIFPSSEQIEILETWLSYCRLTYNSALLDKQRKYRQSKESYSRFDMQKQLKQDKQEWEFLKEIPSQALQEVFRRLDHAFTKFFRKEANYPKLKKYKDYNSMTFPQFGFKPNTHHRYAASFTENGKLQLSKLGQIPIHLHRPMEGTIKQLLIKRQGSRWYAIFSVEGQAYPAPINRGLAVGIDVGINKYAVLSDGKSYENPTFIRKTEKKRKRAQAKLSKMKRGSANYVKQIIKVRSLHEKVANQRRDFLHKLSYHLAKDYSIIAVEDLDIRHMVKNKRLSKSISDAGWGTSQDCSTCGTRVKKSLSIRTHICKGCGTILDRDHNASLNILRKGMEQLDQMVAID

SEQ ID NO: 20720 - protein, 304 aa, Citricoccus sp.
MNLRLNEVDSLALANAQLNLDKAYKAFFEGNAKFPKFKSKRHRQSYTTNVVNGNIELLDGQIKLPKLKIVKVKQHRIIPSDHTIKSCTISMTSSRKYYISILTEYEKEIRHKDIENVVGLDFAMDGLFVDSEMGEKANYPRFYRQMLEKLGTEQRKLSRKKKGSSNWNKQRIRVAKIQEKVANQRKNFLHHKSKELVTNYDAVIIEDLDMKGMSQALKFGKSVADNGWGMFTSFLQYKLKEQGKLLIKIEKWFPSTKTCSSCGSVREVKLSERTYQCACGLHIDRDYNSALNIKKEGMRLLAIV

SEQ ID NO: 20721 - protein, 728 aa, unknown
  TnpB Polypeptide
MHDLSLDQAQENLRLAMQRRNRLKALREPLLAGEDITARAAEILGEDVGTLLARLAGPEEDSGAGAEHPGAEHPGADVAEETGAEHPGAEEAGEEDAAPAPEGVAPERLDVGLLDRLLKEAAAAVRAARDQIAEVSNIVVRQYALGQPLDWDDECEAQMRAQNTCWNRLVETDGLFRERFVAVSAEDSLTHESEAALTGALLALGKLKDQKKILRQKLALTRRKLAGLRASRASQKEAIETAIADLTAAINVLAGEIADQKKIVQVRSAAAKAARKAARQRRAPEVEAIKAARKAALDAAVKESGLWWCNANAVRRSFDKACERVVSARSSGTAARLNFHRWTGEGRLVNQIIGGMTVDELYAGEHSQVAVLAARTSHLKASQPPAGQRRPDGRRMERRVQRAGETERWPVQRMTLRATVFTVRDGEKSRRKDVHWPILIDWPLPPDVIIKEVAVHRRKLADQTRWTATFLCRQPKAPASAPATETPGKVPRMAIWLNWRRVNDGLRVATIQRADSEEVEYLTLPDDIMAGAWLDAQKSHRDRMHNAIIDKLRALPWHAAPPPLAAEAARWQAIPLKRLAPRHTVRLVMAWRSHADWWPEACAAAEDWRKADKRAWQRIVHRSRRAIGARREIYRIAAKRFAAEAAVIVINKPPLAEQSRQKGHTEYDAAAKERQALRRTAGLSVLRTCLANACEKAGTRLLVRMPKKAPESSDAETARRLLNAPDDA

SEQ ID NO: 20722 - protein, 379 aa, unknown
  TnpB Polypeptide
VLKAFRYRLYPTKAQKTKIDATLELLRWVYNETLAVRKNSWEREKKSVSPFKTNKLLTGWKKERPKLNSVFSQVLQDAQVRVDLAFKVFFRRVKSGEKEVGYPRFKGRGRYDSLTYTQFGYKLESNKLTLAKIGAIRVKLHRPIQGEIRRITVRRASTGKIFVSIIAEVSSNPVPFKDGSVVGVDVGLESFATLSNGEKTANPRFFKNEEYELTKAQRRLSLQKKGSIEWHKRLKVVQRVHERIANKRSNFIHQESRKLVNRFGVIAFEDLNVKGMQQNNNHGLAKSIADASWGMFVNATRNKAEEAGSKVVLVNPQYTSQACSRCGLIVPKDLSERIHQCECGLVMNRDLNAAINILRLGLQSLGLTAVEAHPLQGWE

SEQ ID NO: 20723 - protein, 398 aa, Frankia sp.
  misc_feature (213)..(213): Xaa can be any naturally occurring amino acid
VSRFRLSPDATQAEALLAQCGYARFVWNLGQEQRAAYRAGRGPTPGYHEQARQLTEARRTFGWLAAGSQTVQQQALRDLDQAWRNFFAGTHRRPGFRRQGVHEGFRVVGQAAGRVRVESRRWSSVLVPKVGWVRFRRSRPVPAAAKSYRVTRDRTGRWHISFAVVPEPIEAPGTGGVVGVDRGVAVSVALSTGELLVCPGLRSKEAERLRRLXRFQAKAKRGSHRRDRLKGQIARLKAREADRRKDWVEKTSTDLARRFDLIRVEDLNIRGMTSSARGTVEAPGRQVRQKAGLNRGILGAGWGLLVQRLEHKAPGRVEKIPAAYTSQRCSTCGHTASGNRESQAVFRCVACGHTANADLNAAVNIAAGRAVTARGGTVLAVPVNREPQPSAPPSSVGV

SEQ ID NO: 20724 - protein, 458 aa, Frankia sp.
MKTKWAWSAKMQFLPVRTLRSWAINQCQAVIVQLRYNYRLDPSPGQVAALARAFGCGRVVFNDALRLRQDARVDGLRYVSDGEMSRRVITEAKRTGERAWLGEVSAVVLQQALADLNTAYRNFFSSLSGKRKGRKVFPLRFRSRKDNRQAIRFTKNARFVVTAGRKLRLPKIGDVAVRWSRDLPAAPSSVTVVRDAAGRYFASFVVETTDDVLPPVESEVGIDLGLTHFAVLSDGTKVTSPKFLRRAHRRLRRLQKDLSRMEKGSANRKRAVVKVARAHARVADSRRDWQHQLSTAIIRENQAVYVEDLCGRSWPDPAGPVGTRRGLVPVRGDAGVQAARYGRTFARMDRFGPEHSHRRSQGRRRTGGDRKRPWSASQTGTRAGIAPRSGNPPEAHTHSGVAGWNFRPSGQRGCQSSRSVGTTRTGRFAQLTTRWETEPVSSRSRTTPPPCRVPMTIA

SEQ ID NO: 20725 - protein, 254 aa, unknown
  TnpB Polypeptide
LEWNYGLPKVVNISFDNGYRINTTYTGAQQRQASEDENTEDTAGVDLGEIHLAVAHTRDKTVIANGRVLRSKRRYQNKVNAYFQRKISKCKKRSRRWKTLIKAKKRVLNKLDNQIKDILHKQTTKLVSILKQEGVKTVAIGDVRNLRQNVDYGKRANQKIHQMPAGQTRFMLTYKAKKLGMSVHIISEAYSSQTCPQCLIRHKPNGRVYKCPHCGFKFHRDGVGAINIRHKQMYKEYVPVVGDMTPPVGIRYAA

SEQ ID NO: 20726 - protein, 478 aa, unknown
  TnpB Polypeptide
MKITVKAFLPEVDECADQAISDLMKVFCGAVRYSFKRLLESEKIGDIEKTVAANYGLNIRQAKDAVEEARQVIASQRELLKLNYENATKKVKALDKILEQDNLTERKRKGLMKKLDKRKRRQAYYAKFIGSGTIPPVVFGTKALFIKRCKGQISHEEWRAARSNRVYSRGDKTKCGNPNLRVIDDGNKTFLEISTLGRTDTNRAVKIQTPLYLPRKLSKKTGKINGRDYKNMVFDYLRTGEAYQVELIKKNSGYYCHITIDEAKIREYKTVYTGHCGMVGVDTNPDGFGLTVISKDGNLIESTYIKQPELQYARSDRRENLCEEMAKQVVEYAQKHECGVAIEDLKFKDDKDVGRKFSRIKHQFIYSSLLSALETACIRGGIEVTKVKPQFTSKIGLYKYCHQYGLYVHNAAAMVIARRAYGYKERVPIILKDKFVKYKNSFEEKSEWAQWAIINKQLKEKGGTGFWIRNRKQILGLV

SEQ ID NO: 20727 - protein, 419 aa, Symploca sp.
MILTYCYRIKPSAEQEATMFYTLELLRRHWNYCLGQRLDCLRRTRCQIDRCSIVSEPIGEIPEKVNYYIQQSALKETKKLFPDYKNIWSESQQVNLQRLNKAWERWLIPDKSGKRGGRPRFKKTGELRSFVYPRVNCKRAGAHINNGVLKLSKIGEMFVIMHRPIPDGFTLKTCTIVHKADGWYCCLSMQDETVPEPMPLDQVKSTVGVDVGLKEFLTTSDGETVPIQQTYRKNQSHLARQQRKLARKQKGSKRAEKQKNFIARIHQRIGRIRENFHYNTAHKLVKQYDLIAVENLNIRGLARTRLSKSILDAAWGKFINILEAVAVKRGVRVVAVNPHNTSQKCSNCGVKVPKTLSIRLHECHKCRLQMDRDENAARNILDRALSEVGLILPARGGLVSGQPEKRELPSRDWVQLSLF

SEQ ID NO: 20728 - protein, 388 aa, unknown
  TnpB Polypeptide
MDRTIRIRLAPTPSQVDAFRETTHQFTHAFNQVCAHGWHTGEKNGVKLHHATYRAGRADYPALPSNLLIQARTKATEAIKSAFALQAKGKRVSCPSAMTCPPRYNMYTYKVNWETQTVNVATVEGRLHIPFIVPAYAVRYAGCSTATADLIQKRNHWYLHVVVSMPAPEVEPTAVVVGVDLGVTRAAVSSDNRFHGERRWRALEARDFRLRRALQKKGTKSAKRHLKKLSGRTARRRRDHDHVVSRRIVDGVPEGATIAVENLTNIRSRVRAKKANGGQRRLHIWSFAHLRACITYKAEGKGIRVEGVDPRHTSQTCSRCGFQSRSNRRSQSEFWCRACGYRTNADRNASVNIATKLRASRGMTAVGGPSSIGLSCPTPVEGQAVCYR

SEQ ID NO: 20729 - protein, 311 aa, Calothrix sp.
MTTDQIVEEPCEVKISSTVLKTSRRGDRPAEFIKLAEDRKSITITDKIGIGKLKLKGTRDLNFYQPDQIKRVRLVKKADGYYVQFCISVDRKEVISPTKSTIGLDMGLNHFYTDSNGEQVENPRFYRQAEKSMKRSQRLVSRKVKVSSNRRKARVKLSKIHLKISRQRKDYAIKLARCVIQSNDLVAYEDLRVKNMVKNHCLAKSISDAGWYQFRVWLEYFGKVFGRATVAVNPAYTSQECSSCGVIVKKSLSTRTHVCQCGCVLDRDENAAINILNKGLSTVGHTGRSALDVGNASGEDTSIDVGESLCQ

SEQ ID NO: 20730 - protein, 450 aa, unknown
  TnpB Polypeptide
MSNVYTYTTEIKNREYNKLLMDYITEYKGLFNKIQRVAFYKIKNTYVKNKKFTLKDKGELVKYIARTYHITTRAASSIVYNMTGRFNAIKELKEYEKNNLELKIESLEKKIVNLEEDRQKLNLKVSINIATKEENKKYEKIKGCLYWNRNKLNKMKQKILNLKKEIENHKHNICFGTKKLLQTDYEKFLEQRDSEIFFVGRAAEKACNNNFQIKYNKKDNQFYLQIRKEIDTKQDKYARGKIHFNQRRTAEIKELLRSKKSPLTYRIKVENGKYYLQIIFQYKHNKSMCLTRNSNGVVVIDFNKGFVAVCETDKYGNLKNTFNIKYRFKRGTQTESDFQYIAKQLAEYCLENGKDLVIENLNFKKTKGKTVIKGGFKLYNEMLSSLAYSKFMKIIESKCAKKRIFLSKVNPAWTSYIAKEKYCEIKKLNVHSGASYVIARRGQGLKDKMK

SEQ ID NO: 20731 - protein, 382 aa, Streptomyces sp.
MERVPCGICTHELWQMTPRCQRSLSRMDEAIRQARKEIPWLGVVPAQAAQAVLKTYVQAWKNCWDGRAEEPAFKKRTARRAVDIPQGRDLRIKRLSRHWGQCWVPMIGPVKFRWTKNLPVGRRADKLNRITGARLVHDAPGWHIVFRVRTEVDEPKPHQGLITGIDRGIAKLLALSNGTFREHGPWLTPGEAKRMKRLEQKRERQRSDHEPGQPTSNRLRRTYDQIRQLRARATRRALDWQHKTTTELADACGIIGVEDLAIRSMVKSAKGTVEAPGTKVRQKAGLNRSISGESWGRAITLLEYKLADRGGILVKVPAPNTSRRCSACGFITPGSRESQDRFVCRADGCGYQVNADTNAARNIEHAAGHAVSGRGDLGDAQS

SEQ ID NO: 20732 - protein, 269 aa, Streptomyces sp.
MTQLLDVCWSRPLPDGAQPTMVTVSRDSAGRWFVSMLCEDTVVPASAMNTAVGLDAGIISLVTLSTGEKIVNPKHERSDRARLAKAQRTLSRKAKGSNYREKARWKVAKVHARLADRRRDFLHKLSTRLVRENQTVVIEDLTVRNLMKNGRLARAISDAAWTDLRMMLESKCAWYGRELVVIDRWFPSSKLCGNCGTVRGKLPLNVRAWTCVCGAVHDRDVNEARNILAAGLAASACGDGVRPQRESFRTGRSSVKQETQRATAGIPRL

SEQ ID NO: 20733 - protein, 451 aa, unknown
  TnpB Polypeptide
MSQKVRIDGVKHVGASVFLGVDHCGNPCWTRNPERIMVWLCDGWRTRFNQRREQRPHNVPVKDEAGEIIGWLREPLGGSDVPELISDREARLRCLWMAGIPSSILATTDRIEGNERFAGLKRKKTAGGRVPGFKSRHRGLGFVCWYHPSGNSYNAVFHKTGRRSGVVVITGMNPTRWRKPGEKLHWRIAIHVRVSQPIRPYTSVHVDWTHRTLVFVNMPLPLPRTGNGEVGLDRGCVHTLTSSDGTFMDMPKPSKAELKRLKYLQRKMARQDRVNEAKGGRTAKFVSKRKQKTLSEFNALNSRIIRRRNDWIEKTTTTLAKANILIAMEDLDVQAMTKRPKPKPDPDKPGQYLHNGAKAKAGLNRSILSNNWSRLMKRLKDKMDANGGNLVIVPAAYTSQTCHKCGHVAKGNRDSQAVFHCVRCGYEANADVNAAMNILGRALTKTGGGTA

SEQ ID NO: 20734 - protein, 386 aa, unknown
  TnpB Polypeptide
MLFATMERYNSACNAISPVAFSEHQFSNIGLQKRLYRHIRETFGLSAQMAQLAIRKVAGSYRSTKEAIKEQNKVLAALGKPLKSLTEISFRKHGAIGYDARVLSIGRNRVSIWTLEGRIKLRYIKPDYFPAVATVKQTDLVYQGGSFWLYATIETPDIEPADPSGFLGVDLGVVNIATTSDGEVFSSEATEKVRQRYGRHAGALQKTGTKSAKRRLRKISGRERRFKTNTNHVISKQIVCAAQGTKRGIALEDLKGILQRTTVRRDQRERHHKWAFHQLRSFIEYKARRGGVRVQVIDGAYTSQQCSSCGFVHPGNRTSQAAFRCRACGHTENADINAAKNIAARAAVNRPIVVRFPDIGGEVESQACKERDTTHGIMPPTRGGGS

SEQ ID NO: 20735 - protein, 228 aa, unknown
  TnpB Polypeptide
MLLYQGSGYRVKEGYVENIGGIRLRIIGWDRRYDQYDNREARLVYRDNKMMLWISKRIPKPQPYQPRDVIAIDINERRIVYGDDKINKEIGTGIDRAYRWKLLAESLQKKYSSPRYPAWRRRKGILNRIRSYHRKSRNILEAWARKTSLEIVELAKKLRYAVAREDLTGLINSLRRIKSKDHMARLTIMGYRRIGKWIDWQAMKRGSPLAIVDPRGDIKRMPTMRFKA

SEQ ID NO: 20736 - protein, 428 aa, unknown
  TnpB Polypeptide
VEYVKRTNVVELVVGKEEHEKLKELGVTTAKCWNEVNWLRMQQFKKGEWVDFAKTEKEVYEKYKHVLKTSAQQVARKNAGAWNAFFTQIREKREGKLPKWFKPRPPGYWKDKNGKYKLMIFIRNDRYEVDENKGIIYLKDFKLALRFKGELKWRGKQGRLEMIYDEARRGWYAHIPVEVENEVKVEGSLRASVDLGIVNLATVYVEDGDWYIFKGGGVLSQYEYYSKRIAVIQKTLARHKQRGSRKLKLLYDKRRGFLRHALNSMVRRIMSDLKEKRVGEVVVGYPKEISRNHGNKLTTNFWNYSYVIKRFEDVGEELGIKVVKVNEGYSSKKCSLCGDAHENGRIKRGLFKCPRTGKVINADLNGAINILHIPESLGSTDGGLSVVRDRGNGLETQPVVYRWTSGAGWVRKPTSNEAMRMKAINHKQ

SEQ ID NO: 20737 - protein, 537 aa, unknown
  TnpB Polypeptide
MISHEEYKKALKQFHKLSDRHILAAETDISSSDIQKVVKLSEKIRKAGNELVGLMRKNYDQLMRTKRYRKLLKLYGSTEDKKKRKCFAGQLNEMQKQYDVTWDFCRKSMIFIGKKYNVDAVFALTKAEDIWRGMEKCLYGNGNILHFSKYGELPCIRAKQINRGIRIFVKDNLLQFKLGRTVFGIKINDRFQTDEVNAVLDYLAEPEITNNKAVQTLMDEAYCIDTYRPCYAVLVPKLIRGKYRVYLHLTIEGRAKPKYDRSGSPRHKYGKGKIGADIGTQTVAYTSDTEVGLKNLSERGRSIQKSERLERLYYRAMDRSRRATNPQNYNEDGTIKKGRKTWRYSNHYKKLKEKHSELCRINAINRQLAINEDANYLRSLGDVFITEPRNAGKLMKRAKETTVNSKGKFNKKKRFGKSIKNRCPSGFQATVEEKFKTTGGTYIEVPDDYRASQYDHTADSYIKKKLSDRMYHLADGTLVQRDWYSSFLLYCYDYRTKNIDRDRCISEFEKCYSKEEALIKRIKINRIKVLNSGIKIV

SEQ ID NO: 20738 - protein, 381 aa, unknown
  TnpB Polypeptide
MHFKTFKYRLFPSPAQCRLLEETLETCRRWYNTCLAERKSAWEQEHRNVGKYAQLRQVKVYRQENEYAARLHSHILQVVVADLDQAFQAFFRRVQAGQTLGYPRFKGKNRFDSFGLKEYGNGFQIDGRRLKLSGVGRIRVRWHRPIEGKVKTVRICRQAGKWYACFACEVEGQPLPPTGRAVGIDVGVHHLLATSDGEVVENPRWYQGEQKKLRVLQRRVSRRKLGGSNRRKAVSALQRHHEHIANSRKDFLNKVAHALIARYDLIALEDLQIQGMVRNRHLSKSILDAGWGALKRHLIDKAADADRQVVWVHPAYTSKTCSSCGAVWADLSLADRWVECSCGLSIDRDVNAALNILWVGRIHWDKNTVTGLRLSQEAPRL

SEQ ID NO: 20739 - protein, 431 aa, unknown
  TnpB Polypeptide
LKTLEQVRMYSIPISDSRVRELITWYLQVLQRAIDVIWENIEWRYVFPRVERKGGKLRVTTSYKVKSPELPKSKSFKKQLRDELLKDCPYAKHWVDAVIRTAYSIMVSWRKRYLKGRARKLKPKVKKRFARCKITLMRVDYVKKTIRITIRPGEHLEVSWAGRWFSRRVEGWRVGEVVLKDGRILIPFKSTRVVEVRDVIAWDSNELSLDGLSSQLGFIKVDLRLLQSIKIVYDKKKAVAQSENKREIYEKYVKREHNRERDFINKLAKGLVALFPNSVHVFEDLEKEDLVSKNKAPKSRRKRNARTPWKLIQRKLSEKAPVVRVSPKNTSRTCPRCGFVAKTRVGRVFKCEKCGLELDRQKLASINIYLKYAKMRGLPHSNDPDTWMKGELWVGVTPSGQSPVICTSMKWGAEGCEAKGGGVYIKPYKSL

SEQ ID NO: 20740 - protein, 389 aa, unknown
  TnpB Polypeptide
MYQVRRVNIGKTPQLDELARECGRLYSQTVVSFWRTVGKKGIWLQPKHLMRWHTSDKLHAHTADACVQAFFASLKSWRARRTTDPDAHPPRRRRSFFRIEYKSTAMRHKNGKLTLSNGRGNAPLVLDWPWQTPKTVVIHWTGTQYEAIATYKVEATAQPWGEKVAGIDLGEIHVAVAHDGTETHILNGRFLRSKRQYQNKLKATLQTRLDGKKKGSHRRKKLIKSKEKQLKKLKNQIRDIEHKQSSRLISTLHANGVQTVVIGDVRNIRQDLDVGRKNNQKLHQWSHGRVRHMFTYKAERVGMEVTLQEEAYTSKTCPKCGHRRQSKGTGRVFHCTKKSCGFTWHRDAVGAINIRAKYQGEFGSPLVVGDMAPPTGLRYVPQVRCSSSW

SEQ ID NO: 20741 - protein, 429 aa, unknown
  TnpB Polypeptide
MNTEPVTRGIVLRLYLNRAQGATLRRWQGGLRRAWNDTLDLCLKRREREGNWPNKAAIQNFVVGLKKQEATTWMAEIPAHALLALADDMHKAFRNWFQKRAKRPKFRGKFQRQFSVYMVNQRTAFEEGKVKLPKLGAVKFRGGELPEGRLLASRVWCDAGKWYMSSVFECQHPGYVVPKVARVGIDLGVKTLATAFDGEKIITIEAPKALREAEKSLARYQRRMSRRLKGSKRREDAKRRLARLHQRVANIRKNAAHQATSMLVRHAHQIVVESINVKGMMRNRHLAKSVADAGMGEFLRQIAYKGDWRQREVTEAGRWYPSSRRCSACGEIHDMPLSKRWMSCACGNEMNRDENASRNLYAYPEERGNEGDILPKTRRERGVQEPAAMPSPVPLSELRNLKRGSEKRDRACVMYRFTEVNNSEDVDAA

SEQ ID NO: 20742 - protein, 367 aa, unknown
  TnpB Polypeptide
MNKANKLRLYPNAEQAMMFAKTFGCARFIYNRMLGDKINHYNETKEKLNNTPAQYKSEYEWLKEVDSLALANAQLNLQTAYNNFFRDKSVGFPKFKSKRSHHYSYTTNNQNGSIRIEKGLLKLPKIGFVKLKQHRAIPENYVLKSVTVSKTPSGKYYASILFEYEQIIEPVEINSTVGLDFSMAELYVDSNGNEPQYDRYYHRSLDKLRRMSRALSKMRKFSSNWYRQKHKIAILHEKIANQRKDFLHKQSRQIANAYDLVGAEDLNMKAMSQALNFGKSVADNSWGTFRTLLKYKLDDMGKYFVVIDKWFPSSKLCSTPGCTYKNDALDLSVREWVCPNCGVVHNRDHNAAVNIRNEAVRLVSVMA

SEQ ID NO: 20743 - protein, 174 aa, unknown
  TnpB Polypeptide
VESQVDAERNRIPRIANGMIGIDPGFNDVITTSGGEKVPHPKELQQSIERPGQAQRGINRKLVARLHERIKNQRKDRNHRLSLRLVQENSLIVFSKDNIKGMAKKFGKSVASSGHAELRNQIAYKCLAGGTRYMEVSGRNSTKTCSSCGALSGPSGLNMLSVRQWSCGCGAKHD

SEQ ID NO: 20744 - protein, 382 aa, unknown
  TnpB Polypeptide
VGFRRKGSGMVANRAYKFRIYPNNEQKILFAKTFGCVRMVYNHWLDRKIKQYEENKTNVTYTICAKEIAAMKKTEEYRFLKEIDSIALQQSLRHLDTAFQNFFKQPKTGFPRFKSKKRNKNSYSTVCINGNITLSNGYLRLPKIGQIRLKQHRIIPEEYRLKSVTVSQTPSGKYYASILFEYEDQVQEKELQKFLGLDFSMHELYRDSNGKEPAYPGYYRNAEKKLAREQRKLSKMQKGSNNRNKQRLKVAKLHEKVSNQRKDFLHKQSRQIANAYDCICIEDLDMKAMSRSLKFGKSVSDNGWGMFTTFLRYKLEEQGKKLVKVDRFFASSQTCSVCGYKNAKTKNLALREWDCPQCGTHHDRDVNAAVNIRNEGMRLVNA

SEQ ID NO: 20745 - protein, 374 aa, Chromatium sp.
MLLAHKIELRPTPEQMVYLDKACGSKRHCYNQLLAHFLKPENKWSKNEAYQHYINVLRKEFDWYNEVSSRVTRNAIDDLDTAFKHFFRRVKAKQKAGFPRFKKKDLRDSFALRESAKFDVIGRELRIEKLKTKIELRQPLRFQGIAKQVTISKRAGKYFASILVETEDYNPNDVDRQHSVGVDFGIKSLAVLSMGKMFSANQKLKASLKKLAKLQRNLTKKVKWSNRRAKAKLAIVKLHFRIARQRQALLHELSDYLTKNFDVITIEDLNVKGMLKNRKLSRAISDAGFGYLRQMIEYKAQLRNCVVVVANRFFPSSKTCSCCGKVKTNLSLADRTFTCECGFSADRDLNAALNLNQYGLDTLQPDLKCTPEQS

SEQ ID NO: 20746 - protein, 407 aa, Streptomyces sp.
VPTSHVKRAYKFRFYPTAEQAEMLARTFGCVRKVYNLALAARTEAWALRQERITYNQTSAMLTAWKRTEDLAFLNEVSSVPMQQALRHLQGAFTNFFAKRAKYPRFKSKHKSRASAEYTSSAFRYRDGELTLAKMAQPLALVWSRPLPDGAVPSTVTVSRDASGRWFVSLLCEDPGVGPLPVLDTAVGIDAGLDSLVTLSTGERIINPRQERKDRERLARAQRGLARKAKGSNNRAKARVRVTRIHARIADRRRDFLHKLTTRLVRENQTLVIEDLAVRNMVKNHTLARAISDASWTEMRSMLEYKCDWYGRDLVVVDRFFPSSKLCSACGSLAGRMPLNVRTWTCGCGTTHDRDVNAAKNLLAAGLAVSACGDGVRPQRSTPGGRSSVKQEVVPPQRRRAATQPRG

SEQ ID NO: 20747 - protein, 407 aa, Streptomyces sp.
LQQHCGKLEGRVSEAAVTVPAVKLVVQLKLLPDADAASALRSTLRTVNEAANWVSAVAFERGVPREYELRKHTYAELKARGLGAQAAQQTIKKVRDAYTALKANIRAGNLGRPGSGRRRRAESKPVTFRAQAAQPYDDRCLSWQPDRQTVSIWTTGGRLKNVRFACSADALTMLRDHRRGESDLIERDGVFYLIATCDVPGKPVDEDPASFIGVDLGIANIATTSTGYRAAGRGLNRHRRRQRDLRRKLQAKGTRSAKRLLKKRSRKEARHTANVNHIVSKTIVTTAERTGAGIALEDLTGIRGRVRLRKDQRQQLHSWSFHQLAAFVEYKAKRAGVPLVYVDPAYTSQECSACHHIDRKNRADQATFACRACGVMLHADHNASHNIARKGEAVWTAGRESRVPATR

SEQ ID NO: 20748 - protein, 397 aa, Mycobacterium sp.
VGGKLQGVLLRGFGRSGPGTEQLERESQRHPQRPAGGFPRFQSARRDPGRVRFTTGAMRLEDDRRTITVPVIGGLRSMENTRRVQRHLASGRARILNMTLSQRWGRLFVSVGYALRTPDTARTPTRPTVRAGVDLGVRTLATVATRDIITGTETLVEYQNPAPLKATLAARRRAGRQLSRRIPGSHGHRAAKGKLSRLDRRCVHLRREGAHQLTTELAGTYGQVVIEDLDVAAMKRSMGRRAYRRAVSDAAMGMVAPMMAYKTTRCGSTLIVADRWYASSQIHHGCYLPDGSPCRLQGKGRIDKHLVCPQTGEVVDRDRNAAKNLRDWPDMPVVAQSGPRPRSSAVPAGVPETAAQTIGTTDCLGSLRKTRPHGKAANSEAKTGVAPATTELRKESA

SEQ ID NO: 20749 - protein, 375 aa, unknown
  TnpB Polypeptide
MYKYYRIIYSIAKVYNMLLTVKSKLITDKEQHDKLLKTMEKFNEACNFISVFAFKKKLFGKVGIQKELYYEIREKYGLSAQMTVRAVGKVAESYKVDRNTLHEFDPHGAIVYDQRILSYRSADVISILTLDGRIEVGIQYGEYRKLEANRVRGQADLIYKNGTFYLMIVVDLPDAEPILPDGVLGVDLGIVNLATTSDGENYSGEKCTKVRQKYAKVKSVLQSVGTKSAKKHLRKISGKERRFKKDTNHCISKKIVQTAKDTNRAIALEDLSGIRESVTVSKAVRESIGKWAFLELRNFIEYKAKLLGVPVIPIDPRNTSRECSVCGYIDKKNRKNQASFVCLECGHTENADFNAAKNIASRAVVNQPIVFCLGN

SEQ ID NO: 20750 - protein, 330 aa, unknown
  TnpB Polypeptide
VETYTLGYKFRIYPNKTQARLINRTLGCVRFVFNHFLAVRCDEWKANHHSLTYVKTCQLLTNLKKREDTSWLSEADSMALQESLRNLDRAYENFFQKRAGYPRFKSKHSRSQSYRTRNQGNGIRIEGNRIKLPKVGLVKIKQSRTFEGRILNATVSRADSGTYFVSLCVEMDKTALLHPNGGRQIGIDVGLKAFYSDSDGNTVASPRPLKSLQRKLRREQRRLSRKMPKSRNREKARICVARLHERIANIRKDFLHKLSTRLARENQTVAVEHLNIKGMLRNHRLAKSISDVSWSEFFLQLAYKTELHGGELLKVDTFYPSSQTCSLCGY

SEQ ID NO: 20751 - protein, 171 aa, unknown
  TnpB Polypeptide
MHWYRKSEERLAKEQRKLSHCKKGSNRYFKQKARVSKLSRTVANQRLDFCHKLSRKIASSYDAVCVEDIDLSAMAQTLKFGKAVSDNGFGMFRTFLQYKLAEQGKYYIVIDKWYPSTKTCRHCGSKNPDVQLGQMEWVCPHCGAVIDRDLNAAINIRNEGLRTFYAERIPA

SEQ ID NO: 20752 - protein, 372 aa, unknown
  TnpB Polypeptide
MQNMEQAFRYRVFPTVEQENLLRRTMGCVRLVYNRALAARTEAWYERQQKVDYLQTSALLTEWKKQEDLVFLNDVSCVPLQQGLRHLQKAFINFFAKRAKYPRFKKKRSGGSAEFTRSAFRWKDGQVWLAKCTEALPIRWSRPLPDGCVPSTITVKLDASGRWFVSLLVDNPSIKPLSPIDKAIGIDAGITSLIATSDGEKTANPKHFNRKYKRLRQAQKTLSRRLMGSQNREKARRDVARIQATISDARKDFLHKLTTQLVCENQTIAVEDLAVQNMVKNHKLARSISNAAWGELTRQLEYKAKWYGRTLVRIDRWFPSSKRCAKCGHIVDKLPLKIREWVCPNCGIVHDRDLNAARNITCRRACGTQQQC

SEQ ID NO: 20753 - protein, 190 aa, unknown
  TnpB Polypeptide
VKTARAIIQSNDLVAIEDLKVWNMVKNYSLAKSISDAAWSQFRKWLEYFGRVFGVPVIAVPPHFTSQDCSKCGNEVKKTLSTRTHNCPHCGYIQDRDWNAAINILKKALQYWAKNTVGHTEINASGENDHCAVEETQQGKPTRGKRKPKEKSMDIPTLALSFLGEDVNTPGVFERKHDNGKAICRAWPWE

SEQ ID NO: 20754 - protein, 362 aa, unknown
  TnpB Polypeptide
LHEQINVAGLIYNYCVALQRRYYRMFGGYIGKARLQSHLAKLRRHNPAWQRLGSQAMQQIVERVDNAYRRFFKWAKTRQGPRCSPPRFKKVRKYPSFTLKQAGWKLLDGNRIKIGNQVYRFVKSRESEGQIKTVTVKRDSLGKLYVCFSLVQEQTQPKEAATGEIGGFDFGLKTFLVDHEGNQYLSPEFLKAELANLRQTSRKLSSKQRGSNNRRKAGVDLARKHERVKNKRRDAHFKLAHRLLDQFDMLVFEDLNLKAMQRLWGRKVSDLGFADFVSILDHLATKRGKRIVKLDRFEPTSQVCSGCGQRQPMPLRERTYRCGSCGLVLDRDHNAARNIFRVGASTLGLEGVRLPSVGAALA

SEQ ID NO: 20755 - protein, 388 aa, unknown
  TnpB Polypeptide
MIIEYREDVTNSEGGVHQMQKIMGCKGRLYPTAEQAQQINQTVGCCRYIYNHMLSRNQRAYYRRGEHLSYISMQNLLPGMKKYLPWLCDADSQALKYACRQLNDAYNRFFKGLGEKPKFKSKKSSDGQGYTTTKGASIHVLDDAVKLPLLGIVQCKGLRKLEGKISKATIRETSSGKYFVSILYTVEADDPEPVNDKVGLDVGIKEFAIDSNGNHYENPKYLAKSLKKLRREQRRLSRKAIGSKNREKQRVKVARVHEHITNQRADHHHKLSRKLVDENQIIGVEDLNIKGMVRNHRLARSIADAGWGEFLRMLEYKAIWNERTVVRIPTFYPSNQTCSHCGYKNQEVKNLSVREWTCPICGAKHQRDENAARNILTEALRILTKQAA

SEQ ID NO: 20756 - protein, 454 aa, Halobacteriales sp.
MNDDRLDILRLRRIDRLLYSVFITGCEAKIQMRVVRTFEATIANPRQVSDGLDQIGHAASKLWNVGRYYAGEQWDETGEIPDDGELKSELKGHERYTDLHSQPSQRVLEELAEAFNGWFGKRRNGDDRARPPGYRKRGDAHPRSSVSFKAAGFKHDAQFQRVRLSKGRNLKEHRSDFVLCEFELRPDVDLSEWSVQQVQAVYKYSEWRLHFVCRDTIDPEPSGDDTAGIDLGICNVVSLSFGGESILFPGNVLKEDEYYFSKEKAKCDDARSRKRLRIDQKRTERRKHFLHTLTKHIVAECSERGVGTIAVGDLGGIRDDENSDSRNWGKYGNLDLHGWAFDRFVQMLTYKAEAEGIDVEPVSERDTSKTCSACGHADDNQRVERGLYVCGKCDMAANADVNGAENIRMKVTPSPLQDRSTGWLAQPVVRLFDRTAGLFRHCSEAATNRNIPTR

SEQ ID NO: 20757 - protein, 566 aa, Streptomyces sp.
VKRAFTYRSHRTHAQAAEPSRTSGCVRRLYNMALQARTEARTLRSERINDNATSAMPTAWKKTGELAYLDDVSSVPLQQALRRLQAAFTNFPGKRAKYPRVKSRKKSRTSAEYTTGAFRFRDGKPTLGKTAEPLDIVRSRPLPEGSSPSAATVSQDAAGRWFVPMLVADPTVKPLPANGHSVGADAGLDHSPTPSTGEKIADPRHERKDRARLARAQRELSRKARGGGANRAKARREVARVHARIADRRRDHPHLLTTRLVRENQAVVIEDPTVRSMRKNRAPSRAICEAAWPEFRRMPEYKAAWYGREVIAVDRWFPSGKLCSACGTPQERVPLNVREWTCDCGTVHDRDVNAARNILAAGLAVSACGTGVRPQRSTPGGRSAMKQETPRREPWEPPPFQEGRKSTPDSSRSGRRGNNRARSRRSTYTATLRRTEVRTGPEGRIGRLGGARSGARTCRATGSATGHTREAPSADRPPTTGSRTSGARQEPAAPARGEDRATPPAARDHPQQAPRHRRQQPSQLTARCVRPTRRSTRRSRRRARRHPTPLPVPYPVPSVAKRFRRS

SEQ ID NO: 20758 - protein, 474 aa, Moorea sp.
LYRTIPVKANFSDEEKVFWEFQCQQSNSLFNCAIYYAKQKHYQWLEDQEAYTTYWRGDELTYGWKTYKCATKYPELDIALKLSPNYKGMAAQSAQQTLKTVGEAIASYNKLVGLYYQGKVDRPKFPRYRKSGGFAAVTFPRQALTYKEGLFFPSVSKESKPELLTQITLDPPDFIDPDWVKEATVRPCYGQLWIDWVIDDGKQSVTNNPNLDYSQALGIDHGGDNWLTCVSTLGKSFIIDGKKLKAMNQGYCRLVAKYKSGKPKKYWDSNLDRIQLKRNNQMRDTINKAARFIVNRCLNDGIGNLVIGWNEGQKNRSNIGKRENQKFVAIPTKRLIERLKQLCSEYGINLIITEESYTSKASFLDGDSLPKHGAKPNGWKPSGKRVRRGLYRAASGKLINADTNGAANILRKVTTQSFDLTKVARGALTLPHRYDLFTSLSRSYRNKGGAVRVHPTAQQTSFENPPCFSRGRCQ

SEQ ID NO: 20759 - protein, 415 aa, unknown
  TnpB Polypeptide
MINIRAVKRLETKLKRQSQRCQVFEIKLDKSNLSKKSLEHLCKIFLEAKWYYNYVISNQNINDAETKMKQVPVKVGENYKTRNLEVLTAQMRQDIKSRTFGSLKALKQLKQNGHKVGWLKFKKRVDSVPLRQLGRTFDLDVEHSRIRIQGLKGWLRVRGLEQITKEKEIANATLVRKSGDFYINVTTFEDRQEQNIPEQAIGIDFGCETQLTLLDGTKIKFQVPVSKRLKKLDRKIDRKQSPAGKKRSYSKKKRQDQIKRQKAYERLTNKKSDIRNKIVSAITKNYKYVVFQDESIHAWHSGNHGKKVQHSGIGAILRDLKNKSVTPMMVDKFFPSTQLCPVCGVKNKMPVHKRVYECECGFKEDRDFKSACCILEEGLKQIPMDRRDFKARENVSSTLFDSISGIKVSKMCSEN

SEQ ID NO: 20760 - protein, 475 aa, Fusobacterium sp.
MANYVLTLALKTELWQEHILEKRLNIARMIYNACLYEILKRHKKMINSFEYKGISNLDKKEQSKRYKELDKKYSISKFELNKYVKPMTQKFKKNIGSQMGQELAERAFATYEKFKYGKAKKAYFKSYENFYSVREKGNITGLRFFKEDCCISWLGLKIPVIIKNNDKYAQSCFLDKLLYCRLLKRVVNGKNKYYVQITFEGTPPKKHKVGGENEIGIDIGTSTIAIVSDNKVELKILAENIEINEKEKTRLQRKLDRQRRANNPNKYNKDGTINIENKEKWKKSKSYVKTKLKLSNLQRKIAEKRKQSHNILANSILEIGTIVKVENMNFKALQRRSKKTEISEKTGKFKKKKRFGKSLSNRAPALLIEIINRKLEYIGKNIIKIDTFKVKASQLNHSTNEYEKKNLSKRWVEILGNRIQRDLYSAFLIKNVKENLEEVNIEKAQKEFKNFVKLHNEEIERIKKGNVKTLKCMGF

SEQ ID NO: 20761 - protein, 276 aa, Fusobacterium sp.
MEKAYKFRFYPTKTQITILNCTFGCVRYVYNHFLDLKQELYNKEKKSISYSECSKELTVLKQEKEWLKDVDKFSLQNSLKDLDKAYKNFFSGSGYPKFKSKKDNRKSYRTNYTNNNIEFLDKWIKVPKLGKLKIRDKIKPQGRIINATITQVPSGKYYISLCCTDVEVEKLESTNKNVGIDLGIKDFAITSDEISIENPKYLQKSLNKLVILQRKLSRKPKGSSNRNKARIKVARLFEKISNQREDFLQKLSTMLIKEYDIICMEDLQVKNMVKKS

SEQ ID NO: 20762 - protein, 542 aa, unknown
  TnpB Polypeptide
MRGKIPSRKDRVETSHDGNKGNSGFITVESLLAFDTDEDKKKVLDLMHKFSSMVRFAYKRLLKKTEEKDLRKLLPIKYGLNARYSNAAIFLAQQALGSCLERKQNPKKLIFGSRALFEQLKKKHLTSTRREKLRQKWEERRYGILYAIGGKASKGNLNLRLVNLKGQWHLRINLGNGEYVWAKVIRASKRKTDKWVGFISDIEHAEKTGDWFPYTVRIKLRNGKIYAQFIKEEKFPEVTITKDNGVIGIDINAYPFHLAIVHTAKDGNIEKYERISLDKLLEGSTEKREYLSWQTVHQVVGIAKREGKALVIENLEKLPKGKRGDGLPKLRQKLQKWVYKGLLQKIEIVARRNGIQVIKVNPAYTSIIGKLKYAPLYNIDKDIAGAYVIARRGLGFKERVPKNYKELLKDAEFLSYTIAKTEDKIAKLKQEIRYEKNEYKRNRLKGNLWKTRKELDLLYKHFRGSGESELATQQTVNRKMERVRGLTHVRQKSWQVLSVALAFSCLESLRDFSPLKRVLISRDWVGVANKASPSHSGQGATT

SEQ ID NO: 20763 - protein, 390 aa, Nitrososphaera sp.
LGPARNYKFRLYPTHQQEQKLVETLDGCRWLYNHFLSKDLSKEDLQFALTELKEHKPWLRNYHSKMLQMVIHKIDSARKALTTLRKKGYKTGKSYYLTHEKYNSFTYNQSGFRIQRHGKTDLLWLSNIGYIAIRLHRPVKNIKQITICRRIDKWYAFVCCELSKPIFKFLNPNKSIGIDVGITKFIHDSDNLAIENPLFLNKIVKPLKRSSRKMARRKKGSQNHKKAKTRLQILHERIRNKRNDFLHKISSYYSKQYDVVFLERLHVLNMVKNSYLARYILDSGWRKFKQLLEYKAKMIVEVEPKNTTINCHRCGNKVPKTLAIRIHKCDVCGLAIDRDYNASMNILQGGLLLLPVVRREFTPVEIECRSKKQENIGFPIDSRVLFKPFQ

SEQ ID NO: 20764 - protein, 277 aa, unknown
  TnpB Polypeptide
LKGRKIQLPRLGRIRIKEKRKSYYKGRILSVTIGKRANKWFVSITVEVEIPDPIPVEGPAVGVDLGVKTLATLSDGTVFPNSRALGKQLRKLRRLSKGLSRKKKGSRNREKTRLRLAKMHLKISNIRQDTLHKVTTYLAKSHSRIVIENLGVSGMLKNRRLARALADVGMYEFRRQLEYKCAWYGSHLIAASRTFPSSKRCSNCGHKKKDFSLSEREYHCELCGMTIDRDLNAALNLVAVSLPETQTACGEDVSLYDSLGITERTSAKQEPNIIPGP

SEQ ID NO: 20765 - protein, 440 aa, unknown
  TnpB Polypeptide
MVLQAYQFALDPTPRKQGSLASHAGAARFAYNWGLELVTTRLDQRKAGQDVQVPWTLPELRREWNRAKHQAAPWWAENSKEAYNSGLDALARALKNWSDSRNGRRKGRPVGFPRRKKKRRARVACRFTTGAIRVLPDRKHVQFPRIGVVKTHESTRKLARRLERGTAHILAATISRTADRWFVSFTVEVERAIPAGNGKLSMVGVDLGVHHLAVLSTGAVISNPRALQHSLRKLRQLNRQLARRTPGSRRRNRTRRRLARVHARAANLRRDALHKLTTRLATEHGTVVVEQLNVAGMVRNRYLARAISDTGMAELRRLLAYKTSWYGSRLVVADPFFPSSKTCSACGWVKAKLTLAERTFTCEACGLILDRDLNAARNLAKLVVSVAQSGWETQHARGADVRPGRAGRTAMKREVGASRALGKTGTADVQASAARLGSAP

SEQ ID NO: 20766 - protein, 377 aa, unknown
  TnpB Polypeptide
MEVKRAYRFRFYPTPEQEMILAKTFGCARFAYNYMLRLRTDAWFKEQKRVGYHETSALLTELKKTPEYAWLNEVSSVPVQQALRHLQTAFNNFFAKRAAYPTFKRKDGPQSAEYTTSAFKWDGRALKLAKMDAPLAIRWSRTIPKAAKVTTVTVSKDAAGRYFVSLLCDDTVSPKPEVTGKVGIDLGLTHFAILSTGEKVAAPNTFRRYEKKLAKLQRRLAKKTNGSNRREKAKLKVARLHAKIADARRDFLHKLSTRLINENQVIAIESLSVSNMQKNRCLSKSISDASWSEFVRQLEYKARWYGRELIGIDRWYPSSKRCSDCGYTMPKMPLSVREWVCPECGSIHDRDINAARNVLTAGLAVSAHREAVSPVCM

SEQ ID NO: 20767 - protein, 391 aa, Alteribacillus sp.
VPLPYNKSSLHSSREEVGEMVVHKAYKFRIYPTKKQEVLIAKTIGCSRFVFNHFLAKWRDTYQETGKGLTYNTCSKQLTQLKKEWIWLKEVDSVAIQSSLKNLADSYTRFFKKENKAPRFKSKKNRVQSYTTKQTNGNIAVMDSKIKLPKLGCITFAKSRNVEGRILRATVRRNPSGKYFVSILVETEVHELPKTHSSVGMDVGIKDVAILSDGTVYKNHKYFRTLEKKLAKAQRILSRRKKGSSNWHKQRIKVARLHEKISNARNDYLHKISTDIVKNHDIIGIEDLQVSNMLKNHKLAKAISDVSWSQFRTMLEYKATWYGKQVVAVEKNFPSSQLCSSCGYKNKDVKHLALREWECPTCHTQHDRDRNASINLRKEALRLTGGTSGIA

SEQ ID NO: 20768 - protein, 408 aa, unknown
  TnpB Polypeptide
MQLSETVKLYPTEYQIELTRNTMSEYISTVNNIVSDYTNKDNGNIESVKEIKNIKSISKLTTADVKAKLPSALCNQCIRDAKSIVKKYDKACKEVEKAKKNKKNKKSKKNKNSKNVKEVEEIKEVKKLKEIKVPVLKKLCCYINNQNFKIQDNYISFPVMIDGKSKRISVKTKMTDKQKLILSSHRLGTMCIVIKNINILVAQFVYEINEIEKVNESNNVMGVDLGIKCPAVSYCTDGSVKFYGNGRKNKYMRRHYANLRKWFQKAKKPTVVKRIKNKEQRIMKDIDHKISREIVNTAKKHKAKVIKLERLENIRSTTRTSCKNNPSLHTWSFYRLAQYIEYKAKLVGIEVEYVDPAYTSQKCPQCGNIHHAKDKKYICKCGYHTHRDLLGAINICNSTEYIGNRCIA

SEQ ID NO: 20769 - protein, 448 aa, unknown
  TnpB Polypeptide
LKIWIEEYSDLQKPEKNDGLRKMNLKKNKAIKEAGKATKLRRQGLSCKVFSCKIDKSHLSKQSSEFLRMSFLEAKWFVNDIIANDKIFTSDYKNKAPIVLKDGKTPEVREIKNLSSQIRQSLAEKLKQDIYNLAKLKKAGYPVGRLKCKKEVKSLPLNQAGVTFKIVDKTHIHIQGNKGLIRVNGLNQIPKDAEIAQATLVHRAGDYFFKVTCFVPRKARVKTGKSVGLDFGVTTSVTTSDGEKFKIAIPESRRLRLLQRGKFVRKLDKTSKNRRKTIDIVAQAYDKACRQKKDIQNKLVSFLTREYDIIVCQDENIKGWKSRYGKAVQCSCMGGIISDLKDKSETHILVDRFFPSTKKCRICGHLQEMHLSDRIFHCDACGHTEDRDIHAAKNNLQEGLRTFSANRVMRNSEHVKSPAELVASTRSARKRFSKPSALKQEAHEFIRG

SEQ ID NO: 20770 - protein, 510 aa, unknown
  TnpB Polypeptide
VRAQTPSFVVSVKLLLPEQIQNHLEKSFHIANSAYNEALGFGLRRFEAMKQNPSYQELLELRRELFAKSEKKQETKEFKTQKKEIDLALAEIRKAYSLTEYSLDAHLGKQRRKSGSVYQHLNSGELQVVAKHAFKTLEKVLFYQIEPHKVRFRSKYDADMSFRNRVNSTGTRLVESDNTGIAYRLYIHKASTFVDIPIKAFNTYQQMSLLRSERIKYVQIIRKTIRGKKVYYLQIVCEGTPPAKANKGEGVVGIDPGISTVAYAASNKVALVDLVPRNITQKEKFLKALDRRIERSRRVNNPTCFNEDGTIKKGSHFKHLSNRALRLVNRRKKAYRSLSEERKKLQGQLINQLVSTASIIKMEELNVKGLQKRAKDIRINPKTNRPFSKKRFGKFIFRAAPSAFREALKTRAVQLGIEVIMISPKEVKPSQYNHILQTFEKKPLSTRIFDLSPEWTGLQRDLYSAFLIGHIENGHYQETTLNQDFPDFYQLMKDFLQQTPKTSRLAWYFS

SEQ ID NO: 20771 - protein, 408 aa, unknown
  TnpB Polypeptide
MKQYRTYTIRLFPNKEQAKQLQELSLARNTLYNILIDIEWQTYGKTKKIKTEYDLDKDITLIRKERVLLTKLNSKASQRVAKEIYSSYKAFFSLIKKDKSAKPPHRLNDVSKLHTIVYNQTGWKFLNNYEIKLNGITLPYKGIPLIEYNTLNVKEVKLKFINGKYLLDLGVETIVKEADILNVNNKVLAIDLGIKNLVNGVDNLGDVVVLPNKAKRINRYFRKQISKVQSKMDKCVKWSNAYKKLKKVKKKLYNRKNSQIKQTLHIQSKRLANMNYKTIVVGDLKIKKLMEKGSNKLTKISRSFSESAIATFMEYLTYKCQAKNTEVISIGEQWTTQQNCLTGKLFKDKISLSERTVRLSDSIVIDRDLNAAINILKRYEQNHLALLTAPLDVSSVVNRYNLLTNTCS

SEQ ID NO: 20772 - protein, 452 aa, unknown
  TnpB Polypeptide
LGDGPGKAGQEGGSDPQRSSLTEEELVKDVRESITVFSGRPLFMYGSRSHRNRKLMEAKVLSSEAMVMLAHQIRLEPNRREEEYFRKACGVARFSWNWGLSEWKKRYESRERVDGLKLKKDFNAIKALEFPWTYEVTKYASQQPFLHLQAAFRRFFEKKGRYPRFKRKGVHDSFYIGGDHLEVNGKKIRIPRLGWVRMREAVRFQGKVVSATVRRIADKWFVSVQVELEEAPTPCESQARVGVDLGVNRLATLSNGETFEGPKPLRKELSKLRRLSRALSRKQKGSQNRLKARVRLQRLHYRIRSIRQDSLHKLTTYLTRNFGVIAIEDLNVRGMLKNRHLSRAISDMGFHEFRRQAEYKAKLRQNHLEVVSRWFGSSKTCSECGTIQQRLELSERTFRCEECGYEADRDFNAAVNLFRTVSSTGSQACGEEGSGFSERWSETVLREAGTWA

SEQ ID NO: 20773 - protein, 402 aa, Salmonella sp.
MKRLQAFKFQLRPDGQQEREMRRFAGACRFVFNRALARQNENHEAGNKYIPYTKMASWLIEWKSVPETQWLKESPSQPLQQALKDLERAYKNFFQKRTSFPRFKKRDQSDSFRYPQGVKLDQEHNRISLPKLGWIRYRNSREVIGEVKNVTVSQSCGKWYVSIQTEYEVSEPQHESTSMVGLDAGVAKLATLSDGTVFEPVNSFKTNQKKLARLQREMSRKVKFSNNWQKQKRKIQRLHSRIANIRRDYLHKVTTTISKNHAMIVIEDLKVKNLSKSATGTLSQPGRNVRSKSGLNRSILDQGWYEMRRQLEYKQFWRGGQVLAVPPAYTSQRCACCGHTAKENRQSQSKFRCQACGYTANADVNGARNILAAGHAVLACGGMVQSGHPMKQEPTEASQASV

SEQ ID NO: 20774 - protein, 372 aa, unknown
  TnpB Polypeptide
MKNIALKFRFYPTDEQAQLLAQTFGCVRFVYNHILRWRTDEYYQNQHKIDYLKASAKLTQIKKLAEFVWLNDVSSVALQQAIRHQQSALKNFFEGRTKYPTFKKKSGNQSATFTQSAFKYTDGKIYIAKSKEPLDIRWSRELPSNPSSITISKDCVGRYFVSCLCEFEPIPLLKNDKTVGVDVGIKHLLVTSDGEKIDNPKYFAKYEKKLVKAQKALSRKQKGSNNRAKARLKVARIHAKIKDCRLDNLHKLSRKIINENQIVCVEALRIKNLVKNPKLAKHIADAGWGEFVRQLEYKADWGDRTLVKIGQFYPSSKRCSNCGYTLNFLTLDTRHWNCPECKTTHDRDINAAKNILTAGLAGIACRENVSLI

SEQ ID NO: 20775 - protein, 404 aa, unknown
  TnpB Polypeptide
MLWGGCVGGLTATLKLKVSPEPSLLFLVNRYVNALRYTVNWIIDNRELRLSRVHKALYKNLKEEYGLPSRIAVDCYREALSIAKSWFKNPRRGRKPIIKTKRVWLTPKLSYRLNLSNMKVHITGVGKVKIIGYPSNIKEYLNWNIREARLIVRENGIFLHVVVKKHINNTKPSLRVIAVDINEHEIVYGFQEHIVRDKTRVKECIRIKKYMERLQRKYSFGKYRAWISRRGILKRIKELGRRIRNITEDFVRKEAKRIIDFTIIHGMDTIVIEDLSNLNKNLKKLRKPWRERLVYMTYRKLLRWIEWEAKKHGLVVVKVNPRGTSTTCPYCNIKMISTGYRKFRCLICGFESDRDTIAVINLIVKHISLEMGVVLTRPTAPQMKDVYPNRCGELMNTLKGIHTF

SEQ ID NO: 20776 - protein, 332 aa, unknown
  TnpB Polypeptide
MLLSHRTSVKIRPEYSNIIGHMCYAASKLWNICNYERHHYKELGLEKYPDWYYQKKTHKGNLWYKQLPSQTAQETCKQLRIYPSENGKCDLIVIYEMEEPEQLSQNGHYLSIDPGLHNLMTCYDSGNGRAFILGRKYLSLERYFHKEIARVQSVWYAQQSERGIKYPKTSEHIQRLYRKKQNTVKDYLHKVTRWIAEYCRKEDIRCVVVGDIRNICKEKDMGHKTNQKLHSLPYNRLYIMLEYKLKRYGIQLIKQEESYTSQCSPLSPEVSKRYAEASNRKERGMYVTDGVRYNADAVGAFNILRKYLSVSGKHKKLSVAGLKNPEIVKVAA

SEQ ID NO: 20777 - protein, 404 aa, unknown
  TnpB Polypeptide
MRNFGILRNGIKKRLQRFIIPNRINWIELIMAKAIITKSFKFRISKPSKIVQERLEQTLYLCRQLYNASLQERRDAYQINRISINYQAQQKQLPEIKLTNPEYKDIHSQVLQNVLKRCERAFDGFFRRIKTKQTAGFPRFKGANRFDSFCYPQSGFSLTGDKLTLSKIGKVKIKLSRSVVGKVKTCTIKKEIDKWFVIFTVETAAEPLPKTGQSVGLDAGLNAFMTLSDGTQIDNFKYYESTQKKLRVAQRSVSRKIKGSNRRRKAVLQLKKIHQKIKNQRNDFQHKVSTYLVEQYDLIAIEKLNILGMSRGILSKQIHDASWSSFFGKLRYKAVNAGRDLKEVSPNFTSQDCSSCGNRVKKDLSIRVHHCLKCGLKICRDWNAAINILALGQSVLTPTQASRL

SEQ ID NO: 20778 - protein, 387 aa, unknown
  TnpB Polypeptide
MMKAFKYRIYPTKQQEVLIAKHIGASRFVYNLALETKQMAYSGSRVNLSRFDISNQIPELKKECPWLKEVNAQSLQKAITHMDSAFNNFFKGHAKFPKFKSKKSSKQSFGIPQNVELNVDSQKLVLPKFKQGISIRLHRPIKGKVKQATISRTPIGKYFASILVETGEVAPNKIAVIEQTAIGIDLGIKSFLIGSDGSKFDNPRHLKKTMSRLKFIQSRYDKFKGKRTKYKLAKLHEEVANKRRDFLHRVSSHLVKNHDSIAIEDLNVSEMMKNHSFAQAISDCGWSIFVEMLEYKAEWQGKNILRIGRFEPSSKMCSSCGHVNKQLQISDREWTCKKCMTHHDRDVNAAKNIKAFALEKHVCGTQTKTCSELPTLVGVLTCEASSI

SEQ ID NO: 20779 - protein, 375 aa, Methylacidiphilales sp.
MKTLKLKLYQHKRNKFLKQAINAAGVIYNHCIALHKRYYRMWNKHLSCAKLQSHIAKLRKHNYFWQTVGSQAVQDICQRIEKAYQLFFERNKQGVRPPNFKKVKKYKSFTLKQAGYKFLGGNRVKIGQKVYQFCKSREIEGKVKTLTIKRTPLGELFMVVVVDNYSVEPENKFKTGKIAGFDFGLKTFLTCSNGTQIESPQFFKQSLNAIRKASKSHSRKLKGSANRERARKNLVRKHEDISHARRDWFWKLAHDLTNKFDVLCFETLNLKGMQRLWGRKISDLAFAEFLKILEWVAKKKGKQVVYVDRWYPSSKTCSHCGHVLESLDLSVREWCCPSCHQVNGRDENAAKNIQTVGASTVRLGDVRQVIPAVAV

SEQ ID NO: 20780 - protein, 379 aa, unknown
  TnpB Polypeptide
MANRAIKYRVYPTTEQSIMFAKTFGCCRKVYNLMLSDKIEGYKTAGKFPAVTPARYKKDYPYLKEVDSLALANKQMDLQEAFRNRFSKSRKKKNGFPKFKSAKHSRKSYTTNNQKGTVAVIDDKYIKLPKVGKVKAVIHRIPDDNWIIKSATVSQESDGKYYISVLFEFDKTVNTYIADKTNAIGLDYASEGLYVDSNGNVGTNHKYYRESHDKLAKAQRRLSRMQGFKKQEEKSNNYIKQLCKVNKIHRHIANQRLDNLHKISTEIANQYDAVCVESLNMRSMSNKGFGNGKATLDNGYGMFLSMLEYKLSDRNKYLVKIDKWYPSSQICHCCGTLHPEMKDLSRRILKCGCGIQISRDQNASINILNEGLRILAEKA

SEQ ID NO: 20781 - protein, 789 aa, unknown
  TnpB Polypeptide
MITAHKIVLDPNPAQENYFARACGTARFAYNWALAEWNRQYKAGERPSEAALRRQLNSLKDDAFPWMREVTKNAPQQAIKNLGTAFKNYFADLKKPKRQRRFRHPQFKKKGKHDSFRADNGADKDHPNAVEVDDKRVKLPVIGWVKMRESLRFVGKIKSAVVSRTADRWFVSLTVEIEHTPPNRENQAVVGVDLGIKALATLSDDTPAVENPKALRRNLKKLKRLSRSLSRKVKGSANRRKAKCKLARLHARIANIRNDVMHKLTTDLVTRFDVIGVEDLNVRGMMANGRLARAVADVGMFEFGRQLVYKAAMTGARVVMADRWFASSKTCSDCGHVQTGLTLSDREWSCVECGVIHDRDRNAAINLMNFAASSAVTACGEMLWGRRRGCGTIVAVDQPMERPMKRDDLSRSLVAFDQASTLVAVVELGLRSWLVAGLVPSLTRQPLKKLRSDPDALLGLLLRWRDQATKAGGRIKRMVVAFEAGRDGFWLARWLRARGIEAHVIHPTSIPVSREHRRAKTDRLDTGLLMRAVLGWLRGEPKHCSMAAIPTIAEEDSRRPNREREKLVGEQTRAINRIKSTLVRFGIRAFKIKLRQASKHLEELRGPEGEPLPPNTMAELRRDLARLQIIRAQITEIERARLERLKRVPCQGTNPMIRMLTKVMGIGIETADVLVHEALTRQLRDQRAVARYGGLTGSPDESGIKRRERGLARAGNARVRRSMIQLAWRWLMYQKTSALAQWYQARTAGAKSGLRKAMIVALARKLLIDLWRYVTIGKVPPGAVLRPAT

SEQ ID NO: 20782 - protein, 285 aa, Bacillaceae sp.
MANKAYKFRLYPTQEQEQLLVKTFGCVRFVYNKMLAERKEAYEQFKDDKEALKKQKFSTPAKYKEEFSWLKEVDSLALANAQLNLQKAYKNFFSGRAEFPKFKNRKARQFYTTNVVNGNIMLLDGYIKLPKWKLVKMKQHREIPSHHIIKSCTISRTKTGKYYVSILIEYEHQPVQKEVKAVVGLDFSMNGLFVDSEKGKTATYPRFYHQALEKLAKEQRILSLRKKGSNRWHKQRLKVAKLHEKIANQRKDFLHKESYKLVKLYDCVVNRRPQHERNVTSTPFR

SEQ ID NO: 20783 - protein, 356 aa, Phormidium sp.
VKSFKTKLDLNNRQRTLMAKHAGVARHAWNWGLATCKETLEAGGKLPSAIDLHKRLVAEVKSQNPWYYEVSKCSPQEALRHLSQAFKRVWQVKGTGFPKFKKKNVKDSFYLEGSIKISGYWVKLPRIGWVKSHEQLPPAHPKNVTVSQQAGDWYIAFKIDFEPQVTPKIRERIGVDVGIKTLATLSDGKTYPNPKAYRQAQKKLAQLQKELCRRQKGGKNREKTKLKLAKAHRRIANIRADHLHKLTTYLAKNHGEVKIEDLNVSGMLKNHKLAGAIADGGFYEFRRQLAYKCQWYGSQLTLIDPWYPSSQICSHCGHRQKMPLDKRQYDCPNCHVSIDRDLNAAINLENAESSTV

SEQ ID NO: 20784 - protein, 409 aa, unknown
  TnpB Polypeptide
MQLRYRFRLHPTPAQRKALAKAFGCARVVYNDGLRLREEAHRAGLPWVSDGDLLRLVTTEAKRTPDRAWLAEVSAVVLQQSVADLHRAYRNYFAALAEMKTERAKGNKQVKLRVHKPRLKRRHYDQAIRFTANSRFRVLSNGRLRLPKVGDLRVRWSRELPSSPSSVTITLDGAGRYYASFVVQIQEAPLPWTPAQVGIDLGLTHFATLSTGEKLTNPLWLRQRQRALRRAQRSLSRRQKGSNNRDKQRRKVARLHARVADARRDFHHQLSARLIRENQAVVAEKLNVAALGRSNLARSIYDAGWSSFVAMLEYKAALSGRRVVRIDQWHPPSQLCSTCGQRNGPKGLGALKVRTWTCLACGTEHDRDVNAALNILAAGRAVAACGPDVRPPAMVAAGLEAGTTLTGAA

SEQ ID NO: 20785 - protein, 342 aa, unknown
  TnpB Polypeptide
MQLTYHYRVKSYGGFLNELSRKVNFVWNYCNDVQRQAVKSHRQWLGEFDFNHLTSGSSKELGLNADSIQAIARQYSQSRTQHKKPWLKWRSRKSLGWVPMKASSLKYRDGDFTFMGHTFRVFLDRPMPTDAKIVYGSSFSQDSQGRWFLNVAVELPTPTSREGDASVGIDLGLKDFATFSDGTKIANPRILSKYARKLAVAQRANKRKQVRKIHQKIKDVRKDFHHKLSNDATKKYNHIFVGDVSSSKLSKTSMAKSILDVGWSSFRSMLRYKSIRNGATCAEVDESFTTQTCHICGRKTGPKGLAGLNKREWVCDCGIVLDRDVNSAINILQRGLQYQALN

SEQ ID NO: 20786 - protein, 385 aa, unknown
  TnpB Polypeptide
MLSTFKFRLYPSEAQARIMEETLETCRRLYNSMLADKKENKTGFYDQNKMLVELKGTDKHLRLIHSQVLQDVVLRLDKALQAFFAGLSRYPRFKRGGCYNSFTYPQSGFKLEGDRIRLSKLGKVRVRLHRKVTGAIKRVTVIRDIDQWFVALLVEETPNGVHSGDGQVGVDLGISNLVALSDGTLVDNPRFLKRSMYRIISLQRGVYRKEKASKNRVKAKLSLAKAWRRVRRQRDDFAHKLSDQLTKENKVIVFENLRIGNMVKNHNLASAIMDSSWGRLRRVTAYKAERRGGRVILVEPRGTSQKCSGCGEAVPKDLSERVHGCPCCGLVMDRDVNAARNILKLGQELAIVEERPLLVQRRRISKFVPVKQEVHGMKPTGFSRG

SEQ ID NO: 20787 - protein, 421 aa, unknown
  TnpB Polypeptide
MKSAFRFRLYPDLSQEARMVRALEATRRLWNDALAHRKRRWENERQATSHGLQARLLTAEREQDVLLGELHSQAGQDVLRRLDRAFKSFFEHRARYPRFKKFRRSGSFTYPQAYNRSVKPDVARRRLFLSKVGNVPVVFHRPLPRDSRLKTCTVVRESDVKWFASLVFEEVVPLQNVRPASRFLATKTPIGVDLGLLSLLATSDGEKTEHPNFLRRAEQRLKRLQRVLSRKQKGSKNRFRARERVASQHSRVRRQRLDFNHKLSAKLVGEHGFIAFEDLRISNMVRNHALAKSIQDASWGQLVRLTEYKAIATGCMVVRVPAEYSTQECVHCGTLNKIALDLRSFECCGCRGLLDRDTNAAQVVLKRGLAIAWLDQCKGRAGHARTQACGDRASAPQSTGGVSQVEEAGTIRPERAGNPRL

SEQ ID NO: 20788 - protein, 386 aa, unknown
  TnpB Polypeptide
VAENLRKTFKEKLRPTPEQERQLERVLWHCRTLYNTALEQRITAWQRYQVSVSRYQQEAELKDLRAEFPEYAAIHAHILQDVLARLDKTYQAFFRRVQRGEKAGFPRFKGRNRFHSFTFKEYGNGARLDNGVLVLSRIGRISVHWSRPIAGTPKTVTIMREADDWYVAFSCAEVPSQPVPLTGQETGIDLGLESFATLADGSQVANPRIFRVAELNLKRAQRRVSRRKKGSTRRRKAVKLLAKAHQRVRRTRADFHHKTALALVRQYDTIYHEDLQTANMMQNHHLAKSISDAGWGQFCALLAAKAAYAGKRAVAVPPAFTSHACSGCGVLVRKGLSVRWHECPECGTSLHRDHNAALNILRLGTEHSGLGQSLQARTQPVGAYVA

SEQ ID NO: 20789 - protein, 541 aa, unknown
  TnpB Polypeptide
MDSVANLRSSTIGNYSTTTNPTLSSNFSGHSLKSFSRNQIGDLTAILGKLLESNRQLLRTQCATTEDLFSKATEDHGVGAIESDTIDVVGGLADLLISRLKFIFLEEGNPFGFSQGEEFRPFNYFTSTSPFCQPQNIFHYFSTFCILSTYLYEVISYNTQLLMKTQDDFDNLKSILDMHKIVFNFASNLQFNESKNSLVVLHSKVYHNIRKQYPNIPSQVVIKAEQECLSSYKTTKSNKHKLKKPIEKKNLSMRLDKRLYSKNKSDKYSIRITSAVGRQSYKFVVYPKLKELLDMYEYADPLIYENGEKLFISFCFDNKPKDKIKQKLALGVDIGIRRSVALSDGRIIIDRKFNGDKRNLRHLKDSLKSKGNKSSHRHLCKLRRKEANKNKNQTHLISNEVLRTKADTIVLENLKGIKKKKHKYQNKRSIGQVPMFELRRVITYKAENQGKTVLLVRPYYTSQTDCVTGNREGERRGCRFYSKNGLIYDADINAAINIAKLSKLPVSQTNYLTYGQARVNVPIVCKSSASREVLQAPTALA

SEQ ID NO: 20790 - protein, 384 aa, unknown
  TnpB Polypeptide
VITYNTELLTDDQEDLDSLKSILENHRVVFNIASKEQFNEKKNSIVILHSKVYHPTRKQFPDINSQVIIKAEQECLAAYRSAKSNKHKIKKPIEKKNLSIRLDKRLYSFPTNKSIKITTSSGKKHFKFKLYPKLVELLNKYKYADPLLYVNDNKIYISLPFDNKIEKQKSKLALGVDLGMRRVAACSDGRIIIDRKFNGDKRKLRHLKDSLKSESTKSARTHLRKLRHKEANKNKNQTHCVANEILKTNCDTIVLENLKGIKAKKHKFQNKRAISQVPLFELRRILTYKAENMGKSVILVSPAYTSQIDSFSGIKEGVRRGCRFYALSGIVYDADLNASRNIGNRSKLPVSYGNILDGQATVNSPIVCKSSAKAGVLQAPTALA

SEQ ID NO: 20791 - protein, 388 aa, Desulfovirgula sp.
MAAERDGDGRAHRAAFLFFGGPGEEVSAVEQAVTLKLKLHEPTKAKREMYQLMADRVTEFANRYLSLPKKERPRTSKEAAGISDSLPAAVLNQAIRDIRAKKKAKRFKRLWPTFNNQNFRVEREFSRDGRAVWKVSFPALEKRVGVPVAVAPYQERYLNLLLEGRARQGVARLVRRGGDWYVHLSLAVATGRRQGPEKVMGVDLGMVDLLVASVEGRTLFFSGGELAYVRRRYARLRRKLQKAGANRALKRLGDKEHRWVTDVNHKVSRRLVEFAVAHGVTKIRMEDLTGARWVFPQGREQRKDHGRSLQYWPYYQLQKFIEYKAALVGIEVEYVRPDLTSLTCSRCGETVKSRPKGRWFRCPRCGREKHVDVNAADNIAQAVSGLAT

SEQ ID NO: 20792 - protein, 405 aa, Desertifilum sp.
MEKAYSYRFYPTQEQESLLRRTLGCVRLVYNRALAERTAAWYERQQPIGYAQTSSMLTQWKKQDDLQFLNEVSCVPLQQGLRHLQTAFKNFFDGRAKYPNFKKKRNGGSAEFTKSAFKWKQGKVFLAKCLKPLNIRWSRQLPEGAEPSSVTIRLNSAQQWYISLRFVDPRDLTLKPVNQAVGLDAGITSLVTLSTGEKVANPKHFNKRYQQLRQAQKALSRKQKGSRNREKARLKVARIQAGIANSRKDHLHKLTTRLIRENQTIAVESLVVKNMVKNHKLARAISDAGWGEMVRQLEYKAKWYGRDLVKIDRWFPSSKCCGNCGHVVERLPLSVREWDCPKCGTHHDRDVNAAGNILRQCGLGAYPSRTTAVAVGHTVSVCGATVRPEESKSWKAGAKKQKPKS

SEQ ID NO: 20793 - protein, 283 aa, Salmonella sp.
LLTLKARFPAFKRKHGRQSSCHCVGIKVLDSAIKIPKISPIEARLHREIKGTLKSITLSRSATGKYYASLLCDDGMEAPAKPALISNVTGMDMGLAHFAINKIANPRHLINSSRNLRRKQKALSCKKKGSANRKKARIRLAALHERVANARADFQHKLSRAIVDENQAVIVETLKAANMIKNHNLARAIGDAGWHGFNTKLEYKAAEKGVHLVKLDQWFASSKTCHCCGHKMPAMPLNKRIWQCPECGVEHDRDINAAINIERKGILELQAAGLVVSAHWRPA

SEQ ID NO: 20794 - protein, 383 aa, Halomonas sp.
MPSVVMLKAVKVRIYPTAEQADWLNRQFGSVRFVYNAGLRIMSHRYKRHGQSLNARHDIKKLLPVAKKSRKYGWLTESDSIALQQACLHLDQAFQRFFDPKQKAGYPRFKSKRGRQSSYHCVGVNSGDNWIRVPKIKAIKARIHRPMDGKLKSITLSRTVTGKHYAALLFETEQAAPAPLKAVDAAGVVGLDMGLSHLAIDSNGHKIANPRFLKQAQRNLKRKQQALSRKQKGSANRAKARLLVARAHERVVNARKDFQHKLSRQIVDDNQAVIVETLKVKNMMKNARLARHIGDASWHALIEKLAYKAEEKGKHLVKLDQWFPGSKTCHVCQHKSDTMLLNIRSWACPACHTRHDRDINAALNIKHQGIVQLKTAGLSVSAH

SEQ ID NO: 20795 - protein, 308 aa, Anoxybacillus sp.
VKAMLVHKAYKFRIYPTKQQEILIAKTFGCARFVFNHFLAEWERAYRTTGKGLTYKLCSSQLTNLRKQFVWLKEVDSIALQTSLKHLSDAYTRFFQKQNNKPRFKSKKNKVQSYTTKYTNGNIAVVGHRIKLPKLDLVRFAKSREVEGRILSATIRRNASGKYFVSIVVEIDVQPLPKTNRAIGIDLGVKHFAILSDGTTYANPKFLRKLEEKLAKAQRILSRRQIGSSNWHKQRIKVARLHEKITNSRNDYLHKLSTEIVKNHDIIGIEDLQVSNMMKNHNLAKAIADVSWSTFTVEASIEQLQSQV

SEQ ID NO: 20796 - protein, 150 aa, Escherichia sp.
LRHQQAAFANFFAGRVAYPAFKSKRHKQVAEFTASAFKHRDGELYIAKSKSPLDVRWSRELPSAPSTVTISRDSAGRYFVSCLCEFEPVSMPVTAKTVGIDVGLKDLFVTDTGFKTDNPRHTAKYAKRLTLLQRRLSRKQKAQETVLKPA

SEQ ID NO: 20797 - protein, 131 aa, Methanosarcinaceae sp.
MGKISKQRNELQHKVSSKLISENQAVALETFNVCGMLKNHCLAQAIADASWSYFISKLKYKSKWYGKTILRIDQFERSTKRCNICIYHNGKSTLTDRGWQCPDCKTNNYRDINVVINIKTFALYKQNLIGI

SEQ ID NO: 20798 - protein, 372 aa, unknown
  TnpB Polypeptide
MQRAHKIRIYPTKEQETQLYKTAGTTRYVYNWALDQWKSMYDAFDKGLSTEKPSAFKLSAKWTRERPDWSHETFRGCQTRAIADVGTAFQNLWKGHASYPKFHKKGRKDSFYVDNAHAHIEGSRISLPRVGKVRLAEPLRYTGKIMSYVVSTYAGEWFVSVQVETNVDARPRCEAPNSAVGIDVGLSHIAVASDGTVLDMPKSLHRLDEHLKALQRKLSKKAKRSRNRSKALRRKQKVQRRIDNIRQDAVHKFTNTITKNHGIVVTEDLNIHGMVEKGSKSLRRSLAHSLMGEVIRQVSYKAQKHIMVDRFFPSSKRCSNCGFVKASLELSERTYKCEACGLVIDRDFNASLNLMQAGKVIPGVPVEASPRG

SEQ ID NO: 20799 - protein, 258 aa, Synechococcus sp.
VEGETLRLTKVGSIPITWSRDLPATPSSVTIIKDGAGRRFASFAVQVERPPLESNGRAVGIDLGGAALTVTSDGEKIVPPQLLRSAGKRLQRVQPSLSRKVRGANNRFKDRFRLAEARAKVSDSRLDVLHKLSTRLIRKTPTVVLEDLNVAGMMQNRKQARSMAAGWRMLRTLLEYKADLYGPAWKGISRWEPTSQAGSTCGHSDGKKPFRVRAAWNIRAAGLAERLNACGAEGLTGLSASGSKAATHLNQGVQPCTA

SEQ ID NO: 20800 - protein, 371 aa, Planomicrobium sp.
MPTIAAKILIYTNENEAEYLMMTAKAYQRACNFLSEKVFISKELNQVTVNNLYYKDLRNLFSLKSQMAQSVMKTVISRYKAAKSNGHNWSLIRFKRPQYDLVWNRDYSLNKNLFSVNTLDGRIKLRFEKKGMGHFFQDDWKFGTAKLVFRQKKWFLHIPMTKEIPDLALSEIHHVVGIDLGINFLATSYDSKGKTTFHTGRKMKHKRGQYKVLRKQLQLRHTPSARKRLKQIGSRENRYVTDINHQVTKALVEQHPKGTLFVIEDLSRVRQSTERVHVRNRYVSVSWAFYQFRKMLEYKALLNGQKVVSVDPKYTSQTCPKCGHIKKANLNKKNHTFCCQNCQYRSNDDRIGAMNLYRKGIEFLDTVTAKV

SEQ ID NO: 20801 - protein, 307 aa, unknown
  TnpB Polypeptide
  misc_feature (241)..(297): Xaa can be any naturally occurring amino acid
MVYKSYKFRLKPNKEQETLILKTIGSGRFVFNHFLDLWNSEYQKTGKGLSYSKCSALLPQLKIELSWLKEVDSIALQSSVRFLDDSFKNFFKKLSGYPNFKSKKYSKQSYTTKFTNDNIAVFESYIKLPKLGLVKFAKSREVEGKIVKAIVKRKSTGKYYVSVVCEVEIEPFEKTNQSVGIDLGIADFAILSTGEKIDNLHFSKEMAQKLAREQRKLSKRTLLAKEKGVRLADAKNYQKQXXXXXXXXXXXXXXXXXXXXXXXXXXXXXXXXXXXXXXXXXXXXXXXXXXXXXXXXXCFLGQICLDA

SEQ ID NO: 20802 - protein, 240 aa, unknown
  TnpB Polypeptide
MTALDIGANNLVACTTTTGEQYLYHGLELFDRFRATTREIARLQSKLEGGRYSSKRIRRLYRKRTRRRDHAQEALCRDLLDRLYEDGVDTVYIGGLTDVLDTHWSVETNAKTHNFWAFKQFTERLACTAEEYGISVEIRSEAWTSQECPQCGSTDRTTWHQDTLTCECGFEGHADLTASETFLERHTEKPVRPMARPVRFKWDDHTWSEIPHSPERASPNEQRTNPSTVNGDGNVASGES

SEQ ID NO: 20803 - protein, 324 aa, Enterococcus sp.
VLKLTTHTWLKEVGSNVMKQAVKDADLALKRWLKGISGKPKFKSKHRCKDSFYVNYESMKRTKDGFRGEKIGNVKTCSALPKIKKGEHYSNPRISFDGKNWYLSVGYEKEFEKAELTDESLGIDLGVKNLAITSNGKVYKNINKTKEVKRLEKKLKREQRKLSRKIERNIAGYTKNRKPIYKKPLKEIKNIGKQKEIIKSLHKRLSDIRKNHLHQTTSDIVKTKPYRIVMEDLNVKGMMKNQYLAKSIASQCFYEFKRQMKYKCERLGISFVEVDRWYPSSKTCSHCGKIKKNLKLSDRVFRCECGFTLDRDLNASINLANYQI

SEQ ID NO: 20804 - protein, 497 aa, unknown
  TnpB Polypeptide
MITIKLPYQSSKNNKEIIMKLMKQQNSCMHHIFNKIKDSENSLDQKDLTVLVNSMNNINEIDSWFKQSAVFIASSKYGVLKENTKQIEKYNKENPSNKKKVPNSILFGGKKLFIDRVLKKIKKKDFKLMRLDPLISVGEACKEGNRKYLFDVIENNLIMFYPDRHTEIEIRLPKLRKNYKRDLYKIQNLVENKKMPVQIGIDLSHVYISYDEDNLKENVCCPIYKRFMAIDMNPNEIGYSIVDWIDENNFNIVFTGILSIREINDEQFKLRVPSNDPRNIYLNNKREYEIFEISKEFVEIAKYYQVSAFGLENLDLYSKDYTKGNKNNRLINNFWAYNRFSKNLIKRLVINGIKYYEVPAAYSSFIGNLVHSNYPDAVAASIEINRRVYLSFIGDASTKVRVKFHGLKKNKIKTRPKKIAIFPEFKGVKDALIHTLEVMNLRPLKSLTDSDSWKDLYSKVKNFKLRYRVSLDLFKFEVFSLGNRKSLVQSMGCFSII

SEQ ID NO: 20805 - protein, 370 aa, unknown
  TnpB Polypeptide
MRLIRSSKCSLKFATASKLSELKRVLAEYGRVCNIFIEYFWKNGTPSKSELLKDIVDLPQDTWLTARLRKVAAREAIDMIIAVRERWKDKPWKISMPVHKGKRAYVSCTIADLQEKETKEFDAWLHLQSIGDGTILYFPIKFHKHFNKLAIQGKRLNSYILTEKYVQLSFEIDAGEKKKGVNVIGIDTGIKALASLNNGTQLGLDTEACIERIKRCEHGSNGQKQARRAFKQRIDEVVKDIAKHFEQIDLVVVEKLKNMNYKSKLKRRLSKNMRRSIGTWAYRYWLKRLEQACETNRVSFRTVAPFYTSQTCPSCGHTDRGNRVGQVFRCLGCGHTGNADVVGARNILTRFLTGLYGARYKPYEAMFSFS

SEQ ID NO: 20806 - protein, 204 aa, Arthrospira sp.
MYKAYKYRIYPTDEQKVSLAKAFGCCRWFGNFALSLCQQTYIEEDFLHKLSRQIVNENQVIAVENLNVKGIIPNHKIAQAISDVRWGIFTKMLKYKAEWEGKTYIKVDRFFASSKTCNVCLHQVDSLPLDIRSWTCQHCGTHHDRDVNAAINIKHEALRILRLCSVQVLSLVTSDTAWIGNVRQPGQTAVLLDAVPVESGSPML

SEQ ID NO: 20807 - protein, 424 aa, Halobellus sp.
MDDKTLVKTLDFQLDVQSDNEGLLYDATLEARRVYNETIRLAKEGVDWDSISRHLEDDADLVKNTVQRIVAKALGAMENYLEYDDFGRPSHTKDDPYPLRANYEEGYTLSLTDDSDVAFRISAKPYKHVRGVLKGSDAHLDLLKTALTCDEWKVTTSETLWRDGNPELHINIRNTERTVRDKQDSRTVVGMDVNEDNVALTALSKDGVEDTLVIDFPEIKFERHRYFTVRKRVQNAGKESIHDTLEGREERFVRDCLHKVSRQIVKWSQQFERPCIVFEDLKELRDSIDYGTQMNRRLHHLPFRALQFYTSYKASFEGVPTAWIDPAYTSQRCPMCGHTERANRNKKRFKCRGCEHQDHSDRGASVNIAVKGVKKHQDWNVPALNSLPVVRKVRRQASGAVDAPTVTHPTVRGSLADGRSGVSN

SEQ ID NO: 20808 - protein, 379 aa, unknown
  TnpB Polypeptide
MAGPSNTRRRYLATKTKYTCRLKTQSRPWRISLSAVIGQVDRSLVRLVKAYRFRLEPTPTVAREMGRVAGCCRFVFNPRFKKKGRHDAFRYPDPKQFAVDDGHGRVKLPKLGWVRYRKSRSVSGTPKQLTISRQGGHWFVSIQTEQEVATPIHPANSGGGLDVGVAKFVALSTGDTFAPVSSFRKYEKKLAREQRKLARKVKYSQNWRKQKARIAKLHEKIARIRNDFLHKTSTTISKTHAMIVLEDLSVRSMSRSARGTVNDPRRNVRAKAGLNKSILDQGWAQFRRQLEYKQVWRGGIVVAVDPRNTSRTCPCCGHVSAENRKTQALFRCVRGGHAADADVNAAHNILAAGHAVIACGKRMQSGPSMKQEPSVSQAA

SEQ ID NO: 20809 - protein, 403 aa, unknown
  TnpB Polypeptide
MFQSRKVKLKPIKAQAEFFRKNFGAARFIYNWGLEQLIKHWEENKDKEKKDRAKRPTSYDLCKELNRLKNTDEQYAWLKDVDSHAINYSLANLNEAFKRCFTGVSKYPKFKSKRDSRQSYSTKNGKALPRLKDSNHILLPKIGSVKFYNRNYLPEVEYKRATISTDGDYFYCSVLLEGEPKELPEPLHESVGIDLGVKTAVTTSHGTTFHLKRNHRLERRLKRAQRIVSRRKKDSRRRLKARKRLRNLYRKISNQRNDFINKTTSTLVSENQVIRMEDLNTKGMMKNHCLAASIAHASFFEIKRQLSYKCEWYGRSLQLVSRFYPSSQLCSHCGARNKEMKNLNKRTFTCPECGFTLDRDLNAAININNFCTRREWETGIKANDRRDSSSAKRRYSLSSVANR

SEQ ID NO: 20810 - protein, 341 aa, Thermoprotei sp.
MVRKVRKEYVAVNGRLLIADNIAKSKLLYTMRLFRDTIKMAHYLMRKELAWEDIEKRLTSLISNAHYGHSAYQRAKLWKDRPYLKLRKKFLFSVGKSAEKGNRNIRLIPSDNYFIVKIKIPHADGRHEWIECKAIFGKRYIPLLKELSKGNVSYGVEIGEDYKIHVHVPLELYARYLGKNISRRGKSLHIAGFDLNADRINMVIINSSGELLDFKVKHFPEVTQHGFPKERAKDIRLKALSELIDYACYHNVEYFVFEKLGRRRRKKTSNRNINRKLSKFPKKQLLTHAKVMVAKRGKKFCEENPAFSSQDAELIAKKLRLDTHTTSAYILAYRYLKSINT

SEQ ID NO: 20811 - protein, 364 aa, unknown
  TnpB Polypeptide
MKLTFSAKLTGNSGKINELDQIYAQVQSLSYFMFHNIDWSINENNKFSKEIYAQLRVKFPTINSKLIQKSMKEYGKFGKAKLPKKPVNLPLIFDNQNFNVKFRDGYYDLFIKFLKLRLPVEGLRTIEQLKDKKIQQISIKKFEDSPDYRIYFVCEVEEPRKRDSGTILGLDLNVKSQVLSDGKFFHTKEFAHRKDEYRKNKGKQNIENFTRNYIHKTTNKIVDHLISQDVKVLRLEKLKHLRRAHVKEYGKENKNYKVNNCFPYHMMRTFFEYKCAKVGIDIENINPAHTSDTCYKCGSSHTIRFPREILSCLNSECLNVINADLNGARNIAVGKPIAMGQRLTHPSSTISDVAKTIVFATSQA

SEQ ID NO: 20812 - protein, 419 aa, Clostridium sp.
MDWGILYYKYFIDEVGETMINKNKGYKFRLKPNKEQSIYLERAFGCSRKMYNTYVDILYTQLEKQNFINGKIVYKTIKLPTPATIKKDYDYMKEIDSLAFANVQLDFRDAIKKYNNESDGKTYTKKAKKQVKTLGRELTFKDLKGMPNFKSKNKNQNSFSTNNQNGTVAIIDDNSVKIPKLKEAIKFVNHRQLPQNSIIKGATISKDCKNHYNISILIEYYVEERQTPSNNILGLDYSQHDFYVDSEGRKANYPKYYRKSEEKLKKQQRKLSKKILKSNNWIRQKKKISKIQNKISNQRLDWLHKISYRLSENYDVVVVEDINLRAMAQTLKLAKNLNDNGFGMFRNFLKYKLEDSGKQFIKIDKWYPSSKICSNCGNIKENLQLSDRIYKCECCDIIIDRDYNASLNIKEVGSTLIAW

SEQ ID NO: 20813 - protein, 326 aa, Oscillatoria sp.
MLVLEAKLEGLKEQYGKLDEAIRTARFVRNSCLRYWMDNRDIGRYDLSAYCAVLAKEFAWAGQLNSQARQASAEKAWSAIARFFNNCKKNKPGKKGYPKFKKEQTHGSVEYKATGWKLSEDRRYITFTDGFGAGIFKMWGSRDLHFYQLKQIKRVRVVHRADGYYVQFCINQERLEKKEPTFKTIGLDVGLTNFYADSNGQTVENPKHLRKSEKLLKRLSRRLSKTQKGSKNRAKFRNRLARKCLKVSTIQRKDFAVKLARCVVQSNDLVAYEDLRVRNMIKNRHLAKSISDAAGTTFRTWTASEIYAIATPNQRSTRSTVLAQSA

SEQ ID NO: 20814 - protein, 390 aa, Oscillatoria sp.
MDKAYRYRFYPTTEQESLLRRTMGCVRLVYNKALAARTQSWYERHERIDYVQTSSMLTNWKQQEELDFLNEVSCVPLQQGLRHLQKAFTNFFAGRAQYPKFKKKHHGGSAEFTKSAFRWKDGQVFLAKCSVPLPIRWSRQIPTGCTPSTITVKLTPSGRWYISLLVDDPTIKPLPKTDKQIGLDFGVTSLIATSDGDKIANPKHFKRLYKKLKRLQKALSRKQKGSNNRYKARLKVAKVHAQITDARTDFLHKLTTQLVRENQTIVVEDLAIKNMVKNHKLANAISDASWGELTRQLAYKCQWYGRELVKIDRYFPSSKRCGNCGHIVDKMPLNVREWECPECGTQHDRDINASKNILAAGLAVSVCGATVRPERSKSVKAGAMKQKPRS

SEQ ID NO: 20815 - protein, 341 aa, Natronorubrum sp.
VDDYLRRTAITRLRVSDEQSDLLEATISDWQHGATLASQIGWRENEDSKYGLQQLAYDNVREETRLGSQHAILATHQAASALTGVNELKDKGRKVSCPEFTSPTIKYDANTLTLFDDNTVSLTTVESRVRCELVLPEDEDGYQYQFLSDDEWSVTESTLTARDGEYFLHLGFRKPNPFDEQASPAEDRTVLGVDLGIENLAVTSTAHFESGKKLVHDHDQFEQVRGDLNTGTVSTSNHRWSRKPRRTLLADKLHRVSNEIIDEAVEHECSHIVFEDLAYIRDRMPTRKVPPVGAPKAHLVRDVQSGSTRYSYRVCGCVVHESAVFGVRSHKSWESNVTGSL

SEQ ID NO: 20816 - protein, 261 aa, Natronorubrum sp.
VTTTATKTLEATLAPPTTGKEQRLERTVATYRRALSDAFESGADTQTAVNDIVTGYTLTSYAKDALKNYVPQLRRTYNASELEDDHPVRFTNRGFRIDHSDERTHEFCWRVPQAGRGNAFWIPLRINPEQESLWFDLLNEDILVGEFRLQQYRTSWVLHVTVEYEVADPETPGDPTRIGFDIGESKLLTGCACQNDTPTRPYIYDGGRARALRKEMHTTLKRLQKRDAEQWRVDERFDHYQNALTDIVEKPSSMPSPLTIQ

SEQ ID NO: 20817 - protein, 761 aa, Natronorubrum sp.
VTSVPTLCRNRGSNRFTWWAPQPGRGSNFWIPLRINPAQEGLWHDLVHGDASAGQLRLQRHRTSWTLHVTVEFPIEEPDYEPTDDDVTPIGFDIGEAHLLAGTAREQGTPTDPLLINGGRARHLRKEMFTTLKRLQERDAAEWRIDKRFDHYQNALTDIIEKASRRAVEYACRFEKPVLVLEDLLYIREDLDYGEWMNRRLHAWAFARLQQRIEDKAREAGLPVKYVRPEYTSQTCPECGHVGHRNGDEFRCQNDECWVSEYHADINAAVNIADRYDPWGESLPLKPGAMTFHGMGAPVTAPRPTERRARTPRNDPLSLPRVGTLCQQQRHLAGIPMPGSRAIYGAEDVTDIYSRKTLFISLILMTMQAAITRVVVVCFLLMTASLAAAPAASSGYNLEVTTSVSTPQETVEIEGDQFTIDGIGVVEPGDPIEIDVTSSKDYRVTLYNTDGDGEYRSDLIDADNDRITIGTQDDDLDTSNLEGTYMLTLEPRGEGRQAVYPVVVQAFDFHLEYPSMATQGETVEFSTTIDSSDTSMVESVEVALWNEAAGDATEITLDSQGDGSYSTTVDLDSYDKGEYTIYGAALSDDEAEGYPAPIAIQGGETMTVSEDDSSDDDNDKKSDDDDKMDTDEEVNESDESENKTDSEDSEPDMPGNETDNGNGVSDMPGNETDSEEGEPDMPGNETTPDLEDTSENETEEHGDDEEGGNETGVINPNEESDNETGDQDEDAVGTPGVVFLAVFLLLGLLAFGSHVREGEQD

SEQ ID NO: 20818 - protein, 212 aa, Natronorubrum sp.
LVRTETTRDDSAGDGVAGIDLGITNIATVAFPDEYVLYPGNSLKQDKHYFTRTEYDTEGENGPSEMSVWARRKLADRETHFFHVLTDAIITECVERGVGMLAVSWPENVRESDWGKTGNKKLHSWAFDRIYQYLEYKGEIRGVEVLKENEWDTSKTCSACGDDTKPNRVERGLYVCSSCELVANADCNGAENMQQKLTSSCACSAYNSESSR

SEQ ID NO: 20819 - protein, 420 aa, Natronorubrum sp.
MDYSARFRLLPTTEQRELLGWQRNTVRQVYNHALHRLNQLPEQPDKTVRQRVWHVRDELPTWKDKWPEWSNVYSTVLQAAVERIYHSITGLAQQRDNGHKIGELNWKKPREFQSFTYRQRGFELDRKSGRDGRGRLILKKVRGETIEIPIRLHRDLPDDAEVKHVSVKQEATGAWYASFNIEHKNPEKPDVEDIDPADAVGLDLGVLNFIHDSDGRSIDRLDLSDDRERLEREQRSLSRKEYESKNWERQRRRVAEVHIDMWNKKRDFKHKLAHFYTREYDAVFVEDLDVRGMLENGGNARNKAEVGWRDFIRVLKHHGRKHGCHVVEVEPAGTTKECSRCGAETVKPLWVREHSCPSCGLELDRDWNAALNVFSRGLEDIGVVHSEATTPVETATAVDTYSVSASRVVEAGSPCLKEAA

SEQ ID NO: 20820 - protein, 247 aa, Natronorubrum sp.
MKQTAEKTVVAKILTDDLTQSKLDAINHEYLPSRNTEFYGREIRRIRRHHHDLRTRLQEKGAYDTLQSVKAKEYRRVNDRLHKISRALVEEAKERNALIVVGNLEGIQNQDLGAKMNRRLHSMPHHTLKKYIEYKATFAGIAVKSVNEYMTSQTCWRCGEQEATTRKGQGQHLCHECGLDDNADKNGATNIAKKGLGKDIACPLSSLGAVCEPALEPSGADRASATVRLRADLEVPASTKRAVRRAK

SEQ ID NO: 20821 - protein, 444 aa, Natronorubrum sp.
MEYSPRYRLFPTTEQWESLDWTRNIVRQLYNHALYEFNKIPQDEGTLRQRVWHVRDELPRLKQQWTDLKQIYSTVLQKAVERIRTNINNLGKLKAKGYDVGSLNWKAPREFRSFTYRQSGFELDTKSGSNNRAILRLKKVRGETLEIPIHLHRDLPDHDALKEVTVKKEPTGAWYASFCISTNEPEKPAPEDIDAEDTVGLDLGVLNFVHDSDGRSIGRLDLSDERDRLEREQRSLSRKQHESNNWEKQRLRVAEVHACMSNKKHDYKHKLAHAYTTLSDAVFVENLNVKSMLEGEGNARNKAEVGWRDFISILKHHGRKNGCHVVEVEPSGTTKECASCGVETEKPLWVREHSCPSCGFELDRDWNAALNVKSRGLSKLGVVHSEGTSSESHGDSDGLRKSFDDFRTPVETATAVDTVSVSASRVVETGSPCLKERAAATANE

SEQ ID NO: 20822 - protein, 191 aa, Natronorubrum sp.
FGRKKAKCDDSRSNERLRLDRKRTERRTHFLHTLSKHIVSECVERGVGTIVIGDLGGIRDDDNGESCNWGKHGNLDLHGWAFDRLTSILEYKAEAEGIDVTVESERDTSKTCSACGTKDGNQRVERGLYVCEECDTVANADVNGAENIRRKVTPSPSEDRSNGWLAQPSVHLFDRNEGRFAPREQVVDCKP

SEQ ID NO: 20823 - protein, 300 aa, Natronorubrum sp.
  misc_feature (300)..(300): Xaa can be any naturally occurring amino acid
FTWWAPQPGRGSNFWIPLRINPAQEGLWHDLVHGDASAGQLRLQRHRTSWTLHVTVEFPIEEPDYEPTDDDVTPIGFDIGEAHLLAGTAREQGTPTDPLLINGGRARHLRKEMFTTLKRLQERDAAEWRIDKRFDHYQNALTDIIEKASRRAVEYACRFEKPVLVLEDLLYIREDLDYGEWMNRRLHAWAFARLQQRIEDKAREAGLPVKYVRPEYTSQTCPECGHVGHRNGDEFRCQNDECWVSEYHADINAAVNIADRYDPWGESLPLKPGAMTFHGMGAPVTAPRPTERRARTPRNX

SEQ ID NO: 20824 - protein, 416 aa, Natronorubrum sp.
MAIQVTRTYVGSIQNQRQVCDDLDLLGDSASKIWNVARWTADRIWDEIGEIPDEGTLKAYMKNQACWKDLNAQSSQKVIEELSDAFQSWFDLRHKFDEANPPGYRKHGDTRPKSTVTFKADGFKHDPENNRVRLSKGKNLKENWSDFILCEYQTRPDVDLTEVNSVQNVRTVWNGDEWELHLVCKVELETNDSAGDEVAGIDLGIKNIATVAFPGEYVLYPGNSLKQDKHYFTRVEYDTEGENGPSEKSMWARRKLADRETHFYHTLTDAIITECVERGVGTLAVSWPEDVRESDWGKTGNKKIHTWAFDRIYQYLEYKGEIRGVEVLKENEWDTSKMCSRCGDDTKSNRVERGLYVCSSCELVANADCNGAENMRQKITPSPHGEDRSNGCVAQPSVHLFDRESGTFHTREQVVS

SEQ ID NO: 20825 - protein, 451 aa, Natronorubrum sp.
MDELVETLRFRLHIESGERWRLKQARFDARPIANHTWAMRELGYSKTEIAKQVMPTENDFVKNNAQAVVWKACDAYDAYESALKKWRNSDNRDELPKPQPPSTDSWGAFPLVMNHGEGYELQVRDDNRVGYRISAQPYKEKVRGFLRGAKQDLDRVKHALDSASDLEVGRAEVVYREGVYYLHVPIRHPITIDAAEDAESVIAIDINERNITTTVLDRESRETLAQLAIDYGQVKQKRQRYYDIKRRCQEHGKHSEVHRIGNHVVNFTEWTLHRLSKVIEHYVQWFPNPVVVFESLDGIRNDIDYGSYMNRRLHKLPFQEFERQVTYKVHRHGAPVEHVDSEYNSQRCSMCGEKGSRNGGRFTCKNDTCALKQDHSDRNASVNAAVRWIAKTETGDDSHSSADNYRPRKTPPQVRVRRVGSGRHTTTSCGGVDVNRPTSSHEIASQGVLHS

SEQ ID NO: 20826 - protein, 233 aa, Natronorubrum sp.
MRTHRTFEASITNPRQVSDDLDQLGRAASKLWNVGRYYAQEQWDETGEIPDDGELKSELKGHERYTDLHSQSSQRVLEELAEAFNGWFAKRRNGDSRARPPGYRKRGDSHPRSTVSFKAAGFKHDAQFTRVRLSKGRNLKEHRSDFVLCEYELRPDVDLSEWDIQQVRAVHKYDEWRLHFICRKSIDPEPPGDETAGIDLGISNVAALSFGGESILFPGNALKEDEYYFGRLW

SEQ ID NO: 20827 - protein, 526 aa, unknown
  TnpB Polypeptide
MRTIKRVSLEINSEKFLNIAEIVTAYSREKDYFLQMFSSIEKLDSISKYYEVRNELVRINYNSLNQLQGRAWKLALKDALETHQKYWEAIFEKITPFIHKNLNLNEKQRHYCFWIMKDYEKVKKILIGKRPIPKFDIRSSEIYKASKYLARKISKLKGKSPRVKKARSFVLDANCYTTFTAKNTQYISIMTLLAGKRLVIPLKGVGKISGNIRVILNREEKMVEIHFAKKIKADFVPQITEVEAIDLGISEVFTTSKGLRYGKNLGKLSKTYSEEINNKGKKRNKLHSIQKKQLEKSNNKKVQHIKKCNLGKKKLVESRKKARLTIEREINQSFNEFFEEVKPKVIISENLRHQFKYGVDKKFNRLVSNWVKGTIQDRIEFKAMQRSSLHKQVNAAYGSQSCPNCGFVWKLNRDGDKFKCLFCGHGAKSDAVAAINYLARSGDRSITLWMPHNQVKELLVSKFRRRLECWQFDFSPFQVNWKSMSNLFKDWEALKTQAEIAYCRRTVPGRTLDTAQPRVPNPLGDN

SEQ ID NO: 20828 - protein, 440 aa, unknown
  TnpB Polypeptide
MIRLTRAVTHIRLCDANHAKIAALEALAAAYLRLCQQYTTYFCTEAQPDKYAAPCFDSPLSQRWQRVAIQQAAGIAHSWRSNYAAAYQDYLDLLAEYQEAPDGDPPAWKEWNTPVLNETVIQANANVALLQPAKDSSFDYWLRLSTLEPGQPVLLPVKLAAYHRRALAGKTLNSSTTLTCKPTGWWLTLSYDEQVPVVTLQNAPVLGVDVGIANFITTSTGKQYGTFHGKLAERHKQDRAKRRRKAKLRACLKKKGVKQLPSTRNKKLARHVRQEINRAVNELYRDYPDAQVAYEQLNVAGMRFTARRMNAYLYASNLAHLPEQLAWGAAKRGVRARKVKSAYSSQECQRCHYVAHQNRPTQQTFCCRVCGHTTHADVNAAENLASRFNDHELAACVDRQAIKALLDRRHQAWVQEQEQEQQQQRLAVVQPPAELSRQPA

SEQ ID NO: 20829 - protein, 368 aa, unknown
  TnpB Polypeptide
MQRGYVIQLYPNEAQKVLLAKHFGSARWVYNHMIVVQQKRYHRTGKSMSGYDLQNMLPKIKKQYPWLCEVNSQSLQIVCHDLAGAYTRFFKKKARYPSFKKKGCGGSFTSINGSRLDDKNIHLPKLGDIRYRGGKRPSGDIKRFTVRYRAGKFYCSILFDDGCKLPKEKVARKATGIDLGLIDIITTSDGESHVSPKFMKSARKELRKKQKALSRCVKGSNRRKKARIAVAKLHMKVANQRKDFNHKITCILVSDSKNQAFGIESLAVRNMMKNHKLAGAIADAGWYQFRSFLTYKAAAVGKRVIEVDRFYPSSKACSVCGVVRESLALSERKWTCECGVTHQRDVNAARNIAFEALRNSARRDRVSL

SEQ ID NO: 20830 - protein, 353 aa, Escherichia sp.
VKRLQAFKFQLRPGGQQECEMRRFAGACRFVFNRALARQNENHEAGNKYIPYGKMASWLVEWKNATETQWLKDSPSQPLQQSLKDLERAYKNFFRKRAAFPRFKKRGQNDAFRYPQGVKLDQENSRIFLPKLGWMRYRNSRQVTDVVKNVTVSQSCGKWYISIQTESEVSTPAHPSASMVGLDAGVAKLATLSDGTVFEPVNSFQKNQKTLARLQRQLSRKVKFSNNWQKQKRKIQRLHSCIANIRRDYLHKVTTAVSKNHAMIFIEDLKVSNMSKSAAGTVSQPGRNVRAKSGLNRSILDQGWYEMHRQLEYKQLWRGGQVLAVPPAYTSQRCAYCGHTAKENRLSQSKFRC

SEQ ID NO: 20831 - protein, 378 aa, Bacillus sp.
MEVNQIMMNKAYKFRIYPNQAQAILINKTIGCSRFVFNYFLSLWDHAYKETGKGLTYGTCSAKLPAMKKELVWLKEVDSIAIQSSVRNLADAYTRFFKKQNSAPRFKSKKNNLQSYTTKQTNENIAIIGNKIKLPKLGLVRFAKSCEVEGRIVNATVRRNPSGRYFVSLLVETEIQELPKTHSYIGIDVGLKDFAILSNGTHYKNPKFFRSLEDKLAKAQRVLSRRMKGSSRWNKQRVKIARIHEYISNARKDYLDKISTEIIKNHDVIGIEDLQVSNMLKNHKLAKAISEVSWLQFRSMLEYKAKWYGKQVIVVSKTFASSQLCSCCGYQNKDVKNLNLREWDCPSCRTHHDRDINASINLKHEAIRLLTARTPGLA

SEQ ID NO: 20832 - protein, 346 aa, unknown
  TnpB Polypeptide
MAQQILKEVDGSFKSFFGLLKLAQNGKYTFKDCKLPRYLPKDGYTTLVIGFVRLNGNKLRLPFSNTYKKTHKSVEITIPPVLLDKIVKEIRIIPKANARFFEIQYIYEAENIQRNLNQNNTLALDLGINNLVTAVSSEGKTFIIDGRRLKSINQWYNKRNAYLQSIKDRQHLGYKPTNRQKANTRDRNNKVNDYMNKASRKIIEYCISNDIGTLVAGYNETFQHSSDIGKTNNQNFVNIPYGQLQSKLEYLCELNGIVFVKQEESYTSKSSFWDRDELPVYNDDNIKTYSFSGIRIHRGMYQCKNGKCLNADVNGALNILRKSNVVSLEGLYTRGEVDTPVRIRIA

SEQ ID NO: 20833 - protein, 428 aa, Oscillatoria sp.
MLKSAVPPNSQNSAEKLQHSATITSPPSSRVEVGANSSSHPKIRVPYWDKFSEKMSAWLSLPTRTDWQEEGLTCFDGSVNKTAVNSWFSTKQVSVQSEKLVRTSSPSSTVSVADSMEGVNTKLRSKKIRIYPGPELNKVWRKWLAACRYCYNQAIAFSRSGKPRSKLKLRNQVMQSDLPEWVKETPCHIRQNAIFDAYVAITKSPNARFRSCRDRSAAIKFNNTNFSSSTWYPRLTTGLTFTASEPIPSNCDQGTQLVFVKGKWFAIFPELVAMTPTESTGVIALDPGVRTFMTGFDGNKFLELGRGDIGRITRLCQHLDDLMSRIAKEPSRLRRRRMRKAAHRMRTQIRNLVDEAHKQIAHYLTRHYGLIFLPTFETSQMVAKAARKIRSKTARAMLTKGALSVQTNPKTSFRNNWDHRCRCDRRIH

SEQ ID NO: 20834 - protein, 390 aa, Oscillatoria sp.
MLKVVKVRLYPNREQKQLLEESFGNCRFLWNYCLDLMNKTYKETGKGLSGYEVKKQIPSLKKEYEWLKLTYSQCLQQVCLNLGVAFNNFFERRAGYPSFKSKHGKQSIHYPQNVKVLDGSLKLPSIGEVKAIIHRPISGKVKTVTVSKNRCDQYFASVLFEEGKGKPESSAEGKAVGIDLGLTHFAITSDGSKFDNPRWLNKHKQNLKCKQQQLSRKQKGSNNCNKARKKVARVHNKISRCREDFHHKLSLSIVNENQVIVVEDLAVKNMVKNHCLAKAISQVGWGQFCTMLKYKAEQEGKIYQEVDRFFPSSKTCHVCLNQVGSLPLDIRHWTCTNCGSKHDRDVNAAIMIRNEGLRILTSGTGDKAYRQTVRRSNRGRKKSTTTLVSG

SEQ ID NO: 20835 - protein, 449 aa, Oscillatoria sp.
MSAWLSLHTKTDWQDMPDGTTGLTCFDAGANKTGVNSWFSIRQVSVQNEKWLRTSSPSSTALAPDSPEQVNTKLRSKKIRIYPSPELNKVWRKWLAACRYCYNQAIALSRSGKRLSKLKLRNEVMQSDLPAWVKETPCHIRQNAIFDAYLAWIASPGARFRSCRDSSQAIKFNDANFSLGSWYPRLTKGLTFTASEPIPKTCDQGTQLVFAKGRWFAVFPEPVAVTSTEATGVIALDPGVRTFMTGFDGSRFLEFGSGDIGRITRLCQHLDDLMSRIAKEPNRSRRRRMRQAAQRMRTKIRNLVDEAHKQIAHYLTRNYSVIFLPTFETSNMVAKVKRKIRSKTARAMLTWAHYRFKLTLRHQAEITGTTVVDVTEEYTSKTCTHCGHLHSKLGGSKVFRCPECGFTLPRDWNGAFGIFLKALRDTASVTFNGDSAVVALPGNNRTNVA

SEQ ID NO: 20836 - protein, 407 aa, Oscillatoria sp.
MQLVEKHIINRQHKFWKECDNLAFQSKHLYNAANYVQRQYFFETHKYYNSIDIYHQTKNLEAYRYLPTKVSKQIVRRVSEDWKGWLAALKDWSKHPDKYLGKPKIPGYKHKERGRNVVIYPIDAISKPALAKGIVKLSQSNISIPTQAKNLDQVRIVPKISHYVIEVVYTVDDPVKSTGKYSAGVDLGLNNLMAITSNHPGIKPLLINGRPLKSINQYFNKCVAKAQAMEAWQQIKQLSSKRDRRVDNYLHTVSRRVIDWCQVNDVGQLVIGNNQGWKQKINIGRKNNQAFTKIPHAKLISLLTYKARLAGIEVVLTEESYTSKASALDQDKLPVYKAKSDSQPVFSGKRVKRGLYRTDVGRIINADTNGSLNIARKVIPNFMDGIEGLPFIPVVLGLWTKITNVVV

SEQ ID NO: 20837 - protein, 382 aa, Oscillatoria sp.
MSRPKKQRSSLESTKEYSKDGMKMDQSRPSELLLGSYDTTLSLMLPSQAVTNVKSLSIPELVVAPSKATSTDRLPDSQACIPKPKLSQKSEVDSTSQKRKCLPYWDKFCQEMSAWLSLHTKTDWQDMPDGTTGLTCFDAGANKTGVNSWFSIRQVSVQNEKWLRTSSPSSTALAPDSPEQVNTKLRSKKIRIYPSPELNKVWRKWLAACRYCYNQAIALSRSGKRLSKLKLRNEVMQSDLPAWVKETPCHIRQNAIFDAYLAWIASPGARFRSCRDSSQAIKFNDANFSLGSWYPRLTKGLTFTASEPIPKTCDQGTQLVFAKGRWFAVFPEPVAVTSTEATGVIALDPGVRTFMTGFDGSRFLEFGSGDIGRNHSAMPTSG

SEQ ID NO: 20838 - protein, 400 aa, Oscillatoria sp.
MILSQIIFTVMLRATKYRIYPTTEQRQHLAQSFGCCRFAWNYALNLTNETYKATGQGLGRFAIQQEITNLKKEHEWMKEPYSQCLQVVALNLSRAFINFFEGRADYPQFKSKHRNQSISYPQNVSIVEDGIKFPKMGIVHARLHRPIEGAIRTVTVSMNANGQYFASVLVDDGKDILIKTTEGKAVGIDLGLTHFAITSDGSKFDNPRWLARHEKNLRAKQKRLSRRQKGSNNRNKTRKQVAGVHNKISRCRSDFHHKLSRRMVDENQVIVVENLAVRNLVRNHYLAKAISQVGWGQFCTMLKYKAEQEGKVYLEVDRFFPSSKTCNVCLNQVRSLTLDVRTWQCEKCQTKHDRDINAAKNIRDEGLRILSSGTGEVAYRPGVRRDSRGRKKSTISQSAG

SEQ ID NO: 20839 - protein, 452 aa, Oscillatoria sp.
MESADLESHILRNYAREQEVNSWFSMTVTPLMKGNSLKISCPSSLSFLVGYTGGEPENKPKKRFKKYPRNSTTKTTPNAVKKIRIYPEKKLHQLWKQWLAAYRWIYNWTIAYLRHEPHLSAFSLQSLARQSNRPDWVKELPGHQLQEAVADAVDAHKQAKANQGTASFKSCRAFSQVIKFKAGNFKNGTWYCQRTKGLEFKSAEEFPQQCPYGTQILYQKGKWFGCFPEYREPTPTQEERVIALDPGVRTFLTGYDGETILEIGQKDIGRINRLCTHLDQLMSKIALSSNKRQRYKMRKAATRMRCKIQNLVKDLHNKSASFLVNNYKLILLPTFETSQMVERHKRKIRSRTARNMLTWSHYKFAKHLEQKAARNGVMVVRCNESFTSKTCPECGHIHEKLGGNKTFRCPECGYEAPRDWNGARNILLRALQATAFTIVGDAILFLELLSHE

SEQ ID NO: 20840 - protein, 425 aa, Oscillatoria sp.
MKLAYQYKLLPAYQQRCRMDKWLDMLRCQYNYLLAARFDWWEMNRCPVNACPLVCSIAEPRKQPEYYGQKRSLVSLKQERSWYADIHADVLQDMVKRVDLAFVRLIKGDKNGKRSGKPRFKGKNRYRTFAYQRVKPDCIQGNGVMLPKLGEMKFIQHRSIPDGFTIKRALVTKKADGWYVTLTLEDQAVPELPINEIQPTEANSIGVDAGLEYFIACSDGETKQPPKFYRQAEEKLGKLQAKRDARAKGSKPRRRLNERIAKLHQRIARQRQQWHFETAQELIDKAEVIFIEELKVSNMVRRNKPKQGDDGTFLPNGQSAKSGLNKSFADAGIAGFLNDILPYKAAKAGRLVVKVNPAGTSQHCAMCLNRVPKELSDRWHECPYCGASMPRDVNSGMLIKKVGLGVRLTIKRESLNGRRSPHRNA

SEQ ID NO: 20841 - protein, 371 aa, Shinella sp.
MRLHPFVSFGDSQKVRGNQNIHLMDETTVVVKIGRKEGGGMSGRTVTQTARLDLAKMKGAAATIIRELAGICAQPEKAQRINVSYSIGDTHISITFDPSDLPNHPQRRRPVTAKMGRALGIDLNPNWIGLAVASNVNEAARIEDTELLEQALVKLDMAADASPELVRETLAVVCGSAISMARKHRCGTIVLEKGLGKLRSSGKSRSLNSLSNYWARTVFVQMLTRRARLAGIEVLEVWAGYSSTIGNLAFEAPDACASAAEIARRGIARLAGIKDALPALEEGCVSRLWKNGKVPAELGSWQEVHRSIKAAKIGYRRPHPDVPIGARGSDVYGTRMFCGHAVVRLGRRHRPGLLFRQIVTSVKPDAVLRTF

SEQ ID NO: 20842 - protein, 445 aa, unknown
  TnpB Polypeptide
MPQLAKRFRIKPIPDVENLCRISKDLYNQSLYELRKKGEEEGVWLGHYDLRDHMKTVHNLEGNINYKLLRDAVADCVVKQVVKNVKSFFESIKKWKKHPEEFKAKPEFPHFLGRNGMNLLQIRYGHDCKIDKMGNITLNGMSDVKIPIPQWGKYADAISKGCKQVRILPDKGFMTIEVVYEAECHSANVTKERLAAIDFGIDNLATLVTPEGCTIFSGKVLKSYNQNFNKKLAHYSSIKAKQGIEKGTKRTTALYDKRNRYIETFMHTTSKAIVDLLISQHIGKLVVGRNKGWKQEVNIGNKNNQKFVQIPFYMLQSKLKYKCEMAGIEYVEQEESHTSKCDALAMEEIGHHDQYAGQRKYRGLFKSSTGRYINADQNGALNILRKNIGNKAYKEKTKDWPMSSPVRIKHPQKNYAVCNPNKGQQITEAFPVMDKVHAESVSPLR

SEQ ID NO: 20843 - protein, 417 aa, unknown
  TnpB Polypeptide
MYLVIKQQVKHLNKEEYNILRELCRTAKNLTNQAIYNVRQHYFQEKQYLRYEANYHELKNSDNYKLLNSNMAQQTLKDVDQIFKSFFALIKLAKQGKYNFKHIRLPKYLPRNSYSNLIIGQIRLRKDNILTIPFSNTFKKKHEIKIQIKIPQVLEDKKIKEIQIIPKFNARFFEIQYTYEVQEENLKLNTNNALAIDLGVNNLCTCVTNTGKSFIIDGRKLKSINQFFNKQNAKLQSIKDKQNIKRETKQQYLISRKRKNKVDDYINKTCRYIINYCLVNDIGTLVIGYNQSFQSKANLGRKNNQIFTQLPFGKIREKLEYLCKRYNINYILQEESYTSKASFFDNDNLPIYNADNPQIYEFSGKRIKRGLYQTKNNYLFNADCNGALNILRKSKAVDLTVLCCRGDLDTPKRIRIS

SEQ ID NO: 20844 - protein, 400 aa, unknown
  TnpB Polypeptide
MELKKMYRTKRIRLLPTSEQEKLFWKSAGVARWSYNFFLSYNQEKYNEWIKDNTKERFISECDVRKYINNVLKKTTHIWLQEVGSNVMKMGVMDANNSLQRYFNKVSNYPKYKSKKRSKPSFYVNYETLKRTPNGFRGEKIGVIKTKESLPKIPKDQKYVNPRITYDGKFWYLSIGYKVEQKQVKLTDEKIGIDLGLKDLAIVSNTDNSYSKKYRNINKGYKVKLLEKRLKRAQRKLSRKILNNIKSYDEKHIPIYIRPLEDCKNVQKQIHIVQNLYRKLTSIRNNYIHQVTTEIVKTKPSRIILEDLNVSGMMKNKYSAKSIANSKWYEFRRQILYKAELYGIEVILADRFYPSSKICSCCGNYKKDLRLKDRTYICNECGLKIDRDINAAINLANYQI

SEQ ID NO: 20845 - protein, 259 aa, unknown
  TnpB Polypeptide
MKYAKGFKFRIYPNAQQQKIINQTLGCARFVYNHFLAIRRDNWQEKHESVTYVKSSRLLTELKCNPDFVWLKSVDSMALQEALRNLDRAFQNFFKKQSGYPKFKSKHSHNQSYRTRNQSRGIRIIDGNIKLPRIGIVKTKLSREFEGRILNATVSRTASGKYFVSLCVEMDIELLLGRNNGRQIGIDVGIKDFYSNDQGNTVANPHILKGMEKKLKRLQRSLSRMLMYGKEASNRKQEIDRQHYTIPNQRPKDKHCGKI

SEQ ID NO: 20846 - protein, 295 aa, Streptomyces sp.
MGRSVVVQKLNRRWAQVKVPGCGWVRFRLSRSGLPKAKTFRVTYRNGQWHIAFAVVPEPIEKPGTGGVIGIDRGVKITAALSDGRKLNCPQLTTKERARIRKHQRRAARAPKGSEVKTAEYAKVARLKAREADRRKDWCEKTSTVLARTYGLVRFEKLNIKNMTRSAKGTVDQPGTRVRQKAGLNRVILAQGWGLLRQRTEDKAPGRVEDVPAPFTSLRCSACGWIEKNSRKSQAEFVCVSCGFTCYADENAATNVAAGQGGIPRRSAGAGGMTAATSRSSVREPQPIRVGIPLF

SEQ ID NO: 20847 - protein, 225 aa, unknown
  TnpB Polypeptide
MTRAARLLWPGRKRSAPACVNSAVPAGRTPARPRGSANRRKAAARLARVHARVASVRADALHKATSDLAARYETVVAEDLNVAGMVRNRRLARAIADAGSGEARRMLACKTTWNGGRLIMAGRWFPSSKTCSGCGAVKAKLALSGRTYVCTACGLIIDRDVNAAANLLKLAASGAESLNACGGTVRPGVAGHGPVKQEPGTRRLVATGTASGQPLAAGREITHAH

SEQ ID NO: 20848 - protein, 284 aa, unknown
  TnpB Polypeptide
VRVNQAYRFALDPTPAQERMLASHAGAARFAWNWGLAKCRERYEAEGKWYSATDLHKLWNAAKKADPALAWWSENSKCACQEAFRDLDRALRGFSASRKGTRKGRRIGFPRFKKRGKCRDSFRFGAGVMRCAGTTVTLPRLGTIRTHEATRKLARRLDNGTARILPATATRTAQRWFVSFTVEVERAIPERHARPGAAVGIDPGVKTLLSGVDDQGRTITVAGPKALRASLRKLRRASRAHSRKAKGLREPAQGCSPARPRPRPGGQCPCRRTPQGHQRPRRPV

SEQ ID NO: 20849 - protein, 414 aa, Streptomyces sp.
VINMQLRYSFRVYPGAGQRMALARAFGCARVVFNDALRVRETARAAGLPFVPSGELSKQLTASKKTSERAWLTEVSSVVLQQSLRDLDTAYKNFFDGLKGRRPRMGAPRFRSRKDNRQSIRFTANAGWKITPGGKLRLPKIGDVVVKWSRSLPSVPSTVTVVKDAGGRYFASFIVETDPNTDLDRMPATDNVVGIDLGLSHFAILSDGTKVDSPRFLRRAEKRLKKAQRNLSRKARGSNNRSKARVKVARAHGRVADARREFHHQLSTRLIRDSQAVAVEDLAVKGLVRTRLAKSVHDAGWSAFTTMLEYKAAKYGRTLIRIGRFESTSQVCSQCGVKDGPKPLNVREWTCGACGAVLDRDINAAVNVAKAAGLAVSACRARVGPGAIPARREEAGTHPKVSRASGSQAGISVL

SEQ ID NO: 20850 - protein, 386 aa, unknown
  TnpB Polypeptide
MRPTRSEEQSLNNMAGARRWVWNWALRRWKDTYAATGKSISLKQLSAELTTLKEQLETAWLKEVDSQALQQVLKDLHLAFTNFFEKRARHPRFKGRKRDPLRFRVPQRVTVKDGKVYVPKIGWVRIRQSRDVEGTTKSATFRRDPIGHWYVTLTVEFEMPDVALPPPDHAKVAGIDLGLKVFATITGRKPVPNPRFFRAGQRKLKRAQRAFSRRKDGSRRRAKAKRRVARIHRKIANQRGDFLHKLTTKLVVEHNGLCIEDLSLKGFARTKLAKSFADASMGEFRRQLTYKSEWNRKHLTVIDRWFPSSRLCRGCGAVNSQLTLADRHWVCGCGLAHDRDDSAAINIRDEGLRMLAVGRPDSLNAQGDTVRPPTGAGVVELRIPRL

SEQ ID NO: 20851 - protein, 406 aa, unknown
  TnpB Polypeptide
MSQSTKDKRKASRDATRARRANQTLKVRELKITRLNKTQQDRLKRMYLEAKWLRNTIINDGILNYKPSNTVQVKLPDGTIENRELTVLPAHVKQTIHTNLKNNIKTLSTLKRKGKRVGQIRYSARINTLEFPTGDIRVKGNKAHIPKLGWVNVRGTNQLGSEIANVRLVRRSSGYYLLVTSLTKKQSMLGPKREPLGLDFGIRTHVTISDGREWSLVVKEPESHKRLQRKLNRQTKHSNNYYRTLDKLNRSYERLSNKKNEAANQFVAELKKHELIVFQDENLSGWHKTKGFGRTVQHSAMGRVKAKLRTLPNVVMLDRFVPTTQHCPECGSLNKLPLSVRVYSCSCGYHAGRDVHAAQNMLVLHNSNHSPAERGGALVEDSTSDTNIVSIKSGLLKQETRRSLVV

SEQ ID NO: 20852 - protein, 424 aa, Okeania sp.
MRTAYQYKLRPNKEQIAIIELWLELLRRQYNYRLSERFSWWEENRCSVNACPLVMPIPQLRDNPDYYSQKKDLVNTKDKFPEYKLIHSQVCQDCIKRVKLAFDRWFTADKNGHKLGKARFKGKGRYRSFTYPQIKQDCIQENKINLPKIGNIKLIQHRPLPDGFQIKTVTISRKADGYYVTLSLEEKSVPALTFNVEPTLKNTLGIDMGLKEFLVTSEGEFVPIPQYYRKSQKRLKTLQKRLYRKKKGSKRRLKTVKAVAKQHKKVADKRKSFHFKTANELLSKADVIAHENLNIKGLAKTHLSKSINDAGWGQFLSILTVKAVSAAPLKEANAGQKTIAVNPKNTSQDCSNCGEKVPKELNIRTHSCPHCGIVIDRDLFAQHDLGNAAINIKNRAVGHSVLKARGARCNGRAAKREAHTIAPA

SEQ ID NO: 20853 - protein, 475 aa, Butyrivibrio sp.
MPKEKSTVYRTRQYRINRNNDLYDYCCNICLASASLYNRANFILRQYSSAVEAMNSYKPLFENQMKVFRIVSDSLYGTKYEPKGQWLSYNSMDYLLKSTNDRAYYGMPSQANQQILKLLMRDYKSFFEAVKAYGRDKSAFTGRPHMPGYVRNGKMKTAVLTNQICRIKDGKLLKFPGTKEILELGDVSFSWKLKEVRIKPSGRDFVIDVVMEMENKGIEPKDDSSILKELREMDDISDMRVMAIDPGTDNIAAVVNNFGNRPFVIKGGIVKSINQLYNKGIGRLSSCAMTCNQRYRTRRMEILTGKRNRRIKDQFHKISRQLADYARDNHVDVVVMGHNVFQKQEIGIGHIGNQNFVQIPMLVFADMLRYKLEEYGIRFVLTEESYTSKADFLAQDDIPVYKKGDNTEYVFSGKRIKRGLYRHFDGTVTNADINGAANILRKVFPKVTQWDRGIVDMPCSAGCVEHTAGSCREAA

SEQ ID NO: 20854 - protein, 442 aa, Escherichia sp.
MVKNLALVFGDKDQVNMHQENTVPSASDISFFHRPKYNLPCETTTAFTFRLRPGGQQEREMRRFAGACRFVFNRALALQNENHEAGNKYIPYGKMASWLVEWKNATETQWLKDSPSQPLQQSLKDLERAYKNFFQKRAAFPRFKKRGQNDAFRYPQGVKLDQENSRIFLPKLGWMRYRNSRQVTGVVKNVTVSQSCGKWYISIQTESEVSTPVHPSASMVGLDAGVAKLATLSDGTVFEPVNSFQKNQKTLARLQRQLSRKVKFSNNWQKQKRKIQRLHSCIANIRRDYLHKVTTTVSKNHAMIVIEDLKVSNMSKSAAGTVSQPGRNVRAKSGLNRTILDQGWYEMRRQLEYKQLWRGGQVLAVPPAYTSQRCACCGHTAKENRLSQSQFRCQVCGYTANADVNGAHNILAAGHAVLACGEMVQSGRPLKQEPTEMIQATA

SEQ ID NO: 20855 - protein, 501 aa, Bacillus sp.
MKKRLLLFLQYYNIYIECMFGGRVNMAKKGPRYVVELFLKTEIFQVHILEKRFEIGRHIYNACKRKMLDNIQQMRKDETYQFWLKQEKSKTRTKKLIEIREAYDISKTGAERIVNHMGKHFLSKKPKNEKHKQKVHLDSHVVQKIALNVWESIEDYLFNPKTKKVRFKKFGEFNTLESKTNKSGIRYKNGFVEWNGLKIKAEMPKPGKDSYLEAALHDEIAYCRIVRKIIRGRTKFYLQLVMKGIPPQKRKPVEGKVGLDNGISTVATVSDKSVNVQEFCKGLDELDRERRILLRRMDRSRRATNPNKFNDNGTFKKGNKDKWIRSKRYWKTLYELKEICRKIAAVRKMMHNKLANEILSEGNEVYAEWMNYKGLHKTRLGKRMGIKAPAAFLEILDRKLKYQGRQLIYVNTWTVKASQYCPIGDVYAKKPLSLRFHALPCGRKIQRDIFSAWLIKNVNETLDKVDRQKCLNEFHTFYEMYQSFEEKMRSLGEKHISSIGF

SEQ ID NO: 20856 - protein, 403 aa, unknown
  TnpB Polypeptide
MRNTTHKLFRDKSLKHLHDDLNIIGIVRNHFIALSMRYYRRYGKGLSYKKLSKHLTQLKKLEKYEHWHIPYSWALQNMLKRLAQSFREMKTLGRGHPQFKSCEKHKGMTFDGGQVPLEKVLEKQKHERNHPTYRIRLNGRWYRFALHRAIEGEIRRVQVTRDTLGDVYITLTEDFTEVRYEPKTGKAEGFDFGIKDFLTGRDGERRKSPMFYKQNAEKLAKAQQAHSRKVNGSNNRERERKNVARIHKKTENQRTDHHWKLAIDLCREFDILFFEDLNLEGMKRLWGKQVSDLAFGAFLQKVKHQAKKRIRAVLKIGRWTPTTKCCCVCGDKNEDLTLADRHWTCPECHTYLDRDQNAALNILKEEVASFALGEVNPIVLFNKVVGISVEATSPLLKTTNASA

SEQ ID NO: 20857 - protein, 418 aa, unknown
  TnpB Polypeptide
MRLVYKFNIGQNENISSLCKISNNLYNQALYIFRETLSKEDKWLSYFELDAIMKNTKNLDGDINYKLLKAQCSQQILRILDKNIKGYYKSVQDYKKNYNKYREKPGLPSYRKRGSEFNLYYTNQSCKIKDGKIILSKDISISIPQYEKYSDLIKDFKQIRIKPLACGYKIEIIYEVKDTGVSKCREEKVASIDLGIDNLATLVSEDFTVLFSGKFVKSYNQLFNKTLAKLNSIKDLQKIKGITKRIKKLYYDREQYIEDVFHKISRKIVDLLVDSKITKLVVGYNKGWKQNVNMGKRNNQKFTQIPFARLVSYLEYKWELAGIEIVIHEESYTSKCDSLAFEKIGKHENYLGKRKNRGLFQSSVGKLINADINGALNIMRKVVGDSCESIRRIIDRGLLFNPVRITNVFYKMNISGNL

SEQ ID NO: 20858 - protein, 398 aa, Streptomyces sp.
MTTTHAKRAFKYRFYPTDAQAAELSRTFGCVRKVYNLALQARTEAWVLRSERINYNATSAMLTAWKKTEELAFLNDVSSVPLQQCLRHLQSAFTNFFGKRAKYPRFKSRKKSRKSAEYTTSGFRFRDGKLTLAKMTEPLDIVWSRPLPEGAAPSTVTVSQDAAGRWFVSLLVEDPMVKPLPATGTAVGVDVGLEHLLTLSTGEKVANPRHERKDRARLALAQRRLAKKRKGSANRAKARRRVARIHARIADRRRDHLHKLTTRLVRENQTVVIEDLSVRNMVRNRNLARAISDAAWSDFRGMLEYKAQWYGREVIAVDRWFPSSKLCSNCGALQGKMPLNVRTWTCDCGATHDRDVNAAKNLLAAGLAVSACGAGVRPQRSTPGGQSAMKQETLQREP

SEQ ID NO: 20859 - protein, 376 aa, unknown
  TnpB Polypeptide
MQYTTLKVRLCPTPAQAELFEKTFGCCRYVWNQMLSDQQRFYAETGAHFIPTPAKYKKGAPFLTEVDSQALIQEHNKLSQAFRVFFKNPESFGYPNFKKKKTDRDSFTACSHDFTSGPTIYTTREGVRMTKAGIVRARFSRRPEGWWKLRRITVSRTKTGKYYCSILYECPVRQPEPAVPTAETTLGLKYSMNHFYVADNGAAADPPQWLKGSREKLARIQQKLARMEPGSQNYEKAVQKYRLLHEHIANQRRDFIHKESSRIANGWNAVCVRGDDLAEISRRLTLGGTLDSGFGMFRECLRYKLERQGKRLVVVDRYAPTTRTCSACGQLQDKVDYGARIWTCPKCGTAHDREVNAAKNIKLEGLAQLLPTASPA

SEQ ID NO: 20860 - protein, 392 aa, Actinomadura sp.
MNRYGAGVQLRYNYRVYPTPGQQIALARAFGCARVVFNDGLRARLDAREQGLPYTSDAELSRRVITQAKATPERAWLGEVSAVVLQQALADLNAAYRNFFASIRGERQGRKVAPPRFRSRKDNRQAIRFTRNARFKVLDNGRLRLPKIGEVRVRWSRPLPSAPSSVTVIRDAAGRYFASFVVRTGHGETLPPSDCEVDVDLGLTHFAVLSDGTKVAAPRFLRRAARKLKRLQRALSRKQKGSANRKKAAIKVARAHGRVADTRRDWQHKLSTAIIRDNQAVYVEDLCVAGLARTRLAKSVQDAGWAGFTAMLEYKAQRYGRTFARVDRFFPSTRLCSDCGRINQKMALDIRAWGCPCGAGSAQRSGNPPRRRTLTARREGNLCPLGRRGRHR

SEQ ID NO: 20861 - protein, 239 aa, Actinomadura sp.
VDAGIAAVVALSTGEKIADPRHERRDRTRLAKAQRELSRKAPGSVNRDKARRKVARVHAQITDRRRDFLHKLSTRLVRENQTVVIEDLAVGNLLKNRTLARAVSDVAWRELRRMLEYKCAWYGRDLVVIDRWFPSSKRCGNCGTVRTKLPLDVREWTCACGAVHDRDVNAARNILAAGLAVTACGDGVRPQRETSRTGRSSVKQETQWATAGTLRLQEEEVNRSDIPEEPRRPATRRSR

SEQ ID NO: 20862 - protein, 309 aa, Actinomadura sp.
VTHCVRRSFRYRFYPTSEQVEHLSRTFGCVRLVYNMALEARIKAHQKGRSMAYKESSAALTAWKREDDFSFLNEVSCVPLQQALRHLQTAFLNYSAKRAGHPRFKSRKRSRASAEYTRSAFRYADGRLSLAKLKEPLRVVWSRPLPEGVEPSTVTVSRDPAGRWFVSLLCEIPVELMAPTDKSVGLDAGITALVTTSAGEKVCNPRHERSDRRRLLKAQRVLSRREPGSAGHAEARLRLARVHARIADRRRDFLHKLTTRLVRENQAVVIEDLNVAGMVRNHRLARAITDAALAGDAVHAGVQVRLVRT

SEQ ID NO: 20863 - protein, 410 aa, Actinomadura sp.
VHLRYQFRLYPAPCQEQALARAFGCARVVFNDALRAREQAYAAGLAYLPDGELSKRVITEAKKSPERVWLGEVSAVVLQQALADLNAAYRNFFASVSGRRKGRVIAAPRYRSRKDRRQAIRFTRNARWKITAGGRLRLPKIGDVPVRWSRTLPSVPSSVTVIRDAAGRYFASFVVETGNEPLPQTEAEIGVDLGLTHFAVLSDGRKISSPRFLRRAERKLRKAQQALSRKTSGSANRRKAAARAARLHARVTDARRDHHHKLSTQLIRDNQAVYVENLCVNGLARTGLAKSVHDAGWSQFLAMLEYKAARHGRTFAKIDRWFPSSKLCGTCGKVAESMPLNIRKWGCACGAVHDRDVNAANNILAAGQADRLNDRRAQARPGLVPAPRSEAVTHPDAARSTRSVEGISAL

SEQ ID NO: 20864 - protein, 416 aa, Actinomadura sp.
VQLRYRFRLYPAPGQQQALARAFGCARVVFNDALRAREQARAAGPAYPSDGELSKRVITEAKKTPERAWLGEVSAVVLQQALADLNTAYRNFFASVSGGRKGRVVAAPRYRSRKDRRQAIRFTRNARWKITAGGRLRLPKVGDVPVRWSRTLPSVPSSVTVIRDAAGRYFASFVVETADEPLPRTEAEVGVDLGLAHFAVLSDGRKISSSRFLRRAERRLRKAQQALSRKTKGSANRRKAAARVARLHARVADARRDHHHKLSTQLVRDNQAVYVENLCVSGLARTRLAKSVHDAGWSQFVAMLEYKAARHGRTFAKVDRWFPSSKLCGACGTVAESMPLHIRTWACACGAVHDRDVNAANNILAAGRADRLNACGGTARPPAQRKAGPSETGSRRSAAHAARLNPRPSGRGARQW

SEQ ID NO: 20865 - protein, 412 aa, Actinomadura sp.
VLLVRLRFNFRVYPTPGQQIELARAFGCARVVFNDGLRLRQEAREQGLPYVSDAELSKRIITLAKATPERAWLGEVSSVVLQQALADLNTAYRNFFASVSGKRRGRKVAPPRYRSRKDNRQAIRFTKNSRFKVLGNGRLRLPKIGDLAVRWSRALPSTPSSVAIIKDATGRYFASFVVQVTDELLPPVESEVGVDLGLTHFAVLSDGTKVAAPKFLRRAARKLKRLQQALARKQRGSQNRKKAVVKVARAHARVADTRRDWQHKLSTQIIRENQAVYVEDLCVTGLGRTRLAKSVHDAGWAGFTGMLEYKAARYGRAFGRVDRFFPSTRICSDCGRNNEKMALNVRTWDCPCGSHHDRDVNAARNVRAAGQADLNARGAHVRPGLVPAARNEAGTHPDAARSARSVEGISVR

SEQ ID NO: 20866 - protein, 427 aa, unknown
  TnpB Polypeptide
  misc_feature (75)..(75): Xaa can be any naturally occurring amino acid
  misc_feature (116)..(116): Xaa can be any naturally occurring amino acid
  misc_feature (130)..(130): Xaa can be any naturally occurring amino acid
  misc_feature (194)..(194): Xaa can be any naturally occurring amino acid
  misc_feature (215)..(215): Xaa can be any naturally occurring amino acid
MKGGFKMAKQPTTNVLFGVQKQQLKHLSKNEYKALRELCFLSKNMYNVALYSIRQYYFTEKKFLNYAKNYHLCKXNENFAMLNSNSAQQVMKVVDRNFKSFFSLINLAKKGQYQYXDIKIPKYLPKDGFXNLIFGEFNCNKEKFTVPMSPAFKRLYGKVEFLIPKNLQGKKIKEVRILPKNNARFFEVQWIYEXEESQIKLNEQNVLAIDLGIDXLCTCVTNEGKSFIIDGKKLKSINQWANKENSRLQCIKDKQKIKGTTKKQRKLWLKRNNRVNDYLNKSVKTIIDYCVQNNIGTIIIGYNPTIQNKSNMGKTNNQNFVNIPFGNIREKLQYQCDRNNIKLIEQEESYTSKADFLANDNIPKYKVGDKTKYTFSGIRISRGMYKSSTGIILNADINGALNIMRKANIIPALSVRIIEQPKRLRIA

SEQ ID NO: 20867 - protein, 386 aa, unknown
  TnpB Polypeptide
MLAYKFRLYPNKEEERKLLWTKEVCRQTYNKFLELYCSGEHDRFKLQALLPVWKESDMDLRGVHSKVLQYELHRLFANLKALNELKKRGRRAGKLRFKGQNHFKTITYNQSGFRLEPKNKKFSFLHLSKIGDIPIRMHRAVEGNIKGVTIKHTASGKWFAYLLVDDGNGTNELPVIHDAVGIDVGLEYYAVDSDGQEVENPRYLKRELNKLRREQRRLSRKQKGSKNWNKQRIIVAKTYERACDQRNDFQHKLSRQYVDDHDLIVTEKLDIKDLIESGHLTRSTIDAAWSSFNQKLAYKAESAGKLFVQVDARGTSQTCPACGRVEAKTLSQRIHDCPCGFSASRDHTSSLVILDRGLRKVRSERPELTLVDTRPLLVSAKIQQVG

SEQ ID NO: 20868 - protein, 550 aa, Mycobacterium sp.
MRDHLTKAVGLHVADEVWETIDRHLFADVSGRRHGPPRVGSWWDFTRIPGRARSHTKATQTWETYRLVGTLDGHLAAHRHPLLPGGVHTAHQAADQPAGTSILAQPARLRPPARPVSKSWWDHTGALAVVFTGLPAGDLVFPVRLPSGAGQWAHLAHFLADRSIWHKIDLVRVGDRKAPGGWRYYAHLLIHRGGYQSPATRDRRSVIPAGRRAGVDANVSNLSVASFPAAQPEHLAVEQIVCTDAQQKAAARAAQRTRARQKALDRSRRNTNTDQYDPSVRQQKRAQRRAAKALPARQITNPGGARHARADGVPLRAYRHDELSQRYQRTRCDHAADARRDSQAKQARAAQVAARIVAAHGNTITVEDCRISTWARLWGKRIALFSPGMLVTALQTECEASGGQFYRAGTHATAMSQHCLCGARVPKALAQRIHDCSRCGLHAARDTVSAALAACVEFADPDDPRTARVDYRLAHALRDGLASQQEWEGSVNRHQPPPSPDGGSARTGSHQPVAPAEQAAPGPPPNRPRPKRGRRGTSRKQPAPKLIGAA

SEQ ID NO: 20869 - protein, 422 aa, Nitrospiraceae sp.
  misc_feature (363)..(378): Xaa can be any naturally occurring amino acid
MVIRKGYKFRLNSSPADEALMRQFAGCSRFLWNKALALQNGRLDDKQSCLSYNKLANMLPAWKKEHPFLADAPSQALQQTLKALDKAIKEAFDKANPKRFPVLKKRGHSRDSFRYPQGFDISNARVLLPKIGWIGFRKSQFIKGKPKNVTVSREIDHWDISIQTEQKVSEPAHPSVKTVGIDLGINKMIAQSDGNYIVPINSFRKAQAKLAKQQRQLARKVKFSSNWHKQVKKIQKLHWHIANIRKDYLHKASYALSKSHAIVCMEDLQVRNMSKSASGTIEKAGRNVRAKSGLNKAILDQGWGELTRQLSYKQHWRGGVLVLVPPQYTSQQCSECGHVDADNRLSQAVFHCQACGHTENADXXXXXXXXXXXXXXXXKLRIFGICARENVNAVIALTFKVYISYIFIICDLPHSLTMISRF

SEQ ID NO: 20870 - protein, 402 aa, unknown
  TnpB Polypeptide
VNAIDNKMLSAYRYRIYPKQEQEMWLKRSLFLLCNLYNKLRAEKIEEYKKNRKVLTQTDLRRLALEERRNDPELKSIHSQVVQNVADRVHTAFKNFFEKRARFPRNKPPKKYHSLTYPQSGFKVNPEKGLYLSGIGYIRIFVHRPICGKVSRLTIKYEAGQWYAIFIADRENPEKQEIDLVPESRIRGIDLGLEKFVTPDNAESIEYPRFLRASEEKIKALQRRLAHKKKGSKRSRQICFSLAKLHLHIKRQREDFQNKLIHNIFKESDVLILEKLNVSSMLRNHRLAKSISDASWNKFAIKAMFKAKMLGKHTIFVDPWGTTQFCNKCLSWVPKELDDREHTCPECGEKLDRDLNSALLIKRLGILSCPPSDGGSSLAEQVPLPSLRMMASASIEAGSPRL

SEQ ID NO: 20871 - protein, 393 aa, Symploca sp.
MPKLHQYRGVNVTTYFRGWESKGIITGLMRRAFQTKLKLNHKQKTLMAQHAGYARWVWNWALRLWNEAYFAGLKPSANKLKKFYTNDVKPLYPWMTSLSSRVYQFVFMHLGEAFSRFFQGTAQYPKFKKKGRNDSFTLDNCGKLMEFSGTRLKLPFMGWVSTYEPLPEIQTKRVTISRVADSWYISVAHEFEAEHTVKSRQYLGIDVGIKVLATCSDGTVVPNPRAFKRAKKKLARLQRELSRKHRGSNNRNKTKLKLAKVHQRITNIRKDTIHKLTSWVCKNHAVIGLEDLNVSGLLKNHKLAGAIADSAFYEIRRQLEYKSEWYGCQLVFADRFYPSTKTCSSCGHIQEMPLKERVFNCEACGQVKDRDYNASLNLEHLAEGFSVIACVSE

SEQ ID NO: 20872 - protein, 400 aa, unknown
  TnpB Polypeptide
MRIRRAWRYRIYPSKTQEHELNSYLYECKNLWNSLLEYTKSYYKKTRKFPKRSQLHLLTKEREIYSQVAQNVADRLTKSLKGTVARKKAGQKAGFPRFKPIERVKSFTYPQFGFRLNEKLELSGIGSIAIKKHRDIQGEMKTLTIKKTPSGRWFALFTTEIEKEIPQKKQGGPAAGIDLGIEHFAYLSDKTIIENPRHLKQAEQRLKQRQKQLSNKKKRSKNRRRARIKVAMAHEKLTNRRTDFLHKVSRKLTDKYSFIAMENLNIAGLAKGFLAKSVLDCSWAEFLSMLTYKAAEAGCEVVLVDPAHTTKKCSSCGLIQKKSLAERKHICICGASMHRDLNAAINILKKATGGTLGGNADVQMYCTEARKACGEETTTHYKHNEQVSSTKQEAHAFMCE

SEQ ID NO: 20873 - protein, 394 aa, Bacillus sp.
VEFVLVHKAYKFRLYPNKKQIELINKTIGCSRFVFNFFLGKQKERDAYWYIVEEMKQNGQLTSNNWKGQYLNKYETIKSLPELKKHYPFLKEVDSIALQKSVENLSDSYVRYYKKQNQQPRFKSKKNKVQSYTTKYTNNNIAVFDQHIKLPKLGLVRFAKSREVEGRILSATIRRNPSGKYFVSLATETEVAALPKTNSAIGVDVGLKDFVILSNGTIYSNPKFFRTLEGKLAKAQQMMSRRTIGGSNWYKAKRKVARIYEKIANARKDYLDKISTEIVKNHDVIGMEDLSVSNMMKNHHLAKAISEVSWSQFKSMMEYKAKWYGKQVVTVAKNFASSQLCSCCGYQNKDVKNLGLREWECPKCHTHHNRDINAGINLKNEAVKLLTAGTAGIA

SEQ ID NO: 20874 - protein, 166 aa, Salmonella sp.
MLLAGLVRVKLNQLIVLKACLKVARLHAKIADCRLDALHKASRKLINDNQVVCVESLKVKNMIRNPSLSKAIADASWGELVRQLLYKGEWAGRSVVAIDQFFPSSKRCSCCGFTMKKMPLDVRKWQCPECGTDHDRDVNAARNIKAAGLAVLAHGEPVNPESLKAA

SEQ ID NO: 20875 - protein, 180 aa, unknown
  TnpB Polypeptide
MEVGHINNVTIERTPTGKYFVVLNVDFDPEPRFNNGSVVGIGVGIKEFYSDSNGNVVNNPKYLEKSMHKLAREQRRLSRKQKGSNNRNKQRIRVAKIYEKITNQRNDFLQKQSTMLVSENQTICIEDLNVKGMIRNHKLTKSIASVSWSKFFTMLKYKAAWYGSNIVKVPTMCPRILMQV

SEQ ID NO: 20876 - protein, 447 aa, unknown
  TnpB Polypeptide
MQKRKFTVVTQLHEKNNLELIKYIEASRSEYAKAVRETFYTLRTSENFNKSNFNAYLQCSYDITKRTANSIILDAQGRFNSLKELKRYEVNQLRHKISYLEEQLIPKLVEKRNNNSRLLQDGTLVSPIKQRNLRSKIVSKKAKLNRLKQKLVNLNYQLESGRLKLCFGTKKLLKQNYNRFIEQRDSQITFVGAKEEVCCNQNLQLTYNRRNNQFSIKLRKDFKKYKSANTRDKFIYGEIYFNHHKDKIISILKNKNSPLSYRIIKENGRYYLYCTFEIQVDEKGFTTYPDYGTIGLDFNKGFITLSETNQHGHLIRTQFLPYRFRAGNKTKTDLQKIANHVTALAYQTGKDICIEDLDFGTKRFKTEAKQGRQHNKMLHSLAYRQFTNIIESAAYQNKVTLTKVNPAWTSWLAEQLYCPTMKLNVHVGASYVIARRGQGYKDTVKSL

SEQ ID NO: 20877 - protein, 328 aa, unknown
  TnpB Polypeptide
MIINRAHKIKLTKLSSEQKTYLLRSAGASRFAYNWGLAEWKKQYEAYTQGKTKIRPNAYDLRKLFNVRKKIENPSNYDELTWEQQREYFHWVTNVSKCIPQQALINLGTAYQRFFKKTAKAPRFKLKGKDDSFYIDNENAKIIKKEVNGTTCFYLSLPKIDHDFLLTEEPRFQGKLLSVTVSRHGESWYAALSYELEIPDPVVDKKRATTKIGIDLGIKHFAVMVDHGEVTFEEEGPKALKRLLGRLRLLNRRLSKKVKCSKNFEKAKLKISALHFRISNIRKDFQHKLSTDIVQHYHQVGMETLNVKGMLKNHNYRTSKDVLIAPLS

SEQ ID NO: 20878 - protein, 385 aa, unknown
  TnpB Polypeptide
MTTGKSKTAQHRESMVNATPQRTLVLPLDISPEQYGIFEGLADSYNRMWGSLVSWCDSNRSVNRTRMQKDNYARLRAEYPELPSQFVCIAMRDAAGAVRSWNSNHPKRRWNLKASRRKKTINYDLRVMSLRGNLLSLSVTHGEKRQRILLPDIPGWFDRRYSERKLNAAKLVLDPDGRNASVMLVYRLPQSTPIEHGDVLGVDLGQHSLTMDSRGGETSYSRMQGIRRRYAHNRKTLQEKGTRSARRRLKAMRHREERFIRDVNHRASKRLANTPNVSVIAFEDLAYIRRQARKGTKTGRRRRNMLNQWPFAQLQEFTAYKAARNGVRILMVDPAYTSQKCNRCGYVDARNRNHARFDCLRCGHSDNADHNAALNIRDRAIQNLG

SEQ ID NO: 20879 - protein, 361 aa, unknown
  TnpB Polypeptide
VIEMLVAYKYRLYPNKEQEIYFAKTFGCVRFIYNKMLSDKIEYYKETNQKLNNTPAQYKKEYEWLKEVDAQALCNAQMNLQTAYSNFFKRPEVGFPKFKSKKNNHFSYTTNQVTIKVSDKYITLPKVGQLRIKRHRVFDGKIKNATISKTPSGKYYVSVLVEQDEKEKLRTTDSKIGIDLGIKAFCITSDGEMIENPKYLRKSEKKLRKLQKDLSRCQKGSNNRNKARIKVAKEHEKVANQRKDFLHKLSIRYIRENQTICLEDLRVKNMMSNHKLAKSIADVSWSEFVRQLEYKADWYGREIVKIDTWYPSSQICSCCGHKDGKKALSIREWTCPECGTHHERDINAAINIMNEGLKLVY

SEQ ID NO: 20880 - protein, 147 aa, Cyanobacteria sp.
LNLNQRRVSRKQKGCSNRNKAINCLGRTHFKISSQRQEHAKRLARCVIQSNDLVAYENLKVKSLVRNYCLAKSINDAPWDRSRKGLEYFGQKLGKVTIAVDPALTSQQCASCATKVQKPLSTRTHVCSCGCEMDRGWNAAINILKEP

SEQ ID NO: 20881 - protein, 364 aa, unknown
  TnpB Polypeptide
MKCRTTIKLKIPKKIQLLKLFDSYLKACQYSADKALEHECKTKYDLHNIIYYNIRKLFKLKSQFAINAIAKGFEAYLSAKKLKGKKPVFKSVPVRFDRRTFTFFADKISLTTQEKRCVVPIDIPVYYWKYLDWTYQTADLILIKDKMFINITFAREVNTSTVGSTTVGVDLGINQLAVCSDGQVFKGHKTRIIQHNYLRKKLQAKGTKSAKRLLRKVSGKQKRYMAWVNHNISKTIVDSADTIVMENLKGIRKNRKGKRFNRWLNSWTFFQLQQFIKYKAEVQGKKVVFVSPYMTSQTCSNCLKIGSRYSNSFVCLHCGFSCDSDLNASYNLRRLNVTQPYSSCDDVKGFIATATEHRAKSPAL

SEQ ID NO: 20882 - protein, 249 aa, Scytonema sp.
TEPTKEMAGIDLGLKYFIADNKGNVEPSPQFYRKSEKQLNRANRKKSKKYDKARKKAKKPQSTNYHKARNRYARKHLRVSRQRKEYCKRLAYSVIQSNDLVAYDSAACPLGIDLNVKGMVRNRHLAKSISDAGWSTFRSWLEYFGHKYGKVTVAVPPYNTSQNCSNCGKKVKKSLSTRTHVCPHCGFVEDRDVNAAINILKKGLSTVGHTGTYAWGDLPSWAVGASLLSNGESKNQESPSREKGECQSK

SEQ ID NO: 20883 - protein, 422 aa, Lactobacillus sp.
MAEEQLYKALKTRIYPNPKQRRFIHQNFIVNKYIWNYFLDYLQNNYQECKKYLDENKENMSDDELKEIKKKMYPSKFDLINKLSELKKKETWLKNSESTSLQNTIGNLYQGYQNMFRGDARLPRFKRNLHSYTSNITSPLKTNSIDREKHLLKIPRLGKVFYPYSEKLKMNSIQTITVSEDNLHNFYVSIMYKNGFSTSNLDNLNASKMIGIDLGLTNFATLSNGDTIPAMQFDYTSRKDIIRKRKLARRGKAAFKKVKAFNHKHAKDDTPLMKVDDLKGYRDIKKADAKVEKKKALRRKNFLQNIANSLVKQYDFIVIEDLKINKMLKNKFLSRRIANASWRSFRTMLENKCKEKGKILMVVSAYNTTRICSQCGYYNGIKNLSVDKWTCPHCKSHLIRQVNSAKNILNKGIEEWKVKKDK

SEQ ID NO: 20884 - protein, 367 aa, unknown
  TnpB Polypeptide
MLKAYKYRIYPNNKQKIQIAKTFGCCRFVYNQTLAYRKGKYENGKEAVTKTDCNNYCNRELKKKYGWLKEVDKFALTNAIYNMDAAYQKFFKEHAGYPKFKSKHNSCKSYTTNFTNGNITADFERGKIKLPKLKTVKAKLHRKFTGKIKTATISQVPSGKYYVSVLVETEQEELLHTKQNIGLDLGIKDLCTRSDGEKYENPKTIKRYEKKLTKLQRQLAHKEKKSKNYYKQRRKIALCHEKITNTRKDYLHKVSYRIISENQVIVSENLQIKNMVKNHHLAKSIIDTSWYELTRQLEYKAAWNGRQYIKIDTFYASSQICSGCGYQNAGTKDLSVREWVCPICGTKHDRDVNAAKNILAEGLRQIA

SEQ ID NO: 20885 - protein, 398 aa, Scytonema sp.
VTRVLEIQTLTAICKLDVDTKTATDIDNLMLMFAATCNYVNASVNPRYTGATKIQKLIYKDAKEKSGMQANHVIQACIRVAGNRKVNRVKEYKPGSVPFDARTMAIRWHNKTVSLTLLGKRVKGIPLVINKYANYLLLDRENQEITSAVLVRSGKAYYLHIQVDHFVLQPNASSQYLGVDLGRRDIAYTSDDQSWSGKEIETVRVKHSKVRAELQQKASKGTRSSRRRCRQLQKRLAGKEHRYQKWLNHNISNAILLNAKRTNRYVVLEDLEGIRERLNEKPNKREQRFLSNSWSFYQLKQFICYKAKIYGVLVILVDPRYTSQTCHNCLHIHPEKGKSYRSGKNFHCKHCNWKGDADANGARVIALLGENVNRPCGSEFISCQIPVVSSSRASESLH

SEQ ID NO: 20886 - protein, 403 aa, Chitinophagales sp.
MKSIQVRLEFNNEKRSLAAQHAGTARYAYNWGLAKSQKAHQLGLKRPTAVDLHKEWVVFKHTEATWAASVSKCAPQEAFRHLNTAYQRAFKMKHVRLPKFKKKGQKDSFYLEGSIHLKGNRIQLPKLGWVKCSETLPQGVVVKNVTVSRQAEHWFVSFKMPHSKSVPTIDNQSIIGVDLGIKTLATLSDGQTIANLRPYRQHKRKLRLAQRQASKKYIKGKSAKEQSHNYQKAQANVAKIHYKIARIRKDALHQVTTRLAKNHREVVIENLNIKGMSRNHKLASAILDGGFYEFRRQLTYKCEWYGSKLTIVDRFYPSSKTCSGCQKVKKELSLKERTYCCEHCGLAIDRDLNAAINLRNQAVSYTVSACGVFKPPNDSFVGNTVKQEADCEIENVQDCVSSV

SEQ ID NO: 20887 - protein, 319 aa, Helicobacter sp.
MLSNNTLKTNKTATALSKKKNGKVMLITYKQKLYKNDKNRRIDTLLRRYGVFYNHCIALHKRYYRLFKKYLKLNDLQKHTTKLKKTHRYAFLKTLGSQTLQDLTERIDKAFKKFFKKQAKLPRFKKVANYKSFTFKSGIDKKTGLNKGVGFEIKDNVVSFNGYSYKFIKTYALIGKVKTLTIKRDNMGDYFLCLVCELENNPNKQTACDKSVGFDFGLRTFLTGSDNTKIESPLFFSKYLPLIKRRSKNLSKKVKGSNNFKKAKKKLAQLHQKIKHLRTDFFYKLALKLSRKYQSIFIEDLNMKAMQKLWGRKVSDYSF

SEQ ID NO: 20888 - protein, 424 aa, unknown
  TnpB Polypeptide
MTDSQAFVKTLDFQLDIQSANESLLYDACLESRSAYNEAIRLAKEGVDWDAIPDRVADDADLVKNTAQRVVAKALGAMENYYEHDDFGQPSHTRDGAYPLRANYEEGYNLSLTDDGDVAFRISAKPYKHVKGVLEGGDTHLDILKTALTSDEWKIGTAEALFHNGNPELHVNVTKTDQTVRDKEDSRTVVGADVNEDNVALTALTEDGVEDTLVIDFPEIKFERHRYFTMRKRVQNAGKDSIHDTLEGREERFVRDRLHKASRHIVEWSQRFERPCIVFEDLKEMRDSIDYGTRMNRRLHHLPFRALQFYTSYKAAFEGIPTAWIDPEYTSQRCPMCGHTERANRNKKRFKCRDCGHQDHSDRGASVNIAVKGIKKLEWNVPALNNLPVVRKVRREASGAVDAPTVTHPTARGYQTDGQVGVSD

SEQ ID NO: 20889 - protein, 386 aa, Escherichia sp.
VAGDIPPNNDDQLNINTLYVHTTMNIQIKILSVRIKDKHAAVLRQMAFEVNQIFNLANEITSAAYGNAGFFGAQKPQWLSAFDVQKPLLKERKERGYTIPSHTVQEIAAIHGKARKQFKRSRLRWRVSGGSRRSLGWVPFKIGSAVWKNGAVRFAGRIFNVWDSYGLGGFKFRAGSFSEDSRGRWYFNVCVEVETVPSTATSAVGIDLGLKDYATPSEGDPLIAGRFYRDLEPALGKAQRANKKARVRAIHAKIKNRRKDALHKYSTALVNSHAAIFVGDASSKKLVKTKMAKSILDAGWFMLKTQLEYKAIARSVMFEVVNESYSTQACSCCGAISANSPKGRAGLRIREWTCCECGTTHDRDVNAAKNILAAGHRRLAVGIPFL

SEQ ID NO: 20890 - protein, 369 aa, unknown
  TnpB Polypeptide
VVKARKTFRYRLYPTPAQADTLTWALERCRELYNAGLQERREAYRMCGVSVGYLHQQNQLPAIKGVRPEYKQIGSQVLQDVLRRLDKAFAAFFRRVKEGHPKPGYPGFKGRYRYNSLTFTQAGWKLNKRLRLSGVGALKIKLHRPVEGAIKTVTIKRDVDQWYVTFSCEAEIEPAPIQDKPAVGIDMGLEYYATLSDGTHIENPRHYRKAQDTIARRQRVMEQRRKGSGKCAKAGVLVRKAHRKVANQRRDMQHKVARRIVDTYGAVAVEDLNIAGMVQNHSLAKSISDAAWGHFIAILTSKAVSASVVVVAVNPSGTSQTCSACGAKPERAKTLADRWHTCACGCSLQRDVNAARNILNRAGLARQVA

SEQ ID NO: 20891 - protein, 540 aa, Chloroflexi sp.
MGTKQTKQSKHSKENTPTFLLELPLEVEAGQARRLRSHLEAGRQFYNAVLSEGQRRLRRMKADPAWGAAQALPRTRPLERRAAFSALRQQYGFSDYAFQGFAKELRVSWLADHLDAVLAQTLATRAYRALNRVCVGQARRVRFKSRGRGLASLENKRNDTGLRFVLQTPEEGHAGYLVWHDDQLGALIDWNDPVVKHGLDQPIKYARLIRRPASSPRAQGADREGDRYFVQLALRGVPYQKPKHEVGKDTIGLDLGPASIAIVPREAEARLDLLCAELRPDEQAIRRLQRQMDRQRRAANPEHYDEQGRVKKRGKGAPRWKQSRGYQATRRRKASRERRLSAHRKSLHGRLVHQIVSVGNTILTEKISYQGWQKQYGRSVGLRAPGMLIAHLRRTVASTGGTLIEVPTRSTKLSQYCHGCGQTVRKPLSQRWHQCPCGIGPVQRDLYSAFLAAYLDPAEPIPSCAQYVVPWEGAEARLRAAHERVKERANEGQVVPRSMGIPRAGARLPQSRSEATPELLFLSRRGNVEAWKHRPEPPVL

SEQ ID NO: 20892 - protein, 331 aa, Bacillus sp.
  misc_feature (310)..(312): Xaa can be any naturally occurring amino acid
MMINKAYKFRIYPNKTQATLINKTIGCSRFVFNHFLSLWDNAYKETGKDLTYGTCSARLPAMKKEFVWLKEVDSIAIQSSVRNLADAYTRFFKKQTSTPRFKSKKNNVQSYTTKQTNENIAVVGNKIKLPKLGLIRFAKSREITGRILNATVRRNPSGRYFVSLLVETEVQELPKTQSYIGMDMGLKDFAILSDGTIYKNPKFFRSLEEKLAKAQRVLSRRTQGSSRWNKQRVKVARIHEYMTNARKDYLDKVSTEIIKNHDVIGIEDLQVSNMLKNHKLAKAISEVSWSQFRTMLEYKAKWYGKQVIVXXXGIALLAVHTMIGILTQVSI

SEQ ID NO: 20893 - protein, 293 aa, unknown
  TnpB Polypeptide
MNLTEKEIIYSTDERFSLIKELCHLSKNLYNASLYDVRQYYFETKLYRSWKSQRPIFTKSNNPDYYALQSHLAGEIFKQVGEQFISFFNNKSNKKKRIPRYKDKNGYNVVAFPKITISKNIEFDEDKQLYSYTLCKRSYNLKVQSSKPNVKQVKFVYDEANDLIKCFKIYEVEQPKLKRDNSRYFSIDPGLNNIMSIYNNIGIRPLLYNGRPIKSINQYYNKTKAKMRSELPANVKSSKRLKQLSFKRNNKIDYEMHKISSHIINEAVKNNISKIFIGNNIGWKNEINLGFII

SEQ ID NO: 20894 - protein, 413 aa, unknown
  TnpB Polypeptide
LEGGGIMQLTEQHIINRDDPRFVMINATAFKSKYLYNAALYAMRQAFFKERKYLTYNEMDKLMQSHEAYKALPAKVSQQILMLLDKNWKSFKEAKKAYDENPSKFTGRPKLPKYKHKTEGRNILIYTVQALSKTALRDGLIRPSGLPITIETEHTSVDQVRIVPRNGHYVIEIVYTKEPVQAVVDPSFCVAIDLGVTNVAAIASNREGFVPRLVNGQTLKAWNQWYNKRVKELKLCLPKEDRERVTRQMERITNKRNRRIDHYLHTASRRIIDFLVEEGIGTVIIGKNLLWKQEVNNGRHNNQNFVSIPHTRFIEMITYKAALVGIQVEVQEESYTSKASFLDLGPIPTYRPNDEEKHTFSGRRVARGLYRASGKRSINADVNGAYNILRKRRPDVFAKGVAGYVVHPSRLAV

SEQ ID NO: 20895 - protein, 342 aa, unknown
  TnpB Polypeptide
  misc_feature (310)..(310): Xaa can be any naturally occurring amino acid
MLLCTKIKLEVSEQDATTLDFMQNKCRGLYNWWVMRLREGEQWNVYEAKKSLRESKIHDPELEQVYGKLLAEVYFRLDKAMKAFYRRVKAGEPPGFPRVRPRHCFFTLCYPAMYIKVTGKIVELPTGGKGKHNKQYPTIQARLTETPPEKYKEVAISRDARGDYYASFVSERQEEQASPDGIIAFDLGMKTLATGVNDKGTFYHVDGFKGGRWYNRQLDKIRSKRDKCKKKSRRYIHLSNVYKRVAQKKRNKQRDSLHKASHLISHKLVERTIVVGDLSARQMVMKEHKERNKHLNRAVFNDWGLYTFTXMLKYSAIRSLQTIAIRGTSGKEIFDNYLSDVG

SEQ ID NO: 20896 - protein, 463 aa, unknown
  TnpB Polypeptide
LVNRFQFRSLSVLSATSPCELYIPRNNVSTTMSYRTVKFQLFPKPEQEKRMLLNLHACRATYNDLNEYCRDCVQRYREWRESMGVDEGQDASQYGTDTNPVPGFPSMFDLTAKAGELRDINLWRREAYGTSVREVGARIHKAYQRWFDSLIDDPSAGKPRFRTDGRYDSFTYPAYEQYRLDTQGLFRGKKPRMFLGGVGWVRASNNGIIKRVPTDCMKQAVISRKKMGKSNKWYITIFCECLEIPDNRTWYMDAETPDPVGLDLGARRVATLSDGTVVENHRTMRKNEKRMAKIQRKISKAEEGSEERRKYLGHLRHLQKRIDDSKNDVLQKATRSIVQNHTKIFVEDLSVKKLIDLQDNKESRKLFRDASAGMFMRLLRYKGEETGSEIVPVDPAYTSRICTKCGKLNKPFSEETFRCRFCGFTKHRDDNACENLFRRGMGFDILGTSSIAGITEAEAEVHN

SEQ ID NO: 20897 - protein, 423 aa, unknown
  TnpB Polypeptide
MQLTERHLIKPNHELYRALDDLTFKAKNLYNHGLYLYRQSYFEYKKNPNKPVLSWVDIDKSLRRQGHEDIRALPAKVANAVLKNLGESIASYWKLFRLKREGGLGQKPGLPRYLHKTDGRYPVSFNYQTFRSKRGTNNELILCPKGLCLRIPTKVKHPKQVRVVPKHGNFVIEVIYEVEECAPKRTSKYAGIDLGVDNFATVTFSAQRKPLIVKGLELKSINQGYNRLISKAQSMLPGTQKTSKSIHRLWSRRSWVLRTKIHQMTAFLATLFDEMQIEKVFIGKNINWKQKLPFDRAVKQRFAYLPYETFIEQLHYKCQLRGITVVVQEESYTSKASFLDNDDIPVYGETGNPRFSGRRITRGLYRTSTGRLINADVNGAYNILRKGLVANHQSFHMVDPLIQPLVVKGIGKEPNSKLVQLYM

SEQ ID NO: 20898 - protein, 366 aa, unknown
  TnpB Polypeptide
MMRSYELRLKPTRAQKEAFARILLDSQETYNACLQERKEAWKLQHKSVTYNDQCAELTQLRKDVQFATIAVDIQREPLRRVDRAFKAFFRRCKSGDKPGFPRFRSRDRYTSFAWHSPRLHGDSVLIPNLGHVRFKAHREITGTAKQVTIKLNGKKWVGRVVCDIGPAPEKCVVSRPVGIDLGLTTFATLSDGSEVQNPRFVRQHAQRIARAQKNLARKKRGSKNRIRAKEQARRAYQRMSDARKNFCHHVSKALVGRYDLIAHEDLKITNMVKGNLAKSILDAAWGQLLFQLSYKAECAGRYIVAVNPRGTTQRCSRCGEIVPKGLADRWHECPHCGLSLNRDHNAALNVLALGRSAVEVLAEGSK

SEQ ID NO: 20899 - protein, 366 aa, unknown; identical to SEQ ID NO: 20898
  TnpB Polypeptide

SEQ ID NO: 20900 - protein, 392 aa, unknown
  TnpB Polypeptide
MESMKKTLMVKLDTAKEEHTALLETMNRFNEACNYISEIAFSIKSANKIKLQQIVYHDVRERFDLSSQLAIRAISKVSEVYKRDRSIKPGFRIDGAVVYDQRILSWKSLELVSILSINGRLKIPVIMGEYQQTGIDRKSMCGQTDLILRNGIFYLAVVVEVPEPSKFDAVGSLGVDLGIVNLATDSDGDTFSGKQVDEVRERNVSLRSNLQKAGTKSAKRHLKKLSGRERRFQRDINHNISKKIVAKAKDTGKAIALEDLTGIRTSTTVRKTQRSRHSSWAFRQMRSFIEYKATLSGVSVILVNPRGTSHTCPVCGHNERRNRPNRDTFRCVKCDFSGHADHIAAINIAARAAVNQPVIACDEVKANIGIEMEHSYKPLSGASNMPLNSIRG

SEQ ID NO: 20901 - protein, 405 aa, Ewingella sp.
MIRAFEYRLFPTDIQRETLLQNAGNARFIYNHFLAELRDTGEFLNSYALSKKLTQLKKENGFEFLKLSESSSLQHVAGNLGNAITRFFNKVSKFPVFKKKQVRDSFTISNLNNNCKIWNPASEGCKGKHQIKLAKLGWFRYKSHRPIPENSNIKRITLRLKSDGHWYCSIVTDTGIIPEVVNPKSSVGVDLGLKDFLTLSSGEKISSPKHYHLAQSRLKYLQRSMSRKAKGSNNWNKARRKVAKLHFKIAAQRKDFLNKLSFAIATKYDLVTLETLNVAGLSRNRRLSKSIMTSGWSTFKNMLEYKLADQGKWWCYASPFFASSKIHASSGYKNTELTLAIRYWQCPETGIQVDRDINAAINLDQLGQHWYLTDHLLDSNAYQNAIKSKTLLSLNLPKPESERAA

SEQ ID NO: 20902 - protein, 419 aa, Ewingella sp.
LIIKGKTNNILYKYILTGSSMFKGYKFRLLPNQPQIQKLNQAVGNARFVFNHFLEMKMKTYQETGISISHNDISALLTQMKKDSNYSWLKETPATSLIGSLQNLDAAYRNFFIHNKGFPKFKSKRGKQNFYLSALDLKNSWQNHQCLWINPENSKDVQVKLGTLGWFKLNLHREMPESGKIKCAHISKEANGEWYIAFRTELQEAYPETIPVEKAIENSIGIDFGLKTFLTLSNGEQIYSPKHYQTSEKKLAKLQRSLSKKTKGSNNSLKTKQKLVNLHRKIANQREDYLRKLAYQLASRFDLITIENLNIQGMSSNHRLAKSVMTSGWAKFVTFLREKCREFGKHLIWTGRWFASSRIIYDTGEYRSNMTLKCRTLTDCHGNQIDRDVNAAKNINYWGQHFITTGELLATKDYLALYS

SEQ ID NO: 20903 - protein, 561 aa, unknown
  TnpB Polypeptide
MRSIRMPYVVAPPTGTRIRTRLRLTPADEQVVTAVGRHLATLAGQDLAWRCRRGLHADQRTERKRRLTAASSSRWAGTITRTANDQWKRGYRNLLDARTGLRRATFAIDRRLAGPIKGRHGRTRGYASRVERYQKQRRLQHLQAKLAEVERRLAEGRVSVCRGGRRVARLRHHPDTAGLPASEWRGRWQAERLFLTADGEAEAGWGNLTIRVHPDEQWLELRLPTPLAPLSNTLGRVATYRLSAPVVFNYRADQWAAQAATGAVRYDVTYQPDRCRWYLDASWRLPAAEPPSLEELRQERTLAVDLNADHVACGVLDSAGNPVGEPTTIPLDLDGQVTACRDGRLRAAISQLIALANGHGCKSIMVEDLNFTDIRWAGRETLGHGRRGKSFRRTIAGIPTGRFRDLLVGMATNAGLWVVAVDPAYTSKWGRQHWLAPLRRTSPATATVHHAAAVVIGRRGLGHNARRRPGVTGHDRRIVAGELPARPSIRLRAVGEPDQQKASGQRRSPRKTRQAGSQEVRGPGGSGLFGTTGAGLTPAYLIGAVARQVQSPPTSRRPQPP

SEQ ID NO: 20904 - protein, 297 aa, Okeania sp.
LYAKKLELKLSNQERSKMAQCAAYARFVYNYGLSMVNGTSGMTKVNKCGQKVSLSYSLRILEAKKVFTNYVKKQPEYAWINNYSSRIYQSAFQHLGEAFKRYKEGISKYPKLKRKKDRQSFTVYDGNGKVKINPGKKIKIPTLGTFRLWESIPYTTASQTFTISRTAEKWFVSFSIETSLLPAHSLLDERSEETFGIDVGVKQFASIGNLELGENALVSLPGSIKLEQLKIAKFQWRNRNKQLGGQGKPPSKNGIKYYKKLAKYHGRVKNLRRDFIEKTTTNLASKVKHVCARKFKC

SEQ ID NO: 20905 - protein, 243 aa, Okeania sp.
LYAKKLELKLSNQERSKMAQCAAYARFVYNYGLSMVNGTSGMTKVNKCGQKVSLSYSLRILEAKKVFTNYVKKQPEYAWINNYSSRIYQSAFQHLGEAFKRYKEGISKYPKLKRKKDRQSFTVYDGNGKVKINPGKKIKIPTLGTFRLWESIPYTTASQTFTISRTAEKWFVSFSIETSLLPAHSLLDERSEETFGIDVGVKQFASIGNLELGENALVSLPGSIKLEQLKIAKFQWRNRNKQL

SEQ ID NO: 20906 - protein, 267 aa, Microbispora sp.
MRPRTAASLRTSANSLRASATLISSDSIRGSVHGCYNFRLYPTPGQRQALARAFGCARVVFNDGLRARQDAREQGMPYISDGELSKRVITEAKRTTERSWLGEVSAVVLQQALADLNTAYRNFFNSMAGKRKGPKVAPPRFRSKRDNRQAIRFTKNARFSVTPGGKLRLPKIGDVNVRWSRDLPAEPSSVTVVKDAAGRYFASFVVETAGEPFPKVTPEIGIDLGLTHFAVLSDGRKVDNPRFLRRAERRLRKAQQAVTGHTSSPPR

SEQ ID NO: 20907 - protein, 493 aa, Hungateiclostridiaceae sp.
MGLRTIHLKLHKPGAAKRNIINKAFLNYNNAYNYLLGKAYSEIDIIEERCRSKKGTYSTLGLSKWIDSDLSAEINRFDIQPFKDSLKLDFGMTLASYFVQKKNNPQMPYPGFKSEPVTLGEKLRTIYFCRYDTKRCFCLLHDAVNQKFFAKLFLMNTRNGKDRCSHEFNRELNYISKKPEKAKALKKETFIIVPLSFGKWQLDFLMQAVEKPEMLRTARLINKNNEYYLSLSIDLPEDDKIETNTFLGVSRGMESAVNYTAVDGQGHLLLNGTFDCRNSENQSECKKEMHKLASEIVNLAVKNKSMVVLQNLTGKSDKLSWTDEGKTVKPVFGCKQYNDLARILDYKLPQKGLPPPAKVSSVDIFHSCSVCGSNTKKNRFSKTLFICTTCGLSSSLDSLGSLNLSTKLIRYKNTPFKLKARRTMEGMYLQNELIGLDFFVPRYQNPLDILKEKIQEISDSFEEYAGERKLNSKEVRSIIEKLKRNNFANIEIV

SEQ ID NO: 20908 - protein, 404 aa, unknown
  TnpB Polypeptide
MQRLQAFKYELMPTGEQQRNMRRFAGSCRFVFNKALALQKQRYEQGEKKLGYAGLCKELTAWRNGTETPWLADAPTHPLQQTLKDLERAYANFFAKRADFPRFKKKGQQDSFRYPDPKQIRLDQGNSRIFLPKLGWLRYRNSREVLGTLRNVTISQSCGKWYASIQTEREVEQPLPNGGAIGIDMGVARFATLSDGTFYAPLNSFKRQETALRKAQRSMNRKTKFSNNWKKAKARVQRIHSRIGNARRDYLHKCSTTISQNHAMVCIEDLQVRNMSKSAKGSAEQPGKQVRAKSGLNKSILDQGWFEFRRQLDYKLAWNGGWLIAVPPQNTSRTCPYCGHVSKDNRQTQARFECVGCGFEEHADVVGAINVLRAGHARLACADTSPEVGASGQEPTEATIQVSV

SEQ ID NO: 20909 - protein, 522 aa, unknown
  TnpB Polypeptide
MECVRRAVAVELERPPPELYALEEPYRRIVEEVAAYVAERGRLERERYNELYRRFREQYPLPAQLIQQAMNQGVETGKSFLEAKRDGRVYKPRPEVGRVSIRFAKDSWSYKKAISSVAPVRLALSLPGGRREVWIKPHRRFWLYWWKTLRGEAELASTLMLKRRRGRWYAVFVFDVASKSEPPAEVVAFDVNENSVAVARVSLLSTVDAVARWNWRYVDPAVYSIKTDFGRLAKRYEAVRNAKLEELKRKYPYTGRDEEERRQNVADTREYKKFARRLRERRRKEGRVRQIASEVTKSPAVIVTEELGKNPQGEIIGVEEKAKKGVKKKVGKRELRHRIKQTPFRKLIGTVEDKAREAGSVVVYVSSYRNSKVCPIHFTLLRDNGSWHVLHCPRGHIVDRDVAAVLNMLWRTTPTGWVKAVWWDVKEAKKRLKKGIMPKDAAKKRNPLVPWPVVCAVWTSLMALKAGGKWPAVLARAAPMTPAQGADEGGARAPVSRPKGGEEVRPPHRPRGHEVRAETKGV

SEQ ID NO: 20910 - protein, 545 aa, unknown
  TnpB Polypeptide
MLKTGLYQTPANAGKRAQVRAVFKEYRHTAVRLGAAQWRLFFTAGKLNRNATLRIPTRLSARYVQTCQYQVVGQLTGYLGNCANHFKSLVRHSSLDADTQRTLLYLNKYKAWYRPAVEMAGVPVPASTLRLARNLMRQVFQRLRKPRLARINLALDEKVAQVVHCTTTKTFSRWLKVATLTRNKPVLLPIRDNRWFDGLAGEEKAFSQLNLDETGTLWIGLIKDVAPTPYAPGLDILGLDVGLKHLLASSEGDLLGQHVLPRLIALDRQISTLAANRQRQGLKVRSPRYDALVRRMRGFLDNEVRRTLRQVLLRHRPSEVAVERLDFRSPQLSRRMNRLVQNFGRRVFKEALETYSMQYGFRWTEVEPAYSSQTCRLCGYVDKRNRKGEVFKCLHCGQQEHADVHASRNIATRLREDLGGSQAKWTGRRRARGKILEAVVGGFATRKRLARLQQVLQQAPARLTRQRRLDSKPCLVMLSNPHFREVLAPLKLAAQGALYRATQPLAALRVLHGLKTPTGLLLQTVSISDFIIAQLRFPVIARHKR

SEQ ID NO: 20911 - protein, 456 aa, unknown
  TnpB Polypeptide
VYRANIARLAADEGADERPRGASEVTRTVTVRSERLPRRTFRAFVELEGMYRNMVEQLVLYAVDNNITKFTRLKAERYREVRSLYPRLPSHYAYTACQDAAERSHSFLKLRKMGKARKPHPEVRDVSIWLDDHLWSAEGLTSVSLATHKGRVRVSLELNRHLLRYVNRSWRLTSEARVKLDHRDRRLMLYLTFRKEVSEYRPKAYVTVDVNENAEAALIDGVVYLFETDLSRVTLGYYYRRKSVQERYDRVYGPGSRPARRIFKRLSGNERALKRDIRWKLAALIVREAARRQAAIVLERLGREPAKGMIERIRNPQLRHRIFQAAFKGIQRAIEEKAREYGVPVIYVNPRNTSRTCPIHGAKIVYGKDRHGTCSRGGETWHRDVVACYNLLLRALGGDGGSAPSRTRALVTVDVSPVPLGSKESHDPPAVKLGRWLRAKSLRSIMIERKMSEMRA

SEQ ID NO: 20912 - protein, 406 aa, Paenalcaligenes sp.
MKRLQAYQYELTPNGAQRRDMRRFAGACRFVFNRALAWQKDRYAADSTTKFSYTVLANFLPAWKKDKETAWLKQSPSQCLQQALKDLERAYKNFFAKRAAFPRFKKKGQSDRFRYPQGCQLDQENSRIFLPKLGWVRYRNSREVLGTVKNVTVSHKAGQWFISIQTERDVEPPVPQGTSAVGIDMGVARFATLSDGTYYAPLNSFKQHETALRKAQQALSRKIKFSHNWKKAKTRVQRIHSRIGNARRDYLHKATTAISQNHAMVCIEDLQVRNMSKSAAGTTEQPGRNVRAKSGLNKAILDQGWFEFRRQLEYKMAWVGGWLVAVPPHYTSQTCPECGHCSKANRPTQAQFRCVECGVKENADVVGAINVLRAGHARFACEVSGEVMPPAAGTHRSDSGAAQCRI

SEQ ID NO: 20913 - protein, 329 aa, unknown
  TnpB Polypeptide
VALSVASGTISAVPRDAAVKEPSRVLVSHTGVPLSRSTTFRFTLDPNRAQHQRLLAHAGAARLAYNHHLGRAVANLNQRVAERSYGVGQADLTPALSWSKVSLINHMNAWKDGRATDANVSLDEDGNEVRGLPWRGEVSTDVFECASVNAAVALANWSKSRQGQRAGKAAGFPRFTSRHKSPPAFRIRSKSKPGQTSPVRATGPRALRLPTLGELRVHEHTGTLTKMLASGRFHVYAASFRLEHGRWVVAITGVAAQLHHQRRGPKNRYQARVAERVYDCAACGLVIDRDVNAAVNLARYTAPPPKAVQPPKARRYQRPPDARTASAPG

SEQ ID NO: 20914 - protein, 329 aa, unknown; identical to SEQ ID NO: 20913
  TnpB Polypeptide

SEQ ID NO: 20915 - protein, 408 aa, Leptospirillum sp.
MKRLRAFKFRICPTPEQETLLSRHAGCTRFVWNKALDLQKRRLEAGMALLTYGDMAKLLTLWRESDEYGFLALAPSQPQQQTLKNLDRAIREALDKKNPKRFPRFKRKGEKTSFLYPQGTKLDLSTTDPEGRTVLPRIFLPKVGWVKLRLSRQIEGEIQNVTVGERAGRWSVSIQTEREVPEPLPKTRPAVGLDLGVAVFATLSDGTRLHPDPTLLAAMKRAEESLSREQRKLSRKYRKGAKSRNFAKQKRRVARAHERVANMRLDFLHKTSTAIGETQAVVHVEDLRIRNMSRSARGTVESPGKKVRQKSGLNRAILSQGWGIFLTILDYKLSRNGGHLVRVPPRYTSQTCSVCGHAAPENRKTQEAFVCMTCGHAENADVNAARNILRAGQARSACSEAKTSESAA

SEQ ID NO: 20916 - protein, 410 aa, unknown
  TnpB Polypeptide
MEQDRKNKIKKTLSETKERRASMTCKVIECKVDSSNLSDPTISSLNKLFLESKWLYNSILASQDISSFDTKINEVEIKVKDKFENRTLETISAQMKQGIKTRMFSSLLSLRELKKKGHKTGKLKFKSEIKSIPLKQHTQTFTILKHSKRIKIQGIKKPLKVNGLNQLPKIYEIGNANLVKCGKDFYIKITIFTNKEKINVPDKSVGIDFGCETQLTLSNGEKIKYQFPVSKRIKILDKQLARKPKESRSNNRYKVLAKREKAYKDLTNKRNETKNQIVSKLVKNYKTICFQDESFSDWSKNGHGKKIQFSAMGGIISALKHKAVTPIVVDKWYPSTQICSRCGEKHKMTERERTYLCQSCGIIIDRDVNASINIEREGLKIKEIPMERRDFKPVEIGTSLDSLVNSKVLV

SEQ ID NO: 20917 - protein, 396 aa, unknown
  TnpB Polypeptide
MNALTYNIKLRFQSQEDKESLINLLLEHQKVWNYMSEYVFNSKTIDKKLIHDKNYYQCRKLFPECPSQVIIRAKDSVYATYKTIKSNHHEITEPAIQENLSIRLDKRLYIFIPNNQIKLTTTGKRIICSYSPYDKFKEMFSKYSVCDPLVFVRNDQIWLAVSFEVNTPTLIEDSCIGVDLGIKRLATTSEGIAITNKQFLKEKRKFRYLKRMLKSKSKTTFSRSSKRKLKTLKRKEFDKNKNESYLIANKILETKANVIVMEDLTKIKEKNRGKKFNNKQSQVPYFDLRRILTYKAPLQGKIVVTVDPAYTSKNDYRGIKKGKRQGCRYYTSDGKVFDADWNASINIANRYAMRKKVKGVELPVSFNAPIDGALNLIGKPHQLANCEIRSCKFNGV

SEQ ID NO: 20918 - protein, 445 aa, Actinomadura sp.
VRIVLVTQAYRFALDPSPRQERGLWSHAGAARFAWNWGLAACRDRYDAEGKWWSGVELHRLWNRVKKTDPGLGWWGEHSKCVHQEAFRDLDRALRGFVRARKGLRKGRRPGFPRFKKRGRCRDSFRFGSGVMRCSGRTVTLPRLGTIATHESTRKLARRLENGTARILSATVSRTAHRWFVSFTVQVDRNVLGRHARPGTIVGVDLGVTTLLTGVDDHGAEIEVGGPKALRAGLRKLQRLGKAHARAQRGSANRAKAAKRLARHHARVAAVRADALHKATSTLAARYETVVVEDLNVTGMLANRRLAGAVADQGFGAVRRMLDYKTGWNGGRLVVADRWFPSSKTCSGCGGRKPSLSLSERTFRCDACGLVLGRDVNAAINLRNLAASGAERRNACGGDVRPGPAGRPPAKQEPGTAHHAGETGTAAAQATAIWTADAHIRSWFR

SEQ ID NO: 20919 - protein, 405 aa, Boseongicola sp.
MARVATHRQVVCRLLPQRRSTWRLLERTLEDQRQLWNAALEERIDCYRKTGRSLTYFDQCKALTQCRRDDPEIAACPVAIQRGTLKRLDEAYKHFFRRVRNGETPGFPKFKGRSRFDSISVVSGVKVRDGMLHVPGFGPLAVRRKGGNPYPDGKPVSAVLKRVCGRWTAVVCHAVEVEEPADNGRSVGLDRNGGQVADSDGELHVMPDMARLEARSRRLQRKLSRQRKASRRRERTKLRLARLRRKIANRRHNWHHHVSRRLAAKAGTVVVEGLDVKGMTRSAKGTVEAPGTKVAQKSGMNRVVRDTGWTALKRMLDCKAANVIVVPARNTSRTCHECGAVEAASRRTRDDFICAACGHAAHADLNAARNILALALDGRAGKDEAPRIGAPARREAFALATSTDP

SEQ ID NO: 20920 - protein, 406 aa, unknown
  TnpB Polypeptide
MKKTYEYRAYPTVKQANKLGAWLEILRNLYNQALAWRKETYEQTGQSVKKSTQEKALTPFRQESDTVASLHIDVLQDMIDRLDKAYQAFFRRGKRGDKPGFPRFKGAGRYRSMTFRHLSNRLIRDIRKRTARVVVPKIGDVKIHYHRPLPDGTIKTLTVRRKASGWYVCIVVEIADPVEIPVETTIGIDVGLASFLTTSDDDKVANPRHFRRSEKRLGKAQRILSRRDKGSVRYEKQREHVAKIHEHIGNQRRDFQGKTAHWLFCQCEEVAVEDLKIRNMVKNKHLSKSISDAGWGNFRLRLQSKAANAGLTLTRVDPKHTSQKCSGCDSVVPKSLSERVHACPHCGLVLDRDYNAAINIKKAAVALRGGVSVVNDPETPCSGTEARNSIRPIGRTNKYRPLGRGN

SEQ ID NO: 20921 - protein, 402 aa, Escherichia sp.
VKRLQAFKFQLRPGGQQECEMRRFAGACRFVFNRALARQNENHEAGNKYIPYGKMASWLVEWKNATETQWLKDSPSQPLQQSLKDLERVYKNFFRKRAAFPRFKKRGQNDAFRYPQGVKLDQENSRIFLPKLGWMRYRNSRQVTGVVKNVTVSQSCGKWYISIQTESEVSTPVHPSASMVGLDAGVAKLATLSDGSVFEPVNSFQKNQKKLARLQRQLSRKVKFSNNWQKQKRKIQRLHSCIANIRRDYLHKVTTAVSKNHAMIVIEDLKVSNMSKSAAGTVSQPGRNVRAKSGLNRSILDQGWYEMRRQLAYKQLWRGGQVLAVPPAYTSQRCAYCGHTAKENRLSQSKFRCQVCGYTANADVNGARNILAAGHAVLACGEMVQSGRPLKQEPTEMIQATA

SEQ ID NO: 20922 - protein, 327 aa, Escherichia sp.
  misc_feature (266)..(269): Xaa can be any naturally occurring amino acid
VKRLQAFKFQLRPGGQQEREMRRFAGACRFVFNRALALQNENHEAGNKYIPYGKMASWLVEWKNATETQWLKDAPSQPLQQSLKDLERAYKNFFQKRAAFPRFKKRGQNDAFRYPQGVKLDQENSRIFLPKLGWMRYRNSRQVTGVVKNVTVSQSCGKWYISIQTENEVSTPVHPSALMVGLDAGVAKLATLSDGTVFGPVNSFQKNQKTLARLQRQLSRKVKFSNNWQKQKRKIQRLHSCIANIRRDYLHKVTTTVSKNHAMIVXXXXKCAASLSTSSSGVAVRCLLFRQRTQASVARAVVIQRKKIACHKVNSDARHVDIQRTLM

SEQ ID NO: 20923 - protein, 212 aa, unknown
  TnpB Polypeptide
VEFPDCRDRSNHDGIGIDLGIKDLAICSDGNTYKNINKSQTVKKLEKCKRRLQRSVSRKYEHNKKGGSYCKTNNIVKKEKLLLKVNHRLANIRKDYLNQTTSEIVNRKPRFICIEDLNVSGMIKNRHLSKAVQNQGFFEFRKQLEYKCNDRGIQLIVADRFYPSSKRCSCCGKIKKDLRLSDRTYKCECGNVIDRDFQASLNLKAYGEQFAS

SEQ ID NO: 20924 - protein, 460 aa, Haloechinothrix sp.
MSTVVQAYRFALDPTTVQRHALASHCGAARFAFNWGLAQVTINLGQRQAERSYGIAEDRLTPPLSWSLYSLRKSWNAAKHEVAPWWSENSKEAYASGLANLADALSNWGASRTGKRRGRRMGFPKPKSKRGRWSCRFTTGAFGLSNSDRRHVQLPRIGMVRTHESTRKLARHLQRGTARIRSATVSYQRGRWHVSFSVEISKREAASATRGGTVGVDLGVQCLAVLSTGETIANPKHLQRAQRTLRRLQRQVSRRVGPDKRTQRAPSNRWSTTRDRVTRLHTKVANERRDGLHQLSTRLVREFDTIVIEDLNVAGMLRNRLLARYIADVGMGELRRQLDYKTSWHGRGLVVADRFYPSSKTCHDCGAAKAKLCLSERTFTCDHCGQTADRDHNAARNLAALVSEIASSASSPSCGATKNEPAGNPRKTTTSGGNGYRHGKTPRVNAAPQGDGSGTLPHVS

SEQ ID NO: 20925 - protein, 499 aa, Nocardia sp.
VGKFEPRAGFQVQAYRFALDPNAATEQRLKSHCGAARAAFNWAVAWVRSVWWQRAAEQSYGVPTEELTAWRSFSLPALRKAFNQIKHIDPHFAGWWTENSKEAYNTGLALAAAAFDNYCKFKNGQRRGKRMGMPRFKSKHRATPSCRFTTGTIRVDPDRRHVTLPRLGTIRTHESTRKLERRLAAGTARILSATVRVERGRWYIAFQVEVQRTALTPVRPDTIAGIDVGIKHLAVLADNAGQIRYEPNPTHLGNALTRLRKLSRRVSRRRGPDHRKGVNGSRRWEKANAARNKVHHRIANQRADALHKFTTRVRREYATVVVEDLNVAGMLRNRRLARHIADAGFGEIRRQLTYKGEWAGGTTVIADRWFASSKTCSGCGVAKTKLPLHVRVFTCNECGLILDRDANAARNLATLAASCSAGTGVAGDQDTTVSKPRGADRKTRATRTSCSAGAGRAGGATLPTGGGRKRETVPRTSSRSRGGDTGTDLPGANTRNADT

SEQ ID NO: 20926 - protein, 382 aa, Escherichia sp.
MRRFAGACRFVFNRALALQNENHEAGNKYIPYGKMASWLVEWKNATETQWLKDAPSQPLQQSLKDLERAYKNFFRKRAAFPRFKKRGQNDAFRYPQGVKLDQENSRIFLPKLGWMRYRNSRQVMGVVKNVTVSQSSGKWYISIQTESEVSTPVHPSASMIGLDAGVAKLATLSDGTVFEPVNSFQKNQKTLARLQRQLSRKVKFSNNWQKQKRKIQRLHSCIANIRRDYLHKVTTTVSKNHAMIVIEDLKVSNMSKSAAGTVSQPGRNVRAKSGLNRSILDQGWYEMRRQLAYKQLWRGGQVLAVPPAYTSQRCACCGHTAKENRLSQSKFRCQVCGYTANADVNGARNILAAGHAVLACGGMVQSGRPLKQEPTEMIQATA

SEQ ID NO: 20927 - protein, 402 aa, Escherichia sp.
VKRLQAFKFQLRPGGQQEREMRRFAGACRFVFNRALARQNENHEAGNKYIPYGKMASWLVEWKNATETQWLKDAPSQPLQQSLKDLEWAYKNFFRKRAAFPRFKKRGQNDAFRYPQGVKLDQENSRIFLPKLGWMRYRNSRQVTGVVKNVTVSQSCGKWHISIQTESEVSTPVHPSASMIGLDAGVAKLATLSDGTVFDPVNSFQKNQKKLARLQRQFSRKVKFSNNWQKQKRKIQRLHSRIANIRRDYLHKVTTTVSKNHAMIVIEDLKVSNMSKSAAGTVSQPGRNVRAKSGLNRSILDQGWYEMRRQLEYKQLWCGGQVLAVPPAYTSQRCACCGHTAKENRVSQSKFRCQVCGYTENADVNGARNILAAGHAVLACGGMVQSGRPLKQEPTEMIQATA

SEQ ID NO: 20928 - protein, 377 aa, Acidithiobacillus sp.
MDIKRAYRFRFYPTSEQITVLAQTFGCARFIYNHMLRLRSDAWMKRHEHISYHETSAALTIMKKMPDYTWLNEVSSVPLQQSLRHLQTAFGNFFAKRSSYPTFKCKDGNQSATYTDSAFQWNGKTLKLAKMKETLNIIFSRTLPKAAKVTTVTVSKDTAGRYFVNFLCDDAVSVKVPVNNQIGIDLGLTHFAILSNGEKIASPNVLRQNETKLVRLQRRLSRKQKGSCNRAKAKWKIARLHAKIADTRKDFLHKLSSRLIDENQVIAMESLAVSNMQKNHCLARSISDAGWGEFVRMLAYKAQWYGRTLVQIDRWYPSSKRCSDCGHIVSKMPLNIREWTCPECGSIHDRDVNAARNVLTAGLAELVCGENVSPVLL

SEQ ID NO: 20929 - protein, 388 aa, unknown
  TnpB Polypeptide
LLRTYKYRIYPTTSQSVLLDRHFGACRLIYNIALETRNTAYRSAGVKLNSYDLSKQLTELKKEHIWLNEINSQSLIEVLRNQDSAFTNFFNHRAQYPKFKSIKKANNSAKFPQNHKLIEEKSLLRISKFQEGIKIVIDRVPKGELRNVIVTKSKTGKYFASLLYNTGCAVPEIKNIKDGTSVGVDLGLKHFVILSDGDKIHSHKFLKSSQARLAVLQRRLSRKTKGSNRRRGQILKIARVHEHIVNQRKDFQHKLSTSIVNKYDTVCMENLSISNMVKNHSLAGAISDAAWFQFTQMIKYKCDWYGKNFLQIGRFEPSSKMCTCGVINRELSLSDREWTCDSCGVTHDRDILAANNIKFFALRNAGQGMPKEDVELPTLVGAMKRQVS

SEQ ID NO: 20930 - protein, 500 aa, unknown
  TnpB Polypeptide
MYPDEAQEGKLHEIFTIYNRVKRIGYNLLFHGDDYMTARFGEDKTIQQCLMSLCNNNPYVNTILIDNKQKLDAQHTWLEKRHKYMKQKIKVITKKISKIKEQDTRDRRLKGLYDRRSSIMAKFHTLKLEPIVFGGKKLFRNRILGKISREEFKIRRDSSFSCVGKKQKGVKNLNLKVLPDKTVKIRSFSKQKGRKWLIIPISVNHVQEKWFQEILNTDKYTVTVKRRLFKGEVRYFVHVSYDLPEPAQRYGYQHGAIGLDFNYNFVALTNVDNIGNLLSYHSISFGNLHSYRTDKRNDYISYKMDKVVNYCINKGKGIVVEDLQFDQEFSYTKKRNRKLSNLKTTALQLLERKCKKRGVSLRKVFPGYTSLIGKYKYSGLHNLSVHHLSSYVIARRGLGFKEAIPVVYDWVLSHIGEFIEPRVKQGSPYRTWSQIHDLFKYSGITSFKTAEILRKVVVMRYVLCSVTSAQSDNLRAGLSKNGKIDDYHKTWKYINHSIVL

SEQ ID NO: 20931 - protein, 379 aa, unknown
  TnpB Polypeptide
MEQTITAKIQIKVSPEEHQNLHNTMQAYTDACNYVSDYIFDTHNLKQWELNHALYGKLRTDFGLGAQMAQSVMITVIAKYKAILKNQKEWIKPIFRKPQIDLVWNRDYSLINNRSLFSVNTLNGRIKCEFYDKGFESYFDIANKFGTAKLVCRHNKFFLHIPITYEIDMLDTKDVSNVVGIDRGVRFLATSYDSSGKTVFYSGNEVKQKRAHYKALRKELQQIGTPSSRRRLKAIGQRENRYVQDVNHCISKALVENNPKGTIFVLEDLSGIRSATEKVRVKDRYVMVSWSYYDLEQKLMYKALKNHQLVIKVDPRYTSQTCPKCGHTERSNRNKKLHRFCCKNCGYQSNDDRIGGMNLHRMGIDYLNNSLVPDAVVME

SEQ ID NO: 20932 - protein, 376 aa, unknown
  TnpB Polypeptide
MQHYTRLLTAWRNSAETAWLADAPVHPLQQSLQDMERAYKNFFEKRAAFPKFKKKGVYDSFRYPDQKQFKIDQPNNRLFLPKLGWVRYRNSLEILGLAKNITISYSGGRWYASIQTEREVEQPMHPATSMVGIDMGIARFATLSDNSFVEPLNSFKKHENQLARSQRRMSRKVKFSSNWKKARARVQKINSRIANVRKDFLHKTSTTLSKNHAMIVLEDLKVSNMSRSAAGSTAKPGRNVRQKSGLNRSILDQGWSEFRRQLEYKQVWRGGDVLAVPPQYTSQTCPACAHVSADNRKTQAKFECVACGYENHADLVGAINILNRGTKMLEGQDTTDASVGCVSTARIACGEAAEVKRSVKQEPAERKTANPKGMAV

SEQ ID NO: 20933 - protein, 402 aa, Escherichia sp.
VKRLQAFKFQLRPGGQQECEMRRFAGACRFVFNRALARQNENHEAGNKYIPYGKMASWLVEWKNATETQWLKDSPSQPLQQSLKDLERAYKNFFQNRAAFPRFKKRGQNDAFRYPQGVKLDQENSRIFLPKLGWMRYRNSRQVTGVVKNVTVSQSSGKWYISIQTESEVSTPVHPSASMVGLDAGVAKLATLSDGTVFEPVNSLQKNQKKLARLQRQLSRKVKFSNNWQKQKCKIQRLHSRIANIRRDYLHKVTTTVSKNHAMIVIEDLKVSNMSKSAAGTVSQPGRHVRAKSGLNRSILDQGWYEMHRQLEYKQLWRGGQVLAVPPAYTSQRCAYCGHTAKENRLSQSKFRCQVCGYTANADVNGARNILAAGHAVLACGEMVQSGRQLKQEPTEMIQATA

SEQ ID NO: 20934 - protein, 197 aa, Bacillus sp.
MDRMSKNVKIAQKKYGYISAPNLWRKINGLQKHIMIDTARRIVNFAEQHHADVIVFEFLGKMKFPPNTYGAKRLKQKLHHWCKNGIQNKVQQMAHYRGIRIRRVNATNTSKLAYDGSGEVVRNYKKDLATFQNDKVYHADLNAAYNIGARYFLREHLKAFSEKKKLKLEAKVPQVSARTQQSLSTFISFLQAVAPMV

SEQ ID NO: 20935 - protein, 431 aa, Micromonospora sp.
VLEVNAWRRRRGDAPLAGFQELCRELAASGPGTFGELDSTGARSVLRRFSDAWFAVAKRRQTGDVSAGFPRRRRGLVPVRWYHGTFTVVGRRVRIPAARGSAPLWVRLVRDLPYPVEQVRSITLLCEGNRLFLDVTAEVPVTVYPPGEEPDAGRVAGVDLGIIHPYAVAGPDGAGLLVSGRAVRAEYRMHLADTKARRRAVARRAPKPGQRGSRRWRRYRRRARMVEGRHRRRVRQAQHEAARTVISWAQQQRVGVLHVGDPRSVLDIPAGRRHNLRLRQWQIGRLIQVLTDKATLAGITVHMVDERGTSSTCPACHRRIPKPRGRTITCPHCRFSGHRDLVAAAMIATRKPGGGPTTPTTAVAVLPGVITHRRAGRHLPGAGQSRRDPRRPTQAARGSVGPRWPAPPPGGESLAPNGEDPQHPTGRPGER

SEQ ID NO: 20936 - protein, 413 aa, Micromonospora sp.
VLFVQLRYQFRVYPTLGQQIELAKAFGCARVVFNDGLRLRQRAWEAGEKHVSDAVLSRLLITEAKKTEERAWLGEVSAVVLQQALADLNIAYRNFFASISGERKGRVVSPPRFRSRKDNRQSIRFTKNSRFKVLDNGRLRLPKIGDLVVRWSRELPSVPSSVTVVKDAAGRYFASFVVQATEEPLPEADYEVGIDLGLTHFAVLSDGTKVTAPRFLRRAARKLKRLQQDLSRKQKGSANRKKAVVKVARAHARVAETRRDWQHKLSTAIIRDNQAVYVEDLAVAGLGRTRLAKSVHDAGWASFTAMLEYKAARYGRRFGRVDRWFPSTRMCSQCGRISDRMALDVRSWECPCGATHDRDVNAAMNVLAAGQADNSNDRGAQVRPGLVPAPRREAVTHPDAACSHMQRGGNLHP

SEQ ID NO: 20937 - protein, 341 aa, Bacillus sp.
MEVNQIMINKAYKFRIYPNQAQAILINKTIGCSRVWLKEVDSIAIQSSVRNLADAYTRFFKKQNSAPRFKSKKNNVQSYTTKQTNENIAVVGNKIKLPKLGLVRFAKSREVEGRIVNATVRQNPSGRYFVSLLVETEVQELPKTHSYIGIDVGLKDFAILSDGTHYENPKFFRSLEDKLAKAQRVLSRRMKGSSRWNKQRVKVARIHEYISNTRKDYLDKISTEIIKNHDVIGIEDLQVSNMLKNHKLAKAISEVSWLQFRSMLEYKAKWYGKQVIVVSKTFASSQLCSCCGYQNKDVKNLNLREWDCPSCRTHHDRDINASINLKNEAIRLLTARTAGLA

SEQ ID NO: 20938 - protein, 174 aa, Limnospira sp.
MVSEPIPKTCGQGTQLVFTKGRWLAIFPEPVAVTPTEANGVIALDPGVRTFMTGFDGSRFLELGSGDIGRITRLCQHLDDLMSRIAKEPCRSRRRRMRQAAQRMRTKIRNLVDEAHKQIAHYLTHNYSLIFLPTFETSDMASQVKRKIRSKTARAMLTWAHYRFKLTLRHQAEI

SEQ ID NO: 20939 - protein, 130 aa, Limnospira sp.
LKEYYTDSNGVTVENPKFLKKCERTLKRSHRRVSKKVKGSKNRGKARQILGKHYLQISRQRKDHAVKLARCVVQSNDLIAYEDLRIKNMVQNHCLAKSINDASWYQFRVGLEYFAKAFERRNGCGKSAIH

SEQ ID NO: 20940 - protein, 147 aa, Limnospira sp.
MALAPGLRSFLVGYDGESITEFATNDISKINRLCYHVDVLMSQISQCQIKRKRYRMRKASHRMRERIRKLVDDLHKKVAHVLVNHYKLIFLPTFNSSEMVVKYRRKLNSKSARHLLTWSHYIFSKRLMQQAERKGVLVVRAEGKLYL

SEQ ID NO: 20941 - protein, 337 aa, Limnospira sp.
MSAYEEGLKPNVNSIKKVFTNYVKPQYPWMSELSSRVYQYAFINLGDAFKRFFKGISSYPKFKKKGHHDSFTLDNGGKPFKLSGTRHKLPFVGWVSTFEGLPESWVKKVTLTRQAGDWYMSFFVEITPEITPKFRERIGVDLGINNLATCSDGTQFSNPKAYKAATKKLARLQRHLSRKVKGSKNWAKCLLKVQKLHQRVANIRRDTIHKITTFLAKNHSQVVIEDLNVSGMLKNHGLAGSIADASFYEFRRQLGYKAERYGSKLIIADRFYPSSQLCSNCGYRQKMPLVRRTFECQNCGLKIDRDLNASINLEKSPGSDDYTCGRGAADSPGRSQK

SEQ ID NO: 20942 - protein, 414 aa, unknown
  TnpB Polypeptide
MLLLYVRRFLLQSTYAQLQVSPLSNPTAEQEEKLVEVLYGSRWVYNYFYRNSIVMSVYDMQFALTEIKEQHPWLYNYHSTMLQMVIHKIDAARKALSVLRRNGHKIGRLHYLKHEESNSFTYNQSGFKIESNQLWLSKIGSIKIRLHRQPVNIKQVTVCRQVGKWYAVVACKTIKLIFRFIDPRASIGIDVGITKFSHDSNNRAVENPLFLTKMLKPLRKAHRRLSRRQIGSNNRQKAKHMLARLYAKIHNKRMNFLHKLSAEYASRYDIIFLERLRALNIVKNHSIARHVLDSGWRTFKRILEYKAKIVAEVEPYNTSIDCSRCGNNVSKTLAVRIHKCGRCGLSIDRDYNASLNIKQRGLTLLLPQGLREVTPVEILDESVKQEEVTIVHGSSPRHSSIWGQEQRSAGFCRS

SEQ ID NO: 20943 - protein, 297 aa, Mycobacterium sp.
MPKFEVPDGWTVQAFRFTLDPTEDQAKALARHFGARRKAYNWTVATLKADIQAWHASGTVTAKPSLRVLRKRWNTVKDDVCVNTETGVAWWPECSKEAYADGIAGAVEAYWNWQTSRAGKRAGKRVGFPRFKRKGRDQDRVSFTTGAMRVEPDRRHLTLPVIGTVRTHENTRRIERLIKAGRARVLAISVAATALVWMPVCGCLSSVRSSRRWCTPVRGLVSMSGSGAWRRSPPLTARRSSRLRTHDRSAPRCASYATCAGPVRVARKVHGATVSAPLRFPGCIAGSTMSAPITCTS

SEQ ID NO: 20944 - protein, 246 aa, Mycobacterium sp.
VHPGSRVGVDVGVRRLATVATADGTAIEQVENPRPLGAALRELRHVCRARSRCTKGSRRYRERTTQISRLHRRVNDVRTHHLHVLTTRLAQTHGRIVVEGLDATEMLRQKGLPGARARRRGLSDAALGTPRRHLSYKTVWYGSALVVADRWFPSSKTCHACRHVQDIGWDEQWQCDRCSVVHQRDDCAAINLARYEETSSIVGPVGAAVKRGADRKTGPRPAGGCEARKGSSPKAAEQPRDGVQVA

SEQ ID NO: 20945 - protein, 405 aa, unknown
  TnpB Polypeptide
MPGAVTRTDYSGQVQMKRAYKFRAYPTRSPEGRAARLLAGHCDLCNAALEERREAWRRHSVSISYGSQSGQLRAIRAADPDGQGRHSFTAQQQTLRRLDVVFRAFYARTQSGGAGYPRFKPYCRFHQVLFVAGDGARWEPTAGRWAYVRFRAVGSVKVRRHRPVMGTVKVLQLKREYRRWYVIVTADRQPAPLSATGRKVGVDVGVARFLTTSAGDVVANPRFLANAQGVIADLQRRQERAQRGSGNRKRIRRQLAREWRKVRRRRSDFHHKTARTLVSSFDVIALKQLNTQTMTHRPAPRLDGAGIWLPNGAAAKAGLNKVILDAGWAQFMTILVGKAEEAGRRVVFVNPARTSTDCYQCGARCQRPRQNLVVCPQHGGMDSDINAARNIATRAGLGSGHASVA

SEQ ID NO: 20946 - protein, 392 aa, Gloeocapsopsis sp.
MLLGFKTELKLNNKQRTRVLKHCGVARHGWNWGLALTKQILDHNKLNPKQKIKFPSAIDLHKWLVALVKPENPWYFEVSKCAPQYALRDLRTAWDRCFKRVSGVPKFKKKGKSDSFELDGTIKICGSRKIQLPRLGVLKTYENLPQVKPKSATISRTANRWYISFKIEVEPSDTPKAVDAVGVDLGVKSLATLSTGEVFEGAKPYRQLEAKLSRLQWLNRHKQIGSANWKKAQRQIAKLHQRIANIRSYSLHKLTTYLAKNHGVIVIEDLNVSGLMANRKLAKAIADMGFYEFRRQLEYKTKLYGSSLMVVNRFYPSSKTCSQCGTKKEFLSLQERVFKCEHCSFECNRDLNAAINLKNAVSHTVSACGVDSADVATVKQENFSLLANVSKL

SEQ ID NO: 20947 - protein, 372 aa, unknown
  TnpB Polypeptide
MEKAYKFRIYPTSEQETLLQKTFGCARYVYNYYLNKRMTAYQTDKTTLNYYACSADLTHLKKEKDWLREPDKFALQSALRNLDDAYQRFFDRVKKGEAPGHPKFKSKRDRNRSYTTRYTNGNIRVLDKHVKLPKLGLVKCRISRQVEGRILSATVSQKASGKYFVSITCTDVVQESLKSTGAIVGIDLGLKELCITSDGQHFDNPKHLARSQKKLARLQRPLSRKPKGSKNRDKARIKVARLHEKIANQRRDAIHKLTTQLVRDYDLICMETLMPKNMVKNRKLAKAISDAAWGEVARQLEYKTLWYGRALIKVDRFYSSSQTCNVCGCKNGETKNLTVREWDCPNCGTHHDRDVNAARNILEEGLRVVNTV

SEQ ID NO: 20948 - protein, 220 aa, unknown
  TnpB Polypeptide
LSFTDNYPNTQGLGRKFIDFPSEKDRMYRVLGRIRRFQREHESVQTKSRWAYAKRLNIELGRKIAGAVTKYAKEKHADVIVFEYLETKGKISGRKKQKLHLWKKRDIQKRCEHQAHRNGMRISRICAWNTSRLAYDGTGAVARDQKNHSLCVFQTGKRYNCDLSASYNIGARYFIRELLKPLPVTERSLLEAKVPAVKRRTSCVYADLRKLSSEMNLRAA

SEQ ID NO: 20949 - protein, 309 aa, Salmonella sp.
MKRAYKYRFYPTTEQAELLAQTFGCVRFVYNSILRWRTDAYYERKEKIGYLQANARLTALKKEPEFAWLNDVSCVPLQQSLRHQQTAFANFFAGRAAYPAFKSKRHKQAAEFTASAFKYRDGKLYMAKNKIPLDVRWSRPLPSVPSTVTISKDAAGRYFVSCLCEFESASLPITSSMVGIDVGLKDLFVTDTGFRSGNPRHTAKYAARLALLQRRLSKKAKGSKNRAKARLKVAQLHAKIADCRLDALHKASRKLINDNQVVCVESLKVKNMLRNPSLSKAIADASWGELVRQLQYKGEWAGRSVVAID

SEQ ID NO: 20950 - protein, 403 aa, unknown
  TnpB Polypeptide
MRLDVHYLLLYNSASETTKKGGLTMAQMSITAKIQVVASDEDKALLDETMSVYREACNYVSDYVFRTHDLKQFSLNKALYPTLRAEFGLKSQMTQSVFKTVIARYRTILENQKEWIKPSFKKPQYDLVWNRDYSLTQDRFSVNTLGGRVKLPYFAEWMSKYFDRSIYRFGTAKLVNKHGKYFLHIPVTYDVEESNLSDICNVVGIDRGINFVVATYDSKHKSGFVRGRSIKQKRAHYSALRKELQMRHTPSSRRRLKRISQRENRWMQDVNHCVSKALVVNNPAHTLFVLEDLSGIRHAPERVKTKHRYVSASWAFYDLEQKLIYKAKQNQSSVIKVDPRYTSQCCPVCGHTEQANRNKKIHLFTCKNCGYKSNDDRIGAMNLYRMGINYLYDSQVPDTVAAE

SEQ ID NO: 20951 - protein, 275 aa, Streptomyces sp.
MPTGLWPTSSTRTPHAAAGTSPPPGPTLRCRPCRWPRSVRVAWWGWTPTPTTWRLDSHGNPIGAPRRFGYDLSGSAAHRDAQVRHALIRLLHWARRHHLALAVEDLDFTGEPTREKHGGRKRFRSLVSGMPVARLRARLVSMAAALGIPVVAVDPAYTSKWGAQHWQQPLTGKTRKPTRHDAAAVAIGRRALGHPVRRRTAPPPHDRSDRAGHRSVQAPPGIPGREGPRPRVPGPRTRSVPPGRGANAGDQDTQHRSGRPAEHESWQQDSLPLSL

SEQ ID NO: 20952 - protein, 407 aa, Streptomyces sp.
MQLRYSFRLYPDTGQLRALSKAFGCARVVFNDAVRAREDARKAKQPFPTAGQLSRKLITEAKRTPERSWLGEVSAVVLQQSLRDAETAYRNFFASLKGTRKGARIGPPRCKSRKDARQSIRFTANARWSITRSGRLNLPKIGAVKVQWSRTLPSTPTSVTVIKDAAGRFFASFVIDTDPAADQARMPETDRTIGIDLGLTHFAVLSDGTKIDSPRFLRRAEKKLKKAQQELSRKQKGSRNRAKARLKVARAHAKVTDARREFHHQLSTKLISENQGIAVEDLSVAGLARTRLAKSVHDAGWASFISMLEYKAQRYGRTLVTIGRFTPTSRTCSTCGVVDGPKPLNVRKWTCAACGVVHDRDVNAAINVKTAAGLAVTACGAQVRPGRVPAQCDEAGSHGFPSKDCVA

SEQ ID NO: 20953 - protein, 485 aa, Streptomyces sp.
VKKFQPQSGFVVQAFRFALDPNAAQEAALRSHCGAARAAYNWAVAWVEASWWQRRAEESYGIPEAGLTQWRPWSLPSLRKAFNAAKHTDPRFAAWWEDNSKEAYSTGLANAAAAFDNYAKSKRGQRKGKRVGMPRFKSKRKARLSCRFTTGTIRVDTDGRHITLPRLGTLRSHEPTVKLLDRVQAGTARILSATVRHERGRWFVSFQAEVKRDLERVARPDVTVGIDLGVKTLAVMADSTGEIRQVPHPNHYDRARKQLRRASRTVSRRQGPDRRTGQKPSRRWEKANAQQNKVHHQVANLREDALHKLTTAVAAEYGTIVVEDLNVAGMLRNRRLARRIADAGFGEIRRQLEYKTSQCHATRLVVANRWYPSSKTCSGCGAVKAKLPLHIRTYECDACSLVIDRDDNAALNLAALAAACMTGTGVAGDQDTPKRVSKPRGADRKTRATRTRLKAEAGRAGGAILPQQRQTETRDRTQAEPLTLW

SEQ ID NO: 20954 - protein, 429 aa, Archaeon sp.
MKRTIKIPIHYNLTKSKLSKLDKLTARLSYGVQLFLEIIKREEIYTRTTLTPFENEITKRTKLSSAYIQQCKDKAIWMYKSYKKQHKKWENKCKYAKGKYKLKLLKRKPSFPQTDKIPVRLDYRTAQIKQIKKNLTSLWLNLSTLKKYNKILIPLNPSNYHISRLGKIIDCELVKKDKYYLHVTCEYHTSKQMVKNVRSIDLGINRSVTTVLLTPVENQIKILKEKEKKHKIEKLDNLIGKLQNKGNYKKLKQVREKRKNFIEDQERKLAKYIATISNESLVAIGYPKGIKYRNFKGNGNKKLRKKIHKWAYGRIINYIQQSCEKQGIEAIRIDEYNTSKTCSKCQSKDTKRPYKQNYSLFKCENCGKIMNSDVNACYNIARRATGNKSFSGWALDEHALSADDLLHKGVSAETSLRTGCVDAQSFRAE

SEQ ID NO: 20955 - protein, 465 aa, unknown
  TnpB Polypeptide
MNKSQKIELILLETNGNIENTRKILWELSSECRTVANRAVQHLWEWNGLSSDYKKEYDHYPSKEETTQLLSGKNSIDTYAYSKIIPECRYLATSSVQTIIRDVKGTYMKSLGEILKGAQSIPSYKNYPIPVKKQTLSVSHIVKYNSNGQPCDEDYFVEAGILSKKGAEHFKTGTRVKFKLRVKNKSLKSFLKQCKEVIELSEIDGKVTKNGCCCEEKLFDIVSSSISYDERNKKWMFNMGYSFEAEQTPYFEGKQVGVQLGYHLPVCCAVNDGLERFYIRENEIEEFRRRTEARRAALRQHTAYCGDGSIGHGRDTRCKAAEKIGNIISNFKDTCNHKYSRAIINFAVAQKAEYIVIENMSGISENNLFLKSWSYYDLQNKIKYKAAEVGIKVKIIDPQYTSRRCSKCGHINIKKTDVDANRMFICEECGKKADFDYNAAKNIAETDIEKIISMQKVTQGIEKIK

SEQ ID NO: 20956 - protein, 441 aa, Bacteroides sp.
MTSISHKIEIKPNNKQKTYFRKAFGCSRLAYNWGLSEWQRRYKAGEKVSTYDLKKSFNAIKKEQFPFVTEVTKYAVQQPFINLGKAFTKFFSDLKKGVVSYPQFKKKRDNSGSFYIGGDQIALSFANFNSKRFKGIPHNERQKRQYLKVPNLGWVKMTEAVRFIGKINGVVISQEGNRYHASFSMEITEEEYRRTHPQTTRTKQRCLGIDLGVKSAILLSDGISIENPKHIKKQEKKITRLSRQLSKRGHARTKQERLLGVQKSSNYRKLSVRLCNVQRKVANMRRDFIQKVTTLFTVYYSHIGMEDLNVKGMMRNYRLARAISDVGFGEFRRQIEYKSTFNGVTVTIADRFYPSSKTCSICGDVKVKLKLSERIFRCQKCGTVIDRDYNASLNLLSLITQKRVGTDYPELTPADLAALLFLFAKNGIITSKVETGMQHEL

SEQ ID NO: 20957 - protein, 189 aa, Clostridioides sp.
MYCGQHIKLPKLGMVKIRDKQVPQGRILNATISKEPSGRYYVSLCCTDVDIEVFENTNNQTGLDLGIKEFCISSCGEFIENPKYLKKSLNKLAKLQRELSRKTIGSLNRNKARLKVARLQEHIANQRNDFLQKLSTKLIKENDIICIEDLQVKNMIKNHKLSRLISDVSWSEFIRQLEYKANWYGRQIV

SEQ ID NO: 20958 - protein, 451 aa, Natronolimnobius sp.
MYYAYKYRLKPSDAHREELDRHRDICRQLYNHTLYRLNEYQDEHDELPSMTTLRSELPDLKKWWNGLSDVYSKVLQTVVERLFDNLKGLSKLKENGYDVGQLKWKPPREFRSFTYSQSGFKLDKKGGQTVLSLSKLADIPIRLHRAIPDVHKSDSSCAAHQKPPISEDDATLKQVTVKKEPTGEWFATFGVEMDREPPELPENPENCVGIDVGILKYAHDTDGMAVGSLDLSDERKRLEREQRKLSRKQHGSNNYENQRRRVAECHADLRRKRRDFLHKLSAYYAREYGLVAVEDLNVKEMMESPSNSRNTASAAWRTFLSLLEYKCEREGTHFVAVNPRGTTKECASCGVSTDKPLWVREHSCPACGFEADRDANAAWNILSRGLEDVGVGYSESTSSEPVGSDGLRKSRSDFRTPVETALPVDTPVSAKRVVEAGSPTLKERTASTVSE

SEQ ID NO: 20959 - protein, 429 aa, Acidobacteria sp.
MQIEKGFTDNWLQPTGAQEKLMRQYAGCQRFVWNRALSIEQARYRRGEKRLLGKFEMMRQLTMWRNNPDPHSNFLKAAPVHALQCVLYELYDSYQRFFRGQQVRPPQFKKKSKARISFTESDPACFEMDEPNKRVRLPKLGWVKCRFTRHIEGQPNSVTVKWNGMRWVLSAECKVAIAEQTHPSDTIVAGDFGVVRRVTFSDGVVVPPIDVSWEEKRKSFYQRRLKNKRRFSRNWKKVVDKISKLDSRIAHIRKDETHKFTSGYVKNHAVIVLGDLHIKSMTASAAGTVEQPGRNVKQKSGLNRAILRQGWGELGRQMEYKQSWAGGLAEYQSEAYSSQRCPACGYSSALNRKTQEGFRCVWPTCGFSGHADEVAAQNQLRKFLSSDKGVALLASGYRASVNSLRSGRSWDSTRKQEPIEEAAQCTQPQ

SEQ ID NO: 20960 - protein, 525 aa, unknown
  TnpB Polypeptide
LAKNQTYKAFTARPSHVLDLNGEVLDSAPVLARLVSEIQGISGYATYMVRNDMKLGTELAQTGTIQPTTAARRAGVTMPKFFVEDEDGEPIVGKSGRSRKEFPVQHNMVTSYRSWQERINAVNGESSKYVSQGWKRTMNASAPSYGEDFINLGAVDKQYAVIENSPFIDGEIVLKMVICGKWYRLIFNFDNSRFREGKVTLPLVKVENNQPVFIFTVVTDNPVVQFSGDYVVGVGVGINNYATVVVRSIKSGQIVHKTTLSQRVHSLWNSVRASELQVRSLRKKAAQLLYQRQAKMSALDEAQFHRKAASRKKRELAILAAQEIAYLSHFWGNAVVAVEDLGWVSHTMQNGRWNRGDLIQWLTHYVAQNGGWVVSVNAANTSQLCHLCGSKVTHPVHEISICLEHGVLDRDVNAATNIAARAVPKVEKARNTRAKNRKLQPQVALKTPPARTSLRYPGRDRTKNTATPKRKNRSNIKGVILPSRPARVNMITVLADQDVSGILGTCQAAIKQGYTTYKCRLYSPN

SEQ ID NO: 20961 - protein, 415 aa, unknown
  TnpB Polypeptide
MLISRKIKLEVSEQDAATLEFMQGKCRGLYNWWIMKLRNNEKWPGWEEAKKTLQESRAYDPELKYVYGKLLHEVYFRLDAAMKAFFRRVKNGEKPGFPRVRPRHNFFTLIYPAMYIHVEDLSLTLPTGGKGKNKRFPNVVARLTEEAPADYKEVAISRDGQGHYYASFVHEVKVETHEHKGVLAIDLGIKTLATGVNEQGRFYHIGGFKGSKWYNKQLDKIRSKRDKCKKGSRRYKHLSQVYKRVSQQKRNKQQDCLHKASHLIAHTLVERTVVIGDLSQRQMVTKEHQERNKHRNRAVYNDWGLYSFVQVLLYKCLLYGKELVILDERDTSKTCSACEQKQDMPLWKRTYRCENPDCRLVMDRDENSAVNILKRYLARLGPHTGDPVRCAVVFTAIENQCALVFTATDDGVESI

SEQ ID NO: 20962 - protein, 447 aa, unknown
  TnpB Polypeptide
VTLLAVRVALDPTPAQERALRSHAGAARVAFNWGLARVKANLSQREAEASYGLAGDDLTPYVDWSFYGLRKAWNVAKDTVAPWWRENSKEAYASGLERLARALKNWSASRCGKRKGSKVGFPRFRSKHKTVPSVRFTTGAIRATGDAATLPVLGRIKMHEDVTKGLAGARILAATVRFERGRWFVSLTVEHDVQRPAATKPDDVIGVDLGIKTLAVLSDGTEIPNPRHLSKALRKVRRAARTVSRRQGPDRRTGQRPSNRWRRAKARLSEEHRRVADARSDATHKMTTSVARTYATVVIEDLFVAGMVKNRRLARHVADASFAEIRRQLAYKIGWHGGTLIVADRWFPSSKTCSGCGAVRAKLTLSERTYVCDICAMVMDRDVNAALNLAQYGRNELRIAASGAEIENGRGADRKTGHARQVAVKRKPGTASADQTGTVPSQDGTAA

SEQ ID NO: 20963 - protein, 404 aa, unknown
  TnpB Polypeptide
LTNIYSFDILVLSSKGDLSMLRNKAYKFRLYPNKEQQILINKTFGCTRLIYNIMLDKKKRNNSLSCYDLIKEIPSLYKEYPFLKEVDSCSLRCAIFDLDNAYQRYYKKLGKYPKYKKKGCKDSYRTNLITSTYKNKAYENIKVDLKNKTITLPKLKEVNIKGYRNLVKINGRIINATITKEGKKYYVSIVVEESVILPDKKEDYAVGIDIGVKSLVVTSDGETYGNPRYNEKYEKRIKKLQRDLTRKIKGSNNYQKVKVNLSEIYRKLSNARKKMIEEIVSKVTKYNDIIIAEKLKVKEMLVKKEKREQNKTLRKSIINATFGLIKRKLEEKCKMLNKTFIQVDTYYPSSQICSRCGNRNTRMKDLRKREYKCSKCGVELDRDINASINIEYEGIIKYYKRRLY

SEQ ID NO: 20964 - protein, 402 aa, Moorea sp.
VLKAYKFRLYPDNSQHIALARSFGCARWFWNYALTLCQQTYQDTGKSLSRAAIQGLLPGLKKEYEWLKDCYSQCLQFVANNLSTAFKNFFDKRAKYPRFKSKKGRQTVTYPQHFHIEGDYLKLPGKVGKVYCRQHRPIEGELRSVTVSMNPDGKYFASILVEDGIEPQQPNSLGLAIGIDLGLTHFAVTSEGEKYDNPRHIAQHAKNLKRKQQSLSRKQKGSKNRNKARIKVAKVQGFIARCREDFLHKLSRKIVNENQVIVVENLNVKGMVKNPNLAKAISDCGWGMFTTMLTYKAEWAGKIYVEIDRWFPSSKLCHVCDHQQVEMDLSVRNWTCPFCGTHHDRDINAAINIRNQGLRILELGTSSTALGGDVRQPGKTSVVSDAVPHELGSPRLRAACRG

SEQ ID NO: 20965 - protein, 397 aa, unknown
  TnpB Polypeptide
METVRIYRLGGLAPSTRQRLQAAQMEASRVWNVCCQRHQDARLQQRRWPDRDELQQTTKGGQFALHSQSIQMVCHQFLANVETTRQLKPTHPRMRYPYKPKQYMTVQWPAQAVSRQGKRLILPMGRGRKALCFRLNLPERIGGVSLVWHAGYELHVVVPTPSACEVAGEVKATIDLGEIHLAAVTTTTGKALIVSGRGIRSLKRRHNKSLGQLQRKQARCTKGSRRYRKLQYAKARLRARTKRQIRDQRHKATHHVAQFLAQEGVRTVFIGDPHGVRNQAAGRHHHQRMSQWEYGKDKAYLQQKSARAGIMSFTGSERGTSSQCPTCQRRQSVRGRNWVCKNPQCHFAGHRDIVGSLNMHRLAFGHALAYPSRITYLRPSRDVVAARALACGRGNPF

SEQ ID NO: 20966 - protein, 257 aa, Halogeometricum sp.
VEAERHPSRLEEQPCSSLKSANHKEHPRAWEYILVEYETRPGVEVENLQQVRAVYDQAKERWELHLVCKDEIETPDAPGTETAGIDLGISNFAAVAYSTEEADLYPGNRLKQDGYYFPKEIAKCDDSSGDRATRLHQKWSERRTHSSTVSPNTSWSNVSRRAWVALTSGSWKVCARTKTVSRRAGGNMAISTCTGGRSTASRRFSRTRRRSRASRSWKWTRATRARRVASAVGKTTVSGLNAACMCVRSVMRPIMRT

SEQ ID NO: 20967 - protein, 431 aa, Acidiplasma sp.
MTHLWKSTGDKRTIVFEYKPSDTILKYLNDMRDLINRAIINAYSMAKSNNNELPSPIVLRRSLKNYYDNNIDYAKHHINPACRNAIAILRSYKKNNNGKLKIIKAKRLAMRIDSELIKMDNNKLRLTIRPNEYEYIDIVDKNRKYNEYSRYKISEVLLTDNKVCITFIIGSLNKPLINNNIIGFDLNFKTIDYTIIRDNEIVETNTIDTSDIAKTQRDYARKRTKIQRHIKNPEKRNRKLKESRHRQRNIIRDKLQKLTTKIVNDNSDKTFVFENLTNIKKEGRKNKNNRNNKNNNEDSKASNKNNKSKRFRTDINTWPYRLFQRFIDYKSKNKTLYVNPEGTSSECPVCGGKLKHPIWKISECSNCGVTFNRDRLSSLSISVRGLYLCGTPFTVSGSSSWYSMRNNYMYHPDHVIIENFNDCKKYVHNNA

SEQ ID NO: 20968 - protein, 425 aa, Haloarcula sp.
MEVRRTVSVKLDVDSNDAALLRETVDEFLLAANYVVDHAWQGEYKTTSKAQLHAETYDDVREQTRLHANLVQNARNKAADAVQSAVARWKQGEYAGKPHFTSPTVVYDKRCATFHDEYVSLATVEGRIEVEYLLPAADRDTPHSRYLDSDDYQVTGAELHHRDGQWFLHLRTNAEVESDTPKQATTGHRTVLGVDLGVNQLAVTSTGTFWSGHEFDHWRREYEERRGSLQQCGMRAAHENIQSVGGKETGRFKLMLHRIANGIIEEAAENGCTIIAFEELSGICDRLPEASWGHKWAFERLYEYVKYKSELHGIDVAVVDPENTSRRCSHCGFTHPDNRDSEAFVCLKCGYENHADYNAAKNVGLRYLRRNQTGDGGGAPVGVRLNRGTLNANGEYETPAGDSGQSGSPRESPTLNEARSSDRAK

SEQ ID NO: 20969 - protein, 290 aa, Microcystis sp.
MLVVEAKLKNGTPEQYHRLDKAIITSQFVRNSCVRYWGSNQGTTRNDLQKLCAVLANNKETPYVNKLNSQARQSAADRAWQSINRFYQNCHAKIPGEKWFPRFKKHNRSFEYKLTGYQLSDDRRKIRFTDGFQAGEFDLWCSQKTLFYYSEQQIKRVRVVRRADGKPTGQITGIDLGLKEFYTDAQGNNVENPRYLRKSEKRLKKAQRRLYKKFPQGNKQSKNYHKQRIKVARLHLKVLRQRKDKAIKDALALVQSNDLVVYEALKVRNLVKNHKLAKSISDASWYQFTE

SEQ ID NO: 20970 - protein, 459 aa, unknown
  TnpB Polypeptide
MAKIVSSYCTKVIGENRIFKDTIRVYRDALSLLIRIVESEWDTGLGELYAKSTLKAQRTVELLVHASRTSVAKYPEFDKQFYKYPSYLRRSTISEALGAVSSYRAAVSHWESAGRKGKEPKLQTSRSAMPTFYKDNMYEDNGDGTARLKLYHKNDWVWVKVRLRKQDTDYIREHWDKADASAPKLVKRNRRYALCFAFEETVAYGTKPLTDQTILAVDLGINTDAVCSVMRPDGTVLARKFIDFPSEKDRLNTQLGRARRGQRENGHRGGNRHMKKAVRINEDLSKKIAPAIVRYAVSVGADIIVMEHLDFIGQKPKHKKQRLHMWRNRDIQKIVMHQAHRNGIRVRFVNARNTSRLAFDGSGEVARNSTNMALCRFQNGKQYNCDLNASYNIGARYFIREYLKPIPETEWSLIVAKVPELERRTNCTLSTLFSLYAVLKCQSVSVSESWPHGGNESGA

SEQ ID NO: 20971 - protein, 378 aa, unknown
  TnpB Polypeptide
MTKMILKAYKIRIYPNKQQIEQIAKTLGCCRFVYNYYLAKSIKDYEEARKSNTYNQNSADLTKLKKLDEYSWLKEPEAMALQSSLRDLDTAYQNFFRNVKNGKQPGYPKFKKKLSSRQSYKATYSTPAQFHCLDNKIFLPKLKWVKFKGNLDIKGTPLSATISKTASGKYFASICCKDVEIEEFDKTGSVVGIDLGIKDFAITSDGDKIKNPKYLSKSTKKLRRLQRQLSKKQKGSNNRNKSRIRLAKQFEKVSNQRNDFLHKLSTEFVKNHDMICVEDLRVKNMVKNHKLARAISDASWSKFVELLTYKCSWYGKQLVKIDAFFPSSQTCSCCGFKNAEVKNLEVRTWTCHNCQTTHDRDINAAKNILNEGLRIAFA

SEQ ID NO: 20972 - protein, 518 aa, Oscillatoriales sp.
MAKRAKTPSFVTDIPLVVSPSEARVLLARLEAGRQLYNACLGESVKRLGLYKQSKLYQFAKTLSKGKERTKAFQTAREFVGYTEYALHAYATEIRNGGGGWIAKHIDANTAQKLATRAFQATERVNFGKARKVRFKSKNQLDSLEGKTNTTGIRWRNEQVHWSGLVLNPLIDQNDPVILHGLNSPVKYVRLVRRKVRGQNLFYVQLINEGKPFQKPKHQMGEGVVGLDIGTSTIAIVGNEQAELKPFCDELANKDREVRRLQRKMERQRRANNPDNFEPNFVDAKGRKKKGKVKKGSKRWQHSKTYLKTRSSKAEIERQLTAHRKSLQNQLAHEVFSLGNVVKLEKLSYRAFQRMYGKSVGRRAPGMFVERLRRIAETAASATVFEFPTRETKLSQRCLCGRIHKKPLSMRVHRCECGIIAQRDLFSGFLGQFVDLETACFNATLANQVWGQGWDTILMKAWQQATTRYNQSSIGKPMVCQRSDNAASERVVSKALGEDFKTQDAVASCESLREKPIT

SEQ ID NO: 20973 - protein, 363 aa, Rhodococcus sp.
GLPYLSDAELSKALTGAKRTPERVWLGEVSSVVLQQALADLNTAYRNFFASITGKRKGGRIGPPRFRSSRDNRQSIRFTRNARFQIMPGGRLRLPKIGDVATAWSRELPSEPSSVTVIKDASGRYFASFVVDVESGPLPELDTEVGIDLGLTTFAVMSDGRVIDSPQFFRRAERKLRKAQQGLARKQKGSKNREKARVEVARAHAKVADARRDFAHKASTTIIRENQAVYVEDLCVKGLARTRLAKSVHDAGWSMFTRMLEEKAARNGRIFVKIDRWFPSSQLCSVCGVVDGPKPLAVRLWTCRCGAVHDRDVNAAKNILAAGQAERLNACGAQVGPELVPAQRCEAGTRRKRSGVLVGICGL

SEQ ID NO: 20974 - protein, 380 aa, Kurthia sp.
MPHKAYKFRIYPNKNQQAFIHQTHGHCRFVYNHFLELWNTSYEEEGKGLNRSIMSKMLTKLKKQDETAWLRNVDSVALQASYENLIDAFKRFFKKQNKYPRFKSKKNPVQSYTTKNTNNNIAIVGNQMKLPKLGLVKFVKSREIEGRILKATIKYNASGKFYVSVLCEVPDFKPLPKTNETVGIDLGITDFAVLSDGRKVDNQRFTAKMEQKLKREQRKLSRRYEQAKKECRDLRECMNYQKQRRKVACLRERVAFQREDFLNKLSTELIRQYDVICLEDLNTKGMMKNHKLAKAIADVSWSEFVTKLKYKAKWLDRKIVEIDRFYPSSQICHTCSHRDGKKPLDIRVWTCSSCGTTLDRDINASKNILIEGLRLLKQQP

SEQ ID NO: 20975 - protein, 496 aa, unknown
  TnpB Polypeptide
MFGLLKGSGMCEHNMLRLMVTLNSYQKLLPSSLRMLSYLAMMLVESSGGSSSQWIKRSHSPLLSGRLRASSRYPTQSDWRNLANMYKKSAVHHHRHDSYSAPNEECDFDLKVVKSVWQHYALNEHVLWLLEQFRQMLNECIRIGLAENMTSLKSLSLRTYKQLSGYEVMSCYKLCAISAATGILRNHRKMKRKNPKTKEPYAKRLRLTTCYGFKLRASCLFLPFKHKEPIKIPLNPHTLEVLSEPNIEVRSVTLTDEALTISYTHKVKLIEPRGLVALDRNLDNVAAAASDGTIVCHNLSEATQVKATYREVRSHFKRNDVRIQRRISGKYGHRQREKVQQILHHATKLIVEKAKERQFGITMEKLTGIRKLYRKGNWQGRSYRGRMNSWSYAELQRQIEYKARWEGLPVIYVPPHGTSSKCSICGQKMKPEENRILRCSSCGYTVDRDVNAARNILAAGRLRFGLAERAGEAMVQEPACAAILKVDARESNPRGN

SEQ ID NO: 20976 - protein, 496 aa, Caldivirga sp.
VFFLLLLLRRSVAVELEVAKELNKLLYNVESAYLSIVREVAAYAVENNVTSATRLQRLFYRKYRSEYQGLHAHLIIQAIRQASEIAKSFIARRRRGLVDKPYPEVRSVSIRFTEKAWSYEQFTSSIAPVRLSLSLLGGRREIWLRPHKRFWLYWWKVLNGEAELARTLIVKRRLNKWYAVFIFELKPREEEPQSIIAFDINENTVAVSRVDLPSTVDKVVDWNRQYVTPQLYMIRTDFGRLARRYEAIRNAVIEKLKPRFVLPNGKYVSITDTREYRKQVRRLREGNRKLGRVRHVANELTKTPAIIITEELGEKPQESMINGIGKDELRHRIKQTPFKSIEKAIEDKALERGSKIFRVSSYRNSRVCPVHFTKLESTNDWHILKCPLGHYVDRDHASVMNMAWKLTPEAWIKGVWWNMRREIDRRKYEGKSNPLVPNEIVKHIHATLKEFKASEESPAVLARGSPMNPARGANEDWARTPPRSKGTPHPLGRGGG

SEQ ID NO: 20977 - protein, 424 aa, Metallosphaera sp.
LKKLRVKTFQPEKRYLHLTYAIGNYEGEKSKELIQAYRVLLNKGIRYLFARIVVRKEKKRMKVYLPKKRDTYKELREYLMKENKHNLAKHYVDQAIHDVYSILESWRRGVERGRAELRPPLVKRGYVRVKTTLRKASGKSVRVTVKPHEYITYSWDKTWFSRRVEGFELTEPIIKEDKVYLVFRKEMPTITPLEVVAFDSNLLSLDGYDGEKFVTVSLRQLYTLKFTMQRKRSRVQFLASKKFRVGRRLLNKYSHRERNRVNDLVHKLANLVLDLYHHHVLVFERLNKRGMFSDANNSLSRKLSRTVWRKLVSVLRYKASLYNCKVVEVNPYLTSRSCPKCGWVSRRVGKTFACERCGFTLDRQFNASLNIFKRYLKRFNLRMWGFPHLKVSGVIPLMGRRGMNARDFGELQGSRVEYKVHEIQ

SEQ ID NO: 20978 - protein, 318 aa, Okeania sp.
MYLTQKNKIRNLSSQEFKALRQLCRLSKNMYNVGLYSVRQFYFAEGGYLRYESNYHYCKDNENYQLLQTDIAQQTLKVVDRSFKSFFNLIQKAKEGNYSFEQIRLPRYLNKEGYFPLIIPRIKVRNGYFNIPMSRKFKAEYGAVKIPFPERLVGKNLKEVRIISRYDARFFEVEFITEVESQQIVKSDNALAIDLGLDNLATCVSNTGSSFILDGRKLKSINQWYNKEHSRIQSIKDKQGIKDLTKKQVSITVNRNNKVRDYLNKAARYLINWCSENKIFTIVVGVNHRIKQSITHPHPLQGGEQEGWVPKICTNTTP

SEQ ID NO: 20979 - protein, 332 aa, unknown
  TnpB Polypeptide
MVKAIKVMLIPNNVQKTKMFQYAGASRFAYNWALAREKESYEKGGKFISDSELRKEFTKLRHSDEYAWLLNISNNVTKQAIKDACTAYKNFFKGLQKFPRFKSRKRSMPKFYQDNVKIRFSNTHVKFEGFSSSRKANKQKMNWVRLAEHGRIPTDVKYMNPRISFDGLNWWISVCVEFPDCRETLNDDGVGIDLGIKDLAVCSDGTKYKNINKSQKVKKLEKQKRRLQRSISRSYEKNKKGESYCKTNNVIKKEKLLLKRTVDFIAFIDQDTDHPGFEIFRILQCMYFFKAGKYGILHGICGILIIIKDSPRHLVHCQRILFHQFQKCICIS

SEQ ID NO: 20980 - protein, 452 aa, Halobacteriaceae sp.
VTELTKTLELKLVDPNVHKRQKLRETQDAYQQALQAAFAAGCDTQSAANDVVVEYDLSGYAKNALKKYVPQLCGNSYDADELHDDHPVRFTNEGLQLDHQPQNDIEWYVKVPHHEDYHLWIPARANPEQREWLEAVYADDAEMGESRLFEREGTWYLHITVARDVEDESEASADERTPPDSSGELCLAGLDRTPIGVDIGEASLVTVCHRDGSGSPVRPRLWADDGKAVRRLRKTYFTAKRRLQKRGSERIAESYGDELWDQIDDVFHRVTREVVDYAESVENPVLVLEDLTYIRENMDYGEYMNRRLHGWGFAKLHAQIRYKAAEKGIPVETVNPRNTSKACHACGEHGSRPRQATFRCSNDGCWVGEYQADVNGAINIADRYRSGESHRRSDRTSRQKAGDDVEKNQRFFDRWKSPISKNSATDGASLTGPQDSHADAETQQTTLGTYAS

SEQ ID NO: 20981 - protein, 165 aa, unknown
  TnpB Polypeptide
ADPIPDQTVGIDMGLSHYAVLSTGDAVPNPKYLRNAQERLAILQRRLDRKQKGSKNRNKARLKVARCHQKIADQRRDFQHQLSSRLVRENQALAVESLNVNGMVKNHSLAQAISDAGWGTFLAMLAYKCQEAGKTLLKIGVFEPSSKTCSVCGYKNQNLTLKDRE

SEQ ID NO: 20982 - protein, 326 aa, Scytonema sp.
MRGKKGYPKFKKHCRSVEYKTSGWKLSSTRKVITFSDKKGIGTLKLKGTYDLNYYDIKQIKRVRLVRRADGYYAQFAIDVDIEIETQPSGQVVGIDLGLKYFIADNKGNVEPSPQFYRKSEKQLNRANRKKSKKYDKTKKKAKKPQSTNYHKARNRYARKHLRVSRQRKEYCKGLAYSVIQSNDLVAYDSAACPLGIDLNVKGLVRNRHLAKSISDAGWSTFRSWLEYLGHKYGKITVAVPPHNTSQNCSKCGEKVKKSLSNRTHVCPHCGYIEDRDVNAAINILQKGLSTVGHTGTYAWGDLPSWAIGATLSFNGESGNQESPRL

SEQ ID NO: 20983 - protein, 392 aa, Actinomadura sp.
MAYKCRAYPDPGQTVVLNRTFGCVRKVWNDVLDWRTKRYRAQGVTTTYAESDRYLTQLKKTGELAFLNEVSSVPLQQTLRHQSRAFAGYFAKRTRHPRFKSRTGKQSATYTRSAFRMREGELYLAKMAGSLRHIWSWPDIDPVTLNPTTVTVSREPDGMWYVSFVIDTDAPGALPLTDEHVGIDLGVIDLAVTSDGDRVANPRHLERKQLNLARYQRRMARKCKGSANRRKAARKVAAAHGKVRRTREDFLHKTTTSFVRRYDVIVVEDLNVAGMVRNRSLARAISGCGWGTFRAMLEYKTARWGRRLVVIDRWYPSSKLCSACGHLLARLALDTRHWTCPDCGTLHDRDINAAKNILAEGLSVSACGADVRHSETSRVRSATKQENLRCEP

SEQ ID NO: 20984 - protein, 390 aa, Lentzea sp.
LLVKRAFKFRFYPTDVQAAELTRTFGCVRLVYNKALAVRAAAWSDEQRNISYSDTSAMLTGWKKSEDLAFLSEVSCVPLQQSLRNLHGAFANFFAKRARYPRFKSKKKSRAAAEYTRSAFRWRDGRLTLAKMSEPLAIVWSRPLPVGSMPSTVTVSRDRAGRWFVSMLVDDFVEHHAPTTSAVGVDAGVTALVTLSTGEKIANPRHEEKERVRLARAQRLHARKQKGSNNREKSGRKIARLHARIADRRTDFLHKLTTRFVRENQTIVIEDLNVKGMLRNRRLARVIADASWSQLRRLLEYKAAWRGRQVIVVDRWLPSSKICSKCGHRVGVMSLNVREWQCPCGDVHDRDVNAAKNILAAGLAVAACGDGVRPTQRELVRHLSEPPYRG

SEQ ID NO: 20985 - protein, 420 aa, unknown
  TnpB Polypeptide
MPVRKAYRFKLRCTPAQERALRRASGCLRWVWNQALAEQSARHERGEPYANYVAMAKWLTAWRNAPATAWLAEGPIHPQQQVLRRLDETYRRLFKKTGGTPRFCARGQEPGIRFPDPKQFEMDQVNGRIKVPKLGWLRLRQSQPVVGLLKNVSIRREGPSWYASIQVEVAEVAPALNISPSIGIDMGVANFLATSAGALQAPLAALAAQQRRLRRYHKSVSRKIRGSCNRRKAIERLGRLHRRIARQRSDWLHKLSTSLASQHPVIAIEDLKIKNMIASGRGSAAAPGKNVRAKAGLNRSILDASWGEFARQLDYKLAWAGGELIRVNPAYTSQRCSCCGQVDARSRKSQAQYECVACGHAENADVNAAKNILAAGHAVWSLREIERTKACGEDVRRAEVARPEHAASAKQEPTEEGAFA

SEQ ID NO: 20986 - protein, 401 aa, unknown
  TnpB Polypeptide
MTTQSIRATGSFKLIEVSEELEFLFKTYKEIVNFLITYANEHKITSFFRLCKETYKMLREKYPQLKSQHIVTACRMATAIYRGYRKRKRRKKAKELPTLKRDVVWLHASLFRIDFKKKVLKLSLPSGRKEFHFCTADYHEKFKDWQVKEAQLFKNGKGVFVNVCFLKEVDIGEPKSCVGVDINENNVTLALPNGQFVQIITHEREIRTAYYVKRRKIQKKIRTGKRKIALLRKYGNRERNRIKDLYHKVANKIIEIAKPFGAIALEDLTHIQKSIKYTKEMNGRLHRWSFRQFQNIIAYKATLNGLEVVYIDPAHTSSLCPRCGEKLSSKGHRILKCKKCGLEANRDLIGSLNILLKALKMWGGSVHPESQPMKTGGWNFEATTVIDWFSEKPELACISSE

SEQ ID NO: 20987 - protein, 416 aa, Halobacteriales sp.
MDVRRTAVMKLAVSDEQRDALHRTAEQYLYCANRTADYCWSDISYTECKTNKRQVRDALYSELREQTDLQAQLVQAAIKRAVEAIKSVTERWKKGQRISCPTFSAETMDYDTRSATFYRNKVSLSTVEGRVEPTFVLPADSPTPYERYVLSEDYEFRESTLRYDAATDEFYLNISTQRIDGVDAEVPADAGHPDQTVLGIDLGVNSLAVSSTGTFWQGDDYDHWCREFEKRRGEIQRCGTQAAHNALLRLGKREEAWRKQYIHTVANELVTEAVEHDCDGIVFEDLTDIRERLPNAKWHHVWAFRRLYEYVSYKAPEQGISVEQVEPNHTSHRCSRTDCGFTHEDNRHGEQFKCQKCGYRVNADYNGAKNIGLRYARKRTHRLRSSPKSGSGDAEVDLRINGGTLNGESHRPIAGD

SEQ ID NO: 20988 - protein, 416 aa, unknown
  TnpB Polypeptide
VSYSVRGEEPVVIEALKMRALPEGSYDKLLEFLKLYRNAVQMVVDRIWSINGRLSKKRLHRLFYNNLVSMGFRAHHAKEIYIYAESLVDSARSNGGRKPILRKLSARIDRYDYKLDLDSMTLTLKLHSGYEAKLKLVTSSERVGKFRGWGNYEVVVKCDGSGFWVSIYFKRVAKAVKPRTVMSIDLNFDNITLTVLTPDGRLVKLKRFRTPLRKVLTHRIWVERIQRRYPRSWKFIKGVRKAIDRHGERIRNISWGYAHKVGDLVAELASKHSSIIVLEDLDKLRENNKRGREFNKRLGLWFYRRLQFCVEYEARERGIEVVKINPRGTSSKCPRCGKKLFEDGHRMLRCMKCGFVGDRDVIATINLYKKYVSKYSRCGVSGVAPNAPKPDENTSGMQGNRDDAMKTSSYMNLYES

SEQ ID NO: 20989 - protein, 385 aa, unknown
  TnpB Polypeptide
VLGLLEVFRRMVNESIRIGQANDVSSLRRLSLLSYNQLAQYDSPSCYKLSAISRAAGILAARKKSLKRGFPTRTPYSVRQQLVSCYSFKTKNGGLEIPVARGKRLSIPLTKHTIDIISRPMVKVRSFTLTRNRLSLSIARDAPSIECASTVGVDRNLRNLTVGNDQETRHYNLTETVRIASTTVRIVASFKRDDARIRGAIASKYGERRTARTGHLLHTATKTVVEAAVQQRHAIVLEDIRGIRCLYRKGNGQTRKYRGRMNGWSFSEAQRQLEYKARWVGLPIIRLSRRETRCSSVTCPRCGERLQSDKRLERKLWCGKCRVVMDRDRVAAVNLARRGRVRFARSRPSILIEAQGGAVETVKGNPTPTVIPGVDATKLTQPTKS

SEQ ID NO: 20990 - protein, 230 aa, unknown
  TnpB Polypeptide
LYLSRAIEGDIKTVTVRRTSTGKWFVCFSCDNVPERKYLETKKEIGIDVGINSFLVDSEGNNVENPKYYRKAQKVLRRKQRVLARKKKGSNRRRKARILVAKAHEKVANQRKDFLNKTANLYIAMYAIISIEALKINNMIKNKHLSKSIADSAWGMFFELLTYKAVEAGRKIIKVAPHGTSQNCSKCGEKVPKSLAVRVHKCPYCGIVLDRDFNSALNIKTAGQAVQALI

SEQ ID NO: 20991 - protein, 348 aa, unknown
  TnpB Polypeptide
VLIAKTICGRIEKPTKFKFQCIEHEYNGFQQWMIFGIDQGIYSTYKVGKIWKRKTINYQEYPIIMWAQWMKFEQNKSGNWLLFKTKLKRGGIWLPIKLYQPIPTDCTLKDSQLVYNHKKDLYEVRLVFSKEFKANNHKNILAIDIGEKVMATVVCGDQTGSHTKPYFFGKEIRGIRRHYSWLRKRLGERKLLKMIKKMGQNERNKVNSLLHEITKKILLLCYKHNVGYIFLGDLKDMRELAKNKGRRMRRIVSNFTYNKFREMLRYKAEWNGIQVIEVNEAYSSQNCSRCSNIGKRPYQGLFKCSVCNSEMNADYNAVKNIYKRGIDYISMLGASAYALNPSTETGSI

SEQ ID NO: 20992 - protein, 437 aa, Streptomyces sp.
MNRSDRTAPPPARRTRGAEARPRVYRYRFYPDEEQAAQLTRTFGACRWVYNQGLVLRTTAWRDHGVRVGFAETCRALTGWRHAAQTSWLRDISSAVLQQSLRHLDAAFSRFFKRTSTHPEPKRKNRSRDSATYVRTGFRWRENPARPGTGLIGLAKQSEPLDVRWSRPLPPGAAPLKLTVTRDRAGRFFLQILVEEHIAPLPPALTPDTAAPRAVGLDLGLAALATLDDGTTAGHPRLLRTHGAKLARLQRELHRKEPGSANRGKARARLARLHAAIADYRRDALDQLTTRLVRENQVLVVEDLAVANLVRSPSGPGRRRKAGLNRSIADAAWSTLLRMLWYKCAWYGRTLVIVDRFFPSTRRCSACHAHGERLDVSVRSWTCAACGAAHDRDVNAARNLRQEGLRLYEQAVAALSPGRQLPAVVRASAPAGVVVAA

SEQ ID NO: 20993 - protein, 378 aa, unknown
  TnpB Polypeptide
MLKRQAFKFELMPNGEQIRRINQFCGCARFVSNHALALQNVQYAQDNSVTFSYTKIANLLPQWKKTFPWLKDCNAQVLQQSLKDLDSAFKNFFKNRAGFPKFKKKGIKESIRFPQDCKLEQHNNRLYLPKIGWVRYRNSRNVIGEIKNVTVSKKCGRFYVSIQTQCEVEIPKHQGGEIGIDMGIVRFATLSNGEYFEPLNAFKTYKGKLAKLQRQLKNKIKFSKNWQKLQAKIAKLHHKIANYRKDYLHKISTEICKNHAMIYVEDLQVSNMSKSAKGTAEEPGQNVKQKSGLNRAILDQSWTEFRRQLDYKSQWQGGVLVAVPPQNTSRTCPCCGYTDKENRPTQAKFKCIECGYTENADLVGAINILERGRATVQS

SEQ ID NO: 20994 - protein, 387 aa, unknown
  TnpB Polypeptide
MKNQMMQVEKMQPKAYKYRIYPTEEQQIFINKTFGCVRLVYNLMLNDRIQSYEEYKEESKNLIYPTPAKYKQDFVFLKEVDSLALANAQLNLDKAYKNFFRDKSVGFPKFKSKKNPVQSYTTNNQNGTVDIVGKYIKIPKLKSLIKIKQHREIKGIIKSATISRTASGKYYISLLCETEINQLPKTHSNIGIDLGLKDMMVLSNGEKIANPKLSKNFERKLIREQRKLSKKQEVAKKEQRELKECKNYQKQKIKVAKIYEKMTNSRNDSLNKLSTEIIKNHDVICLENLNIKGLLQNHKLARSIADVSWSKFINKLEYKAKWYGKEVIKIDRWYPSSQLCSVCGTNTGKKDLNIREWTCPSCHTTHDRDINAAKNILAEGLRIRQSA

SEQ ID NO: 20995 - protein, 390 aa, unknown
  TnpB Polypeptide
MIKSIKVRLNPNNKQLTKLFQYAGCNRFAYNWTIVRVRENYKQDNKFISDNELRKEFTQMKKLNEYNWLSKISNNVTKQAIKDACNSYKRFFKGQSKYPKFKSKKHSKQSFYQDSAAIKFTDTHVKIEGFATSKKKNKQKLNWIKLSEKGRIPTNCKYMNPRITYDGLHWWVSVSVEVDDNSNSPPNEGIGIDLGLKDLAICSDGHTYKNVNKTQKVKKVEKRKRKLQRSVSRKYNMNKRGERYKKTSNIIKREKELLKLSRRLTNIRRNHLHQITSEIVKRKPSFICIEDLNVSGMMKNKHLSKAIQQQGFYEFRRQIEYKSAWNNIPVIIADRFFPSSKLCSCCGEIKKDLKLSDRIYRCDCGNVIDRDYQASLNLKQYGENVLKQNL

SEQ ID NO: 20996 - protein, 412 aa, unknown
  TnpB Polypeptide
MRSQKIRLRLTKEQEKLAWQYSNVSRKFWNLLVDIDNRNKKGEFDYILSKNGNKTYYSKFHDRDIYNLNQSDYTKLAKLVVEKNSNEDSDEWSWYYQPNQAFIYSFVARELVTIRIQNKGKLKFRSIRKIQPSFNVRCDSFPGGTRPSRIYLKDNGKLQIPTIGEVRFGSVRLDFDLSCKKQVAYISFDGKYWYLTYVEDVELTTSELPEYTDGIGIDLGITPLATMSDGTIVPNIKTFRRVRILEKRLKRLQRKLSRKYLINKCNKHNKTKNIIKLERQIKLIYRSIRNIRINHIRKFVSELVKKQPQYIAIEDLNVKGMMKNKYLSRDIVNCSFYTIREQLIRKAKERHIVVRLVDRFYPSSKTCSNCGSYKVDLKLSQRVYRCEHCKVQIDRDFNASLNIAQTNRYILA

SEQ ID NO: 20997 - protein, 408 aa, unknown
  TnpB Polypeptide
MSDYMVLCERHVINKNHIFYDECDHLTFLAKNLYNATLYFQRDSFFKKEFKNFYDVNRVFVHGNQKDYRALPTKVSNQVLMLVDRAFKSYFALYRKKMNGDYSQNVRIPRYLDKTSGRYVVPYTKEALSLKNKGFVKLSKTNIVIKTKLSRDEIKAARIVPKGNHFIIEILYKAMCKPLKSDKPKRVAFIDPGLNNLMTVTSNCFNPVIYNGKPLKSINQLSNKNIAALKSKLSERGLRTSSLLQSVYTRRTNRLSDLLHKITTKLVNHLDSYNIDTVIFGHNIGQKQDINLGKVTNQNFVQIPFTQLMQLLKYKCELRGIRFIGTEESYTSKCSFLDEESICKHSIYRGKRLKRGLFQTSSGKLINADVNGSLNIGRKYLTKVNMYTKQLHEDLVKFMINPTVVTIK

SEQ ID NO: 20998 - protein, 320 aa, unknown
  TnpB Polypeptide
VSNNVTKQAIKDACNAYKLFFKGQCRYPKFKSKKRSKTSFYQDNVAIKFTNTHVKVEGFAVSNKRNKQRLNWIKLCEKGRIPTDCKYMNPRFTYDGLYWYVSVSIEVPETTDTNKNDGIGIDLGIKDLAICSDGNKYPNINKTPRVRKLEKRKRRLQRSISRRYEYNKKGNSYCETRNIIKRHKEFLKVIKRLTNIRHNHLHQTTSEIVKRKPSFICIEDLNVSGMMKNKHLSKAIQQQGFYEFRRQIEYKSAWNNIPVIIADRFFPSSKLCSCCGVIKKDLKLSDRIYQCDCGNTIDRDFQASLNLKKYGEDVLQQSIG

SEQ ID NO: 20999 - protein, 386 aa, Methylobacterium sp.
LTRRTERVQTGGTQIRSYKYRLRPSRSQAALLDAMLRDFCGLYNAGLQQRIEAYRRRKLSLRYGHQAGELKACRPADPDGLGRWSFSALQQVLRRLDQTYTAFFQRRRGFPRFRASPRFHSATFRVGDGLTIRKDRRIGIVGVPGGIKVVWHRDLPQDAKLGAAILTRQQGKWYVVLSVEAAFAETCGAGTVGIDLGLNSLIATSDGATVPMPRFARRAQKAQRRRQRALARCRRGSKRRLKAKACLAAASARIARQRRDHLHKLSRSLVSRYRGIAFEDLNMAGLTKGMLARSVHDAAWSLLVQLTAYKAESANASVVLVDPRGTSQTCPACGTIKAKTLAERRHRCECGTDLDRDVAAARIVHQRAFGSGRDIGLQRSSQRIAA

SEQ ID NO: 21000 - protein, 436 aa, Methylobacterium sp.
MLRDFCGLYNAGLQQRIEAYRRRKLSLRYGHQAGELKACRPADPDGLGRWSFSALQQVLRRLDQTYTAFFQRRRGFPRFRASPRFHSATFRVGDGLTIRKDRRIGIVGVPGGIKVVWHRDLPQDAKLGAAILTRQQGKWYVVLSVEAAFAETCGAGTVGIDLGLNSLIATSDGATVPMPRFARRAQKAQRRRQRALARCRRGSKRRLKAKACLAAASARIARQRRDHLHKLSRSLVSRYRGIAFEDLNMAGLTKGMLARSVHDAAWSLLVQLTAYKAESANASVVLVDPRGTSQTCPACGTIKAKTLAERRHRCECGTDLDRDVAAARIVHQRAFGSGRDIGLQRSSQRIAAKLRREAACFSRRSCHALIQVRLLRADGSRRRDEVPELSRRNRGGHAPCPERGGIPDLHARDRVRRPVLAPRDPRLGVDRPTSAP

SEQ ID NO: 21001 - protein, 463 aa, Micromonospora sp.
VKTLQAYRFALDLSPRQERAVLANAGAARVAHNWALARVKAVMSQRAAERTYGVPDELLSPPISWSLPSLRKAWNAAKDEVAPWWAECSKEAFNTGLDALARALKNWSDARKGARKGRAVGFPRFKSRRRSTPTVRFTTGVMRIEADRRHVVLPRLGTLRLHESGRKLARRLEAGTARIMSATVRREGGRWFVSFTCEVERVVRAPARPGSMVGVDLGVKHLAVLSTGERVANPRHLVVAARRMRRLARAVSRCVTPDQRVRRAGSNRWARAQQQLSRAHARVVGLRRDGLHQFTTRLTREHGTVVVEDLNVAGMLRNRRLARHVADASFAEVRRQLIYKCEWNGGRLVTAGRWYPSSKTCSGCGAVKTKLTLAERTYTCTACGLSVDRDLNAALNLAALAREVTDDRSGRESLNGRGADQKTRTRGQVAVKRLPGTARAGQTGTVPPQGGTTAQRSLLSTRR

SEQ ID NO: 21002 - protein, 349 aa, Halobacterium sp.
VVTTTVTVKFHNPSLARRKEWQRAAQLYRDTKQFCIDGWENDDFDKSVTTASIDNGLYSAIQNQAIREAKADHQEDGAVSYRQSQPFALNNQNWEIDTTENGSVVVGFPCISGWWYTPVEVYDDVDDAVRRVLNGEADKTRLQVYRRGDDWFCTFSVECDTNPDGETAIGVDVGHNNLLAAHAEDTDESMLVSGREAKYVRRRFRSLRESLQEAGALRALNRADDKESRRIRDLNHTASRRLIDWIEQFENPVLRLEDLEGIRDGSDWRGVHSWHFHQLQDFIVYKAERAGIRVEKVDPEDTSQRCSVCGEYGTRDGDHFSCPSCGRERHSDLNGAENIAQREGEPCTA

SEQ ID NO: 21003 - protein, 341 aa, Escherichia sp.
  misc_feature (305)..(305): Xaa can be any naturally occurring amino acid
VKRLQAFKFQLRPGGQQECEMRRFAGACRFVFNRALARQNENHEAGNKYIPYGKMASWLVEWKNATETQWLKDSPSQPLQQSLKDLERAYKNFFRKRAAFPRFKKRGQNDAFRYPQGVKLDQENSRIFLPKLGWMRYRNSRQVTGVVKNVTVSQSCGKWYISIQTESEVSTPVHPSASMIGLDAGVAKLATLSDGTVFGPVNSFQKNQKTLARLQRQLSRKVKFSNNWQKQKRKIQRLHSRIANIRRDYLHKVTTTVSKNHAMIVIEDLKVSNMSKSAAGTVSQPGRNVRAKSGLNRSILDQGWXTGRSRNAKYSDCIPVSQISAGTTFIKSQRPSAKTTQ

SEQ ID NO: 21004 - protein, 387 aa, Actinomadura sp.
MKLVVQAKLLPTAVQAAALAETLHACNAAANRVSRVAFDTGMTRNFDLRKATYRGLREAGIGSQAAQHVIKKVADAYTTLHTNLQAGNLGRPGSRRRARAEGKPIVFRADAAQPFDQRNLSIAPDAGTVSIWTVRGRCKDIAFTCSAGARTMLAGCPRGESDLLCRDGKWLLLVTVDVPEQPLNEDPGGFVGVDLGIVNIATTSGGYRAAGRGLNRHRARQAALRRKLQHKRTKAAKRVLKRQRRRERRRATDINHCVSKRIVAEAERTGYGIALEDLTGIRSRVRHRKPQRAAFHTWAFAQLASFISYKARRAGIPVVFVDSAHTSQSCADCGHRSRRNRVSQALFICRGCGVVAHADLNASRNIARRAAAAWDAGRQSSAPAPAP

SEQ ID NO: 21005 - protein, 486 aa, unknown
  TnpB Polypeptide
MISENVAECTVPKLDKNDPDVIVRAYKFALKPTALQEQKLRQHTGAARFVYNYLISQWRDDLHTRIEEKGRGVPESKLTPFTFKLSAYDMHNYWNRTKRECAPWWSEVSKEIGNDAARRAHDSIKNWLDSRSGKRKGRRVGFPRFHKRGYHESCTFSTGVLRVNSDRHSVTLPRIGTIKTYENTRGLQRKIAKGTARIIRATISRGFNYWHVSFTVYERKRIPETHRNPGSVVGVDMGVGDHVIVAANPHGDEVMRRGLPPSVTKNEARVRYLQRKMSRKRGPDKRTKTTPSNRWVRANNQVRKYHNTMANVRRDFTAKAAHDLAKNYETVVIEDLNVRSMMARGGAYKRDLNRAIAQASFADLRRRITYKTQWNGGVIVVADRWFPSSKTCSRCGEVKSKLSLSERKYICHRCGVVVDRDLNAATNLAKLAAPKFDVSNIDRTGSSPGMGRGGAGKTSSLSGGLALAGEASMARKGLSGRKAGAR

SEQ ID NO: 21006 - protein, 318 aa, unknown
  TnpB Polypeptide
LAAHILARNPFPVFRSTRTIHSDGAVLARKKNGGSAFDYWLEIRGFTGHDISIPIVNNPYVLEKFSEAHKVSKTAKIVVDRDGNLHIHQPMEFANPPMRKTGDTLGIDWGLVNTISTSDGRTLGRDLYPWLKKIDAQVTQLQSRLQRQGMKPHQSTRFRYFQHRIVATVKNKLGEILNSLADEDIRAFIVESLDFRGTKLGRKLNRIISRAGRAEMSRRMREMPERYGIEIVEVNPAYTSQECSECHYTHKTNRAGERFVCGFCGHSAHADVNAARNIRFRGENPHLFGRFDTKGKILSTLASLHEVSIQRRLQYGCS

SEQ ID NO: 21007 - protein, 374 aa, Calothrix sp.
MKTLKFKLYQHKHNKHLKRTINAAGVIYNHCIALHKRYYRMFGKHLRSAKLQSHIAKLRKRNSLWQSVGSQAVQDICQRIEKAYQLFFKHNKTGVRSPGFKKVKKYKSFTLKQAGYKFLGGNSVKIGLRVYQFCRSREIEGTVKTLTIKRTPLGELFMVLVVDDCSNPEVEVKTGKIAGFDFGLKTFLTCSDGSTIESPLFFQQSLNAIKKASKQHSQKLKGSSNRERARKNLVRKYEDISHRRRDWFWKLAHELTDKFDILCFETLNLKGMQRLWGRKISDLGFGEFLQILEWVAKNKKKRVVFIDQWYPSSKTCSSCRHLLESLDLSLREWRCPSCQSINGRDENASRNICAVGASTVGLGDVRLATPAIAV

SEQ ID NO: 21008 - protein, 397 aa, Calothrix sp.
MEQVLTLVCKLNPTPTQSQKLEIVLHAFAEACNYTNQIIKPDVTSKLTIQGIVYEDLRAKFGLPANLAVRACARVGANRKTAKQNNQPVVVFKPTSADYDARIFAFREKDWTVSLTTLSGREHIKIDAGNYQRGKLKGRKPTSAQLCKHRDGQYYIHIQLKDEVPDPQATNKVIGVDFGRRDIAATSKGDSWSGEKLTQTRDKYNKTRASLQKKASTRTRSSRRRCRQVLVRLSGRERRFQAWVNHNISKTIIQQAKSEKALVAIEDLTGIRERTNQKPRNKTERRRSNSWAFYQLRMFLEYKGLKDGVEVITVPPAYTSQTCNRCLHIGLRSEKKFKCGNCGLSCDADLNGAKMIALLGLSVSQPRGSNGLYCNLSTDSSGLLKALTVFGTPNQCG

SEQ ID NO: 21009 - protein, 411 aa, unknown
  TnpB Polypeptide
MNVLRAFKTELDLNNLQKTACLRHAGAARYAYNWGLARKLAARQAGEKVPTAIDLHRALNALKKTELAWMYEVSKCAPQEALRDLDQAFAHFFRRVKEKRQGRKIKVGFPRLKSKKNGPGTFRLTGTIHVLEKAIQLPRLGRLRLKERGYLPMHGIHILNATVSEKGGRWFVSLQVEMEIPEPQVLDRPIAGLDLGISRLAQVSDGTSFENPRALTSALTKLKRLQRIVSRRQKGSANRKKVVGQLARVHARVANIRKDALHKATTLLTRTKSAIMMEDLNVSGMLANNHLAQAIADAGMYEFRRQVTYKGAWYGCQVWMADRFYPSTKRCSQCGQVKDRIDLDERVYHCEGCGLVIDRDLNAAINLEQLINTTTASSAGSHACGEHVRPGLPAMLDEAGTKYQSVMDRVE

SEQ ID NO: 21010 - protein, 393 aa, Ktedonobacterales sp.
MEQKKAYKYRVYPTNEQKQILARTFGCARFVSNWALRCKTDAFYQEQKRLYYKDLSEMLTALKKQGEYVWLNDVSSVPLQQALRHLDKAFVNFFEGRAAYPRFKHKRQKQAATYTSNAFTWRDGQLTLAKMKEPLSIVWSRPLPKDAVPSRVTVSKDSTDRYFVSILVEENIAPLPVTPKTVGADLGLKSYVILSTGETIGNPKFFHTDEKKLAKAQRRHAKKKKGSKNKEKARLKVAKIHARIADRRRDFQHKLSTRLIRENQTICVESLAVKNMVKNQSLRKAISDVGWSEFVSQLEYKATWYGRTLVKIDKWYPSSKRCFDCGHILDSLALEVRHWTCPKCGVHHDRDLNASKNIHAAGLTVREACGEAVRPGAVKTKPGTSQRSRKPRS

SEQ ID NO: 21011 - protein, 426 aa, Ktedonobacterales sp.
MQLVEQHFIHKSDARFAPIDAAAFASKNLYNQAMYQIRQAYIHERKYLPYAAVFHLVKQMDCYKALPAKVANSLLILIHKNWVSFFKAMETYLEDPSTFVGRPRIPGYKDKERGRMILIYDTQALGKRHFKKTGKLVPSGLPIEIDTCLTEWWHLDQVRIVPASGGYMIEVVYEQPEEQAAVTQEWIAALDPGVDILAALTSNKPGFQPLLVNGRPLKSENQGYNKHRAHLQGLLPKNQHTSHQLTAMTTKRTRRVNAYLHTASRRIIDVLVEEGISTLVLGKNRLWKQEVMLGRKNNQQFVQIPHARFLDLLTYKAKQVGIQVVIQEESYTSKASFLDCDPIPVYDPKRTENPQFRGKREYRGLYRAQDGRRIQADVNGSYNILRKAFPNSFGQGIVAPAVVARTVEIVCKVGNGSTVNGNRPNG

SEQ ID NO: 21012 - protein, 432 aa, Ktedonobacterales sp.
MMKTAHKIRMNPTPEQVEYLKRACGTRRFVYNWGRAEWEKQYQAYRLEQETIPETQRVLTPPNALALKKQFNAIREELYPWTYEVTKCVVEGAFDDLGKAYSNFFAGRAAYPKYKKKGKSHESFYLSNDKFTIGSHWIAIPGLGRFILDQRKQVKDRGKRKRKLGTVNLSEKLRFVEEDKASPPLKKCNRRKQILCESMKILAATVSCEADHWYLSVQLEINKAMPPTPEPVVGVDVGLKQAAIVSDGRRLENQKPLALHLKKLGKLQRQLSRKQKIKDPQTGKTTFSKNYQKQRVKVARKHQQIANIRRDVQHKFTTELARTCGTIGMEDLNIMGMMANRTLSRAVADAAMGQLLQFLKTKVAASGGNLFVSSRWFPSTKRCSGCGVVKKRMPLKHRTYHCLACGLVMDRDLNASINLAQFAQTQLRHPSA

SEQ ID NO: 21013 - protein, 443 aa, Ktedonobacterales sp.
VELIVQELEGKMHRVEKHVIDQSDPRYTPLDTACFASKNLYNAALYEVRQVYIHEGTYLNYNAIDRLMQSHETYKALPAKVAQQVLLLLDRNWTSFFEALKAHKADPSKFRRRPQLPAYKHKTTGRNVLIYTMQAVSRSKRTLGQRLIQPSGLGIQIKTQQDPKMIAQVRVVPKHGFVVVEVVYEQEEQPTAINSEFIAGIDPGLNNVIALTSNKPDFVPVIVNGRGLKSTNQFYNKRRAALQQALGRPGNTRRMQKLTIWRNRRIEHDLHGISRFVIDLLVAEGIGTLVIGRNVGWKQEINLGKRINQNFVQLPHAKLINLLTYKAEHKGIRVILTEEAYTSKASFLDDDSLPTYQEGQKSEPVFSGKRITRGLYQASDGRLINADCNGSLNVIRKVAPDAFGSEGVEDGKRRVHLPVVHPVRLSFPYKPARVKIPAPVRIH

SEQ ID NO: 21014 - protein, 552 aa, unknown
  TnpB Polypeptide
VPTTVSLKSVHRSYALKVARELNQTKRNVLEGVAAEWKRTLRPAFNWYWLPFWRTGVFNPKLRCSGQTSTFPQTRLVTSQKDLMLRALAGQAQGWASNLSNRGRRLSRSISDSVLRHEVMWINACQLWNATNANQNATLRTGTGPTSISQAATRITRRWFDNYVKRYDLPDPDGLPLQFNQLSAKFEAVKDTKHRHFGYWVTLSTLERGKRIRVPVEPHAYFAAAGGIVAKTLTLRTKDGALYLDIVRDVPTERWHRPGVPLLALDLGLRNFLASSEGDIRGENFIDTLGRYDRQLQATTKGLQNAGIVRLTDCARYRRLAVRIRRYIKNNVQRWVRSLLQAHSPEEVILEKLNFVAENSGLGRRMNRLLRGFGQAVFKQCIKSWSELKEFKVTEVEAAYTSQMCSSCGFVHRANRKGNSFGCLSCGYLAHADVNAAKNQRGRSAAGAPTSTGSRHERWVSALREWLVRLRTGLLEASPGSTLHSRLVWRACTGIAVLMNEKRSAGKCGAARKVLQEFTLTLDRVSDACLYEKITWLVTTEAGSPALAVSTD

SEQ ID NO: 21015 - protein, 432 aa, Actinoplanes sp.
VKRAFKFRFYPTPEQADLLNRTFGCVRKVYNLALQARTAAWCQRQERVNYNATSAMLTAWKKSEELAFLNEVSSVPLQQCLRHLQAAFSAFWEKRARYPRFKSKRKSRASAEFTASAFRWKNGKLTLPKMSDPLEVVWSRPLPEGQSPSTVTVSRDSAGRWFVALLCEDAIEPAPATGAAVGIDAGLDHLVTLSTGEKVANPRQERADRRRLARAQRDLARKEKGSANRAKARLKVARVHARIADRRRDHLHKLTTRLVRENQTLVIEDLAVRNMVKNHTLARAICDAAWTTFRELLTYKADWYGRDLVVIDRWYPSSKVCSACGHLTGKMPLNVRQWSCPCGATHDRDVNAARNILAAGLAVSACGAGVRPQRGNLRPGQQAVKQETRRVTAGIPVLEGGEMSSRDPYERRGGPEQHNGGAGATTRTHRGC

SEQ ID NO: 21016 - protein, 412 aa, Actinoplanes sp.
MVVQLRYNFRVTPDAAQRTALAQAFGCARVVFNDGLRLRQQAREAGEKYLSDGDLSKLVITQAKATEDRAWLGEVSAVVLQQALADLNTAYRNFFASVTGKRKGRKVAPPRFRSRKDNRQAIRFTKNSRFKVLDNGRLRLPKIGDLPVRWSRTLPSDPSSVTIIKDAANRYFASFVVTVGEDEMLPPVEPEIGIDLGLTHFAVMSDGTKVTAPKFLRRAARKLKRLQQALSRKRKGSNRRKKAVIKVARAHARVADTRRDWQHKLSTAIIRDNQAVYVEDLCVTGLGRTRLAKSVHDAGWASFTTMLEYKAARYGRTFARVDRFFPSTRMCCDCGRINDKMTLNVRAWDCACGSHYDRDVNAAINIKAAGQADFNDRRAQVRPGLVPAPRSEAVTRQNAARATRSVAGIAVL

SEQ ID NO: 21017 - protein, 463 aa, Actinoplanes sp.
VVLRTARVGLRLTRGQRNRCFGLLRAAGDVWACILEINSWRRRRGEPPVAGYQQLCRLLTESGPGTFAELDTAGARSVLRRYSDAWFCAAARRKAGHTDVRFPRRRRALMPIRWYHGTFALDGRRLRLPTAAGCPPLWVRLDRLAPYPCETIRSVTLLFDAGRLWIDITAELPVATYPAGQQPDPDRIAGVDLGIIHPYAVSTLDGAGLLVSGRAIRAEHRMHLADTKNRRKAVAGRAPKPGQRGSRRWRKTRRRARLVEARHRRRIRQAQHEAATSVIDWAVKQRVGTLSVGDPRGVLGLPAGRRHNLRLRQWQIGRSLAILHDKAALAGIRVHLVDERGTSSTCPNCRTRITKPAGRTMRCRTCLFAGHRDLAAAFTIATRTPGGVITTPAGMPAGVVTHRRAGRHLPGAGRSRRDPRRPAAPGSVGRLRPAPPPSVGSRSSIPPGMDEDPQHTTGKPGER

SEQ ID NO: 21018 - protein, 397 aa, Rhodospirillales sp.
MKAVECAYRFRFYPTPDQASLLNRTFGCVRVVYNRAREMRETAWVERKEKCGFIQTNAMLTALKKYPAFEWLNEVSSVPLQQSLRHLHTAYRNFFRKTARNPGFRRKDGTQSAEFTKSGFKCRGGILTLAKMAEPLAVVWSRDLPTDPTTVTVTREPDGHWYIACRVIAQVEPLTGGDAIGIDLGLKDLAILNTGEKIVNPRHLAKRETMLAVQQRRLAKKAKGSNNRAKAKIKAARAYAAVRHARRDFLHKLSTRLIRENQTICVENLSVKGMLRSKRCNKSIADAGWGELVRQLSYKAAWYDRRLVKIDRFFPSTKTCSQCGTTGHALTLANREWTCPDCGASHDRDINAAINIRTAGLAGIACGEDVSLGMLRHSGQSSVKQEPALRNAGIPAL

SEQ ID NO: 21019 - protein, 407 aa, unknown
  TnpB Polypeptide
MKLTRKVVLKPNKVMRQVLDSLCDYRRYCWNEALDLWDTLYEQRLIGLTEEERSAIQYLVKSKQPLTDELQKLNALYPSPSDYTVRNILVSQKEDWQYLLSSRVIQLAVRDLANSWFRFYKNSKEFGKPTYKSRKDSKQGFKTDYSRIVNGKLVLDKPQSYKGKWCPISFRGASLPEGRISLCSVTCVNGKYYASFLIDMETPNLPKTGKVNAVDLNVDHFDTLDGRFNLQSKLLNKLYSRVKHYQKALARKRLENPDYKNSKGYQATRTKLQATYERIRNIQDDLLHKFTTSLFVNYDTVVIEDLDVKKMQMKKQAKNLHRSLFGRYRQYMEYKAIKFDKKLIVANRFYPSTQRCSHCGFVKTGEDKITLEGNKKYETKHHEYVCYACGFTADRDYNAVLNLLALA

SEQ ID NO: 21020 - protein, 735 aa, unknown
  TnpB Polypeptide
MSKARNANSCVKCSLSGLGCSRVLRGAIDDLAVRIQLVAVRGTHLANHIIAENICARATSEPLPNLPDVFEPKWWQQCFKAAADPQSGGEGDLHLMSAQLFADGDVIRLGHAGTHAIETLAKDIVTNIHVMLILNFHKQLRKAFRRDILCYAAERDFAFVAADRERLVDYCIWRCVQQDSLCEEVNFPLADCDPMEFGIELQAELDSKVNDWRMLYGQVVLCPIPSFISNMKSSAQKMHLFRWFIDLQRQRKRLQEELTTHFVGDSETARKCFGKAAKAMRALPLTKLRVGHILVDRTLLKFLLLELRKAGEPISDLEIPLLNPVVLSLDENGEPLKKRAKLNDDGTEKQTRNRRKGDDDAHQTELFWSHFPNAKRLLRGRKDAHLYKSIRTDGISCSVALIIPGRPESKNEMKELKRIEKCCDLTPGNPIPIPRKPGQRLVAIDPGRRDMVYCYVKTDDADETPSTCSSSTSKFFRSKQFFGISTRQHVKEAKRRRIATATIELQKRTLLSSQVYHNVDLQFNLHSALCNLPSNKAFETYASYEAMMFPILEEAVRAMSARRLRREAFLSFQSKDKALDLICSKICGGVSVSKVQRHERPRVLVAFGNGGTVSTTGCGYSPAPQARLRHRLKHIWGAHISLINEFRTSKCCCQCGEILSCIFKKRNKGVILKKAVKIHGVLRCKDRDDGTRGHGFIHRDKNAAVNNMSIYESLADETKRERPLQFRPQRGSRYL

SEQ ID NO: 21021 - protein, 391 aa, unknown
  TnpB Polypeptide
VQRTVRVTVEASPEVVETIRLYNLACNLFLRLGFVNHKRSKKALQALGYYAVRRRWPALNSSSVQCARDQAAEILKREAKRPCSERERRLGLPKPLPVKRPHSSARFNDNVFTPFLDSRVLSVSTVAGRRKLPLRIPAYFEKWLVPESRVASVRIGEKNGRWFLDLVMDLPDVPAREAENPVVVGMDRGITNVAVLGTGEFFHSKELRSIRGKYAYLRGRLQAAGTRSARRHLRLLSGRERRFQADRNHRIAKQVAALEFDVLALEDLSIRPEKEKGRRFNRKLGGWAHAQLEGFLRYKLEEVGKRVVLVPPEYTSKMCSRCGLLGSRKGSAFRCSCGFSLNADLNGARNIGHLGNALVVGPTVNRPIVADRGERSVAQSQHLSSVTSPPL

SEQ ID NO: 21022 - protein, 431 aa, Oscillatoria sp.
MYAVQKDIWHLIGRDKSIVEQLLRWSNNLFNVGTYESRQRYFKDKGAVKYPELYKITKTNENYALLYSQVAQQSLKSVAESFSSFRALEKLAKKGELNQKPRLPKYRTKGGMYPVSYPGQALKIVGNQVRLPLGNKGKEHFGVDGLWVTLPQRLKGCSIKELRLIPRNGEVWVEYIHESLTKQAPSCSLEVTGVLGIDHGINNWLTCVSSNGKPFIVDGHKLKSWNQWFNKQKARIQSEYAKHKLPKGFSSKRLQQLSETRTRRMRDAVNKAVRTIIDYCESHQINVIVFGWNKGQKQEVNMGGVTNQNFVQIPTAKVKDRLQQECDLRGWRFVEQDESYTSKASFLDRDFLPVKVGEKPDNWQPSGKRIKRGLYRSAQRLILNADVNGAANIICKSKVATDSIIGRVGSGLLTNPLRIKLWVDLSPKVCP

SEQ ID NO: 21023 - protein, 454 aa, Nitriliruptor sp.
MIASRRQSLKHGPGRLVVDGRDQTVTRKAQFAFRPSRRQERELHTLLRVCREVYNAALQERRDAYRLAGETIRWQHQFNQIKHLKGVRDDALAYGIQPLRGAIMRCDEAMQAFFDRIKHGETPGFPRFKGAQRFNTACWDEPTSWKLRDDRRTLYIQGVGDIRLPKSAARQVGRMLGKGGRPVTLTVTRRRSGPRHLSRWVWRATVAFNDVAVEPTTPSEGEGSLVGADRGIKVTLATSSGEMLTMPRYVAAQREHLAELERAQARCVKFSREWKRLGRQIARGRRKAANQVDNWAREQAATLVGGFGILAVEDLELRNMTRSARGTVEEPGSKVAQKQGLNRELQDAALGKLTIRICVKAESAGRRVWMVNPSNTSRACSQCSHTDRANRPDQATFSCTACGYEANADLNAAANIADRGRTAETDWKVAGAPSLPRRKSRRRPRTDTELTQAA

SEQ ID NO: 21024 - protein, 546 aa, Rugamonas sp.
MVSSDLFRETSSFRARSERNRLRRSRCEGRKHGTHAFRRGQTNMKLVYRYRVKSLTGLLNQQARTVNFVWNYCNDRQKDALRFGRRWHTGFDLIKLTTGCSKELGLHSGTINDVCQRYATSRAMSHRPYLRYRGCKAMGWVPLKGRELKREGNAFRFAGRTFRVFYSRPLPDGKILDGTNFSRDRRGNWFLNIVVEVEPAPVRAPVRGVGIDLGLKTLAALACAQRARKKRRIKAIHAKIANRRLNFLHTRTSAIIAAFDYIVVGNVNAQGLAKTSMAKSVYDVGWSSFLTQLAYKAVKHGAWFEEVDERFTTQVCSHCGALPDTRPRGIADLGVREWCCSDCGVVHDPLFRVERTSMFDTAFRFNDGFFFQDRFDGQVLALGIELLAHRFEQVERAVGVGGIVGGQLVPAGLDAGGRFADGGFDQIHVAAARGHKAVDHGGFVVGDVVPGLFLIVPRFNDGDVDPVRAWLAFEVEGHAAFVAQHIADGAGHHHQLAFERGPLVQALLAGGDIGMDGRRQCQREGECARCEECFHLRLGGVSILVG

SEQ ID NO: 21025 - protein, 400 aa, Nostoc sp.
MLVFEAKLKGSNEQYEKLDEAIRTTRFIRNSCLRYWMDNKGIGKYELSAYCAVLAKDFPFANNLNSMTRQASAERAWSAITRFYDNSKKNVAKKGFPRFKKHQTHGSVEYKTTGYKLSDDRQTIIFTDGFKAGSFRLWGTRDLHFYQLNQIKRVRVVRRADGYYAQFCLDVERVEKREPTGITIGLDVGFSHFYTDSGGQAVENPRHLRKSEKSLKRLQHRMSSTKKGSKNRAKSISRLARKHLKVSRQHKDFAVKLARCVIQSSDLVAYEDLMVRNMVKNRKLSKSITDAAWSAFRDWLEYFGKVFGVVTVAVPPYDTSQNCSNCGEVVKKSLSTRTHECQHCGFVLDRDWNAARNILELGLRTVGHTGTLNASGDIDLCIGGETPQCKPSRGKRKPKK

SEQ ID NO: 21026 - protein, 388 aa, Scytonema sp.
LTLVVRLQPTSEQYAKLKDTATEFASCCEFINSSVKPTLTNRNSIQAVIYNDAKAKFNLVSNHIIKACARVGANRLTAKHKSKKVKGFKPTSFDCDKDTFTFREKDWTVSLSTVKGRERIPVAASNYHRGKLTGQNPTSAQVCLHRDGNFYVHIQLKTEVPESVNSKNVIGVDFGRREIAKTNTDKGWDGKQITQIRDKYSRVRSSLQRKASQGTRSTRRRTRQLLQRLSGRERRFQQWLNHNISKSIITEAKENNCTVAIEDLTGIRERTNQKPRSKTERRRSNSWSFYQLRTFLEYKGIKEGVKVLAVPAYYTSQTCNCCLHIGVRTDKKFKCINQSCGWIGDADTNGSLVIALLGATYVNSPVKGSWLSCSLDEMTGGLKAPCFA

SEQ ID NO: 21027 - protein, 590 aa, Scytonema sp.
  misc_feature (395)..(548): Xaa can be any naturally occurring amino acid
VLHKAVLVRLYPTKEQQIQLAQTFGCARWWWNYALNKSIEVYKETGKGLGQVALNALLPKLKKEEDTLWLADCYSQVLQATTLNLTTAYKNFFDKRAGFPKFKSKHGKQSIQYPQNVKIVDGNVKLPGNIGIVKAKIHRPIKGKIKTVTVSKTPSGKYFASILTEIEGERSSTSEGKIYGIDLGLKHFAVVTDGEKVSKYDNPKHLAKHEKNLKRKQKKLARKEKGSNSRYRYRKIVAKVYERFSNSRQDFLHKLSYKLVSDSQAVIIENLHVKGMVRNHNLAKAISDVGWGTFTNFLAYKLERKGAKLVEIDRWFPSSKLCSNCFYQMSEMSLDVREWTCPHCGTHHDRDGNAAINIRAEGIRMLKAEGSAVSAVGGEVRPKLGRKSNLRHSPXXXXXXXXXXXXXXXXXXXXXXXXXXXXXXXXXXXXXXXXXXXXXXXXXXXXXXXXXXXXXXXXXXXXXXXXXXXXXXXXXXXXXXXXXXXXXXXXXXXXXXXXXXXXXXXXXXXXXXXXXXXXXXXXXXXXXXXXXXXXXXXXXXXXXXXXXXLKNGSWASQRTFSTRSSYQTLCLPTNGTSPCHSNRGTKCDRG

SEQ ID NO: 21028 - protein, 390 aa, Exiguobacterium sp.
LLKHKAYKFRIYPTTEQEILIAKTIGCSRFVFNHFLTKWEETYEATGKGLSYGSCSKKIPVLKQEFDWLREVDSTSVQTSVKHLAEAFDRFFKKQNERPRFKSKRNPVQSYKTNIQGKSQLPEVSIVGNRLKLPKLKWVRFANSKQVEGRILSATIRRNATGKYFVSLCVEQEIDELPKTGSTVGVDVGLKHFAVLSDGTVYQNDRYFRTLEKKLAREQRKLSRRQLIALNKNIKLFEAKNYQKQKRKVARIHEKIANKRTDFLHKVSTEIVKNHDVIGIETLQVKDMQQDRKFSKAISDVSWSAFFHMLEYKADWYGKTVVKVGKTFASSQLCSSCGHRHRDVKHLGLREWTCPGCGTHHDRDVNAGLNLKREAERILASSTVRTASVA

SEQ ID NO: 21029 - protein, 490 aa, Exiguobacterium sp.
VNILLKHKAYKFRIYPTTEQEILIAKTIGCSRFVFNHFLTKWEETYEATGKGLSYGSCSKKIPVLKQEFDWLREVDSTSVQTSVKHLAEAFDRFFKKQNERPRFKSKRNPVQSYKTNIQGKSQLPEVSIVGNRLKLPKLKWVRFANSKQVEGRILSATIRRNATGKYFVSLCVEQEIDELPKTGSTVGVDVGLKHFAVLSDGTVYQNDRYFRTLEKKLAREQRKLSRRQLIALNKNIKLFEAKNYQKQKRKVARIHEKIANKRTDFLHKVSTEIVKNHDVIGIETLQVKDMQQDRKFSKAISDVSWSAFFHMLEYKADWYGKTVVKVGKTFASSQLCSSCGHRHRDVKHLGLREWTCPGCGTHHDRDVNAGLNLKREAERILASSTVRTASVARRTGQIHCFVSVSAPAGKSPMSTPAARSDKPLMSVGVIQPMARSKRFVSVYGRYSDVRSAMPMTPPNPIMPFIALVIHAARSNFESGRWTSSERSKK

SEQ ID NO: 21030 - protein, 470 aa, Moorea sp.
MTESVELELLSMMKKLGIVRSESYNKLGSINHWGLDWKKAIPLIKSFRTPGSLGLPAKLMDWTINDVAKCITASQAACKDAVIKKIYKRFPGKENQKSRKELSKQLKNLTFLSNSLLHRFVRKEFKRGHSWVKNQIVYQQDGYKCKRLSRNTYQLEIAGLVRGKRNKIIVRSNRKIKGQIRLIHNQSLGRFEVHLLVDYGNVKIPSDRRSIGVDKGYTEAFYDSDGYAHGKDLGKVATKKSDRICAKNRNRAKLWALHRKLEKLDPAKSARIFKNNLTRKTENKRYRQNQSELTAIIGAASKSLFNGESLKVFAENLTQPIRNRRQSRAMSRKLNSWMKGKMRDSLQKWANWTGSVVTEVQPSYTSQIDSVTGTLLGKRSGDNFTRFNGVVLQADHNAAKNILARGTDKEISRYMSKTQVQAVLLRRTARFLKGMGLSLADAVELGWLDCKHTTTQAFKKLLVEMPGTSR

SEQ ID NO: 21031 - protein, 283 aa, unknown
  TnpB Polypeptide
VLSLKGWKSGQSRFPKFKKRSRGQSFQADAGRGTTIVEGHRIKLPKIGWVRRFQSLRYFGTICKVVISKHGHRWFASILVDTVIDDTSPEIRGLPTVGVDVGIKHLAVTSEGVYYENSKALKRYERKLKRLQRQLSRQEKGSRNWHKTKAKLAKLHSRITCIRQDAQHKATTTIINRASRIGIESLNVARMLKNHRLAKALSEASLSSFLSMLKYKAERMGVKIVEADTFYPSSKTCSACGTVNSDLSLSDRTYHCSVCGHTQDRDLNAAINLRTVAMGHTET

SEQ ID NO: 21032 - protein, 519 aa, Bifidobacterium sp.
MSFTSFRAGMPGISMPGGTALSFPFKSFSLCARSDIIGIMSQKVVIERVQVRGAAPYLGMSATPDGQQIPLYSTNPDVVMRWLCDGWRCRYNQLRSRRTKWDRESQTAVPLNGRPDMRSDRQVRLECSWLAAIPSMVLQSPNRIENTDWWSANKRRRTLKKKHRNPGMIPRFKSRHDDLYFVCWHNKGSNANYRRLNRHHGEVVITGQNPGEYRLDGQPCRYGIHIRVRVSQSIRDYTSIGVNWTRRTLVFVNDPLPIGRERTGAMVGLDRGCAHTLATSDNRFLDLPKQRLERIDREIRRRQKAQARRVNMSGKTVREYRRNPSRTYERTGREISRLYAKAHRIIDDWQHKTTSMLVHDYDLIALEDLNLQGMSRKSKAKPDPDRPGAFLPNGQSAKRGLNRSLRAASLAGIVSKLEYKTRLTGRNRLIFVNPAYTSQTCSECGYCDSRNRESQADFECKQCHMSMNADLNAARNILKRGLNHLIGLDEAEHARTEPDAQPAYRGKDASAMTCETSTR

SEQ ID NO: 21033 - protein, 423 aa, Halomonas sp.
MRLTLAEYRQFCRALSVVVLSNWPSLQQAPSFAAAVERLMHPTKKNPSPRHLYFAKRFYKFPSYLRRAAIEFVKGQVSSYLTRYRAWQSGDRARRDAKPPRFNPIAGCYPVMYRGQLVKFDAEFTTASLKLWDGKEWLWHEVAIKAVRQRHHLGTIKSPTLVLNRRCHLAVPVEMTPPSLPDRQRVCAVDLGINTLATASIVTPNGTVAARGGFHPAADMDRRDKRATLIRRKARKTAKLSKGFGRTWYRKAQHINEQMAQQTSRRLVDFALEHGADVIVLEDLKGWRPRAGKKRSGLRQRFHHWLHRRLATLIEQKMVEAGGRVVHVYPRGTSSWAFDGSGRIKRDKAQHELATFQNGKQYNADLNASYNIGARYWAWKHKLTRRKDGQLSAGKRSPDKPRTPVTLSTLWRREPEAPHRYVA

SEQ ID NO: 21034 - protein, 429 aa, unknown
  TnpB Polypeptide
MGLSIKTCYTVKIQKQLDATQDKTTEKLNIARKRAVDSRLMRQTSLICLEALKFCVSVISEEWDTIMGVESKLRKRLIDTLVHRTKTAVPKYPEFDLKFPKMPGYTRRAIIADAFGMVKSYRSNHKNWKETPPMERGAEPTLGIPSRYELTFYDQERKMSCLADSQIGLKLYNGKTWNWYYFQIRPSDAKQISRLSKTRKMLSPIVDKVRGRYQIRFTFEEIRELVQDEDKLAYRVLAVDLGINAAASWCVMEADGTVHAKGVIHLPCEEDRLNHMINRKRMYQQAGKKSHCAYRWIREANRQLSIQTTKALMDVAVLYSVDCIVFEHLDSKGKIRGRRYRERIHLWRKNDVQHRVELQAHRMGMRLSHVCAWGTSKYALDGSGVVDRHSIYIMNMDERFTITVFVCFRMVRSTTVTCPQHRTSEQDFF

SEQ ID NO: 21035 - protein, 338 aa, Tissierellia sp.
LIKSVKIRLKPNGKAIKKIFNNTIKREEYEWLYEVSSQAISEAFNDLQRAFDNFLNGKSKYPRFKTKKRSKQSFYVRYDRMNIKNNTVNIEKIGRVKFTTNYYIPILKSYVNPRCHFDGKYWYLTFGYEQDENQVELNQDLSIGIDLGVTNLAVVSHMDNPIKNINKSPKVEKLEKKLKRLQRKCSRKYEMNKNGKKFIKTKNIIKLERKIKLIHRQLANIRNNHIHQATNSIVKLRPYRIVMEDLNISGMMKNKHLSKAIREQKLHEFLRQIEYKSKFNGIEFVKADRFFPSSKMCSSCGNIKKDLKLSDRIYTCNCGLKIDRDKNASINLSNYKLA

SEQ ID NO: 21036 - protein, 402 aa, unknown
  TnpB Polypeptide
MQQLQAYKFELRQTGEQARKMRQFAGACRFVYNKALALQKARHEVGEKHLGYASLCKHLTEWRSSTETPWLKEAHSQIVQQALKDLERAYKNFFEKRAAFPKFKKRGQYDRFRFPQAITLDNLNGRIKLPKLGWMRYRKSRDVLGEVLNVTVSLSYGKWFVSIQTERTVKHAVAQGGAVGIDVGVARFATLSDGSHIEAVNSFRKHEARLRRYQRRTSRKVKFSNNWKKAQAKVKNLHYRIANIRKDFLHKASAAISKNHALVVVEDLKVRNMSASAAGTIDVPGINVRAKSGLNKSILDQGWSEFRRQLEYKMIWKSGWLVAVAPQYTSQTCPRCAHTSKDNRKTQAKFECVGCGFEENADLVGAINILERGYRLLACGESVQSGRSVKQEPTEVTQAAFA

SEQ ID NO: 21037 - protein, 459 aa, Micromonospora sp.
VKTVQAYRFALDLTAGQERDVYAHAGAARVAHNWALARVKAVMDQRAAERTYGLSDDQLTPTVSWTLPALRKAWNASKEQVAPWWRECSKEAFNTGLDALARALRNWVDSRNGKRAGRPVGFPRFKSRRRSTPSVRFTTGVIRVEPGRMHVVLPRLGRLKLHESARKLARRLDNGTARIMSATVRRDGGRWHVAFCVEVERAERTPARPDAVVGVDVGIKHLAVLSTGELVDNPRHLLVAQAQLRALSRTLSRKIGPDRRTGRRASNRWQRAASWLGRAHARVANLRRDGLHKLTTRLAREYGTVVVEDLNVAGMLANRRLARHIADAGFAEIRRQLAYKTEWNGGRLLVADRWYPSSKTCSGCGAAKAKLALSEREYHCQACGLVIDRDRNAALNLAALTAEFDTAGSGPVAARGADQKTRVRGQVAVKREPGTALAGQTGTVPPQGGATNRVLTRAH

SEQ ID NO: 21038 - protein, 262 aa, unknown
  TnpB Polypeptide
MIQLKLLPTSEQADALRRTLERANEACNTISRVAWETKTFRQFAIHKLVYQSVRETFALAAQMAVRCIAKVADAYKLDKKRMRTFSLHGAIAYDDRILSFALPKSEVSIWTLDGRQAIPFVCGERQRQLLASQRGETDLVLVNGVWYVFVTCEIEEPELLDVDSVLGIDLGVTNIATDSDGAIHSGKAIKNVRYRHRQLRQKLQHKGTHGSRRRLRQLAGQERRFAKHVKPLPLQTDRGKGRTHEAGNSVGRSDAHLHAGQG

SEQ ID NO: 21039 - protein, 387 aa, Dinghuibacter sp.
VPKVYKYRLYPSKKQASRIDRSIDVCRLVYNLALEVKIWAYRNGTNISAIDLCYQLVDLRQTFDWIKEVDSQALQASVKKVDVAFKNFFRGSGFPKFKSKRNGGSFQCPNNTRKIDWGNGTLTIPKIKDIPIVLSRKFEGKIKTVTISRTATGKYFASILAELAHDKIQPSKTERAIGIDMGLAHFVVLSNGEKIDNPKYLATSLTRLKVMQRRAIRKKKGSQNRTKANRKVAVLHEKIANQRNDFLQKLSTRLIVDNQIDTFCVENLRVKNMVKNHRLARAISDVGWSMFITMLEYKGRWCGKRVFRIDQWYPSSKTCSHCGYIFEELDLSLREWICASCQTTHDRDVNAARNILSKGIESGVGSSEEPVEPRRMRRTMKQERIQM

SEQ ID NO: 21040 - protein, 404 aa, unknown
  TnpB Polypeptide
MIAHKIELKANNQQITYFKKACGVARLAWNWGLSNWQEQYIEGLNPSGMSLKKEFNAIKKEEFPFVYDVTKYAVQQPFIQLQEAFNRFFKKISGKPKFKKKNRSKDSFYIGGDQIKVERQKVKIPNLGWVKLREDIRFQGKILNATVSRIADKWFISFGIKPSMSYLPCKNQASVGIDLGIKTLAVLSNGSFVESPRPLKKLQKKLTRMSRQLSKKQHSRKKGDTTPKSNNYKKNTIKIAKLHKKIADIRRDTLHKFTTYLTDNFKYISIEDLNVKGMMSNRKLARSIQDLGFYELKRQLEYKSEQKGNKLFINDRWFASSKTCCQCGSHKKDLALKDRIYHCDKCHLEIDRDLNASINLHNQLGRVHPEVTPVEITAMNLEAGLLNLTSIIEAGSKRQTKSVA

SEQ ID NO: 21041 - protein, 375 aa, Lachnospiraceae sp.
MKRDGGKTYKAFRFRLYPNREQEELLSRTFGCCRFIYNRMLADKIEEYNNTGKMLHNTPAQYKKEFLWLKEVDSLALVNVQLHLETAFRNFFSLPKAGFPKFRAKHHCRDSYTTNVVNGNIRLEGRRIRLPKLGTLRIIVHREIPVDAVLKSVTVTREPSGKYYASLLYEEAACENQAGALLHAEKILGIDFTMDGLAVFSDGTRAEYPMYYRKAQKALAKEQRRLSRCVRGSRNYGKQKRKVARCHEKIRNQRMDFQQKLSRRLSDRWDAVCVEDLDMQVMSRRLHLGKGVMDNANGQFRDLLERKLVSQGKTFIRVDRFYPSSKKCSCCGRVKRELPLSERVYRCECGYEGDRDVNAAVNLREEGKRLLGLAG

SEQ ID NO: 21042 - protein, 365 aa, unknown
  TnpB Polypeptide
MARKTYKFRLYPTKQQVEKLETWLSLSCELYNAGLQERRDAWKINRVSISYESQNKQLTEIKKIRTELNDVNSQVLQDALQRIDKSFKAFFGRVKSGEKAGYPRFKSRNHFDSFSIPNTRYKVEKGRFDLSRLGKIKIKQDREIEGVMKTATVKRQCGKWFVCIVVEFEPLPLPKTNQKIGIDVGLKSFAALSTGEVIGNLRYAESLQKKLRIAQRTVARRKKGSSRRQKAVMQLKKIYQKIYDQRNDFQHKLSTKIVRENDLIAVEKLNMKGLTKGMLAKQVLDASWGSFFEKLSYKAENAGRQLIKVNPNGTSQTCLCGASVPKTLSQRTHKCDVCGIETDRDLMSAKVILQRAESHSVQVPT

SEQ ID NO: 21043 - protein, 396 aa, unknown
  TnpB Polypeptide
MSRYRLLPAPAQQAVLRDHCGHARYVWNLAVEQHQHWHPGRASAPGYLEQCRQLTAARAAYPWLAAGSQTVQQQALRDFTQALTAFFDPHNPADRPTWHKAGRNEGFRIVGRRGRQWDVRRLSRKTGQIWIPKAGWVRFRWSRPVPPDVKSYRVTMDRAGRWHVAFAAIPDPVPAPRNGEIVGIDRGVAVSAALSTGELLLVPGLTAPERTRMRRLERRLARAQRGSNRRTQVRLAIAQLRARQTDRRKDWAEKASTSIARRFDIIRVEDLQIGNMTRSATGTRDNPGRNVRAKAGLNREILTSGWGLLVRRLTDKAPGRVEKIKPAFTSQRCSACGHVDQKSRESQARFSCTACGFTCNADVNAARNIAAGHAVTARGGVRAAGPVNREPQLLAS

SEQ ID NO: 21044 - protein, 282 aa, unknown
  TnpB Polypeptide
MLYAQSTAALNNKNSYLQISHSKIEDKNHLQFKDAGIDVGTNNIAAIFINDGITPSLIVDGRKYKNYNFKFNQLIAELNKNKMIQCAKERKKIEKIISSLYEKRDKYLKDQFFKIAKRIAEYLYLNGVSTVYVSGNPAGLKNIWENNSDKTIPQYSDQIYFFKFLRYIKCHAQDYGIQVHYIDERFTSKISCISDDIKNIQSNCNLTNTFNGKRVTRGLFMDTVINKTFHADINAAVNHIKVATGEDFSWLKNRLFKLASPIKIKSNQEFCKLIKNCKTQFK

SEQ ID NO: 21045 - protein, 223 aa, Streptomyces sp.
MLSWQMPDRTVSVWTTYGRIKNVAFTGSAEQLTTLELYRKGESDLVLRDGMWFLFATCEVPEAPLNTDPVDFLGVDLGVVNIATTSDGEIMAGRALNRMRTRERGLRRKLQKKNTPSTKRRLRKRRRKEARRARDINHKIAKHVVAEAERTGRGIALEDLTGIRERVRLRKPGGTSHALEAVGEGHPLQLELRPAGFVHRVQGPPCRGAGGVRRSGIHLSYLR

SEQ ID NO: 21046 - protein, 369 aa, unknown
  TnpB Polypeptide
MIFAYKYRIRDSSSKVRLKKLASSVNFVWNYINELSFENIKRHNRILTTYDIQGYLNGAASELKLRASTLQELARFYVKARKTFKKRKLSWRSTKRSHGWIPLRADNFKLKGDVVYYCGHQFKLWKHRELPQGAKIKTGSFVQDARDRWYLNVNWELPDIVLHPFPGTEVGIDLGIKNQLTLSTGETFTRGSETKKYAVDLARAQRARKKKRVKTISAKAANRRSDWTHKVTTDIVRRFATIFVGDLKTSSLVEKGTLSNCSGLYDAAPSSIKHCLNYKAKKLGGACHIVNEAYTSVTCSYCDVRSGPTGTGGLAIREWTCDNCGATHSRDVNAAQNILRRGHSTLQRSPTAGDATTSGLHFEKFELSS

SEQ ID NO: 21047 - protein, 389 aa, Nocardia sp.
VQLRYSYRVYPTPGQQASLARAFGCARVVYNDALAARMEAFEKGERISDAELSKRLTASKATPQRAWLSEVSSVVLQQALADLNTAYRNFFASITGKRKGARMGLPGFRSRRDTRQAIRFTKNSRFTVTSGGALRLPKIGDVKVGWSRELPSAPSSVTLIKDAAGRYFASFVVAVDEQPLPSVDAEVGIDLGLATFAVMSDGKTIDSPKFLRQAERRLRKAQQALSRKAKGSKNRAKARLKVARAHARVADTRRDWAHKNTTRIIRENQAIFVENLSVKGLARTRMAKSVHDAGWSMFTTMLEEKAARYGRRFGKVDRWFPSTRMCSHCGVIGDKKPLHVREWTCGCGTTHDRDVNAAMNILAAGRAERRNACRAGVRPQRIRPGGQLV

SEQ ID NO: 21048 - protein, 558 aa, Arthrobacter sp.
MDTPIQPSEAPAGRDPARNAGGLRRIVVPFVVAPPAGVRIRTRLRPTDTEAAALTTIGEHLGHLYRTDLAGRVALGRVPAAQRARTERKRNLTAVSSSRWAGAITRAAEDQYQLGMRALVAEVSHLRAATAALHRRIAVPAGPKDGKNRGYRSESERFQKTRRLSQLQERLEAAQTALAAGRPSISVGGRRLWKTRNHLGEAGLTRVQWEERWAASRMFLTADGESGSIGGNQTIRLTAAGTGLPGKLSVKVPTPLVPALGDRLVLSVPVAFAHRGEEWTDRVASRRCIRYDIGFDPEKGRWYLDASWSYGDLQVLPLEALQSSGVVGVDLNADHLAACRLDASGNPVGQPITIPLELAGLNAGARDGRLRSAITTLLDLARDTGAAAIAIENLDFEDSRSTGRETMGRGARGKRFRRTVHGIPTGKFRDRLVGMAANRGIHVIAVDPAYTSKWGGQHWHKPLQAASGGTVTRHHAASVAIGRRALGCRIRRREDGPRTRQWTGAGKPSPRPNQASKGAATGTGPVRPAATSRPGPPGTGRRQAPKTVRGASASPRRT

SEQ ID NO: 21049 - protein, 380 aa, unknown
  TnpB Polypeptide
MQKTYKYRLYPSKDQEQILFQTLEHCRYVYNMLLEWLNKQDKPNRYELQNRLPLLKQEHPELKSVYSKALQYEVYRLFYNLRGLSQSKKNHRKIGKLRFKPSHRFRTIHYNQSGFKILQTDKRLDMLHISKVGDLPMLMHRPVEGNIKQVVIKHYLSGKWYACISVKQDKGVVKQPIKTAVGIDVGIKYHCSDSDGLQFENPKYLNKSLKQLKRRQQKLSKTKRGSKNRGKHRVCVARQHERIENQRNDFLHKISRYYINRYDLIAVEDLNIKGMVRNHHLARHISDASWNKFMQLLFCKAESAGKTMVCVNPRGTSQEYNHGDGIDRDYNASLNILQRGLEKVGLGLPEFTPADIGPLQELQFVPASLVVETGNHFQNL

SEQ ID NO: 21050 - protein, 375 aa, unknown
  TnpB Polypeptide
VRSAFKYRIYPTKPQAEFLTAELREACSLYNAAKQERDDAWKTCHKSINYYDQANQLKAMRADGCLTLANFSCCQDVLRRVDKTYKAFYARVRRGDKPGFPRYRSSRRYDSIAFPSYGDGCRMLDTGKLRVQGAGHIKVKLHRPLEGAIKTVTIKREAGRWFAIFSVKCHAQPLPASTAEIGIDVGLNSFAVLSNGAEIQNPRHYRNAEARLRCAQRKVARRKKGGARRRRKAVRLLQRAHVHVGNQRRDFQHKESRKLIDEYGLIAVEDLNVKGLAGGMLAKSVHDAGWSLFVAMLVYKAEDAGRRLVKVDPRGTSQTCVCGARVAKALADRRHDCVACGLSAGRDHVSAQVILQRARSEPSGANVEVVVSCVA

SEQ ID NO: 21051 - protein, 407 aa, Microcystis sp.
MLVAERHIIKKGNRFWAEIDNLSWQSKNLYNSANYLIRQNFIYGHGYLTYNQMASLMKETEQYQALPAKVSQQVLRGLDRNWPSFFAASSEFKSHPDKFLVKPKIPGYKEPKKGRNLLVYTIQAISKVGLRQGIVKLSGTSIALPTRVAERIAEVRIVPKCDCYVIEVIYEKTKQFLAPNEKIAAIDLGIDNLMAVTSNQPDFIPLLINGRPLKSLNQFYNQRRAKLQSLLKGNRQSSQRIRRLTRCRNQKVDDYLHQASRYLVNLLVDQEITTLVIGKNDGWKQEVNLGKVNNQKFVTIPHARLIEMISYKCRLAGIKVIIQEESYTSVANFLNDDPLPVYGQITEKPVFSGKRISRGLYRTDKGILVQSDVMGSYNILRKAFPNAFNRYGIERCVVHPRRINLSK

SEQ ID NO: 21052 - protein, 187 aa, Microcystis sp.
VSPSVSFLFEITIKLQEKIARLPEKVSNTRRDWHFKLAHYLCDLADNIFVEDINFVSWSRGIVRKQSLDSGIGSFINEILPFVVWKRGKYYLKVDKNGTSQECPNCGAITGKKALSERVHRWDSCGNIEPRDTASAKVIENRGKNAVGLTVLENARGGDRLGIVRLNQVDLVKSLRTENPPLHRASG

SEQ ID NO: 21053 - protein, 417 aa, unknown
  TnpB Polypeptide
MNRILAHKIRIKATDADKAFFANCVGVARFAFNWAESYWNDIYLLGGMPKESELRRFLNSIKEEFFPWMSDVPKSVVQQSIKNLGTAYGRFFKKLGKHPKRKHLRDAKQSARLDNGPGTIKLKSNRAWIPNYGWIELCEQFRWPHARFMSMTLKKDGPRWFLVVSAEVEVPAAADNEKQVVCDGAADLGLASALTVADDDITVKLAAPKPMKWAMKRLAFYQRRYARTKPGSANREKARLRVNALHYRIRCIREDWQHKTTTALARKYEVFYMEDLNVAGMMKNHCLAGAFADVGLGEIKRQLAYKTFVLEVSRWFPSTKTCHKCDIKQEGLTLADRTWTCGGCGTVHDRDENASESIFKEGRRIVTLNYAVLLSFGSYRELHGNYASGDRANASGASRECKPQSERGIKKSLPAQV

SEQ ID NO: 21054 - protein, 418 aa, Crocosphaera sp.
MYKAYKFRIYPDTEQKQALEKAFGCCRWYWNYSLDLCQKTYQKTGKSLSRGAIQGLLPGLKKEYPWLSDAYSQCLQFVALNLSRAYQNFFEKRAKLPRFKSKHGRQSMSYPANVKFEGDYLKLNRKIGKIYCRRHRDFEGTIKTVTISKNSDGKYYASVTVDDGIEKPETSTQGKAIGIDLGLTDFAVTSDGSKFNNPRHLAKHQQNLKRKQQKLSRKQKAIQCGLGGSPHERLNQEGSNTRQKARKSVAKVHSKISRCREDFLHKLSRKIVNENQVIAVENLNIKGMVKNHNLAKAISDCGWGMFCTMLKYKAENEGKTYIEVDRFFPSSKTCHVCLNQVESLPLDIRNWTCEHCHTNHDRDINASINIRNEALRIISLGTSETANGGSVRRLGGKISCLLDATPDEIGSPNYIACN

SEQ ID NO: 21055 - protein, 366 aa, Vulcanisaeta sp.
  misc_feature (331)..(337): Xaa can be any naturally occurring amino acid
VNAGQVINLNNQTWKSYFELLKLYKQGRLPKFVNKPSPPGFWKDKVLGKRILRILVRNDRYYIEPINNGEGYLVLKDWGLKIKYAGRIKWSGKQGTLVIKLEGNRWFAYVPITVGEKPAKSNPKGYVRGIYEKIQIEKPKGSNKAFIDIGLNNLFAVVFNHTDVAILIKGSTIKSEYYYWKREVKTYQSIRDWLRNHGFESWRKYHTYYLHAVYKQHERLRHYYRTAIRFLAKTLWQMGIDEVFIGYPYMVSQNNGNEFNTNIWWFNKIIKWLSEVLQEYGIRLNVVNEYGTSKQCSICNMEHEKGRVKRGLYVCELTGIKINADLNAARXXXXXXXPNYLIAVLGLPSLSRPSPSPGTPCPPPCS

SEQ ID NO: 21056 - protein, 283 aa, Okeania sp.
VHQGQALRDLERAFKNFLTIPERGFPVFKKKGRKDSFYLEGSIKIFQGNYIQLPRIGIVKTYEILPSVPVKNVTISKKADNWYISFKYNFESYPTEKVGETIGVDIGINTLATCSDGSKFANVKAYRQAKKQLVRHQRAVSKKVIGSKNRRKAVKKLAKIHKKVADIRADVLHKLTTWLAKNHSTIVIEDLNVSGMLKNHKLASAIADCGFYEFKRQLIYKCEWYGSKLVIADRYYPSSQICSNCGHQQKMPLHLRTYECSECSFKTDRDLNAAINLKNYVYQ

SEQ ID NO: 21057 - protein, 299 aa, unknown
  TnpB Polypeptide
MQKGVKFRIYPNKEQQTIINQTLGCCRLIRHPQFKSKHNRHQSYRTINQGDNIRIVGRYIKLPKLGLVKIRQSMEVGKINNVTIEHTPTDKYFAVLNVEFEPQPRPNNGGFIGIDVGIKEFYSDSNGNVVPNPKYLEKSMRKLIREQRKLSRKQKNSNNRNKQRVKTALVHEKITNQRNDFLQKQSTMLIRENQTICIEDLKVKNMMRNHKLAQHIGSASWSKFFDMLTYKSVWYGNGVIKVPTMYPSSQTCSCCGYKNPLVKNLAVRVWKCPDCHTVHNRDTNASINILKKGLQMQSA

SEQ ID NO: 21058 - protein, 378 aa, unknown
  TnpB Polypeptide
MLRAIKIRLYPNKTQEQTLNKVLGSYRFIYNHMLALKQNTYNENKTSLGLTELTKYFHGTLLKDKQYDWLKEQNTKVMKQAIRQMLTAYDKFFKQHNGFPKFKTKKDKQSALFPLEAISKRNEFNERKITLTKPLKNIKFRCSDLYFNRLQRHKYEIRSATLSKTKSGNYFLSILIDLPQEEIIKFRQTNKHVGIDIGVKNFVITSDGEVFENKHFFIKEEDNIAKLQRQLSKKVKGSNNRNKQRVKIAKAFERLTNQKNNYIHSVVNELLTFYDTVFMEDLNVQGMLRNHHIAKAIQEIGLYRFRQVLEDKARNNYKKVVFVDRFYPSSKTCSNCGYINKELTLNDREWICPNCGENHDRDLNAAINILHEGERILN

SEQ ID NO: 21059 - protein, 333 aa, unknown
  TnpB Polypeptide
MLRAIKIRLYPNKNQEQTLNKVLGSYRFVYNQMLALKQNTYNENNKSLGLNELSKYFHGTLLKDEQYAWLKEQNTKVMKQAIRQMLSAYDKFFKQHNGFPKFKSKKDKQSALFPLEAISKINKFNERKITLTKPLKDIKFRCSDLYFSRLRKYHKNIRSATLSKTKSGNYFLSILVDLPQEEIIKFECTNKHVGIDLGVKDFVITSDGEVFENKHFFKKEEDKIKHLQKRLSKKQKSSNNRNKQRIKIAKAFERLTNQKVAYIHSVVNELLTFYDTVFMEDLNVQGMLRNHKLAKAIQEIGFYDFRRILVDKARNNYKQVVFVDRFYPSSKTC

SEQ ID NO: 21060 - protein, 379 aa, unknown
  TnpB Polypeptide
MLRAIKVRLYPNKIQEQELNKVLGSYRFVYNHMLAMKQEAYNADKTNIGLNEISKYFHNELLKKEEYRWLKEQNTKVMKQAIRQMLNAYDKFFKERKGFPKFKSKHDKQSALFPLNAISKKNTFESRNISLTKKLKNLNFRCSNLYLSRLQQYKDNIRSATLSKTKSGNFFLSILIKMEDTEFNKFEHTGCDVGIDLGVKDFVITSNGEVFENKHFYKKEEKYLSKLQRQLSKKNKGSNNFRKQCVRIAKVFERIGNKKENYIHFVVNELLLHYDTIYMENLNVQGMLKNHNLAKAIQEVGFCKFKVILQTKALQNDKDVILIDRFYPSSKTCSKCGYVNKDLKLSDRHWCCPKCGMYHDRDKNAAINILHEGRRLKTA

SEQ ID NO: 21061 - protein, 335 aa, unknown
  TnpB Polypeptide
MLVAYKNFFKEHRGFPKFKSRNNVQTALFPIDAISKKNTFERKTITLTKNLKDIRFRCSEEFYSRLKKYKDGLKGATLTKSKSNKYYLSILIEIDDSEINLLPHTKKDVGIDLGVKDFVITSDGEFFENKNFLTKEEKLLKKLNRQLSKKKNGSNNKNKQRLKIAKLHDKIANKKDYYIHEVVNKLLSNYDNVYMEDLNVNGMLRNHKLAKAISEVGFYKFRNLLETKAAENAKNVGFIDRFYPSSKTCHNCGYIKNDLTLNIRKWTCPECGIEHNRDVNAAINILKEGSRLAMEGVTVEKVTKKKAAAKKKKAVKKTDDSTTKEVVTVATEVSA

SEQ ID NO: 21062 - protein, 225 aa, unknown
  TnpB Polypeptide
  misc_feature (10)..(13): Xaa can be any naturally occurring amino acid
MRSVPLCGQXXXXGTVLGRKFIDHPSEKDRMYRTLGRIRRFQREHGSAQSRGRWAYTKRLNTEMGRKIAGAIVKYAEENHADVIVFEYLEMQGKISGKKKQKLHLWRKRDIQKRCEHQAHRKGMRISRVCAWNTSRLAYDGSGNVSRNPKNHSICVFQTGKQYNCDLSASYNIGARYFIRELLKPLPVTERSLLEAKVPPVKRRTSCVYADLKELHLQMEILKAA

SEQ ID NO: 21063 - protein, 389 aa, unknown
  TnpB Polypeptide
MYQAYKYRIYPTHEQQESLAKAFGCCRWFGNYSLSLCQETYKSTGKGLLRKDIQGLLPQLKKEHEWLGTDVYSQCLQVVALNLSTAYKNFFDQRAKYPNFKSQHHRQSIHYPQNVKFDGDNIILPKIGKVHCVRHRDFEGTIKTVTISLNPDGKYYASVLVDDGKETITPSTEGNAIGIDLGLTHFCITSNGSKYDNPRHIKKHEKNLKRKQKKLSRKVKGSNKRKKARKLVAKVHSRIARSREDFLHKLSRKVVNENQVLAVENLEVKNMVKNHNLAKAISDCGWGMFCTMLSYKAKNAGKTYVEVDRFYPSSKTCNICLNQVGNLPLDVRQWQCKHCKTVHDRDVNAAINIRNEGLRILSLGTSHTAHRGNVRRADRISVLPERNSC

SEQ ID NO: 21064 - protein, 470 aa, unknown
  TnpB Polypeptide
MGQATRTTKLLIAEGKREEGGANTDKRLYLDATAAVLNQARAFYIDFFLAHAGKVTERVSYFSEKHQEQRERAIGANELLTWAEACTVATREHPHPSDSWNFSERFPDMPFVYRRSVIKDAIGKARSYLSNWANWQRSGTKRGKPGLPGSTNHPTLYEGAFSLELEDLDLRTSFVRLKVYTGEQWTWANYPVKYSRYFEQRRVEAGWEQQSPKLVLRKQRAEFHFSQIKEVKAEKVRERKQNPHLVTVAVDLNVKNLAVISVRQDDRIIETTFVRDHGLDRHRYEHLKRIAKKQWQTGKPIKGERSNQQLWQHIRRTNQDAAHKVAHRIASICAKYPGCILLFERLRKIRSQGANKSRRMNRRLANQLRGKIRQYAGEKAYVRAAVVTVEVNPHGTSQYCSRCGNLGERFSYRAGRRIVEKWGKLFWCPSCHYEANADLNASVNVHRSFYREWHWHPRKKPPPSPVETSG

SEQ ID NO: 21065 - protein, 396 aa, unknown
  TnpB Polypeptide
MNVLTYNIKLEFQKQEDKTSLVDLLLEHQKVWNYMAEYVFESKKVDKKLIHDKNYHQCRKLFPNCPSQVIIRAKDSVYATYKTIQSNHQNITEAAKQQNLSIRLDKRIYTFLPNNQIKLTTTGKRIVCSYSPYDKFKEMFSKYSVCDPLLFVRNNDIWLSVSFEVNTPTLIENSCIGVDLGIKRLATTSEGIAITDKQFLKEKRKLRYQKRIFKSKSKTSFSRSAQKKLKTLKRKEFNKNKNESHLISNKILETKCNVIVMEDLSGIKQHHRGKKFNNKQAQVPYFDLRRILTYKAPLQGKIVVTVDPAYTSKNDYRGIKKGKRQGCRYYTSDNKVFDADWNASINIANRYAMRKKVKGVELPVSFNIPIDGRLNLMGKHHQRANSEIRSRKPNDL

SEQ ID NO: 21066 - protein, 411 aa, unknown
  TnpB Polypeptide
LYITQKNRLKFNNKEYELILKLCRLSKNLYNVTLYETRQFYIRNDSFLVYAKAYHIVKENENYKQMPKQTAQQTMKVIERNMRSFFGLLRERKKGNYNRQVGLPRYLQKDGYFDLIFQKDQFKIIDNKVRLSLGNYFSKRFNSKYLYVPLSKNIIGKQIKEVRINPKANGKRLYVEYIYKIESEKPELNSNEYLSIDLGLDNFATIVSTTTNEPPIILYGRGLKSFNRWWNKEKSRLDSIYENNKVKTGRKMLTLFDRRFGYINNIMNQYVNFIIKYCIKNKIGNIVIGELQNIKQEQNHGKVNNQNFQTIPYGIFKRKLKGKCERYGIIYIETDEAYTSKCDALSFEPIKKHEKYSGKRIHRGLFKSSIGKVINADVNGALNILRKVSGDSVARRIIGSGFVYNPKRIYV

SEQ ID NO: 21067 - protein, 550 aa, Mycobacteroides sp.
MIVQMRTRAQAAKVAAATGAAHLAGKPKSDGAQTLSRYVDVGADFEAHRAAVESVSVLFDLYDGDVDSYAQTGSPGAPLPSGWTVTAAKFEVEWPAEPQRAGLVRSHFGARRKAFNWGLAKVKADLDAKAVDSGHESVGWDLGSLRWAWNRAKDEVAPWWAENSKEAYSSGLADLARALDSWSASRNGTRRGRRMGFPRFKSARRDAGRVRFTTGTMRVEADRRTITVPVIGALRSKENTRRVQRHVATGRARILNMTLSQRWGRLFVSISYALRPPATEPTVAQPSVIAGIDLGVRTLATVATIDTATGVETLVEYQNPAPLKATLAARRRAGRELSRRIPGSRGHRAAKAKLTRMDRRCVHLRREAAHQLTTELAGSYGHIVIEDLDVAAMKRSMGRRAYRRSVSDAAMGLVRPMLAYKTARHGAVLTVADRWFPSSQIHHGCTTPDGIPCRLIGKGHIDKLLVCPHTGEVVDRDRNAALNLRDWPDYASCGPVGTTAPSVPGPTKSVGTGHGADTGSAGARGASVRPRPRGAGRGEAKTQTPQGDAA

SEQ ID NO: 21068 - protein, 433 aa, Streptomyces sp.
MSRFRMYPSRAQAEQMLTHCAHARYVWNLAVEQHAHWRRWRRSAPGFAEQCRQLTEARREHEWLGSGNVAVQQQALKDFARAKNARFTCGFGEPTWRRKHVHEGFRVTGTDRVPEHHADGSPKLNAKTGKQVMGRSVVVQRLNRRWAQVRVPGCGWVRFRLSAKGKGAKLPDAKTFRVTFRNGQWHIAFAVIPGPVEGPGTGGVIGIDRGVTITAALSDGRKLNCPQLTVKERAQIRKHQRRATRAPKGSSEKAAEYAKVAGLRAREANRRKDWCEKTSTMLARSYSLIRFEKLNIRTMTRSAKGTVERPGRQVAQKSGLNRAILAQGWGLLRQRTGHKAPGRVEDVPAPYTSLRCSACGWIDKNSRKSQAGFVCSSCGFTCNADTNASINIAAGQGGIPRPRRKAGAGGVTTATSRSSTREPQPIWAGIPLF

SEQ ID NO: 21069 - protein, 1265 aa, Streptomyces sp.
VDAPGLSRRRKRSSCGARHGWPVRRQGYGEQRRVSYVQSSAGLTEWKKTEEPAFLTEVSSVPLQQALRHLQTAFGNFFAKRARYPRYKSRKKSRASAEYTRSAFKWRDGQLTLAKTTEPLDIRWSRPLPQGAEPTTVTVSRDGAGRWFVSMLVEDTVALAPATNAAVGLDAGISSLVTLSTGEKIANPKHERRDRTRLARAQRELSRKAKGSNNRAKARVKVARVHARIADRRRDFLHRLSTRLVRENQTVVIEDLTVRNMLKNGRLARAVSDASWTELRSMLEYKCAWYRRELVVIDRWFPSSKLCGACGRVAAKMPLNVREWTCDCGAVHDRDVNAARNILAAGLAVSACGDGVRPQRESSRTGRSSVKQEPQRATAGIPRHEAGEEVKSLFSVLLRAADGSSGGEGGRVLLRPCAEGAGGVPGEHLDVPAEGDGPGGGRPQLDQGVGDVAGHRVGLVGTPHRGRDRLHGDVPAGGLGDDGDLLAEAQRGGAGEMVGTAACLGAGEGGVGALGDVPLVDRVGVAVGEGQGDGAAGPQHIRPGGGVGGQGPAVEGGHGQRGGGQRAFDRQVRGGDRVGAGVGAQHGVGGHHHDVLDARGDGVGGELPDVGGVAVQEHRGDAVEGGRERGGVVKGEPYGGDAVGRGQLLGARGGGRDGYAVVGEEPYEQRSDLAAAAGDEDGHDRVCLSWRGSRGRQAAGAASAGASGGGAAEPAVQCLAQVCAVGVVRPHDVAVGAHQDAGRWLRGGGVPRSPGAGDGVDAVGPVGGRLRRGLVVAGGDEQAAGAVEEFGDLLPAAVGAFEDVVGGQAQAEVRVVAGADVVADVQAADASGEMAGDRLQLHQFAHDGAQRLHLLAAEVEQRHGVHVGHEFLADRVPFAVVGVQEVVAGVAAQDGGEFEAEVDGVLEADADALGAERGVVVGGVAGQEDTALAVPLGQAGGVGQGAHPGGVGVVDVLAGQPLPGVGDLGEGQFALAVVGADTGFVDDDAVDAGFEGDGQDHAAAGDAFADGPHPQVGADHVRQVQAAGGPAAGEGDAGQAAHGAVAAVAADEVGGRVLYGAGGAGEVGDDRLVGLGEGGQLVSAADLDAEFGDPGAEHVLGDRLGQAHDAEVALLQQGEVDADSAVVALLAPADVTEAFQQAALVEDFGGAAGESQAPGLAARGGQLVVDDDVRATEGEFAREHQTGRAGSHDDHAVWHVDSSVQVDGDQESPLVSTGGAVRLKWCGGSRSRGTAGGAARPGAGTGGAAPSGGGMPTGPRWGEGQ

SEQ ID NO: 21070 - protein, 552 aa, Streptomyces sp.
MPLSSSRWAGSITKATHDQWALARRGQLAHIHTLEAGIRTIEGRLSLPVGQKGTRKAPGGYRSRREWHAKSRRLQVLQDRLRAARADREAGIVHVVRGGKPLARARHHLEAAGLTESAWRGRWEAERWFCQADGESGKRHGNETIRISPDGEVSIKLPAPLAHLANVPRGRYVLACRVVFAHRGGEWADRVAADRAIAYRIHLDTGRDRWYVTASWQIPPTPPLSIGAALAHGVIGVDMNADLPHARLRSRGGTPTAAWRLDVHGNPTGSPRRFPYDLTGTAQHRDAQVRHALTRLLHWARVCGVKAIAVEDLDFAGEKTRGRRTRFRRLISGMPTGRLRARLASMADATGIAVIAVDPAYTSRWGAQHWQKPLTTTTRKTTRHEAAAVAIGRRAQQHPVRRRTAPPPQHRRDAVGHRTVQAGPDVAGREETRPRIPGPRTRSVPPGRGANAATRTPNTVRGVRPSMRPGNRTHSRSVPRNGLVCRISRACSAARMVFSPTKSRKRATFSRRAPAGVPGPRTPTPWRAVSTTWAMPRALAIMDRYQTSSSTM

SEQ ID NO: 21071 - protein, 405 aa, unknown
  TnpB Polypeptide
MDLTEKEIIYSTDERFDLIKELCHLSKNLYNASLYDVRQYYFETKSYRTWQSQRPIFTKNHNPDYYALQSHLAGEVLMQVGRQFMGFFNNKSNKNKRIPRYKDKNGYNIITFPKITISKQIKFDETKQIYTYTLCKRNYNLKIQSTKSNVKMVKFVYDENNDLIKCFKIYEVEQTELKRDNSKYFSIDPGLNNIVSIYNNIGIRPLLYNGRPIKSINQYYNKTNAKMRAELPTNVKSSKKLKQLSFKRNNKIDYEMHKISNHIINEAVKNNISKIFIGNNIGWKNEINTGRRNNQNFVNIPHSKLFNQLLYKGLLKGIEVIFTEESYTSKASFFDKDELPIYGVSDNHNFSGRRIKRGLYKDSKGNLWNADLNGAANIMRKCSDKAYKNIRKTKELMKKPILVTL

SEQ ID NO: 21072 - protein, 422 aa, unknown
  TnpB Polypeptide
MERITLSQKIEIYPNKEQIEELRKYFGYRRYCYNRAIRVQKKMYKEWRDFKSTLTESELKRKVVKKILMEKYPSFYSLRKRINTELKDWENLYHNRIRQYAAADVTDAVKNALNPKMPNHKFPKYKKKKNEKQSISIPIKVAGKKCFIARPKNKKAKLIGWIRMSEGIRWEGDKTEDSTIIYSHGKWYLSVTIKLNENESEKERSRYNFRFGERTGVDVNIRHFDYKNSFNEYMQVSTLNKRMEQLHKQISYYQKVLSKKKDKNKLWKTSKSYQRTKTKLDRAYRRLLGQQEELINQFVHYLHSQYKEVVIEDLDVNSMKMNKRLCRSLHKAMFGRFKIKMATKVQSSDLKLYLADQFYPSTQRCSSCGMVKTGEDKLGLSGDRHGNGHNEYKCYHCGEEMNRDENAVDNLIQYPETSYYKG

SEQ ID NO: 21073 - protein, 589 aa, Actinomadura sp.
MSQSAIVEGVDAVPAAAAHPGVDDAICQVGRTAAQTAAQTAVRGGHSQRLRPIDAPFLAAGPSGVAIRTRLKVLTFQDENVLREVAAHLGSLAGRDLKARCRAGTAHDADGWAARKRALTGESSARWAGSITKATHDQWALARRSHLAHLNSLEAGIAVIERRLSVPIGQKGTRQAVGGYRSRREWFAKSRRLHVLKDRLAAVRADWDAGRVHVVRGGKHLLNHRHHLDAAGLSQEQWRARWEAGRRFCQADGESGKRYGNETIRVTPDGEVAIKLPAPLAHLANAPHARYVLTARVGFAHRAAEWADRICADRAVAYRIYHDPDRGRWYLTASWQRPAVPAVSLEAARARGIIGVDANADHLAAYRLDTCGNPVGDPMRFSYDLTGTTTHRDAQIRHAITRLLHWARRCGVAAIAIEDLDFAQDKTREKHGRRKRFRQLISGFPTTKLRARLVSMAAEQGLAIVAVDPAYTSRWGDQHWRKPLTTSKREMTRHDAASVAIGRRALGHPIRRRTTPPRQHQSDAVGHRTVQAEPSAQGREETRPPVTERAHDARPRTGTHGTRATSASNTVRDTRSTRRWVQNSLLDTV

SEQ ID NO: 21074 - protein, 176 aa, unknown
  TnpB Polypeptide
MEVGKINNVTIEHTPTGKYFAVLNVDFEPQPMLNQGGSIGIDVGIKEFYSDSNENTVSNPKYLEKSMRKLIREQRKLSRKEKGSSNRNKQRIKVALVHEKITNQRNDFLQKQSTMLIRENQTICIEDLNVKNMMRNHKLAQHIGSASWTKFFDMLSYKATWYGNDIVKIPTMYPSS

SEQ ID NO: 21075 - protein, 429 aa, Halobacteriaceae sp.
MDITLRYRAYPDEETASEAWRHIDIHRQIRNHAIRDYYAHQPGDRPAAYDQHRKLTEWKQQWPVFSEVSAHAAQQTVSEIHKNIKTQQGRRENGYNTGRLKWQGTGERRSVAYQSEGFDVDYNTGRDGYATLRLSKIGYIPIRAHRELPPTDQIKRVVLKKEPTGEWFVCLVTEQADDLPEKPSPESLAPIDCVGVDLGILSYIHTSDDTAVDMLDLSDEYDRYAREQRKLDRKEHGSANWEKQRRKVAKAKRQIKQKVLDYQHKLTTWLVKEYDLVAVEDLDVKPMLETSQNAKNKQDAAWSRFLTLLEYKADLHGTHVVEVEPAGTTKECSSCGVATSKPIWIREHSCPACGHTEDRDLNAAKNILSRGRKQLGAGRSESTSSESPCDSDVRTRASLSLTPVQTALPTFTPLRVDAKRVVEAGSPEA

SEQ ID NO: 21076 - protein, 388 aa, Bacilli sp.
MIEGGHMEILKGYVFRMYPNEKQEELINKIIGCSRFIYNHFLDDKIKEYKETGKSKSAYDQIKLIPSLSKEYPFLKEVDSCALRNSLLNLDNAYKNFFDGSGYPKFKAKGVHESYKTNNIKSSYKGNNYNSIKLDLKNKIITLPKLKEVKIRGYRNKKVIPGEVKSAVIKKDAGKYYVSVLIEEELIRPSFIPTSIIGIDLGIKDLIVTSYNEKIENKIKLNTKRMMGLQRGLARCKKGSKNRYKMKLKIQRLYQKIRNARKHMIHDITNKLINENDIIVTEDLDVKRMQKNHYIAKGLNENPISEIIRVLKYKANWNNKRLIQIDRYYPSSQICSVCNYQNREVKDLSIRKWECPECHTEHSRDYNAAVNIMFKGLEKHMLYLEQSI

SEQ ID NO: 21077 - protein, 398 aa, unknown
  TnpB Polypeptide
MFRTFEAVLSPTVGQQAKLGRLFRLQCELYNAALEERRGVWKRENRSVSRFEQYRSLTGFEHPVMDFGTAPARGTLTRLDRAFQAFFRRVKQGEKAGFPRFKPSARWSSVEYPDTSCWKITAGGTRKHSGVGRLYLKGVGQVRFRGAKRGIRGAPKTLIVRRVAGRYRMYVTYVLEPALGPPGPRTPRDIGVDLGVTEIVALSDGTLFENPREQKRSAVKLAKLQQELEQKQKGSNRRKRAVERVACQHRKIVMQRRNRNHQISRVIVDRADGGLIVFENLRITDMTARVKPRPDPANPGQFLPNGQSAKTGLNREIQAAGWSQLRGFTGYKAEEADSPIGLANPRYTSQTCHQCGHISPENRHGTRFRCVKCGHQAHADVNAAQNILGRADPTLQPA

SEQ ID NO: 21078 - protein, 549 aa, unknown
  TnpB Polypeptide
MGIRAYTYRANVSDGAALQLRRQMCVLKVLWNAVLAMRKAHGDYKKGRPQQHGPWWPVESFLRHAVPVDVEPTAASMVKAVTALRQSGLKIRALGALVSFADVGRTQQTECLRTLDKAVRAFFDRLKVSRSAAGYPRFKARVEQMTFQNARIVDGVLCGPGLPEDQIHLVLHRPIEGHIKMGVLKDCRTHWEVTLQCEDVPTRVYPKTDTEIGIDVGVKSFLALSNGETVGALQPFRQAQALLRRAQRKAARSVKVHQKLHGVAYSTACRAVKTSKRWQRKMKRAQRLATHAGNVRKDTHRKLVHTLVERYDRIAVEDLNLRGLGQGFLRKQCLDAGWGQFISLLQERADASDKLVCKVNARGTSQNCSGCGAVVPKTLAERTHRCDACGLTIDRDINAARNVLLRAQQSDWSVVAKVPKRAKLAAKTTLIGSTNSSQEEKPTGLSVSGRGGKGQPQRASAGETPADEASTLSATVPTGVVTGSTLNFYPEQVTEDQAPAHAGSRSGNVSSSNLGSHAPRKGSLKTPSEPRRTIQLSCGWVRRFRVGME

SEQ ID NO: 21079 - protein, 424 aa, Ignisphaera sp.
MGEREMKRTSIVRLVVNKTSEEKLKLLCSLSSKLWNEVNYARRRMFFEKRGVDLKTTYKEYYEKYKTLIGSATTQQVLNKNDEAWKSFFKLLKLRKEGKLPPFITGVNPPGYKKKNNRRILWTVLRKDQYRIEGNRLVLKGLGVIGRIELRYKGLIHLKGDQGRLEIHYDQDRKKWYAHISFEVSEKAVRGVWTNAPKKPRGDLVAGIDIGVNNLMAIYVENGLAKLVNGRPLKAVSHYWRMRIAEYQFTLNKYGLKTSKRLRSMYSKWRRQVKSYIDSRVRQAIEWLYNIGVSIIKVGYPKNIAQENGDFNNVHVWTYGYLLRRVYEVAEEYGITVVYTDEAYTSSKCPIHGEGCGKRVKRGLFKCTKLDKVFNADLVGAFNILITPSPMDRGNGSETQPGIKPSGRGDVTPNLPALAGTLAL

SEQ ID NO: 21080 - protein, 181 aa, Burkholderia sp.
MILVYRYRVKSLNGLLNKQSRAVNTVWNFCNDTQKHALKWSKKWPTGFDLNVLTTGSSKALGIHSGTINATCEQYAKSRSQRRRPYLRYRGRKSLGWVPLKGRDLKREGDAFEEVDESGSTQSCSACGSKDSTTRPKGIAGLRIREWACSDCGVEHDRDTNAALNILRCGRASPGVGILRL

SEQ ID NO: 21081 - protein, 336 aa, unknown
  TnpB Polypeptide
LRKLFNARKKIENPSNYDELTWEQQREYFHWVTNVSKCIPQQALINLGTAYQRFFKKTAKAPRFKLKGKDDSFYIDNEKAKIIKKEVNGTTCFYLSLPKIDHDFLLTEEPRFQGKLLSVTVSRHGESWYAALSYELEIPDPVVDKKRATTKIGIDLGIKHFAVMVDHGEVTFEEEGPKALKRLLGRLRLLNRRLSKKVKQSRNFEKAKLKISALHFRISNIRKDFQHKLSTDIVQHYHQVGMETLNVKGMLKNHKLSRHISDAGWYQFKMMMKYKLEARGGILVEADQFFASTKTMSCCDVKLEHVTLSDRTLTCPSCGIVHDRDINSARNLRDIG

SEQ ID NO: 21082 - protein, 203 aa, Frankia sp.
VPAEPLPATGAVVGVDMGVASLATTSEGRHIGNPRYLAASAGRLADAQRDLARKRRGSKRRRKAVARVAALHGKVRRQRLDLAHKTAFTLVRDHDLIAVEALQIANMTRRAKARPDPDQPGQFLPNGQAARSGLNKSILDAGWGVFLAILQTKAESAGRVVVEVNPANTSRTCAVCGHCHADNRRTQAEFGCVACGHTAHGAR

SEQ ID NO: 21083 - protein, 137 aa, Limnoraphis sp.
VAVEDLTGIRDRANTQPRNKTERRRSNSWAFYQLRQFLEYKGVKVGVEVVAVSPRYTSQTCHKCLHIHPKQGKSYRSGKTFKCGHCGWKGDADLNGAKMISIVGQSVSLPVTRNPLSCSVLEAYIGLVRMPRDFSRG

SEQ ID NO: 21084 - protein, 400 aa, unknown
  TnpB Polypeptide
LEVCRHLYNGALAGRKDAWENEKRSVNFAQQCASLPALKEKSEYLPNIHSQVLQDVMHRVNRSFENFFRRVKSGETPGYPRFKGEHWYDSFQYRQYGNGAKFDASGRLSLSKIGAVRVCKDRPLTGTPKTVSLTRRADGWYACIACDTEPEPLPKTGESVGADVGLEYFATLSNGETIANPRLLRRAERQLKTAQRRVSRRKRGSERRKKARVLLAKAHLKVRRARLDFCHKVAHNLVNRFDTITVEKLNIKGMVKAPKPKPDPNNPSQFLPNGASAKAGLNKSISEAGWGLFVSILTQKAESAARQVVAVNPAYTSQDCSNCGMRVPKKLSMRLHSCPYCGFKNVSQKADFGSFVGSQIAQIRCFEIHSKAHRDHNAALNILKSSGDTAFGETATLVAV

SEQ ID NO: 21085 - protein, 444 aa, unknown
  TnpB Polypeptide
MTVSLIGSPRKTSEEARLDKNRRIKESIKATKAKRKTQTCSTFDLKIVGNKLSSTQREALVRVFLEAKWLWNECIASGDPFSYKPRKNVLVKTKDGTMDEREYRVLGSQMKQSLVKTIRSNIKTLATLKEQGRKTGTVGFTSEVKSLGLPQPETTYRIRGQKARIQNIPGWVRVRGVRQLEGWEQAKAVLTSEADGWHLHVTCYMDKEEHRKRREAKRLAPVKNTIIGLDMGVKTAITCSDGTEYDVMVEETDRLKREQRKLNRKKKGSNNRQRNRMRIRRAYTKQQNRLNDAANKTAAELLRNETIFMQDEQVKAWHRRYGRKIQHSILGRVKNRLTRHAGQVVVLSKWEPTTQLCPVCGVKTRIPLERRIYKCADCGYTAPRDVKAAQTMVWLGQSKYSDKIPLERGEYKPVENTSESYVDNLRMFSMRSAKQETVTASASR

SEQ ID NO: 21086 - protein, 534 aa, unknown
  TnpB Polypeptide
MNTVLDYLAIDIVTMYENNIKQHFFEYVERYVNVAWKKKELCDWIKQHKPYITKEKMVSNLCGNLRKIKNDLLSKTRTSKWFYHKWIDQVSTQIFPQREYRENNIYYDIQCTPQDYLPYMFYMMRELEKDGVKLNNVCPLRTDMVPKHVRIDTTSLVHICLTEEQGTKEEFLTKGNLVRMEDKIWGFFFKTEKKCFRLSDEHGYTFHNMISTDGVSCSIVLIRKDLTGKSKFRIKPKKTPFNEKYIDELEEEEYIELQMKNIVGVDPGISDLLHCVNSDQKDNISKFRYSQDQRRQETKSKKYRDVVLSWKEEIVGHQDVVHWETELSHFNKKTLDFGRFQEYIEKKNVVNYNLQEFYQKYMFRKLKLGGYILRQRTESRMMNRFKKIFGSSDKTIIAIGDFEQKQHKRFKEATKGKGFRSLLRRHGYKVFIVDEHKTSCRCANCGHETKTFRWCQNPKYWKDNIIKRHGLLRCKNDCGLWNRDTNGAINIWKIAVSAIGRRERPEYLRRAISSISGVASTSTTPNLHEDPLTF

SEQ ID NO: 21087 - protein, 413 aa, unknown
  TnpB Polypeptide
MEILKAYRFRLEPDEVQERFCRQTAGSCRFLKNLCLEQRSMAWSFGRHSVGFAAQCSDTADLKEMLPWLSEAPSQVLQQAIKDLDWAFKRFFAGIADYPTFQKKGEHDSFRFPQGFEVDEANRRVKFPKMGWVRYRQGRGKSARKIQGEVRSITVSRDGDPWFASILCKQEAATPPAVHGFAVGADLGVAKAIALSTGEVLEVLGMTKAEQKKLAKLQQAMAKKMRFSKNWQKLKRRIARLHSTVARRRRDSINKATTYLAKNHRLIVIEDLRVKNMTRAPKPKADPDLEGAFLPNGAAAKAGLNRVVLDKGFGEIRRQLDYKHVWYGSQLLAENPAYTSQKCSECGHTEADNRQSQEGFCCLKCGHMENADLNAAKNILSAGIHTERTVGHTGVKRKANPLRQPAKRRKPAA

SEQ ID NO: 21088 - protein, 413 aa, unknown; identical to SEQ ID NO: 21087
  TnpB Polypeptide

SEQ ID NO: 21089 - protein, 397 aa, unknown
  TnpB Polypeptide
MIKSTKTSLQFSNIGKLDSLDSFILEYRRVVSLFVDLLWDIKDIHCFIEKEITDKIDTWLSARAVQCAGKQASGIVRGCKKKQSKRLFQINKFKKQGMLKKARKLQKIYNTSKISKPNIQEVQPELDTRFVEVDLDNNTSFDGWLNLTCLGNELKISLPFKKTKHFNKMLELGKMKSGVRISNEEVTFMFDINNLGAIENGKTIGIDIGQTTTLTCSDGQSVESDKHGHNYKSICEKLARKKKGSVNFRQAERHRSNYLHWAVNQLNLKGIKQVRMENIKHLRRGKRSSRLLSHWNYAELVDGLKSKLSDSGVQITEVSPTYTSQRCSKCGWTRKRNRQGKRFRCDKCSFECDADLNGSLNIALELPSIKMVERLQRKNLTGFFWNVVSGAPIVPHV

SEQ ID NO: 21090 - protein, 397 aa, unknown; identical to SEQ ID NO: 21089
  TnpB Polypeptide

SEQ ID NO: 21091 - protein, 430 aa, Anabaena sp.
MDNSFTTYWHGDELRSGWKTSYCQTTYPELDKVLKENPHYKALAAQAAQQTLKLVGESINSYNGLVKAFYNGDGSCHKLGNPPKALPQVDRPSLPKYRKKGGLAAVTFPRQALSFKDGYFKPSISKETKPELITDIKLPLPDFIDSEWVKEVTIRPYYGEFWINWVIDDGKQPIKSNPHLDYSQAWGFDHGGTNWLTGVSTHGKSLIIDGKKLKSMNQGYCRLVAKHKQGKPDFYWDANLDRIQRKRNNQMRDAINKAARFIINRCLNDRIGNIVIGWNEGHKVNANLGKANNQNFVPIPTGRLIQRLKELANEYGIIVTVTEEAYTSKASYLDGDSLYKHGEKPAGWKPSGQRVKRGLYKSAKGLLTSADATAAANILRKVATQLGLSLAEVGRGSLTLPQRYDLFNILNKSYRKRCVGVLLAPVATSA

SEQ ID NO: 21092 - protein, 395 aa, Frankia sp.
LGVCVSFRGLDEAGVRFVGGWLLGCGRVPVPVVSRCGGGRSSAGALRACPVCVEPCLRAGVVVESAPWARSRLCGAEPAAHRRAGRQSVAGGRQCDRAAAGTAGLYDGDGPLFRGSHRRPSFRRRGRAEGFRIVAVKPADVRRVNGRWSQVRVPKVGWVRFRRSRPVPAARSYRVTQDRVGRWHVAFAAVPDLIPVPDTGGVVGVDRGVAVSAALSTGELLCCPGLRPKETERLCRLQRRFARSRRGSNRRARLRARIARVRTREADRRKDWVEKTSTDLARRFALIRVEDLRIGAMTRSARGTPAAPGRNVARKAGLNRGILAQGWGLLVRRVEQKAPGRVERVPAAFTSRRCFACGYVVAGSRESQARFCCVACGYQSNADVNAARNIAEGRR

SEQ ID NO: 21093 - protein, 426 aa, unknown
  TnpB Polypeptide
MSLAKTMRVRATARVEAVAPERGEGLMEFLKAYRDAVQEVVNELWRLKKTPSRATLHRAYYDRLRSRGFRAHHVSEIYKRARELVEATKSNDGSKPLLKKLTARIHPLDYKIDLKARALWLAVLNGEWVELKLKWYDYLDKYLDGSWRLGEVLVSYRRNGIFAYLVFNKEVQLKEPKTVMGVDLNFDNATCTIVDLNGNLITIYPLPYRGLRRALHLKKLAERLQKEHPRSWKYQRWIRRARARWLRRAKSILMDSAHYLAKRLVRIAEEYDAYVAFEGLKRVRENGNRDELAWELQLWCYRRVQEFAKYKALAKGLKTVLVNPRNTSRQSPNGKQLNFLDYKAVELGGVTTSRDVIASWNIALRGLKKLKQGLREEKRRERLMRGFWVTWSPDGLAGERMRTRPDARNPEAIELSTIVQNCWKLI

SEQ ID NO: 21094 - protein, 425 aa, unknown
  TnpB Polypeptide
MKSFRVEMQPTPTQRARFLQHAGCARWAWNWGLRRKQEAWALRKGALAAGAAKAEAPKVPTAIDLHRELNLLKKVPTVQGGVPWMYESSKWAPQESLRNLDRAFQAFFRRLKAGEKPGHPRFKSRSRGVGGFRLSAPTHVGEKTVKLPKIGRVRLKPGCHSYIPTGTYTSVTVKEHGGRWYASVLIEEEAPSAPPSDRPPVGVDVGVARLATLSDGTVFENPSSFARYQKRLRRAQKTLCRRKKGSHRRRKVKARVARLHHTITHLRSNATHQATSRIAKNHGVIVIEDLKVSNMTRRARGRGRAAKAGLNRVVLDANFAEFRRQITYKAAWYGSTVVAVDPAYTSQRCSSCGHTDSGNRPSQAVFRCLACGHESNADLNAARNILVAGSCPETLNARGANVRPGRLRPTRQSAVKRESAGDADL

SEQ ID NO: 21095 - protein, 388 aa, unknown
  TnpB Polypeptide
MEKVKKMMFYIKLLICISVNVKRNYKFRLSPKGSNATRLQETLNTCRYVYNQILEKRNDYYKKTKKTLSCFDCNNLIKDIELKIPVHSQVLQNVSARVDLAYLGFFRRLKDKSGKAGFPRFKSYDRYDSFTFPQTGFKIEKKKLWLSKIGDVRINLHRKMEGKVKTLTIKREGTHWYAIFSCEVEVKIEKKKWKRAVGCDVGCIDFITLSDGTTIPNPHFLKQSQEILSKTQAKYSKLKTKPKDDPRKIKTKRKLVKLHCKVKNQRKDFLHKLSKKLVGEYSHICVEDIRPSLLLNDNWRALNRSILDSGWTTFRQMLHSKAVEAGCEVIDVNPAYTSQVCSGCGTIVKKELSERQHKCPICNLNIGRDLNSARNILRVGMDSFVGAT

SEQ ID NO: 21096 - protein, 366 aa, unknown
  TnpB Polypeptide
MQKGMKFRIYPNREQKNLINQTLGCCRLIYNKGLDMRKTAYANGEKIEYSQTSSMLTSLKKETDFSFLKDVDSIALQQSLRDLDRAYKNFFRDKSVGFPRFKSKHNNHQSYRTQNQGDNIRIVGKYIKLPKLGFVKVHQSMEVEKINNVTVEHTPSEKYFVVLNVEFESEPKLNMGGTIGIDVGIKEFYSDSNGNVVSNPKHLEKTMHKLIREQRKLSRKEKGSNNRNKQRVKVALVHEKITNQRNDFLQKQSTILICENQTICIEDLKVKNMMRNHKLAKHIGSASWSKFFDMLTYKATWYGNDIVRIPTMYPSSQTCSCCGYKNPLVKNLAVRKWKCPECHAIHDRDTNASMNILNKGLQMQSA

SEQ ID NO: 21097 - protein, 413 aa, unknown
  TnpB Polypeptide
VDTIKVNRTEQTIIKSSHKMYSVVNDFSVKSRIMYNHANWYARQCFIREGYWLRYQEMQKMFKTDEKYKSLMSQSSQCVLQVLDRNWVSYYNGIKQYKKDNSKFLNRPKIPKYIKSNNWTWFLKNNNTYIKEGRLYFRLRAMNNYSFKTSIPQNARLISVRFVPRNNNFILEIVYEIEIPEPKQLNDRIVSIDLGLDNFITMSNNIGQPPTIIKGGYIKSQNQWYNKYRAELQSKLDKEIYWSKRLDRITAKRYNQIKNYIHHTSKYIMDFCMVNDIDAVIVGLNETWKQEINLGSKTNQNFVFIPYDMLIRQLEHKCQDEGKRLITTEESYTSGTSALDDELPIKEFYNKSRRIKRGLFKTNNGILINADVNGSLQIGRKVNPNAFDSYGLEECLNPIIIKNVLDCYKLCTQ

SEQ ID NO: 21098 - protein, 425 aa, unknown
  TnpB Polypeptide
MPKKKEKHDYRSYIVATAEKSERLDSVNRLGGCIYSKTVSLSFKTHAQKGFWLSDSGLKKYLKFKDYPCHAHSIQAIIDDYCGARRSFFSNLKTHPKAKPPNKTRKFHTFTWRATGISYKRGKLRLSMGQGRDPLWIKIDKKFHKKVPAEVSLVYNRTTKQYEFHATYMTQPKKTKAKAGSAVAVDMGEIHPIVAFDGNLNADIYNGREHRSKVRYREKSKASINRKLSRCKRGSKRWKKLKRAKDKRLSALTAQLRDMRHKITSRFVSACHERRIETIVIGDIKHIRQSIHYGKKANEKLHQWAFSKIREMITYKAKAVGIKVDFQDEAYTSQTCPFCGHRKKPSRRTYHCKQCQWTGHRDVVGASNILTAYQGWLFNPVVGAVVSPAGIRYHPDLCRLEKDWSPFSGLKSSKPSKRRQRSTRL

SEQ ID NO: 21099 - protein, 165 aa, Aliidiomarina sp.
CSDNWIKIPKMDPIKARIHRKVEGKLKSITLSRQLIDENQAVIVETLKVKNMLKNRKLSKHIADASWSGLIQKLEYKAKEQGKHLVKIDQWFASSKTCSFCGHKLEALSLKVRDWQCPACLIRHNRDLNAALNIRAQGILTLKAAGLSVSANGGKRQSGHEPVAA

SEQ ID NO: 21100 - protein, 315 aa, unknown
  TnpB Polypeptide
MACSIYKSFRKLKKRGLAREERPYFKKHVIMLDDHLFSLDLERWEVSIATEHGRIRVKLLHGTYHEKFKDMKAGEAWIVRKKDEFYLNVCFSKNVELMEQNNKAIAVDINENNVAYGSTEGIENFKTKERAIRTAYFLKRRRIQLRLGSRGENLMKKYKERERKRIEDIYHKLADKIVEKARKEGATTIILERLTNIRKRIKYSKVMNGRLHRWSFRRLQRIIEYKAELMGLNVVYVNARGTSTLCPICGVKLSPNGHRVLRCPSCGLEEDRDVIAVRNLLLKLRDVGASSVHPEGPIREGMKFYVRPERIIGSN

SEQ ID NO: 21101 - protein, 187 aa, Clostridioides sp.
  misc_feature (171)..(171): Xaa can be any naturally occurring amino acid
VEKAYKFRIYPNKKQQELINKTFGCCRFVYNKYLAKRIDVYKSDKETFTYKQCSSDLTNLKKELKWLKEPDKFSLQNALKDLDNAYKKFFKEKAGFPKFKSKKINRFSYKTNFTNGNIMYCGQHIKLPKLGMVKIRDKQVPKGRILNATISKEPSGRYYVSLCCTDVDIEXMSNIDIQYYGETSLES

SEQ ID NO: 21102 - protein, 365 aa, Blastocatellia sp.
MKVIRSTKCSLKFATATKRAELARVLEEYGRVVNFFIDLFWEQPVDKSALLAAVVNQPETWLSSRLKKVAAREALDMIRAARERDGEEAIKPVHKGQRMCVSSTIATLEAPKNAGEFDAWLKIRCVGEGIGLDLPIRFHKHWHKLAEHPGSVRLNAYIITTRYAQFSFEIETGRKVTDGEPVAVDTGVNVLAALSTGLKLGLDIKEIIEAINRCEPGSNRQKKLRRALKQRMDEVVKEIMVLAPALIVVEKLSHVTRGTKQRRRLGRRTRRLLSAWAYRYWLDRLRMACEWNRVSYRTVPPAYTSQRCSRCGHTEQGNRLSSEMFRCRRCDYTDSADVNAARNILSRFLTGVYGPGSQANFMATG

SEQ ID NO: 21103 - protein, 413 aa, Pseudobacteriovorax sp.
MIPVAQIGYKYKLRLNWRTKDRLNQWIGANRLLWNLALSQREMIEHKEFKFRETIAGNFSSLNYNYQEKQLKALKNEYPFFKDLPSQSLQQCLMQLDRAFKSFFKKRADFPKPKKKGKREAGIRFPSLKEGAIEYDKHSRRKAWVTLPKIGRLRFVSSRPFSGKVKNVTLTKKGMDFFVSFGVDQDLKVVGNTSGSAVGIDRGVVHTLAISNGEFLDLPTERIKILEDKIAKLQARLAKKKEFSANWMKQNEKINRVHNRITNIRKDFLWKSAHNLTKNHGMIGIEDLGTQRMTQSAKGSIENPGRNVAQKSGLNRAILRQGWYDFSVKLKWQAEKHDARVIEVAPHNTSIICSACSHKSSANRISQELFRCVECRYEDNADTNAAKNILERAAGATVHNALMDLGLDKNPPL

SEQ ID NO: 21104 - protein, 465 aa, unknown
  TnpB Polypeptide
MTILSGVKLKLYPNKTQKQIIEQTFGNSRFVWNQFRSMQENRYNAMIDDYNLYKKHAKENGNKIINPIYIWDYDMQKLLTELKKEQPWLHHSDATVLQKTISNLDQAYKNFFTKPDQFEKPKFKSRKHRSQAFTGRVNKFRSGKTSVYVSGPRYVYVPKLGFIKISKTTRINGRIKEYTVIRKSSGDYYISFQIEEPDRELLVKTKQLMGGDLGLTHLLTLSNGLKFPKFSPGQTLTLSLKAQSKASKSINRNSKILNTNELIYLIEKGIFDEDKYNASDLFNFKNHEKRMQKSAKAQRKVANKRHDYLHKLTTTLVKTYDVIVLEDLKVKNMLKNHKLAKAISNASWATFVCFLRYKCNWYGKLFILIPPHYTSRICHQCGWDSGKKSLDIREWTCSHCHKTHDRDINAAINILYRGLETYLQSQLMLLNEQAKNNYFSTVFFQVASQWLKQTISYFNQALEIS

SEQ ID NO: 21105 - protein, 391 aa, unknown
  TnpB Polypeptide
MGWGTANVSGSKSEATPTGRSTRNRVGWSCSTTNKHRRSGPFSQSPSMILDWHNHWLRKKPSPEIFDFWLPIRRSLMTALDIGANNLVACTTTTGKQYLYEGRDLFERFRETTREIARLQSLLEEGRYSSHRIRRLYDRRTKRRDHAQDALARDLIERLYDEGVSTVYVGALTDVLETHWSVETNAKTHNFWAFRAFVNRLVCTAEEYGISVEVRSEAWTSQECPNCGSTENTTRHRDTLTCPCGFEGHADLTAFARRTASCVPTRTFGSRDVRDVPSASPELFEFWLANETLRVSSTADDGNTVDGTACMSQVGRPQLVRVTTLSSQRGAYEPASCLRGSVNDTPSARKPRRRRAKPDCLRDESLSVHGEEDVIARESKPHKRRRVRRQR

SEQ ID NO: 21106 - protein, 545 aa, unknown
  TnpB Polypeptide
MSDRPVFTYQTRPALADGQAAVLDAYAELYGRAERSLFAAMQAGRKLNDLKRDFLLRFGITARQFNAVRIGLDGKIDSIKQRRPDLIVEIETKIKKAVKVIARLTTKATRDDKLHQKKRRLGMLKARLSNMQADQASDQVRLCFGSKKLFHAQFELKANGYASHQEWRQDWLVERSSQFFVLGSKDESAGCQGCRAAVAEDGSMSLALRLPDALASQGKYLTITGIRFAYGHGQIAAALNTSQRITATTKAGVATLKRTGTALSYRFVRDTKGWRVFVSVQAQPVKIGTHSFMGAVGVDINADHLAVSETDRFGNLMAARRFDLRTYGKSSDQAKALIGNAAVSIVEQARQAGKPVVVEKLSFQKKKAELEAVEPRQARMLSSFACNKLVSVLKAASFRAGVKVIEVNPAYTSVIGAVNHAQQKGISIHQGAAYAIARRGLGLSEKPSVTKAFVPTRNGDHVTFELPARNRSKHVWSHWAVMRTRLKAAHVAHFRCGDHQKPPPPLLLSKPASCATWDSTARLRGANRPEHCSRVVVDELPDVLF

SEQ ID NO: 21107 - protein, 441 aa, unknown
  TnpB Polypeptide
MKQLITAKLKLHADAAQFQALRDTQLAYRDALNHVSQYSFAHGKMSNQIRLRDATYYELRARYGLPAQMATNVPRQVGATYKTLWTKVKQNAAQRKAGITKKRYKGLDKPPKYVSPTLTYNYQRDYSLKEDCQVSILTLSGRVVVPYAGYEKHIALMRKSARIGAAKLWYDKPRKQFYLLVSLEVEVEEPMPATHTNVVGIDVGIRYLAVTSTTSGEQSFHTGKQVVPKANHYARLRKRLQKKGTRSATRRLVVIAGRERRLKQDANHVVSKRIVTRYPHALIGLEDLKDIRERTKRKHGKKASKKQRKANATYSKWAFAELHSMIAYKALLHESMAIKVDANYTSQACPRCGHTCDANRPNKGLLFACQNCHYMLHADLVGARNITMRTLLVRQDWTRTGHLSIAPGSLDDPDVSRDEAKAARLRRYAELRWSVDTSPAL

SEQ ID NO: 21108 - protein, 385 aa, Iningainema sp.
MFAVKRKLKLNKQEESILAQHAGFSRFVYNYGLDLFWQSIDVKASDSKRIREIKKCFTNITKKRPEYEWTLNLSSTVYQSAFQHLQLAFSNWRKGISKAPVFKSKKDGQSFTVYNCNGVSIVPTGKKIKLPSLGTFRLQERLKESNCAQTFTISKEADGWYVSFSVEAEHIPPIMHEIVEPIGIDLGVKTFATISDRTTLEAPLPYKEAKAKLGRFQYHNRNKQFGNRKKGIQTSNNAKKYFQKLAKRHQRIANKRKDFLHKSTTRICKKYAHVRIEDLNVAGMIANSKLSKAVSDLGFYEFRRQLEYKAPVFGTKLDIVDRWYPSSKQCRMCKQKNDDLKLSDRIFVCLNPACGHTEDRDLHAALNLAQVPEEHISSRVGTIRT

SEQ ID NO: 21109 - protein, 402 aa, Escherichia sp.
VKRLQAFKFQLRPGGQQECEMRRFAGACRFVFNRALARQNENHEAGNKYIPYGKMASWLVEWKNATETQWLKDSPSQPLQQSLKDLERAYKNFFRKRAAFPRFKKRGQNDAFRYPQGVKLDQENSRIFLPKLGWMRYRNSRQVTGVVKNVTVSQSCGKWYISIQTESEVSTPVHPSASMVGLDAGVAKLATLSDGTVFGPVNSFQKNQKTLARLQRQLSRKVKFSNNWQKQKRKIQRLHSRIANIRRDYLHKVTTTVSKNHAMIVIEDLKVSNMSKSAAGTVSQPGRNVRAKSGLNRSILDQGWYEMRRQLEYKQLWSGGQVLAVPLAYTSQRCACCGHTAKENRLSQSQFRCQVCGYTANADVNGARNILAAGHAVLACGEMVQSGRSLKQEPTEMIQATA

SEQ ID NO: 21110 - protein, 442 aa, unknown
  TnpB Polypeptide
MRLARKVEVQPTPTQRQSLLQHAGNARWAYNWGLRRKQEAWAERKALIEAGVDPLNAPKVPTAIDLHRELNALKKLPAEAGGVPWMYEASKCAPQEALRALDIAFQHFFRRVKAGEKPGHPRFKKRSRGVGGFRLTGAITATAQRVDLPRIGRMRIKPGDHGYLPAGVYGQISVTERAGRWYVAVLGQDTVEATSNGGPEVGLDLGVVRLATLSDGTVFENPNALAAGQRKIKRIQKEVCRKQRGSSNRRKARTRLARAYARVANVRSNALHQATTAIAKRYSKVVIEDLRVRNMTRSARGTVDKPGKNVRAKAGLNRVVLDASFSEFSRMLKYKGALYGCKVVAVPPQYTSQRCSACGHTEAGNRRSQSEFVCASCGYEINADLNAAINILVAGSCPETINACGAGVRHSDPRIGTRPAMKQESAAEAVAGPFLTVSSNGE

SEQ ID NO: 21111 - protein, 363 aa, unknown
  TnpB Polypeptide
MAHKAHKIALCPTDAQVAWFQQQCGYARFAFNSALADFKAGLSEGVFHSFINLNNRWNQRKKALDWAGEQDQRAALHGVKNLSDAVTRWRKKQNRFPKFKKRGSRQSYTVEGYQCKVEGKHIKLPKIGTVKMFSELRFAGKIKQVTISRSAHRWFVSILVDTGTPNVPRDTRGLPVIGIDVGINTLATLDNGKQYENPRPLKRYERKLAREQRKLSRKVFLSQNWYKQKRKVERLHYRIACIRKDAHHKVTTDIVRKASAIGIETLSVTNLLKNRKLAKALSDSALGGFLEKLKTKAEGLGIPIVQAPQFFASSKMCSSCGHKKDDLTLSDRNYQCNHCGTSIDRDQNAAINLKQVAVGYTET

SEQ ID NO: 21112 - protein, 423 aa, Halorubrum sp.
MDDALRRTVRIKLDVPRECRGDLHQTKTQFLHCANRTSEWAWRYDDDCITSKSRAEEALYDELREETELTANLVQKGIRRAIAAVRAGVEKLTQGEKTSQPIFDSWSIVYDKRSATFNDDHATLSTPNGRVTAEYVLPPENERENTPFGRYYESDSWNASSATLQYDEDEDTFYLHVTLKRSDYRSDGTERQESQSGDDSPENGVVLGVDLNVTGAFAVTSTGEFIGSADLLTHKRNQYEQRRAKLQQTGTRSAHLTIQSIGSQFSEWTVDWLHNRANDLIEEARDAKVDGIIFEDLTHIRERIANGSKFQQWAYAKFVELVEYKVESTELFVDFVNPAYTSQRCSYCGCTHEDNRDDKQFECQSCGYEVNADYNAAKNIANRYCKYIHRGQKSRGGWATSQLALKSGTLNVNGEYTPSAVRR

SEQ ID NO: 21113 - protein, 387 aa, unknown
  TnpB Polypeptide
MDDSAPVSVLRTLRLKVRSEGYAWLNAAAVEANQVFNYCNETSLKAATRTDRKRKLLSGFDLCSLTAGASPYFEKIGADTIQSICNHYAQKRQAARRLKLRWRVSRGSRRSLGWVPFKAASLKRKGVCLRFAGKSFRVFERQRLEGIQWQGGCFAQDAVGDWWLCLPVKRQVELMIAPEEEVGIDLGLKAIAVTSDGERLAAGRWTQGFSEKLASAQRRGHKRQAKRIHRKAARCRADALHKFSRKIVQRYQKIVVGDLSSLKLVRTRMAKSVLDSGWGTLKTFLDYKSQQAARSFEVVSERYTSVTCFACGAVSGPRGVNGLIVRSWVCSECGALHDRDRNAARNILIGSRCRTSLSGNEHPYSLLPPSNAWRVREAGIEAARTAA

SEQ ID NO: 21114 - protein, 376 aa, unknown
  TnpB Polypeptide
MIKRQVIVVKTYCFKLYKAKRNRKLHKVINIAGIIYNHCIALHKRYYRLFKKSLNIYKLQKHLTKLKKIGKFSYFKEVGSQAIQDITQRIDRACKLFFRNLKHKIRTAPPSFKKIRKYKSFTLKQAGWKLLKDNAIEINKQKYKYFKSRDIEGIVKTITIKRDTLGDIYLYFVCETNENKVLARTGKSVGYDFGLKQFLTASDNEDIKAPLFFKQNANDIKKANRILSRKKKTSNHHRLAKIALARLHKKISNQRKDFHFKLANKICSEYALICIEDLNIKGMQKRWGRKISDYGFSEFIKILEYKAREIGSIVQKIDRYYPSSQICHVCGTKNPETKNLAVREWICAKCKTSHDRDRNAAINIWKVGASTFFGEI

SEQ ID NO: 21115 - protein, 403 aa, unknown
  TnpB Polypeptide
MIKAYEYRIYPTPQQEELFNKTLGLCRLYWNIVVFNKNQNHDMQIEGYKPTFEKYKPEALEWIKESACSIPLSQMWSDVRAAYSNFYKSLKGERKGKFSNPPRFKTKKNTKDSFRYSYSNCNPRIDENGLWITNKIGYLDIRASCRFCEGKWKNITFRRTATGKWFVKICVEKKDEPKIHNGKAIGIDWNCDYNDFISMSDGTKIKCPRFLRKKEKQLAHYQRELARKFVKGKEVQSNNYYKTKMKVAKLHEKVSWQRKDWLHKVSRDLADRFEYVIVENINLQNMAENLYHGKAVGDGGFGMFRDMLAYKTTLVKVSAKNTSKTCSACGYVNPKVVLGVKKWMCPVCGVNHDRDINAAKNILYKGVTSLGIVGRELSEITNASGEPRSSMKEESSESSECIA

SEQ ID NO: 21116 - protein, 355 aa, Okeania sp.
MQSIKTKLKVNNYQKTMLAKHAGVARHAYNWGLATCIAEYESTKKRPSAITLHKRLVPEVKSINPWYYEVSKCAPQQALRDLEKAFKNFLTIPKRGFPKFKKKGRKDSFYLEGSIKVLKGNYIKLPRIGIVKTYEILPSVPIKNVTISKRADNWYISFKYDYQPTPTAKKRDIIGVDVGVNTLATCSDGTKFANIKAYRQSKKRLARYQHRVSKKEPGSKNRLKAIKRLAKAHKKVADIRADTLHKLTTWLAKNHSTIVIEDLNVSGMLKNHKLASAIADCGFYEFKRQLIYKCEWYGSQLVIADRFYPSSQICSHCGHQQKMPLHERTYNCANCGFETDRDFNAAVNLENYVNK

SEQ ID NO: 21117 - protein, 517 aa, Thiotrichales sp.
MPKSDSSSFIHELRMELSPHEMSVLDTRLNIARQIYNACLGEGLKRLKLMRESKDWRCACKMPKKVKGKNGREVNNKSRHELFKGARETYKFSEYDLHRYTTYLRKSKYISDHIDSTSAQKIATRAFNALMQYAIGKRGRPRFKAYNRFSSIEGKSNGTGIRWIDGKIKWGKNFECGVHFDLKDKHGLEAYALSCKTKYVRLVRRTIKGQAVWYAQLIQEGFPYIKGKNTLGDSIVGLDIGPSTIAIVGRDTAKLQAFCPEVDDLSKKIKVLQRKMNRSLRLNNPDNFEADRIVVYSNGRPIKKLGKVKKGASKWIRSKQYTTIRNEASELQRRMASTRKTSHGELSNNILDIGTTIKTEKLSYKGFQKIFGRSVGKRAPGLLVEILRRKAANAGGKVIEFNTRTTALSQSCQCGNKRKKARNERWHNCQQCGIHAQRDLYSAFLARFVQENKLDRSQALCAWPGAGILLEQAVSSLKETTTSKTRLASFGLGQSQSCLSVKKESVSSEALDVVATA

SEQ ID NO: 21118 - protein, 450 aa, unknown
  TnpB Polypeptide
MELTSSYQVKILHYHHLFDETVTIYQKAVAFFLRVCEQNWSEISVLKNKERNSYLERLTIKTKLNPNPKYDFNKVAYKMPSYLRRAALAYAIGAYSSFASNYANWLETDQTDKPPKLVFDHNTMPTLYKGNMFLRVSDCTVRIKVYHKKDWHWVTVGLRKQDVNYINKHCLSDPEVKEQSPTLKRVGKRWKLVFPFVKTLTFPEVDIADRVVCAVDLGLNNNAVCSILTSNGTVVARTFINLAAEKDRLYTGLNRQKKAQQHYNKKTPILWKHVNDQNTDISRKTAKGIMEFAMKYQANVIVFEHLEFTGKKKGAKKQKLALWRKQEIQKLVAHQAHKQGIRISRICAWGTSRLAFDGSGRVTRGSYQQNGKTKYNYSICVFPNGKTYNCDLNASYNIGARYFVRELLKSEQVIARLPLDAKDHPYGTGTTRTLSTLIKLDADLCALRCA

SEQ ID NO: 21119 - protein, 359 aa, unknown
  TnpB Polypeptide
MYPTKTQTIILLHWLNVCRYLYNELLADRKNAYDRCGIGLNYYQQAGQLKYLNLDLHSQVVQDVIRRLDKAFRNFFRRVKNGEKPGYPRFQGKNRYDSFTYPQSGFKILDDGKLKLSKIGTIRMFVHREIVGKIKTCTILRDGDQWYACFSVELPVVEKVEPKTSIGIDLGINTLATLSDGTVIENPKTLDKYDSKLRKAQKDLSRKQKGSNNRNKQKTVLKGVYRKVRNARKDYMHKASRILVDTYDQIVFEDLQIKNMVKNHHLARSIHDASWNMLINFTTYKAEEAGGSVELVNPRNTSKQCSVCGSIQAMPLSQRTYRCPDCGSVINRDHNAAINILNRHVPTDCGELTPVEMVA

SEQ ID NO: 21120 - protein, 520 aa, unknown
  TnpB Polypeptide
MKKSTTPTFLLELPLAGTGGQTKNLRAHFEAARALYNTLLGEALARLHRMWADPAWQAARAIPRSLKQERAAAFSQLRQEYGFSEYALHDYAKHANCTWIADHIDAVTAQTLATRAYQAVNRVCLGKAKKVRFRSKGRGLDSIEGKRNNTGLRFVLQPPEEGNQGWLVWGKDRLPAIIDWEDPVVKYGLDHHIKYARLVRRKASSPRAQGADCQGYRYYVQLVLVGTPYQKPKKKPGQDVIGLDLGPSTLAIVPREGEARLAPLCEELKPDARKKRRLERRLDRQRRANNPQNYDEKGRIKKRGKQRLSWKTSHGYLVTRRRLAHQERKLAAHRKSLHGRLVNEIIHTGNDIRIEKISYKGWQKQFGKSVGMRAPGMLIEHLRRTVAKTGGILHEFPTRSTKLSQYCHGCRTHAKKPLSERWHQCACGVGPVQRDLYSAFLAAYLDPPDYLPSSAQYTMYWEGAELCLRAALEPLYQRAKEGQTVPRSVGITGARARLPESLVPNQQELLYRHGRLETLG

SEQ ID NO: 21121 - protein, 436 aa, Moorea sp.
MIILEFKAKGKKHQYSAIDEAIRTVQFIRNSCLRYWMDNKGISKYDLNKYSAVLAEKFPFANELNSTARQSSAERAWSSIARFFDNCKKKVPGKKGFPRFQKHCRSVEYKQSGWKLSPDKKSITFRDNKGIDLRSRFAIGKLKLKGKWDLWRFDKKQIKRVRIVRRADGYYVQFCVQIDVSEELEPTGNTIGLDVGLKDFYTDSDGYAEPNPRFYRTGEKRLKFYQRRVSRKKKGKAVGHATRTANRKKAINKLGRTHLNISRQREEHAKRLARCVIRSRSVGYAESNDLVAYVRAACRRQDLRVKNLVKNHCLAKSINDAGWYQFRKWLEHFGEKFGRVTVAVNPAYTSQNCSECGEVLKKSLSTRTHVCKCGCQLDRDHNAAINILKRALSTVGHTGTWIDRRSRYANVDPNAYGEDTSTLPGSGLDEQATSLK

SEQ ID NO: 21122 - protein, 468 aa, Moorea sp.
LLESVKTPNKIIRTDKWRLNPTPDQKLLFGETVKVYRRACRYLVGIIYTHWTELGCLTADRVAWPTANQLTPAVERLMHQTAKRPNIKYPQFNKAFYKFPSYYRRAAIAFAAGQVSSYVTRYREWQSGTRKRRNSKPPRLNAETGCYPALYKGQCYKLHGFNQVEIKVFDGSDWVWTSVQITGLRERHKVATNKLMSPSLVFNERCCHLSVPFACKPEKRKPEANVTAVDLGINTTATIAVVTHSGTVIHREFIHPGRDIDRRDKRLKSVSVRASKTMGKGGKLHKGFCSLTYQKCRRINNQIGHIVSKRIVEIAEKFNSEAIVFENLKGWKPKGGRKRSNLRQRFHGWLKSKIRDFTEMKWAELGGKVIEVVAAYTSKLAYDGSGTVKRNSKNYALATFSSGKRFNAVRVAWPTANLNGAYNIGARGVFKLVRRNGNGGRSSKRSRRPPRSWACLCDLWTSGSLRLA

SEQ ID NO: 21123 - protein, 507 aa, Nocardia sp.
MVCRSYRLPSLANADKLVQVAAMLPVWQAGLGRAQSAVRRQLFTTGVLPRWIDTKGWNDGLSQRQWDSISQQALAAHRSWLGNCERVFREFVTGSSLPEALKRDLLSVNKAHAWYLPGGSAGEPVQISRTRVVDSEVLVLARALMRRVRSRVGAPDLRRVRTMVMDGKIAVVETPKHAGTADYWVRISTLTKNKPVWIPLRTQAAFLTRLARPGAVVANHCQVVVTPRGEVEFRLVVKTARATPARERTRDLGLDWGMSNLFATSDGILHGRGFLDLLRAYDTRLQPLVAALNRQHIRLRASRRYRALVQDIRGFVTNEVNRCLNRILHPDKGAAADIARVIVERLDFRGLAQAGKLSKRLRRLLSVAGRAAVTAKLAALRDDFGIEVVDVPAAYSSQECGSCGYTARNNRRTQASFRCRFCGRTVHADIGGARTLLRRSHAADSIRYRNRGQILNALDERFRSRWGLSFAEVAQRQRHRAARVTPTADPPDTTGGRHKGNELPSVA

SEQ ID NO: 21124 - protein, 368 aa, unknown
  TnpB Polypeptide
VAFRRALGGLSDKDRLLHKSWRKNYVKGERKRRRPTARRLFVRAKQTLIKLEGEKLRVTVKPAEYVYFDLSARHFKLPSEVSSAGLGEPVITLEKVHLPVHYEDTQNSKLAVAWDFNLLSLDGYSPETGWVRIDTKKLASVHISSFEKRRSVQRKASKSKKAKKILAKYSNRERNRARKHQLEIARVIQSVAGVVGLEELKKQGMYTRSRLWNRMISRSDWRSISRILIGKMGEARVKELDPYGSSSYCSRCGWENKDLNGAVFECKECGLRINRQLNAAINLYMRMSFGYTTNWEDGRKRIQLRMEGASQREWWDTVVLPSLLGGCVLTGGKRSDPDELVRGLYDAVRPKLYYAYDRYADAYLRIPT

SEQ ID NO: 21125 - protein, 477 aa, Brasilonema sp.
LLTNYVYKLRPKTTQAIKMSNWVDMLRSHYNWCLNDRLTQYAQQFILGEYCDVRTKAEACPMTCFVSKNGATGEPWKDSEQKNPRRVAGDIQITSLPELKKARPWYAGIDSTVLQQNVKRLDIAYKNFFDSVACPKGMGRGFPKFKNRSNFTSFTYAMGVKVQGNKIYLPKLGWMRFHDSRLIPDGFKIKAATIRKRQDGWYVSIRIEDKAVPDYIARPLTDIKTIIGCDLGITKLVHLSDNHQIGNPKFLTNKKTKRVLKIRQRRVNQKVKGSNNRKKAAKKVGKLHKKIADKRQSYQWYVANKIVSIKVNAIAVEDLNISAMKRRCQPKVDEETGRFLKNGQSRKRGLNRSISDASWSDLILKIEYLAEKHGKVVIKINPKHTSLKCQNCGHVDASNRDGEKFICTHCGYMSHADINAAKNIRDRAFSIVLGDSKELESQGSKRPKYCKEISTRPRGKRVEPGNLCKQDIKAVMS

SEQ ID NO: 21126 - protein, 323 aa, unknown
  TnpB Polypeptide
MQKGQKIVSTYRPCYASIVCKVIRGKLRIYIHLTVEGRSLPKRTKDGCVKHPCSDGVVGCDIGTQTIAYTSGHDVGLENLAERGQSIRHTERQQRLILRAMDRSRRATNPGNYNPDGTIRKGKKIWIKSNRYRKLQKRHQELCRIAAENRKFAIHEQVHKMRSLGNVFVTEAKNAKKLQRRAKPEDPLDKNGKPKRKKRFGKSIQNRCPGYFQMKVKQMFESTGGIYIEVPTDYRASQYDHTTDDYIKKKLSQRMFCLQDGTKVQRDWYSSFLLYCIDLTTKTIDRKKCKMEFESLLRKEQVMIEEIIRSGRQVMNSGIRIAQ

SEQ ID NO: 21127 - protein, 403 aa, unknown
  TnpB Polypeptide
MQLVEQHVIKQSDPRFAAIDRATFASKNLYNAANYELRQSFIFQGVYLSYPEMHQRLKDHEAYKALPAKVAQQVLRTLDKNWQGFFAALAAWKEDPSKFLGRPRLPRYKDKQQGRNLLIYTIQALSIPALRDGRICPSMLGITVQTRQRNVQQMRLIPHSGCYVVEVVYEHEPVLVAVNPALYAGVDIGLTNLAVLTSTHAGFKPRLVNGRPGKSINQFSNKRRAELQRELGTLGTSRRLECLTTRRTRRIDHELHTASRRIIELLVAEGIGTLCIGKNPRWKQHAYLGRRGNQTFMSVPHARCIEMLTYKAELVGIQVKITEESSTSQASFLDADPLPIYGAVSEPPVFSGRRVKRGLYRAADGRHINADTNGSYTIIRKVAPDAFAQGSSGCVVHPIRLAV

SEQ ID NO: 21128 - protein, 424 aa, unknown
  TnpB Polypeptide
MANWATRTYVAPIRNHRQVCDDLDSLGFAASKLWNVARWTCDRIWSETGTVPDDSTLKAYLKSHERYADLNAQSSQAILEELAEAFESWYAHRENGNEDANPPGYRKYGDDHPRSTVTFKEDGFKHDPDHNRIRLSKGENIKDSWSDFKDSWSDFVLCEYAADPDVDVENVQQIRAVWTGDEWKLHIVCRVETGDPEPPGDRVAGIDLGICNFAAVAVGDEALLYPGGALKEDDYYFQKERAKCDDTDSHKVERLDHKRRGRREHFLHAVSADMVAECTARNVGTIAVGDLSGIREGTNWSDHGNLDLHGWAFDRFIEMLEYKAYERGISVERVDERDTSKSCASCGTTDDGQRVERGLYVCEACGLVANADVNGAENIRQKVLPNLACDGGDRDNGWMAQPAVRLFDKSTGRVAPQEQVSREP

SEQ ID NO: 21129 - protein, 409 aa, unknown
  TnpB Polypeptide
MDLTYKFYIPHTDVLDAMFRTSNNLYNQALYVFRQRLEADGTWLWYGDLDKIMKDIPNLEGQCNYRMLKAKCSQQILRVLDKNVKAYCKSIKGWKSHPEKYHGMPKLPNFRKRGGMFNLYYTNQSCSVKDGKLRLSKDLFLNIPQWEKYKDRISNLRQCRLIPEPDNVKVEIVYEMEAKPSNLDASRCASIDLGIDNLATMATPEGCEIFSGRFLKSYNVYFNKTLAHLQSIKDMQSIKRITKRIRRIYDKRDRYIDDAFHKISRRIVDTLVRQNVGMLAVGYNAGWKTNVCMGRKNNQKFVQIPFARLTSYLKYKCELSGITFVEHEESYTSKCDALALEPICKHEEYLGKRKKRGLFQSSVGKCVNADLNGAWNILRKVVGDSAFLRIAGSGRSLRPVRHRSPFKGL

SEQ ID NO: 21130 - protein, 387 aa, Clostridia sp.
MVKAIKVMLIPNNVQKTKMFQYAGASRFAYNWALAKEKENYEKGGRFLSNSELRKEFTKLRHSDEYAWLLNISNNVTKQAIKDACLAYKNFFKGLQRYPRFKSKKKSMPKFYQDNIKIQFSNTHVKFEGFSSSKKANKQKLNWVRLAEHGRIPTDAKYMNPRVSFDGLNWWISVCVEFPDCKDRLNHDGIGIDLGIKDLAVCSDAVKYKNINKSQKVKKLEKQKRRLQRSISRSYEKNKKGESYCKTNNVIKKEKLLLKRNHRLTNIRKNYLNQTTSEIVNRKPRFICIEDLNVSGMMKNRHLSKAVQNQGFFEFRKQLEYKCNDRGIQLIAADRFYPSSKLCSRCGNIKKDLKLSDRIYRCECGNVIDRDFQAAINLKAYGERFAS

SEQ ID NO: 21131 - protein, 403 aa, Streptomyces sp.
MTTPVKRAFKYRFHPTDAQAAELSRTFGCVRKVYNMALAARTEAWTLRQERVNYNATSAMLTAWKKTEELAYLSDVSSVPLQQALRHLQTAFTHFFAKRAKYPRFKSRKKSRKSAEYTTSAFRFSDGQLTLAKMTEPLDIVWSRPLTQGVQPSTVTVSQDSAGRWFVSLLCEDPTVKPLPANTNAVGIDAGLHHLLTLSTGEKIANPGHERRDRTRLAKAQRELSRKTKGSKNREKARRRVARVHTRISDRRRDHLHKLTTRLVRENQTLVIEDLTVRNLLKNGHLARAISDAAWSQFRSMLEYKAQWYGREVIAVDRWFPSSKLCSVCGALQDKMPLNVRTWTCACGATHDRDVNAAKNLQAAGLAVSACGAGVRPQRESSRTGQSAMKQETHGATRGIPLL

SEQ ID NO: 21132 - protein, 367 aa, unknown
  TnpB Polypeptide
LNIAYRFRIYPTEEQKILLGKTFGCCRFLYNQMLNDKIREYEKTKKMLKNTPAMYKKEYPFLKEVDSLALANVQLHLEKAYKNFFRDSKIGFPRFKSKHHSKNSYTTNVVNGNILVESKRIRLPKLKWIAMKKHREPAEGLRLKSVTVSMESSGKYFASLLYEGYSCENQAAEPDYSTAKILGIDYAMQGMAVFSEKVETEEAGFFRKNEKRLAREQRKLSRCVRGSHNYELQKKKVARCHEKIRNQRKDHLHKLSRKIADGYDAAAVEDIDMKAMGQCLHFGKSVQDNGYGMFREMLDYKLAWKGKKMVKVDRFFPSSKKCCKCGRIKKELKLSERVYRCACGNEMDRDRNAAINIREEARRMLTA

SEQ ID NO: 21133 - protein, 359 aa, unknown
  TnpB Polypeptide
MKQTMLLKLAPTPEQHQALLDTMHAFNAVANSVATVAFSEKTANKFALQKLVYGELRTTYKLAAQLAIRAISKASEAYKRDKSIPPHFRPEGAITYDERVMSFKGLTTVSLLTLAGRLLIPFRIGGYQQARLDALKGQADLIYRQGTWYLAVTLEVPTPSPDEPTETLGVDLGIVNLATSSDGETFSGEPVEKTRKRYHALRQRLQKRGTTSAKRHLKHVSGREARFRRDTNHRISKRIVHKAKQKNQAIALEDLRHIRHRTERTVKQSQRAKHSSWAFGQLRHFLSYKAALAGVPLYAVDPRNTSRTCSECGHCAKENRKSQASFVCQQCGYFDNADRNAAINISRASVMVPIVAGRA

SEQ ID NO: 21134 - protein, 167 aa, Paenibacillus sp.
MELLRKAKLGLMRIIEKSGKWYAQISIEVPTSVTNNENIMGIDLGLKVPAVSVTSTGKTRFFGNGRENKYIRRKYQQRRRKLGKLKKLSAIRKLGNKEQRWMKDQNHKISRQIVDTAIQEGVSIIKLERLENIRKTARTSRKNAKNLHSWTFYQLQQFISYKANLSA

SEQ ID NO: 21135 - protein, 361 aa, Deinococcus sp.
VEKARQNGEKVHITCNIRVARASYPQLEGALGTGLRQDYGRISGLPRGTVYIPAEPLLIDQQGLDDHTLQLGPLVVGAQLGHLPSVGQAAVVAASPAYRQFAVAPLLAPLRGALGPAAQRRWWGELEAIAARGAQPGLPLQTATPGTAPARWLRGETRLVQSGRHWFAALAFELPARIRPPGERPGAGIDIGLATLATAALGETAATASRAAAPAWTHGPVGLRSPAHRVLYDALQYAAARASLEQLGERLIADAGFVATEELDLSSFQSRFPQRARRLAVIDWCWSTLPQMLHAHTIPLVRVDPRGSSRECHACRSRAPGQRQRRRFACHNPACGVVMDADLNAARVIGQRGAAALHRGA

SEQ ID NO: 21136 - protein, 412 aa, unknown
  TnpB Polypeptide
MLSVLRTSTVLLKPTDTQLLGEYAEQSAILWNIANYERRKAFYTHKKMPSYAAQCRELKHTEPFKKLGTCKAQALLSKLNEAWQSFYTLLRLKKKGKLPPHIRKVNPPRYWKRNGKRVAKAFYVRNDGWSMNEKEISISKDVKIPYQCGELWVGKQGRLEVLYDELSGKWYAHIPVEVDWQPPSRTAEKKASLDLGICNLATLYIEGERPIIFSGRAVLSDWIYHTKKIADRQSKLPQGKHTSKRIRLQFRKRQRRLKHAINAMLRNVFLILEAKEVGELYIGDLNGIRAKANHGKNGKQKIHNFWAFNLIEKRIMELGEEYGVTVRKVSEAYTSETCCLCGKQHNGRVKRGLMVCHEKHQSINADVNGAVNILNVAVNRFPQVLSTDKKETSGSRLLAEPLLLRWNYHEWS

SEQ ID NO: 21137 - protein, 377 aa, unknown
  TnpB Polypeptide
MEKEIVKTFKVKLNISPEDREKLDKTLFEYNNLLNYLSSIAWDKKITNKVKLHHLTYYPAREKFNLPAQFVCSARDVVCDRMRAIIKRKRKSKPQFKKPFLRYDVRTITFKEGYCSLSTSFGRIKAKIIPYDYLNQHKDWTLTNTPTLIKRNKDFYLCLHFKKTVVLKEPSILIGVDLGIKNIAVTSNNKFFSGGYLTYKSNHFFRLRKALQAKGTPSAKRVLKRISGREKRFKLDYLHQKSKKLVQYVSELQNPCIVFEKLQGIREQESKGRKMNRKLSTWTFRKFQELVTYKANQIGVPVAFVDARYTSQKCSRCGNILKSQRTGNTFKCKACGFELNADLNGARNIRKNFTEGQAPQVGLSVNQPLSSAFVTTS

SEQ ID NO: 21138 - protein, 397 aa, unknown
  TnpB Polypeptide
MVLCEYSIVESTKTIQLKILSADFDLVETMQKYSKGMNYVSGVVFENGKVIPARKLQPMVYGYLREKIGLKSQVSCNIPRQVAGTYKTIVELAKIGMSFWQRVTYSSNSMTLSYKRDYDISENTVSITTFSNGRKTYKIQNYPYAMQFFRKPWKFGASKVVKHRNGEYYFHLTVSQEIPDKKIENASTFMGIDVGINYLAVASTTDKKCKFFAGGEIKNTRNIYKKMRARLQSKGTLSAKRLMKKLSGKEQRLMKDVNHCISKAIVKFAVENNVSVIGFEDLTGIRTRTQCKVKKKYHYTHSSWAFRQLQTFVEYKAKIAGIITEYVDPAYTSKTCFRCNHISNNNRRGLVFRCKACNYENNADLNAANNIEHRTRDFRYILESQGCKSITHTHEMI

SEQ ID NO: 21139 - protein, 372 aa, unknown
  TnpB Polypeptide
MEGFADACNQILEVAKRENCWNTTKLHHKVYKPVREATGLKANHVCQAIRRVIGNAKAVKQIHKFRPTSISLDVRTFVYKEESQSVGVTLMCGRVEFKLSIGGYQIALLRGQSPTSATLNRTKQGQYFINFVVDIPTQPTGKTPKVIGVDLGRRDIATTSTGKSWSGKQIQNTRDRYSQVRANVQSKRTRSSRRLLRRLSLRERKFQEWLNHNISKQLVQDAKQMNAALAFEDLTNIRQSLNQLPRGKTERRRTNNWAFYQLRLFVGYKANIAGVRVVLVPPAYTSQTCSRCHHVHPIKGKSYRNGKVFKCGHCGFEYDADINAANNIAALGVTFVSSPEIPGIACQLEGQLSLFPTGEIWDKAPATIVTPI

SEQ ID NO: 21140 - protein, 423 aa, Microcoleus sp.
MQLAERHIIKSTEHRFAQIDELAFKSKNLYNAANYVIRQGFTYGWGYINYNEMNRLMKSHQAYKAMPAKVSQQILMVLDKNWKSFFEAVKAYKIDSSKFTGRPKLPKYKDKAKGRNILIYTIQAISSKQLKKGIIKLSGTEILIKTKVNPDQICQVRRVPKCDSYVIEVIYNEPESTVSNDIWAASIDLGLNSLVALTSNQPGFIPLLINGRPLKSINQFYNKRSSHLQSQLKGSRKSSPRIQRLTRCRNQKVDNYLHHASRLIVDILVAKQIGTLVIGKNAQWKTEIDLGKQTNQNFVSIPHARLIEMLEYKARLVGIRVIVQEESYTSKSNFLNLDPIPVYGHTGADGVAFSGKRIKRGLYKTSVGQLINSDVNGSYNILRKAVPNAFSNGIESCVVQPRRVNPLKVKVKGEGLNASHVMS

SEQ ID NO: 21141 - protein, 402 aa, Escherichia sp.
VKRLQAFKFQLRPGGQQECEMRRFAGACRFVFNRALARQNENHEAGNKYIPYGKMASWLVEWKNATETQWLKDSPSQPLQQSLKDLERAYKNFFRKRAAFPRFKKRGQNDAFRYPQGVKLDQENSRIFLPKLGWMRYRNSRQVTGVVKNVTVSQSCGKWYISIQTESEVSTPVHPSASMVGLDAGVAKLATLSDGTVFEPVNSFQKNQKKLARLQRQLSRKVKFSNNWQKQKRKIQRLHSCIANIRRDYLHKVTTAVSKNHAMIVIEDLKVSNMSKSAAGTVSQPGRNVRAKSGLNRSILDQGWYEMRRQLAYKQLWRGGQVLAVPPAYTSQRCAYCGHTAKENRLSQSKFRCQVCGYTVNADVNGARNILAAGHAVLACGEMVQSGRPLKQEPTEMIQATA

SEQ ID NO: 21142 - protein, 209 aa, unknown
  TnpB Polypeptide
LQGEVMREADTPIDIFVRIGSSYNITLEEWNHDQDYVHIMFRAHPNTEMSKFINDTHFGKPHFKSKKTGHCSYSTNNQKGSVRLEGNKVKDDANYPNFLRKAEKRLAQAQRKLSKRQKGSHNREKQRLRVAVLHEKIANQRREFLHKKNRYLVDHYDAIGIEDISVKAMAKYKKGGKFSFGKSVTNNGWNMFTNMLEYKLAWQGKQLIS

SEQ ID NO: 21143 - protein, 438 aa, unknown
  TnpB Polypeptide
MSYLTYQFRLYPTPAQAAALDNQLETLRNVYNAALAWWRDAYTYEKAGRGQVIPRRKKKSGDGFRKLSLQETLYPVVSGIRNLHLQAQKNGDPGPHWLAHVSAVSVRDTIKRVQVAFDHFYRRCNRGVKKKGYPRFKSHERLRSIPFDNYGKVCRLYENRLHVFGVGKVVVVRHRDVVGNIKTASVKKDTDGKWYVFLRCQQEDRVTEKREGPSVGVDIGLENFLTTSDGEQEPNPKFLKVSLPQLRRLQRIASRRMLVAKKQKRKFRESKNLQKAFRDVGKLHVRIRQQRKEFHHRTAKSLVDRYATVCVESLNVQGMVRNDKLSRAIGDAGWSGFVTTLKQHAAKAGVSVVEVDPCGTSQTRPECGGEVRKELKVRVHDCPHCGYKTHRDHAAARVILARGTNGAGRSPVRQNVDPLPEAKADGKVKRAGRNLAIR

SEQ ID NO: 21144 - protein, 347 aa, unknown
  TnpB Polypeptide
MIQAQLKLRITKKQEKELDRWLISLTRVWNWAIRKIELDGKDHVHYSKIKFQNLLANHGNKIGIPSHTIQGMLCNAWESWKRCYKKIAKKPNLKGLRNKLNSIPLPDKIKNPVDGKVSIPGMGKMRFHKQDIPEGTIKCGRIVKRASGWYLCLFIDATPKAIEPTGSSVIGIDPGFKTNLTTSNGETFQKRKRLKESAKRLAQAQRGKDKKLTARIQERLRNQRKDDNHKLSRKLVAENKEIYFSKDNIKKIAKKFGRSVAEAGHYQLRQMLSYKSIASGRTYAEVDSKFSTMTCSNCFARSGPTGIAGLSVRRWECTECGFHHDRDVNAAVNTLLVGLGLSLERCA

SEQ ID NO: 21145 - protein, 897 aa, Lactobacillus sp.
MAIKRTHVYRLYPDATMAHVLDQWCDYRRYCYNKALELWNTTYSEYRMLVSLEILAEFKKPKEEQQFTEEQKLFISRYYPTAALIQKKLTASKQSWERQISSRILQQACADLGKSFKKFAKDKALKVKNGAGHPVFQSKKAKRQGFKLNQGVALAKEGNHGKLTLPVPAPYKGEWHSIRFSEIPKNAEFGTISFYREHGHYYMAVPYKYETPPYIHKHTGKKTGIDVNVSHFNNAEGEHYFLHKGNNGAANLGRVYENIKHQQRILARKLEENGQIAGKRSNSYQKARTKLQKLYERAHRMQDDAMHKYTTHLVREYDAICIEDLDVKGMLMSHVASKGVHRALFGRFRSYLEYKCKSAGVKLVIANRFYPSTQRCAVCGNIKKNDEKITPSGNKKHGTKHNEYVCYNKKCPNYNKVVDRDMNDMTPEIRTLISGVIFMTKYTKEIKLAIYHEWVDDHRRGTYLSQKYGMGRGGIHYLVDLIQKHGEDILDRPQQKYTANFKLAAIDRVLLGGEALSQVSLDLGLTNTGILANWLRSFKESGYTVITKKKGRPPKNAQKQGQTTDQRAGRAGKEAYSRACIHKKIGGLNSRTEEPRKEELARAITELRQELRLSVKYIIDVINANPGLPHISRSNYYYQTHKPDKDSGNQKLMDRIKEIFLEHSRRYGYRRIYGQLRREVYEINHKKVQRLMQKMGLFAISIRKKRKYSSYYGVQGKIKPDLIKRNFYAIIPNRHWFTDVTEFHLKDQKLYLSPIIDGCTQEIISYNISRHPDLKQVMTMLDDAFEKHPALNGLIFHSDRGWQYQHQAYQAALANRGIDQSMSRLGNSLDDGLMEGFFGILKREMFYGQEHKYKDLNELEQAIHKYIDYYNNVRIKTGRKNMTPIEYRNHVLTTLTA

SEQ ID NO: 21146 - protein, 332 aa, Halobacteriales sp.
LKKEEKTSQPAFDSWSVVYDKRSATFYVDHATLSTPNGRVTAEYVLPPKEEREDTPFDTYYESEDWDASSATLQHDEQEDTFYLHVTLKNPDYEVDGTERQECESRSEGTGNGVVLGVDLNVIGAFTVTSTGAFIGSAAYLTNKRNKYERRRGRLQQTGPRSAHLTIQSIGSSFSDWSLDWLHNRANDLTAEAHEAAVDGIIFENLDHIRETIANGSKFQQWAYAKFVELVEYNVESTELFVDTVNPAYTSQRCSHCGFTHEDNHDDKQFRCVDCGYAVNADYSAAKNIATRYCGYIHRGQKSCGGWATSQLALKSGTLNVNGDYTPAELLG

SEQ ID NO: 21147 - protein, 473 aa, unknown
  TnpB Polypeptide
MRPDGLGNLGAVNTARSHPSFCQGVPDNLGRGDRQGMQGTVFIFHEEGVPRASQASVHVDAILFCLHCRQCLCRNHPEICGGSVSVMSYSVRKFEVKKTEILEKLSLESGILYSSTVKFFWRTVRKKGIWLKPASLMRLYSSDRMHAHSADASVQAFFASLKSWRTLRKSRPEARPPVRLRKYFNVVWKNTAIRLRKGSLILSNGKGNDPVVFKEWKYEIPVQCTLCWHGTGYEIICLYNHEVLEPQVEQKVLAVDLGQIHVATTSDGTIYNGRLLRSIRQWRHKKVSDIQAKMDNKKKGSREWERLRDRKRKFLRKVENRTSDILHKYTTGLVSTCKNNGKDTLVVGDLNGYRQDNNKGKERNQENHSWLYSRTTWMLRYKAEKHGLNFRLQNEAYSSQTCPACGKKKHPKGREYRCKCGFHGHRDVVGAFNILKMYLSSSADMKRDESVVAAMRPASAIRDVKYQPYLRVA

SEQ ID NO: 21148 - protein, 254 aa, Microcoleus sp.
MLVFEYKAYGKQQQFNAVSEAIRTVQFIRNKALRFWIDNEKVTKFDLNKYSAVLAKEFPFCDELNSMARQSSAERAWSAIARFYDNCKKKVPGKKGFPQFQKDNRSVEYKTSGWKLAKDRKSITFTDKLLIGRLKLKGTRDLHFYQITQIKRVRLVKRADGYYVQFCIQVDRSENIEITGNSIGLDVGLKEFYTDSNGVAVENPRFLRKGECRLKKSQRCVSKRVKGSKNRGKARVILGKRHLKISRQRSAIRC

SEQ ID NO: 21149 - protein, 219 aa, unknown
  TnpB Polypeptide
VEYRRTAVIKLDTPDGANASLRETVEQFKHCANTASEWCWHGDDGYHVTFKAKAERAPYDRFRDKTDLTATLVQKGIRRAVEAVKSGVSRPERGENTSQPHFSADSAVYDKRSGPFHCDHISLSTVDGRVEYDYILPDDPETPPTKYVSDEDFEFRIAHLQYRDDNWYLHASMRKVEADDETSESESKHRTILGVDLGVNNLAIASTGDSGRQTSGSYR

SEQ ID NO: 21150 - protein, 378 aa, unknown
  TnpB Polypeptide
MLTSWNYRLYPNRTQQESLDSMLYAYRRLYNAALAERRDAYQERKESLSYNTQATGILKRLRAEDEGLATFNYSAAQHILRRLDKAFAAFFRRIKSGETPGYPRFKSRNRFNSADFTFGNGATLKNDRLRIQGVGEIKVVWHRTIPAEARIKRVMVKRRAGKWYACFVLEIPERTPPKHPGGTVGIDVGLKSLVTLSTGESVAPPQHYRNVEVKLRRANRKASRRKKGSRRQRKAYRELASVHAHVANQRADFLHKLSHDLTDRFSVIAVEDLNVKGLARTKLAKSVHDAGWGILLNMLDYKAASAGGLVVRVDPRYTSQDCSGCGARVKKPLSQRTHCCPECGLVLDRDHNAALNILARAGTPPSGANVVSQCSCVA

SEQ ID NO: 21151 - protein, 149 aa, unknown
  TnpB Polypeptide
VKDYLYKVTRWIAEYCRKEDIRCVVVGDIRNIRKENDMGHKTNQKLHELPYNKLYIMLEYKLKLYGIQLIKREENYTSQCSPLAPEVSKRYAEASNRKERGIYITNGVRYNADAVGAFNILRKYLSVSGKQKELSVTGLKNPEIIKVAV

SEQ ID NO: 21152 - protein, 413 aa, unknown
  TnpB Polypeptide
VSYPVRGGEPVVVEALKVRALPEGSCDRLLEFLRLYRDAVQMVVNRVWGIDEGLSKKKLHRLFYNDLVKLGFRAHHAKEVYLYARSLVESARGNGGRKPVLRRLSARVDRYDYRLDLDSMVLTLKLHNGYEVRLRLVTSRGRVERFRGWGNYELVVKYDDGELWVSIYFRRAVKPLKPRTVMAIDLNFDNVTLAIFALSGRLLKLKRFKTPHRRILTHRIWIERIQGRYPRSWRYIKGVRRAIERHGERVRSISWDYAHKLGELVAELALKHRSVVVLEDLEKLRENGRRDKKFNKRLGLWFYRRVQFCVEYEARERNLEVVKVNPRGTSSKCPRCGGGLLEDGYRVLRCGRCGFAGDRDVVATLNLYRRYMSKYPRCGGLGVPPNAPEPDEVPSGMRGNGDEAMTIKPYEPI

SEQ ID NO: 21153 - protein, 392 aa, Paenibacillus sp.
  misc_feature (146)..(146): Xaa can be any naturally occurring amino acid
  misc_feature (389)..(389): Xaa can be any naturally occurring amino acid
MESDRNECYIFDFHKANGRRGLMLITYKFRLYPTKEEQENIHFVLQRCRLLYNRLLAERIDAYKQTGLSLTYYEQKATLPVRKQYIPELKNVHSQVLQNVVERLDKAYQAFFRRVKNGEKAGFPRFKPESQYSSFTYPQSGFSIEXAYKQTGLSLTYYEQKATLPVRKQYIPELKNVHSQVLQNVVERLDKAYQAFFRRVKNGEKAGFPRFKPESQYSSFTYPQSGFSIGGKHLQLSKIGNVRIRLHRQPQGTIKTCTIMVKNGKYYACFSCEVESKYLSASEKQIGIDLGVSQLAVTSEGDRIRSPKFLRKSEEKLKRKQRAVSKKKRGSNRRRKAVGELARLHEKVANQRKDYAHKESRKLVNEYGLIAFEDLNILYFMEPSDTLEXMKR

SEQ ID NO: 21154 - protein, 430 aa, Proteobacteria sp.
MSRGRHVVIRTHVLPCKLRQATCDALNLYSGRISSGIVSRHWRVLRHNGVWLSEKSLTKLSDMRWASRDVPMHAHSIDVAQQGFFKACKTTRALRKAGGPEAHFPWRTKKLRTTIWKNTAITYKAGTLELSTGAGRRKIRIALPQTLPTALHCVEVRLVFERTSGRYPWHVVLENGTPPRIALGTKTVSVDPGAMHPAVIGDAHSATVLTCRERRALQRGHAKNLQAFSTTLARKTQGSRTYRKLVQAKARCKAKYAMVMRDIAHKISHAIVVEAIHRQAQTIVYGDIRTIADGINKGKAHNQRTSQWHHGTVRAFVQYKAQAEGIAVVLQDEHYTSQTCPHCGHRHKPRGRVYTCGQCGFSGHRDVVGQINILSAHTFGVPGKMPAPTTVKYRIPHNVRVLRKCQGTGQTTKTVCSLDHRTMPQEAAGL

SEQ ID NO: 21155 - protein, 242 aa, Okeania sp.
LTIPQRGFPDCFVPRNAPRFKKKGKKDSFYLEGSIKILKGNYIKLPRIGIVKTYEILPSVPVKNVRIASFRGASLTKRAGNWYISFKYDERPTPTAKEGDIIGVDVGINALATCSDGTTYTNVKAYKQAKKRLSRYQRRVNEKELGSKNRAKAIKKLARLHKKVADIRADALHKLTTWLAKNHSTIVIEDLKVSGMLKKRSFAEQSVRMGWRGLPKSAEPRFMSRLHNYSVGKRNAIQVAPR

SEQ ID NO: 21156 - protein, 418 aa, Blautia sp.
MLLSKKTSIKVSREYANLIGHMCYAASKLWNVCNYERQHYKEAGMGKYPDWYYQKKAHKEDLWYKQLPSQTAQEVCKLLDKAWKSFYALKRSGGIEAPRPPRFKQESIPITYMQMGIVHERDTGRVRLSLPKALKKYMKETYQIHENFLYLENKIFRGMDQIKQLRIYPPEKGNCKIIVVYEVPDEEELPQNGHELSIDLGLHNLMTCYDSGNGKTFILGRKYLALERYFHKEIARVQAQWYGQQSGKGVKYPVTSKHIRKLYKRKHDSVTDYLHKVTRYLAEYCREQGITCVVAGDIRNIRREKDLGHRTNQKFHSLPYNRSYIMLEYKLKRYGIRFIKQEESYTSQCSPLSPKVGKRYAEPSKRKERGLYRDGNRTYNADAVGAYNILRKYHSVSGVKRELSVTGLKTPEIIKVAV

SEQ ID NO: 21157 - protein, 403 aa, Streptosporangium sp.
MSGFGSQRGDIDHTILPVKIVVQVKLMPQADQATALSATLRAVNDAANRVSVVAFEHGVPREYELRKHTYAELKARGLGAQAAQHTIKKVRDAYTTLTANIGAGNLGKKGSRRRTRAESKPITFRPQAAHPFDDRCLSWQYDAQTVSIWTTAGRIKGVRFACSAGALKTLRQHRKGESDLIERDGAFYLIAVCEVPQAPVNEHPGGWLGVDLGIVNIATVDGMTPFNGRGLNRHRKRQLELRRKLQAKATESARRRLKCRRRKEQRHAADVNHIISKKIVTEAARTSSGIALEDLGGIRERVRLRKPQRVTLHSWAFSQLGTFLEYKARRAGVPLVYVDPAYTSQECADCHHIEKNNRVNQALFICRNCGVVAHADRNASRNIAARGEAAWIAGRESRVPATP

SEQ ID NO: 21158 - protein, 425 aa, Lachnospiraceae sp.
MEKGYGITTWWMTLRCGHPEWLVETEKLYRQVCLFYYNLILEEGIVDGKGGIQQMQREAERLTIRGRDKKEPVRPLPFEKVPSYFRRSAINKAIAAARSQKARQYAGRSEALEAPVTFFKGMYRELTGQSVELKVWDGEKWRWLHCRLKGKPFPEVCQLMSPSAVCEYGRWMLHVPVRQETEDARDARSRMAAGERICSLQFTNTDAFAVCCVLDGAGTLLKVKFIGGGKEYQHHCRRLEEKVKRSWGAMGYGEKGPAKGERPEGQPNKKYFLHLKHLGEYYGHKASKEIVEFCREQGVKVLVMPEYEEGYSRMVKVKAGNYSPLHLGNRIREYVEYKSWAAGMVVVKVSAAGTSGMCSECGAQVKREGEKTSGELVVCVKGHRKNRFVNTGVNLGRKCLRGFGEKKPGMKGKAAVDEAAGNEMG

SEQ ID NO: 21159 - protein, 451 aa, unknown
  TnpB Polypeptide
LAETGLFAAIGHRLASAVVEVLFGVVVLRLSTEVFGQRLADVLTLFIHLLPERLDLLFAYWFLISCHSSNLLVNRWAFPANTASEWCWHGDGGYHVTSKAKAEDALYDQLREDTKLTANLVQKGIRQAVESIKSGVERLKNNQDTSRPTFTADTAVYDKRSATFHRDHVSLSTPERRIECDYILPDDADIPPTKYITNEDYEFRRATLHRRDDDWYLHASMPKVEDNDTDTTTGHRTVLGVDLSVNQLAVASTGRFWSADEFNHWKREYEQRRGDLQQCGTRAAHDAIAGVERKEDGRFEIFLHRVANEIVAEAVEHDCSHIVFEDLTDIRENVPKASWHHLWAFRRLYEYVAYKAREQGIEAVQVDPRNTSKRCSTCGFTHDDNRHGEDFECLDCGYQNHADYNASKNIGLQYLRRRQNADDGGAPVDVRLNRGTLNVSGEYDLPASSEA

SEQ ID NO: 21160 - protein, 379 aa, unknown
  TnpB Polypeptide
MQFTVTAKIQVIVTSEQCKLLDETLETYRKACNFVANYIYQTHDLKQFSLNKALYYRLREEFGLKSQMSQSVFKTVIARFKTILENQHKWIQPNFSKPQYDLVWNRDYSLNGKVFSVNTLSGRVKLPYVIKGMEKYFDKSYSFGTAKLVKKHGKYFLHIPMTKDVPESMDSGIRNVVGVDRGINFIVATYNSKHKSGFVSGKIIKQKRAKYKQLRKELQQRQTSSARRRLKSIGQRENRWMQDVNHCVSKALVENNPKHTLFVLEDLSGIRSVTERVCRKNRYFAVSWSFYDLEQKLKYKAALNESSVINVNPRYTSQTCPICGHTEKSNRDKHLHIFKCKCCGYTSNDDRIGAMNLYRMGINYLVDNQVPDTVTSQYI

SEQ ID NO: 21161 - protein, 422 aa, unknown
  TnpB Polypeptide
MNNAVTFVTRTVVIKNNNKALYIYFDEFVRLYQFLYRKVYHNYRHNLNNQKESQYRSDLMKQFHITNRMAKAIMLDVKTSINSHKSLFDYQLNKSKITISKLFIKIIKLKERLQTKRYGRFKTKINLQRHLFKCQVKLNKLKQFVAYNKQSVTFGTKKLLKSNINKFLSKRDNQINYYGDKNEHKQNQQFQIAYNIRYNRFDYKIRLDNEFIKDNKYIYGSFYLKDKQAKNEICNILKFKDRPLSYKIIKCNDKLYLHIMFRYNTSVKVGDSNGVLGIDFNKGFITMSNINKTGKLLKLYKIPYIHKAKTGVCDNSLNQLVNDIINISLDTNKPIVIEDLKSLNNKKLVSDNKKYNSMINLLKFSKFKEKLINKSCKTGSDIKLINPAYTSQIAQSKYCYAMKLNVHSGASYVIARRYYNLD

SEQ ID NO: 21162 - protein, 368 aa, unknown
  TnpB Polypeptide
MILSKKIRCLPTAEQITLFKKSSGTARFVYNLMILENKKAYNNYLQSNRNDKLSFITGYAFGKYITELKKLPEYSWLSEVSSKVAKQACIDCDNAFKRFFKKLSGFPKFKKKGVKDSFYVRYDSIKVTKRGFKCEKLGEIKTSELLPKVNKYYNPHIVYDGKYWYITFGIDIHEKDNENNTGKTLGIDLGIKTFVTVSDGTVIPNINKSRKVKLIYRTIKYFQHKLVRCKKGSKNRIKVIKKLQLLHRKLRCIRNNHIHQATTMLVKTKPAKIVIECLNVLGMLKNRKLSRAISEAGFYEFARQLEYKCKLYGIDFVKANRFFPSSKLCSICGYKKNNLKLSDRIYHCEHCGNVIDRDLNASINLSYL

SEQ ID NO: 21163 - protein, 416 aa, unknown
  TnpB Polypeptide
MYLTIKQQVKHLSKEDYKSIKELCHIAKNLANQAIYNIRQYYFTEGEYLNYEKNYYLLKDSDNYKMLNSNMAQQILKEVDSSFKSFFGLLKLAKKGKYSFNACKLPNYLPKNGYATLVIGFIRLKGNKLILPFSNAYKKAHKPIEITIPPILLDKKVKEIRIIPKSNARFFEIQYIYEAEHIQRNLNQSNALAIDLGINNLVTAVSSKGKTFIIDGRKLKSINQWYNKENACLQRVKDKQHFGKKPTNRQNIITRNRNNKVNDYMNKVARKIINYCIFNDIGVLVVGYNETFQRNLNIGKANNQTFINIPYGKLREKLEYLCELNGISYVKQEESYTSKASFFDKDNIPVYNADNPQEYKFSGNRIHRGMYQCANGKLINADVNGALNILRKSSVVDMNILYSRGEVDTPERIRIA

SEQ ID NO: 21164 - protein, 408 aa, unknown
  TnpB Polypeptide
MILVERHIIKSKHKYYNELDNLCWLSKNLYNSTLYNVRKYYFENKKLLKYQVINKMYVDTNNEDYRALPAKVSKHIQMLVEHNFKSFFELLKLKAKGEYDKPVKIPKYLNKKIGRQVVHYEKGAISFKEQGYIRLSKTNIKIKTKLTKDRVQFVRLVPKNNYIVIEIGYNVQEQEQNLNNNVLAIDIGVNNIASCVTTNGDKFLINGKPLKYINHNYNKKIADIQSKLKLTHNKNKSRYKSNITNKRNNRINDYLHKITTYIVNQAVSNDITTIVVGYNKEWKQDTNMGKVNNQKFVNIPFYKFINMLNYKCKLKGIVFKTITEEYTSKCSFIDDEEIGKHTTYFGKRISRNFFRSQKGIIINADINGAYNILKKYMIKNATWNEKISQTLVKVCSIPSVQKMNVRLA

SEQ ID NO: 21165 - protein, 314 aa, unknown
  TnpB Polypeptide
MATYSLELKLNTKKASDCWYLENYFREVAKISNTVRRFAMRRIERLKRDKNYRDLLAQYIKLIKQDKEKEKETVGKELSVVVWSYGLTKFHLQKSALDLRKNLRYVHSTVYQKIYDQVWKGVEKVLYADGKRMHFKKWDDFLSFEGKSNTTGIIYQDGKVYINCTPKRSNGGIILSVKLPNNKNNDHWNYETRCLCDPTKYCRIVRKKFSSGWCYYVQLIQEGIPPQKHVRGTGRIGIDIGTSTVATVSETACHLDVLGDSMETKEKEIRRLQRKMDRSRRATNPQNYKEDGRVKKEKNRWAYSHHLSKKCGIS

SEQ ID NO: 21166 - protein, 228 aa, unknown
  TnpB Polypeptide
MREFEGRILNATVTKTASGKFYISLCVELQPVVLPNAGGKAGLDVGLKAYCTDSNGNTVDNPKNLRKSMRKIVRAHRKYARKQKGSKNSEKQRIQLARLYEKVDNQRSDFLHKLAHKYASENEVVCIEDLNVKGMLHNHHLAFSISDASWSKFDCLLEQKVAEYGGVVVKVPRFFPTSQICSKCGYKNTEVKNLSVRQWVCPKCGAHHDRDINAAINILKKGLEMLAS

SEQ ID NO: 21167 - protein, 411 aa, unknown
  TnpB Polypeptide
MKKTYSIRLFPTKKQIDELNELSSIRNDIWNKLLQIEENEYKINKKILNKFDLNNLLPKLKDKYPDWKKLNSKAIQTISTELFGSYRSFFNLIKKDKNARPPRKIENNEHFHTIVWNQSGWLFKENGEIIINKLPFAYKSKIDITELNIKEIKIKYVRNKWLCDMIIEEPIKYEDKLNIKTKVLAIDLGLSKLGTGVDNKGSVIVLKNKSKKINDYYQKQIAKIQNKRSKTIKGSNRNLQLKKSLNKCYHKKNEQIKQTLHIQSKKLVNMNYNTIVVGNLNVKKLMSSEGVNEKKKGIRKSFHQSNINMFLQFLKYKCQAKNINLTKIDEKWTTQLNCLTGKLFKEKIELKDRKVQLSDTIIIDRDLNSAINIMDRWFENHFASMNKPLDKSGVVKKYNLFNETTTSLVSW

SEQ ID NO: 21168 - protein, 373 aa, unknown
  TnpB Polypeptide
VIRTYQYRLYPTDEQQNILSDILELARWLYNHVLAYRRKRWGESRYRVTYHEQAALWRDWRNEQPDDNPLRLLNMSAGQQVLRRLDKAYREFLKGKRGKPRFKGRRFFNSLNYKPGDGAAIKDGRLYIQNVGLMAVKWHRGLPEGTLKNIIVTRKASGWYVAFQVEVAAIEPTVSPNPPVGIDVGLHHALALSDSTVIDSPQYLKHSLRRLRRLYRRVSRRKKGSAGRRQAVVQLAKELEHIANQRRDWWHKVTCWLVNTYGFIALEDLQLAFMLRNGNLARAAHDVALGLFHNLLDYKAFQAGVQIVTVDPRNTSQRCSRCREMVPKALHVRVHACPHCGFTVDRDVNAALNILGIGWDATVKRQRSPMGQA

SEQ ID NO: 21169 - protein, 514 aa, unknown
  TnpB Polypeptide
MTKAAYRLRRCHCGCRPAETAPPSEGDEQVQVVVIAVELGQLASYVVADHLHDQLLAGQLEGGEHRMRVLRREALVGVQRQDTVLTGAMSPVLSYGRWTLVAMHADTGRRYRAFPTPGQAGRLIGWGHSCRAVWNLALEQRRFAWRQRGHTIRSAEQCRHLTDARADLRWLADLPAQSAQQVLRQLDRAYDNWWNPEHPAQAPTFRKRSGGLSIPFPGQAVQVRKRSRRWAEVRLPKLGWVRFRLSRPLGGMVRNATIAKDALGWHVSFGVATTTKPAPRNRRPGCGVDFGVACSAFVSDEWEPRLMPSTLTAGQRRRLLGLERRKNRQVTWAKKHNGGRYSNRLRRTISQIAKLRAQQARRRHDFIHKLTTDLAKNHGWVAVEDLRVKGMTMSAKGTREEPGRNVKAKAGLNRAILDNAPYERQRQLAYKAPRFGSELRLVRPAFTSQTCSACGLRDPESRPGCGRLFVCTACGHVEHADLNAARNIHDLAAGQAGPQHAQSPSGGEAIEPDA

SEQ ID NO: 21170 - protein, 418 aa, Streptomyces sp.
MVTKIAASVRSMTTTQVKRAFKFRFYPTDAQAAELSRTFGCVRLVYNMALHARSEAWTMRQERVNYNATSAMLTAWKKTEELAFLNEVSSVPLQQTLRHLQGAFSNFWQKRARYPRFKSKKKSRDSAEYATSAFRYRDGQLTLAKMAEPLRIVWSRLLPEGQSPSTVTVSRDAAGRWFVSMLCEDPGVKPLPALGAAVGIDAGITSLVTLSTGEKITNPRSERKDRERLAKAQREFARKAKGSKNREKARAKVARVHARIADRRRDFLHKLTTRLVHENQLVVIEDLTVRNLLKNKKLARAISDASWTELRTMLEYKCAWYGRDLVTIDRWFPSSKLCSACGTIRDKMPLNVREWACDCGAVHDRDVNAARNILAAGLAVAACGDGVRPQRSTPGGQSSMKQEVIPPQRTRAAAQPRG

SEQ ID NO: 21171 - protein, 361 aa, Chlamydiae sp.
MNTRTICCKLITTPSAEDAFEETSQLFAEACNHVLKIAVAEKTHNAIKLHKLCYTDIRKLFGLSANLAVRSIRRVASCMTQLKGKRKHPKEFRPKSIDYDARIFSYREGSVSLTTTKGRLQTPMLLGEYQKKALAGQNPTSATVIKKHKAWYIHIVIEFEGQLKGGEGVLGIDLGLSNIATASTGLRIEGKARQDFKKRRAKIRASLQSKGKKSTKKVLKRLSGYENRKIRHENHVLSKQLVEEAKRHNCGVIRMERLKDIRSKTKTWNKHLNRMMAGWSFYQLQQFVTYKAAALGIGVELINPAYTSQTCHQCLKLGSRDRESFNCLTCGEEHADVNASRVIALGGAACKPARISTRKGS

SEQ ID NO: 21172 - protein, 383 aa, Kocuria sp.
VKTVVKLRLDPHEQARDALEATLTLCNTAATEVAATAQHQAVFRNWDLRRIAYTDLRKKGLSSQTAQHVVKKVADAYTTRTANARNGRYGPQDSARYRQIMGTPVTFRPHAAQPYDDRILSWNHVARTVSIWTVAGRVRIPFTGGPESLALVAAHRKGESDLLRDRAGRWFLIATIDTPTPVVHEPNGFLGVDLGIVNIATTSDGANWSGGAVTTLRKKNQRVRRSLQKRGTKSAKRRLKARSGREQRFVRDVNHRISKAIVETAERTGKGVAVENLTGIRARVRHRKPQRSTFHSWAFAQLGAFLAYKAARAGVAFAQVDPAYTSRQCSGCGHVERSNRVDQANFACHSCGVSLHADHNAAINIAARGHQVWGRSQPSHDAA

SEQ ID NO: 21173 - protein, 511 aa, unknown
  TnpB Polypeptide
MPKARTPSFILELPLAVAAGDERVLLGRFEAGRRLYNVLLQDAFKRLALMRQSKAWQTARTMERGAARTAAFRACASHHGFTEYALHAAARQHKDAAGFDGRMSANELQKLATRVWRAVSEYAYGTRGKPRFKSVRRPLHSLEGKSNKQGIRWQADVGCVVWNGVYLPARLPTAAQDPYAVAALQARTKYCRLVWRMVKGRRRWFVQLVQEGVPPQKYDFFAAGQIVGLDIGPSTIALVADEAVALERFAPGVVEPAAEKRRIQRALDRSRRACNPDNYAPDGTVKKDVKTWHRSKRYKKLAAQAAELERRLAATRKKEHGTLANKVLGLGTVIQTEKLSYKAFQRQFGRSVKNRAPGAFIELLSRKAASAGGKVVELNTWRLKMSQYDHVTGTYSKKPLSQRWHALGTGAQWVQRDCYSAFLAKCVVGESHSSCQLESSWPVTEALLARAGLCVNQPASGSAPAVPTVEIPSESVARKRRWASSLIQDDVGRKAESQDALRVDAFRTPRL

SEQ ID NO: 21174 - protein, 398 aa, unknown
  TnpB Polypeptide
MKLVEKHKIYKSHPAYSKLDEMSRKANNLYNQCVYLAKHSENLSEDLKDLDKVMKSFPDEHDNYRSFGHSACAQQILRLFHQNLRSYFASIKDYKKNPTKYTGRPRFPRFRKSGDRFQVIFTNQTAKLTGKVINIASKTFENKLYIRLRSDAVKKLCQVVFAPRNDYFLVYVIYEADDTVISQNSNKVAAIDIGLTNLATATFSEEDDPILYRSDLVKINKDFNRLNAKYVSILKKTQNKYTSKRRQSLSDKYSGLIEDRLHKISRAIVNDLSHRGVSTVIVGKNTGQKINNQLKNFVQVPLFRLIEMIKYKSELAGINFIQVEESYTSGTSFLDNELPTKTFYNKERRRFRGLFLSNNLKRINADVNASFQIMKKVYEKFTYDSSVKYANPIVKTIC

SEQ ID NO: 21175 - protein, 301 aa, unknown
  TnpB Polypeptide
MKAYKTEIKPNKHQVELIHQTFGNTRYVYNQFLQFNFERMKQGLNIISGYEYSKLLNNSSSRPDWLLKSSSKAIKQAILNAHTSLWNYFTGKTGKPKFKKKTIHNSFYLIGTIKVERHRIFLPILKWVRLKEFGYIPKNVKSVTVSMKNGRYYVSCLVHEHKDERIVTTNEGIGIDFGLKDQFITKHETIPSINKSDKIRKLEKKLRRLQRSLSRKYEQNMDKVYYKSGKKKGQLKSFKWKRPLSECKNIQKQRLIISKLQERITRIRTDYNHKALQSILKQKPRFIVIEDLNVKGLLHLI

SEQ ID NO: 21176 - protein, 404 aa, Microcoleus sp.
MIVFEFKVKAKPTQYAAIDEAIRTAQFVRNKCLRYWMDNQGIDKYDLSKYCRVLACMFSFADQLNSQARQASADRAWSAITRFYENCRKKVKGPKGFPKFKKNCRSVEYKTSGWKLSENRKAITFTDKKGIGRLKLKGTYDLNFYQLNQIKRVRLVRRADGYYVQFAVKADVRVKTKPTGRVVGLDLGIKYFLADSNGHTEESPKFYRKSERQLNRANRQKSKKYRKGAKPQSKNYHLARKRYARKHLRVSRQRKEYCKRVAYSVIQSNDLVAYEDLNVKGLVRNRHLSKSISDAGWSTFRQWLEYFGHKYGKVTVAVPPHYTSVDCPKCHHRVKKSLSQRTHVCENCGYVEDRDIAASLNILQKGLSTAGHAGNYAWGDLPSWAIGAILSSNGGSENQESPRL

SEQ ID NO: 21177 - protein, 205 aa, Trichodesmium sp.
VWSRELPAIPSSVTVIRDSANRYFLIFVVEVLPEVLSKTYNSVGIDLGIKTFATIGMFHTTSLHGKKIDTPKPLKKRVKKYRKLSKSLSKKTKGSKRYEKARLKIAKFHAKLKDTRIDFLHKLSTKIIRENQTIVLEDLNISGMVKNRKLSRAISDLGWRKFRTFLEGKAEKYGRVLRVINRRDPTSQTYYCCGFEGGKLDLSIS

SEQ ID NO: 21178 - protein, 362 aa, unknown
  TnpB Polypeptide
MQLTIVLELLQPTKRKEAVMLANTFEVAKNRRAIADELKNGNTKLSSAHFKQSRLPSAVKNQNIREVKALYRLFQQTESKKENLTFKDNQLVCFNNQNFTVDGHMISFPLYDDKVRRFAFPVKRTERLTLLNDYMKQGAKLGNASLFYRQGKWYFAVTIQTKVHQSTNQQVMGIDIGLRQLAVASVINEQNEETNRAFHNGKQAGFIRKKYRSLRRRLGKAKQPKLIKRLGDKEQRWMTDKNHQISRQLINLAVQEQVGVIVMEKLENIRQTARSLRRADRSLHNWAFYELQSFIEYKAKLAGIKMVYIDPKYTSQRCSSCGVIKKQQRKRNIYQCSCGNHVHADLNASRNIARLYNEQQSA

SEQ ID NO: 21179 - protein, 255 aa, unknown
  TnpB Polypeptide
MNSQVNQNAIRKAVAAWQGYFESLKAYKKNPAGFTGKPKIPGYKQDEEYIAWFSKQVAKLKEEDGRYYIQFVNNPDRFEIGKASLYGDLKYVKTEVKAMYGKYYILITFDDKIAEVKVPENPKRILGLDPGVNNFLGVANNFGGAPFVMNGRAVKSENQRFNKKRAKLISSVTKGSNSKTSVKYSKQLNILSQRRESFLRDYFYKCAWYICRYAKAADVDVIVMGHNDGQKQEIDLTDNVNQDLCLSHTQNLSRF

SEQ ID NO: 21180 - protein, 433 aa, unknown
  TnpB Polypeptide
MKLTYVYRIKPTTEQVAVMDLWLELLRRHWNYSLGQRLDWLRWTRCQIDRCSLISQPIGEIPGRRPNYNLQAGLLKQTKQLFPDYKNIYHDVQQQNLKRLEKAWERWMKPDKSGRRGGRPRFKKHGDMHSFPWPRVNSEKAGANIRDEALILSKIGTIPIILHRPLPTGFTPKTCTIVTRADGWYACISLEDETVPASIPLDKVKTAVGIDVGLKEFLTDSNGNTEPVQQNFRRTQKRLARYQRSATRKQKGSRNAYKQKNQIAKIHQRIKRQRQEFHYKVAHKLVKACDLIGVEDLNIKGLARTKLAKSILDAAWGEFITILEAVAVKRGVRVVKVKPHGTTIDCSTCGWEVPKTLEERNHDCPKCQTVLDRDLNAAINILKRALNDVGLTLSACGGYLSWVTRHIDHLVRADETGTSNCEIGRLRHTARLA

SEQ ID NO: 21181 - protein, 385 aa, unknown
  TnpB Polypeptide
MINKAYKYRIYPTEEQKVTLAKTFGCVRFVYNTALKAKTDAWSNEQRNMTYVQTSALLTEIKAKEEFIWLNEVSSVPLQQSLRNLQSAFKNFFDKCASYPKFKSKHDTYQSAKYVNTAYTFRDGVLKLAKDKEPLDVRWSRQLPKAAKLTSITISKDSSNRYFVSIQVEDEVAKKKPLTTAIGIDLGVESFLATSNGDKVKSINVFRKSQAKLAKEQRRLAKKVKGSGGYQRAKLKVAKVHTKIADVRKDFLHKLSTKLINENQVICLEDLRISNMVKNRRLSKVISDQGWFEFTRQLQYKADWYGRQVVFVDPFYPSSKRCFECGHVAQRLPLNIRKWTCSACNHEHDRDINASKNILAAGLAVLANGANVRRNPTNVELSNSQ

SEQ ID NO: 21182 - protein, 374 aa, Tolypothrix sp.
MLLSIKTKLKLTATQKEVMAKHAGISRFTYNWGLATWNELYKDGLKPNKYLLKKFFNNHVKTELPWIKQKGICQKITQYAFDHLGSAFENFFKNRSERPSFKKKGRHDSFTIDNGGKPIPIGGTSIKLPTIGWVKTYEGLPHTTTKSITISRTADDWFIAFAYEIPCEPSVKSVDVVGVDLGVKSLATLSTGKTFENPKTYKKQLRKLQRLSRFHSRKVNGSKNKHKSKIKLAKHHARVANIRKDTLHKITNYLCKNHAIIVVEDLNVSGMLKNDKLAQAIADCGFYEFRRQLEYKCKKFGSQLIVASQWYPSSKRCNCCGHKKDKLSLSERIFDCESCGSSIDRDLNAAINLSQCVARVPRVEAPGVSRRALA

SEQ ID NO: 21183 - protein, 570 aa, Tolypothrix sp.
VARVSTKTTPSFVCEVALVVNPASERVLLSRLEAARQMYNACLREAMKRVNLIRQSKDFNKARCFKSSNPERKVLFKRARERYDFSDYAIQSYGTGIRHSWIGNHIDAHTGQKIATRAFNAAQKVLFGEAKSVRFKGKNQFDSVEGKSNAAGIRWKGDRVEWSNLKLRALITSNDPVILHGLSSKVKYVRLVRRKINGRNRFYAQLVCQGKPFIKPKNYLGTGDVGIDLGPETIAVVSNTDAQLQQFASSLEFETARIRRLQRKMDRSRRATNPMNYNPNGTVKKGKKKKWNNSKTYLKTRNAKANLERKLAAHRSSLHGELVNTILRTGNTIKLEKLSYKAFQKLFGKSVGKRAPGMFVSHLINKAERAGGRVIEIPTYSTKLSQTCHCGRVKKKSLSERVHACECGVVAQRDLYSAFLAKYISPDTFVLQVSQLVKDWQSAELRLQAAWRTATDIQPATGRVFPSSFGRCPEAEWVAVQVFATTPKNQDAVAVMREPGRGYLDKEPPAFNEFNALDALNEWKHGESQKQKDDKIGRIEGQEKFYGTECRSGFTEASVWIAYAVDLRGW

SEQ ID NO: 21184 - protein, 439 aa, Tolypothrix sp.
MYRALKVRIYPTDEQESYLAQCFGNTRWLWNYMLNATTTAYKESGKGLSKAAMDKLLPGLKKEYEWLGLAYSQVLQRVTFNLSSAFVNFFEGRAKYPNFKSKHGKQSIQYPQNVKLLPIVSVIKFPGNLGMVKTVFHRDLPDAKVQTVTISRNADGRYYASILFNHASCSTWGDPKTALAQEDNPVVAINERHLLQAGKPVQRSGSAIGVDLGLKNFAITSVGSKYDLPKKQLALLEKNRRRKQRKLANKTDKTSNKRRKAKRIVAKVSSKIARVREDFLHKLSRKIAYENQVICVEDLAVKNMVKNPNLAKSISDQGWGMFQTMLKYKAEKFGHTYIEIGRFFPSSQLCSETLLPIPMLQHGYDSLGIRFIDCPHCQKQHDRDINAAINIKNEGLRLWALGTSASALGGDVRPKSSGRKKSTKVEAVPNELGSPHRTR

SEQ ID NO: 21185 - protein, 402 aa, Tolypothrix sp.
MLRAIKVRIYPNETQQLHLLQAFGCVRWVWNQSLVTMSTTYKETGKGLSAFDMKKQIPVWKQEHEWLKECYSQSLQQSVLNLSQAFIKFFDGRAKYPSLKKRHGRQSLQYPANVKILSDDEIKFPGKLGTVKAKIHRDYTGKLKTVTVSKMPDGRYYASLLIDNGVEVASASSDGKAIGIDLGLIDFAVTSDGSKYQNPKHLKKHERNLKRKQRKLTRKKYKTTSKRRKAKLALVKVHSKISRVREDFLHKLSRKIVNENQVIVVENLAVKNMVKNHNLAKSISDAGWGMFQTMLKYKAEQEGKIYLEIGRFFPSSHLCNTTLLPLAKMDLSVRSFLCPHCSAYHDRDINAAINIKNEGLRILALGTSATALGGGVRPKRFGRKSTTGAATPDELGSPHRTR

SEQ ID NO: 21186 - protein, 461 aa, Tolypothrix sp.
VLLNYQYRAYPNTNQKGQINSWLRISQYWYNKQLGDRFDWWQNNRCDLRTCPLTCSLPKLRENPDFYSQKKQLPALKEDLVTVQHSGELLDFTSVPSQTLQDVSKRVDLAFKRFLQGDFNGKRSGKPRYKNSARYRTLRIEGQAITVERTEKDWLFLSVSKLKGWLKVRLHRPLPDGFVLKNMLLTKKSDGWYATICLEDPTVPVFNPDEVAPTWENTLGMDAVLHEQDYLATSQGTKLPALKSFRKSEKRLAKVSRRKEKKHKGSKARRKLAKRQGREHQRIARARKDHAFKTAHALVRTGKKVFVHEDLNLKALSKRNKAKLDEDGKFLPNGQRAKSGLNKSWNDAAYGQFFTILEYIAGKAGARTIACSPQYTSQLLAYRDEIVFSDCDMRSYWDAEYSLNVDRDINAGINIKRVGLGLFPTLKRRKGKPVEIAKSTTNSTLKEVLETLRMCQKPTPN

SEQ ID NO: 21187 - protein, 489 aa, Tolypothrix sp.
LTLSIFVVKIDDNTKTYQGGEFQVLLNYQYRASPDTNQKKQLNIWLRTSQYWYNKQLGERFDWWEKNRCNIDSCPLICSLPELRNNPDFYSQKKQLPVLKEDLVLVQHSGELLDFTSVPSQTLQDVSKRADLAFKRFLAGDSNGKRSGRPRFKNSARYRTLKIEGQAITVQRTQKDWLFLSISKLKGWLKVRLHRRLPDGFVLKNILLTKKSDGWYATICLEDPTVPVFKPDEVIPTWDNTLGMDAVLHEQDYLATSQGTKLPALKSFRKSEKRLKKVSRRKENKRKGSKARRKLAKRQGREHQRIARARIDHAFKTAHALVRTLKKVFVHEDLNLKALSKRNKAKLDEDGKFLPNGQSAKSGLNKSWNDAAFGQFFTTLEYIAGKAGARVMAVNPAYTSQLLAYRDEIVFTDCNIRSYWDTELSLNVDRDINAAINIKRVGLGLFPTLKRRKGNLIVGDSTTNSTLKEVLAVLKNAPEAYTLSVLRQV

SEQ ID NO: 21188 - protein, 237 aa, Tolypothrix sp.
MFDKHQVTEEPDEVKVSRPVLETSGTGDSLAEFNATTSTLNSWSGEQIQATRDRYSKVRANVQSKRTRNSRRLLRRLSGREQRFQKWLNHNISKQLVQEAKQLNASLAFEDLTNIRESLNQKPRSKPERRRTNNWAFYQLRLFVGYKANIAGVPVVFVPPAYTSQTCSRCGHIHPVKGKSYRNGKLFKCGHCGFEHDADVNAANNIAILGVCVSNPESPGMSCQLEGQLFLFPISQI

SEQ ID NO: 21189 - protein, 716 aa, Escherichia sp.
  misc_feature (3)..(36): Xaa can be any naturally occurring amino acid
  misc_feature (217)..(250): Xaa can be any naturally occurring amino acid
  misc_feature (475)..(508): Xaa can be any naturally occurring amino acid
  misc_feature (560)..(593): Xaa can be any naturally occurring amino acid
  misc_feature (680)..(713): Xaa can be any naturally occurring amino acid
MSXXXXXXXXXXXXXXXXXXXXXXXXXXXXXXXXXXKRLQAFKFQLRPGGQQEREMRRFAGACRFVFNRALALQNENHEAGNKYIPYGKMASWLVEWKNATETQWLKDSPSQPLQQSLKGLERAYKNFFRKRAAFPRFKKRGQNDAFRYPQGVKLDQENSRIFLPKLGWMRYRNSRQVTGVVKNVTVSQSCGKWYISIQTESEVSTPVHPSASMVGXXXXXXXXXXXXXXXXXXXXXXXXXXXXXXXXXXQNENHEAGNKYIPYGKMASWLVEWKNATETQWLKDSPSQPLQQSLKDLERAYKNFFRKRAAFPRFKKRGQNDAFRYPQGVKLDQENSRIFLPKLGWMRYRNSRQVTGVVKNVTVSQSCGKWYISIQTESEVSTPVHPSASMIGLDAGVAKLATLSDGTVFGPVNSFQKNQKTLARLQRQLSRKVKFSNNWQKQKRKIQRLHSRIANIRRDYLHKVTTTVSKNHAXXXXXXXXXXXXXXXXXXXXXXXXXXXXXXXXXXVSKNHAMIVIEDLKVSNMSKSAAGTVSQPGRNVRAKSGLNRSILDQGWYEMXXXXXXXXXXXXXXXXXXXXXXXXXXXXXXXXXXGLNRSILDQGWYEMRRQLEYKQLWRGGQVLAVPPAYTSQRCAYCGHTAKENRLSQSKFRCQVCGYTANADVNGARNILAAGHAVLAXXXXXXXXXXXXXXXXXXXXXXXXXXXXXXXXXXVTK

SEQ ID NO: 21190 - protein, 409 aa, Escherichia sp.
MRYRNSRQVTGVVKNVTVSQSCGKWYISIQTESEVSTPAHPSASMVGLDAGVAKLATLSDGTVFEPVNSFQKNQKGVAKLATLSDGTVFEPVNSFQKNQKTLARLQRQLSRRVKFSNNWQKQKRKIQRLHSRIANIRRDYLHKVTTTVSKNHASPGRRRSARAVSRCLCRLAIARSWPLMVSPSHFGRSVMTDISFCDRRLSGTPVHSAITAAICFLSTCGETSNRSLCRASSSAVRCARRCTGETVSAVSSGCSLPASSAGSAPVLSCSDSDSDSDSDSDSDSDSDSDSGCVSSTVSASGNGAASSSATPSNCWRSAIISRTSVCCWCQAASSSSSAVSVSSYCTSTSVIRDVSVRSPMRSSRSSWRISASCWWLRVVSAEICFGGDDRLMATRAQAVSSTSIALSGN

SEQ ID NO: 21191 - protein, 192 aa, unknown
  TnpB Polypeptide
MLRKQCRFSSMKAGRFYVSVLAEIPDSKITTNDYSEGIGIDLGLKDFAIISNGKTYKNINKSARLKKLEKRLIREQRCLSRKYENLKKGESTQKANIQKQKLKVQKLHHRIDNIRTDHINKAIAEIVKTKPSYITIEDLNVSGMMKNRHLSKAVASQKFYEFRTKLKVKCDDNGIELRIADRFYPSSKICHC

SEQ ID NO: 21192 - protein, 386 aa, unknown
  TnpB Polypeptide
MKNKGIKYRMHPTEEQEKFLLQEVGNQRFIWNYFLNLSNIKYESIKENMFYSEMAMMLPYLRSELEFLKIGINSSMQQTLRDLEKAFKNFYRRLKSTKPEKAGHPVFKKKGQDDSFRIPDPINFTVKRNSITIPKIGNIKINKHQSLNGKPKNLTIKREGNKWYVSVCLEFNPQFIDKTGKQVGIDLGTVRFATGNQGQIKKSLLKIKMVDILLRKIKTTQRELAKKQKFSNNWIKAKSKLGKLHRQLANKRKDFHHKFSTMLVKRHDLIMVEDLKTSNMTRSAKGTWKKPGKNVKQKSGLNRSILTQGWYSFIQMLDYKCDWYGKTLIKVDSKFTSQICSCCGYKRKTNRKTQSSFVCGKCGREMNADVNAARNILKRGLKLCLT

SEQ ID NO: 21193 - protein, 231 aa, unknown
  TnpB Polypeptide
VNKEREETSEEAEKQTVLDVDRNVEGYLAVTSTGAFIGNADLLNHKRREYERRRAQLQQTGTRSAHLTIQSIGDTFANWSEDFLHQASKELVKETVFQGCTTIVFEHLENIREGISNVSKFQQWAFNELKRQVTYKAKQHGITVETVHPAYTSQRCAETGCGFTHDDNRDGDVFVCQKCGKELHSDYNAARNIAHKFIQNRRKSGSGGATYHLALKSGTVNGNGDYSPSTV

SEQ ID NO: 21194 - protein, 364 aa, Halorussus sp.
LTANLVQKGVRRAIEATKSGVARLKKGGKTSQPHFDAWSVVYDKRSATFHRDHVSLSTVNGRVECDYVIPDDSEGTPIGEYLLNEDYEFRMSTLQYDRASESFYLHARMRRTTDEQGQSTTPSAAKHRTVLGVDLNVDGSLAVTSTGAFIGNADEVNHRRREFEKTRGSMQQTGTRSAHLSIQSMKDREHRWMQDELHRASNRILEEALDHGCTHIAFENLTDIRNRMAGAKRFHAWAFRRLYQYVEYKAEIYDISIEQVSPAYTSQRCSSCGFTHETNRRSKHQFVCQKCEYELNADYHASKNIARKLLKTLHSGQTSSGGGAPCQCALPSGTLNLNGDYNASVHATVEGESTDKPTTSVVGN

SEQ ID NO: 21195 - protein, 408 aa, Halorussus sp.
MEVRRTVPVKLDVTESDANLLRETIQQFLDSANYVVDVASKGEWVETRKSVLHDKTYSHVRDRTDLHSNHVQSARDRAVDALKATIAKWKQGRYASLPTFTTPSCEYNPRNATFNDDHATLATVDGRITAEYVLPDEHRDTPQSRYLLNDNYETTGATLHYRNGSFYLHIRTKADVDAPDRPENGTVLGVDLGVENIAVTSTGTFWTTDELTHWRTEYVERRKSLQECGTRWAHENVQSVGRTETGRFEQYLHRVANELVAEAVENGCSYIAFENLTDIRDRMPRTRKFHEWAFRRLYGYVEYKAQARGILVEQITPQYTSQRCSECGFTHEDNRHRETFSCHSCGYENHADYNAAKNIGLKLLRNQTGGEGGAPVGVRLNSGMLTTNGVVPVPTSVRVGVHAECHGL

SEQ ID NO: 21196 - protein, 445 aa, Halorussus sp.
MKRTNQFNVRPRSEKEREVFVRWLDASASLWNEANYARRQAFLEDDESVWDADTGSLEGKYKGILSSSVAQQIIRKNSEAWRSFLSLNEKYHAGTLDDRPSPPGYWGNEDDGRVLRTYVRNDQYTLEYGERSRLEVPIGSDLKDEYGFGYRERLRLEVAGDPKWSGEQGRLELVYDETADAFRAFQPVTVPDSRLDSPLASHKAALDVGANNLVACTTTTGQQLLYDGRDLFDEFRETTERIAHYQSLLDDQRKSSKRIERLYRKRTNRRDHAQDGLVRDLVERLYEEGVLTLYVGDIKDVLSTHWKARVNEKTHNFWAYRRFIDRLESVCEEYGIEVEQESEAWTSRTCPKCGEREETVRHEESLTCPCGFEGHADLVASESFLRQQNNAVGSMARPVYLKWNNHRWREDHSPPSIAVETTANEAYTDQSTASSGNIAHGDSDD

SEQ ID NO: 21197 - protein, 409 aa, Halorussus sp.
MQYNYKYRLDPPEALKEELLHHVDTCRQLYNHVLCLLNDADEIPARYEVQGRLPDLKTWWDDLGDVHSKVLQMVVKRVYENLSTLKAQKENGRAVGMLKWKSPREYRSLTYNQSGFKLKNTSGRPVLWLSKIGEIPIHLHRDIPKNATIKQVTVKQEPTGEWYATFGIDVDKETPEKPETPEKVVGIDVGILKYAHGTDGYAIESPDFSDERERLERAQRELSRKEHGSNNWEKQRKTVAQRHADLKRKRRDFLHKLSNYYAREYDLVAVEDLDAAGLVELPGNSRNRAGASWGTFLRMLEYKCEREGTHFVAVDPKDTTKECASCGVKTDKPLWVREHSCPACGFEADRDANAAWNIRSRGLKEVGVVHSDSTPVETALPVDTFVSAKRVVETGSPTLTERTAQAVSD

SEQ ID NO: 21198 - protein, 177 aa, unknown
  TnpB Polypeptide
MLKAYKYRVYPNKEQKVLISKHFGCARFIYNQGLATKIKSYEETGKSPSCIQLTNSMLMDLKDDKSHLWLKEVSAQSLQMSLRNLDNAFTKFFREKKGFPKFKSKHKSIQSCQFPQSVRCEFKKKIIVLPKIGGLKTVFSREFEGKIKTTTLSKTSTIELPHPQGVGIPIVSQNTAF

SEQ ID NO: 21199 - protein, 223 aa, unknown
  TnpB Polypeptide
VDNLIELPKKANVEEQTTIGIDLGIKDFCIISNGEKISNPKYLRNNIERIKVLQKRKDIKKKGSTRRFRQNKKVVKKYEYVKNIRQDFLHKLSSKIISENQTIYLEDLNVSGMIKNHCLAQSISDVGWSKFVEFLTYKADWYGKNVLQIGRFETSSKTCSICGEVNKLLTLKDREWICKCGVKHDRDINAATNIKKFGLIRYEKYKNYSGAERPSVPVEMSGS

SEQ ID NO: 21200 - protein, 275 aa, unknown
  TnpB Polypeptide
VRSLGSKAKRGLTGRVTPPQMELRSMCWTMRSNCLSWVLFDARGCANWMEKSPKATIRRTPSGKYFVSILYVVEADDPAPINGMIGLDVGIKEFAVDSNGVHYENPKYLAKSLKKLRREQRRLSRKTPGSKNREKQRSKVARVHERISNQRSDHHHKLSRKLVDENQVIGVEDLNIKGMARNQKLARCILDAAWGDFLRMLEYKAGWSGRTLVKVSTFFPSSQTCSCCGYKNAEVKDLSVRKWVCPACGVTHDRDENASKTILAETLRILAEQAA

SEQ ID NO: 21201 - protein, 686 aa, unknown
  TnpB Polypeptide
MEEDVATTNKRKCNRVSKSELDKRLKGVNGDAVGTWWNHRLLFAAENGLVSEAELQASMSYRINCVKTSLRSIGCSSSIQSRLRLYSIVASKIQHRLGVLMNMCAVYNKGNEAALREVASASQEVQKLRDIMLTSKNTPEVVKNTLSRLPSIWDIGPSDNELKLMSSWDQAKTYMANRFVANVQVHVKTHLEQRIKRKLRASLVSTSFDVAYKYIFASGEPPVHQEDKSVCDVLAARLRKMKLVNADGFTLPKQEKVPVDIMLFHFELAFDTGATFQPFPLANTVSRVHARVDERIYDKLTTGIPDAPSFQEFVRKRIRGPAQTTRKWTKHSFRWARRSRSAKKSGFRKVRRKKRAKIQCVKKGQKVVSFETDGYSVSLTLQTPHSCPAEKLTPKEFHKQHVAQLRDVFNSESGCWVAGNDPGRRNIATQAVLLSRDDPLVVPSTRVQFTRAQWNRVIRSKQQRAWEAKRRVGAVQVALEALSNSGGKKGCDEERWTNYIAKSLEHQETLHREFLHNDERPKRRLDGYGRRRKAVDATASRLVTSPDEKPLIIGYGDGDFCSHGRGGVDTSVPTKALFKAVQLAFKKKGVKGGVLKVWEHATTAKCHRCHNTLEKVYKTVNDNMVEDFDFRRCTHCVHEQRPKLRNRDWNAALNIRVVVMSILRGEDRPEYLTPDRTGRRRARVVR

SEQ ID NO: 21202 - protein, 248 aa, unknown
  TnpB Polypeptide
LSIVLAVKSVCASTVGVDRNLRNLTVGNDQETSHYNLSKCVRISNTTVRVVASFTRDDARIRTGLASRYGQRRTARTGHLLHNATKAIVAVALQRRTAIVLENIEGIRSVYRKGNGQGRKYRGRMNSWSFGEAQRQIEYKARWVGLPIIRLSRRETRGSSVTCPRCGERLQSDKQLERKLWCGKCRVVMDRDMVAAINLARRGRVRFARSRPLIIEAQGGAVEAVKGNPTPTVIPGVDAPKLTQPTKS

SEQ ID NO: 21203 - protein, 315 aa, Moorea sp.
MHKAIKTKLKLNNHQKTLMAKHAGYYRWVYNWGLALWQQAYSEGLKPSASKLRKLFTNHVKPQYPWMNQLSSKVYQYAFIALGVAYKRFFKGLGGYPKFKKKGRNDSFTIDNSGKSIKLSGIRHKLPKLGWVKTYEPLPQITTKKITISRQADGWYVSCHYEHEPLPTPKLKDVVGVDLGIKELAVLSTGIVFPGSLPYGQALKQLVRCQRDLSRKIKGSNNWYLAVNRLAKKHQKVANIRKNTLNKLTTYLAKNHGTVVIEDLNVSGMMANHRLAASIADQGFYEFKRQLEYKCEWYGSQLVMVDRFYPSSQLC

SEQ ID NO: 21204 - protein, 153 aa, unknown
  TnpB Polypeptide
MKPDTGYMKEALASDLHVKYCRIVRRTLKGVRRWFVQLVVEGLPPVRKVYASKCEVVGIDPGSSRIAYFHERHAAIVEVAPHVDLKEPKIRLLQRRIDRSRRANKPDNYNPDGTVKKGASTWNTSNRGRRMAVILAEHHRRLAATRKRATVSL

SEQ ID NO: 21205 - protein, 435 aa, unknown
  TnpB Polypeptide
MLINKAIKVRIYPNKKQEEFFECNFNCTRFIYNKLLDLRTQYYLENKNNKEKLKQYKALTEKELKKEFEFLCEADAVALQQANRDLFSAFQNYFRKVKENKLTKLSSEKLARLNNKQFKTEVSRFISYHPDYPQFKSKKDNHNSYRTFDSNREYLSVDNNLNKIRLTKIGWVKFKHSHPIPENIKSVTISRNPSNEYYASLLYEDVNEAEKLLEVNEDDCIGLDMSAHSFAIASNNEVFTNEKFYRRNERRLKIRQRKLSKKEFKSNNRNKAKLIVARTYQKITNQKDYFLHGLTKYLSDKYKAIFIEDLNIKGMQKFNSGLAKTVSHDLSWSKFVTMLNYKMNWKGGYLIKIDRFFPSSKMCSVCGLINKNLTLSDRVWTCECGVFHDRDKNASINILKEGINLLKKSTVVITESYALRDMRLVTDSASEELLF

SEQ ID NO: 21206 - protein, 354 aa, unknown
  TnpB Polypeptide
VQTNYIAGMILTYRYRIKDATSGKHLDVLSRSVNRVWNYCGEIHEASRRHNKRWPSAFEMIKLTTGSSAMLGLHSDTVQAVCKQFVSSRDLHRRRPRWRGKKSMGWVPFAAARAIKVDGDAVIHLKRRYRFWNSRPIDGTLHAGSFSQDARKRWYLNLQVEVADSPSCGTGEIAIDLGLKTLGALSDGRKIENLRHYRKYERALAKAQRARNKGRAKAIHAKVVNARRHHLHEQSTRLVRENNLIVVGDVNARKMTQTRMAKSVLDASWSGFRSMLRYKAMRHGARYVEANERGSSVTCSACGARGGPKGIAGLRVRAWVCDGCGVQHDRDTNAALNLLLGVERHPLVAEIPVL

SEQ ID NO: 21207 - protein, 379 aa, unknown
  TnpB Polypeptide
LAEHCRHARFVWNLAVEQQQHWQPGRQTPDYNAQCAQLTAARAEYDWLAAGSQTVQQQALRDFAQAMRNFFSGTHRRPTWRKAGTHEGFRQVGLKPRHIKRLSRRYGQVWVPKVGWVRFRRTRNIPGTVKSYRVTRDRAGRWHLAFAAIPEPVPGPDDGSVVGVDRGVAVSVALSGGELLRVPRLGASEAQRLCRLQRRLSRARRGSNRRARTKLAIARLRARETDRRRDWVEKTTTELARCFHTIRVEDLNVRAMTCSTRGTQECPGTNVAQKRGLNREISRQGWGLLVARLNHKAQGRLEFVPAAYTSQRCSHCGHVAPENRKNQAVFQCVACGAGPCNADVNAARNIAAGRAVTARGDLGTSRSTNREPQLCPPAA

SEQ ID NO: 21208 - protein, 533 aa, Proteobacteria sp.
LWLSRPVDGLVKTGSFTQDARGRWDVNVQCAVRDATEPVGHLDLGIDLGLTSQIACSEGVISRREHLTRQHATARAMAQRAHKKRRVKALQATMANIRKDWPHKATTAIARRAKLRVIGDVSSTKLIKTPFATSTYAAAWGIVRRQLPYKARRLAGICVDGHERCSRVTCADCGARSGPRGLRGLGVRTWVCLCCGVAHERDVNAARDILAFRSGRATPSKGIPVLEGGEDVNLFRLTLMLVEVGMVCMARSRLNFLDHVSDDQTEDIGQRDGIAPARPIANRLNVHQWQRSELRPQSRDDRGPGRGGHLFTDNPGIHRITFEQLQCCWRWYRQQAVRCTHGAMADIHRRGHDLLDMQRLQTNHRAHHIDNRIHRADFVEVDGLQRFPMQTRFRFPQAPENRQSALLHGGVERAVRNHRHNVRIAAGWLGMFVDDHIDFGTAKAAAFDGLGFQAIAGHGQLRQFFAQHGNVHPGIDQRTKGHVTADPRKTVKIGQAHSFIPSLQRPCCPTGTRSPRCSNCGRTVAAKYGSSAR

SEQ ID NO: 21209 - protein, 345 aa, Moorea sp.
VFNKTIKILQDGEVKANWKAIKTDILNSLPEWCKEVPYQIKSIAIKDACTSVREAKKKYKKSYKIQRVKFRSRKKPIQSCYIPKSAVSEAGIYYTKLGELGFAENLPKNICDSRLISNNGDYYLVVPYKETTKKAENQGRVVALDPGVRTFITFFSETSVGKMGNGDFSRIQRLCQHLDNLLSKISFACGGQKRRMRKAARRMTIKIQNLVNELHRKTARLLVDNFDVILLPTFESSQISKKGSRKIRSKTVRNLLNFAHYRFKEFLKHKAQETGKVVVDVCEAYTSKTVSWTGELIKIGGSRIIRSKVDGRSMDRDINGARGIFLRALVDTPWLRNQLALASQN

SEQ ID NO: 21210 - protein, 357 aa, Moorea sp.
VVIKNIYKRFPEKENQDKCKEYVTQLKTQAFLDNPLLHRLVRKEFHRGHSWVKNQIVYQQVGYKCQRISRNTYQLELAGLTRGKRNKIFVKSNRNIKGQIRLIYNQILQRFEIHFLVDHGTVEIPPERQSVGVDKGYTEAFYDSKGQAHGEGLGKVITKKSDRICAKNRNRGKLWALHRKLEKFDPAKSARILKNNLTRKTENRRYRRNQSELTAIIGAASKSLFNGESLKVFAVREAWPTALDLTQPIKNKRQSKAVSRKLNSWIKGVMRDSLQKWANWTGSVVTEIQPSYTSQIDSRNGCGSFCGKSLLKQEGYDPGDTRETPRILTIRWMVVKTHPMQRYVTPYLATPSKAATL

SEQ ID NO: 21211 - protein, 210 aa, Microbispora sp.
VGIDLGLSHFAVTSDGRKVDNPRFLRRAERRLRKAQQELSLKEKGSANCQKARAKAATAHARVADARRDWAHKLSTQIIRDNQAVYVENLFVSGLGRTRLAKSVHDAGWSQFVAMLEYKAARYGRHFAKIDRWFPSSKLCSGCGTVAESMPLAIRSWTCPCGAVHDRDINAAINILAAGRADRLNACGARVRPGPAPAQREEAGSFRGAA

SEQ ID NO: 21212 - protein, 392 aa, unknown
  TnpB Polypeptide
MIRTSQHILKYSNNCKINQLEKLYENYKSDLQLYINDILSKKLLFKALLSSKLLPTYNIFHSQWKQILYKQASEIVRSNIKYQQNKRYKRYKKCYFYFKKQNRQLKFLSKRFSELNLKPILSTIKIDIKNISINIDERLLTYQNDSLFFNEFIGLTLPYFRNKRRAYRINLPIKWHKQSLKYQNWKRRNTIQLKKINDNFYFKFFYEKESPDKIKEQNKIGFDIGYKKLLSDSNGNHYGKELYDIYQKISNKKQDSKKFKRTLIHRDNKINEIINKIDLKTVSHIFVEDLKNIKHKSELSNKINNKLQRWSYTKVLNKLSLVCNEKGLNLIKVNPMFTSQTCSRCGNIDKDSRNGETYQCKSCNLLIDADTNAAVNILRRGVYSPSNIEKLS

SEQ ID NO: 21213 - protein, 447 aa, unknown
  TnpB Polypeptide
MARKQLTDTEREQIRQSLVATRNRRKNQILKVFELKVNCHQTSKETYDKMKQCFIQAKWVYNDMLSLSGAYNSDVAYETLDIFKYNYLDHKTVHRYNKNKKYVEEKITLPTFFHRGVIQQCKTNIVNLSKAKRKGYKVGALKFKSEYDSIPLLTGSFKIIDNSHIYLPGFKNLKVYGLHQILNIKDYEIADGRFIKKASGYYIHVSVCINKDSFKQRKQTYKEVGLDFGIMDNITTSDGEKFNCNVQESEYLKYLQKQLHRKQKDSKRYWRLLKQIKCEYEHLTNKKVDATNKLIHYLTSNYDTAYFQDEQIAKWKKKKHSKKNGKKCGNSFGRQIQCSYLGRIKTKLVSMEGTKSFKIDKFQPTTKLCTACGCLNTLTLADRIFKCACGYTEDRDIHAAKNVKFIGTIKRAECLEQASVETLSSTVKPAMVNGKTGRRSEKEDPTF

SEQ ID NO: 21214 - protein, 492 aa, unknown
  TnpB Polypeptide
LTWLASEVRDISSYATYVVRNDEALGGELARVAAVQPAVAGRQAGVTMPDFLVSGKSGRSRKEKLLQYNVVTTHRSWKERANAANGESSKYVSQGWKRTVDASAPSYGVDYVNLGAVDKQYAVIENNPFTDGEIVLKMVIQGQWYRLIFSFDNTRFTEGKVTLPIIKIQDGRPVFIFTVVTDNPVVQFSGYYTIGVDVGINNYATVVVREVEAGRIVCETTLSQRVHSLWNSVRASELQVRHLRKKASTLLHDRQARMSALDEAQLHREAASRKKRELAILAAQEIADLSHLWGNAVVSVEDLSWIANTMQNGRWNRGELVKRLTHYVTQNGGWVLSVSSAHTSQLCHKCGAKVAHPTHDVSACPEHGAMDRDVNAAANIAARAVPRVAKARVTRAKNKKLRSQPPLRTSPARDSLKYPGRDRTKNKPTPKRKNHRLASREVILPVCPARAQAYGLVARVLADQGARVALGTSEAALKQGNAAYKSRLCYLI

SEQ ID NO: 21215 - protein, 400 aa, unknown
  TnpB Polypeptide
MLVYEYKLDGSKRQFAAIEEAIRIAQFIRNKCLRLWMDGKNVSKNDLQTYCAVLAKEYPFASRLNSMARQASADRAYSAIQRFYDNCKQKKPGKKGYPQFQKDNRSVEYKTTGWKLASDGRHIIFTDGCGIGRLKLVGNKNQSIETFPIKDIKRVRIVRRADGYYVQFCVKTERKVEHIPSGRQLGIDVGLKAYLTDSLGNTVPNPRHYRKAENKLKRLQRRLSRKQKKSANRKKARKALAKQHLKVQRQREDFARKVANTYISSSDLIAYEDLQIRNMVRNRKLAKSIHDAGWGTFIRWLQYYGHMHDIPVIAVPPHFTSQNCSACGTRVQKSLSVRTHICTGCGVVLDRDQNAALNILDKALNGTVGHTGTSGQDPQNASGDLTSAAPSKRRSGKSSR

SEQ ID NO: 21216 - protein, 372 aa, Streptomyces sp.
VITQGKKRAERSWLGEVSAVVLQQSLRDLEGAYRAFFDSRSGKRKDPRAGPPSFKSLKDRRQSVRFTANARWKITGKGLLSLPKIGDIPVRWSRTLPAVPSTVTVIKDASGRFFASFVIETDPQADADRWPVEDVSGREVGLDMGLNHFAVLSTGEKIASPRFLRRAEKKLRKLQRGHARKQKGSKNKEKSRRALARQHAKVADARHHFHHEWSSRLVREHQAIYAETLNVQGMARGNLAKSIHDAGWSSFLAMLEYKAARYGRVFQQVGRFFPSSQRCSVCHRIDGPKPLHVRTWTCEGCGTVHDRDTNAADNTRQEGRRLHTLNQQLKVAEGHHGDPKRLRSDEKTKDRRSRHDAKKQEAKESRPENRAA

SEQ ID NO: 21217 - protein, 398 aa, Catellatospora sp.
MVKRAFKYRFYPTDAQAAQLSRTFGCVRLVYNLALQARSQAWTQRQERVGYHATSALLTGWKKTDDLAFLNEVSSVPLQQALRHLQTAYTNFWAKRAEHPSFKSKKRSRRSAEYTTSAFRWRDGALLLAKLSEPLDIVWSRPLPQGCTPSTVTVSQDAAGRWFVSLLCDDVIEQTPATGTVGIDVGLDSLLTLSTGEKITNPRYERAGRQRLVRAQRNLARKQKGSANRAKARVKVARVHARIADRRRDHLHKLTTRLVRDTQTIVIEDLAVRNMVKNHRLARAISDAAWRQLRRMLEYKAAWHGRDLIVVDRWFPSTKLCSVCGALAQHMPLDVREWTCRCGSVHDRDVNAARNILAAGLAVTACGDGVRPQRGSSRRGQSSVKQESPRATKGIPVR

SEQ ID NO: 21218 - protein, 342 aa, unknown
  TnpB Polypeptide
VIVQQQALRDFHQAWANWFAAVRVWRARAALLPPSAAPPGPPSFRKRGVHEGFRIVAVSPQDVRRLNRHWGEVAVPKLGWVRFRWSRPVPSARSFRVTCDRAGRWHVTFAAVPRPIPAPGTGEVIGVDRGVAVAAALSTGELLAAPRLRPAEVRRLRLLQRRLARAKRGSTRRQRVKRAVARLHTRATDRRKDWVEQTSTDLARRFDLIRVEDLDVRAMTKSPKGTVERPGRNVGQKAGLNRGILANGWARLVTRLEQKAPGRVEKIHPAYTSQRCSVCGHVAAESRKSQALFACVACAWTGNADVNAARNLAAGRAVPARGGGPLGQPANREPHRVASSAA

SEQ ID NO: 21219 - protein, 405 aa, Desulfonatronovibrio sp.
MLIRKGYKFRLKLRDGDEQTFVQFAGCCRFLWNKALAYQDGLFQAEGEKILSKTKLLNLLPEWKNEYPFLKEAHSQTLQQSLIDLDRAYQNFFRRLKQGEDPGYPRYKKKFVHDSFRFPQGFKVEGRHVYLPKLGWFRFYKSRNIDGTMKNVTVSRRGRHWYIAVQVEQEIPDPTPTQKPSVGIDMGIARFYTLSDGSFHNPLNPFKKLSKKLARLQRSLARKVKFSQNWKRAKARITRLHEKIADMRRDYLHKLSRLIANRFGFVVVEDLKIKNLTTSAKGTLASPGKNVKAKSGLNRSILDQGWGEFFRQLDYKLSWTGGWLEEANPYNTSRTCPVCGYVDKKNRRSQSKFECVNCFFKDNADYVASINIHTAGHAGIYACGDGRPSLKQELPGNSNAVPALS

SEQ ID NO: 21220 - protein, 511 aa, unknown
  TnpB Polypeptide
MSPKTVVSRTYPRVPYAAFDKNGGPLDLSEVLDGIRKDAELVAHYALKEMTEQNLALSTYFDRYKPAEAGRQMNLKLPSEVKKQFKSGASRLEKMFQEQVVTNLRSWAARAEVVNQTSTRHVSAGWNRTASNSKPASMQPRLALSATDKGYYYKNFSVTPDRISLDLVVQGKWVTLHFPTPPQLLEEGCEPGVPDIWVDKNNRVMFGFHGKIDPGRPEFSERYVIGVDLGITNPAAYVVWDTEEKKVVERSLLGQRARSLNNKIKRGAKQVAALRRKGKDEEAGSHRQHLSNRRKELSILIAQELADTAWHYDNAIVSFEDLSHIKNTMKYGRWFRGEVYRRTRDMVEADGSRVFKVNCAYTSKKCHVCQSDLDMSNYSQPHCTTCGITHHRDINAAANIAQRVNVKKACQTRSKHATKTKRARRSKCRIKPLKHPGTKNKPTPKAPQNQKRKTHDHTYPTLPSKEVSKRMCPADTRVSVVDHTWFQTISGTTNPKENPSINTVDWVYPKE

SEQ ID NO: 21221 - protein, 499 aa, unknown
  TnpB Polypeptide
VPYAAFSKNGEPLNLDDVLNGIRADAKLVAHYALKEMTEQNLALSAEFSRYKPAEAGRRMGLKLPTKVKKQFKSGSSRLERMFREQVVTNLRSWAARYEVVNQTSTRYVSDGWKRTASDSKPASMSPHLVLLSTDRGYHKNFSVTPERISLDMVVQGCWVTLHFPTPPQLLEAGCEPGAPDIWIDDKNRVMFGFHSRTDPGKPKFSERYVIGVDVGITNPASYVVWDNERKEIVERSFLNQRARSLNNKIKRGQIQVASLKRQGKDEEAIPHREHLSNRRLELSILIAQELADVSWRYGNAIVSFEDLSHIKNTMKFGRWFRGEVFRRTRDMVESDGGGVMKVNAAYTSQKCHVCGENLNMSDYSSPVCTTCGITHHRDVNAAANIAQRANVKKACETRSKHATKTKRVRRSKFQSKPLKHPGTKNRPTPKAPQNQKKTKTHTRNYPLLPSKEVSKRMCPADTRVSAVDHDTWFQTTSGTTVPNENLSTNTVDWVYSKE

SEQ ID NO: 21222 - protein, 518 aa, unknown
  TnpB Polypeptide
MRGGSPEMPSNSVVSRTYPRTPYAAFEKNGGPLNLDDVLNGIRKDAELVAHYALKEMTEQNLALSTYFDGIKPAEAGRRMNLHLPTEVKKQFRSGASRLEKMLQEQVVTNLRSWAARVEVMTQTYPKYVSAGWKRTASDSKPASLQPRLSLSATDNHYRKMSVTPERVSLDMVVQGSWVTLHLPTPPQLLEKGCEPGVPDIWIDDQNRAMFGFHGKTNPGRPEFSERYVVGVDLGVTNPAAYVVWDAEKKEIVEKSLLGQRARSLNNKIKRTKNQVASLKRKGKDEEAVSHREHLSNRRLELSILIAQELADVSWRYDNAIVSFEDLSHIKNTMKYGRWFRGEIYRRTRDMVEADGGRVFKVNCAYTSKKCHVCQSDLDMSDYSQPRCNTCGITHHRDLNAAANIAQRVNHKKACQTRKKHATKTKRVRRSKCHVKTLKHPGTKNRPTPKAPQNQKKSKSHARTYPPLPSKEVSKEMCPADNRVSAVDHDTWFQTTSGTTNPKDNLSINTVDWVYPKE

SEQ ID NO: 21223 - protein, 407 aa, unknown
  TnpB Polypeptide
MKVIRTEQIWMSPSDNLSHLCHLSKNLFNEGNYIIRQELEQNGKWTRFNSLNEQLNKGVSDNYTLLPSQTANRILYTLDMSWKAFFRAIKDWKNAPGKYQAKPDPPHYKRKDGEHILIFTTQQVKIKDSYLLFQKMTGIDPIKTRLGDDTKLKEVRILPKGTGYICEIVYEKEVESLNLNPDNVAGIDLGLNNIVTMANNIGEQPIVIKGGFVKSMNQYYNKKRAELQSTYDLQGIKGGSKMRVLTEKRNRKMKDAMHKISRFIINYCTEHDIGTLVIGHNENWKQKVNLGKRNNQNFVSIPYYILINDLNYKGEEVGIKVIEQEEAHTSKCSFLDGESIEHHEKYAGKRIKRGIFRSAKGILINADVQGALNIIKTAIPKAFSKENADEIEGVGLHPVRCTLGGTA

SEQ ID NO: 21224 - protein, 195 aa, unknown
  TnpB Polypeptide
VDGLMNTYKAYKLRIYPTDSQRELIEKTFGCTRYIYNNFLAERKNKYEESKTKVHVYEQLKELTDLKREKEWLREIDSCALQACVYNLDDAFQGFFHGKGYPRFRVKGEHESFRTNNTLSTYKNKKYETIRVDFNKRVITLPKLKEVMFRGYRTTKEIVGKIKSATISKDANKYFVSILVEVPFIKYSINPTSIV

SEQ ID NO: 21225 - protein, 370 aa, Clostridiales sp.
MDKCYKFRIYPTAEQAVLINKTIGCCRYIYNHYLAKRKTEYEASGKTFGYYDCSADMTELKKSLVWLREVDSTALQSSLRHLDDAYKSFFRRVKNHEKPGYPKFKKKHCGHQTFTSKHINQNIVLADKSIKLPKLGFVECRVSKKIEGRIISATVSQSPSGKYFVSVHCGDVEIALLPKTEKLIGIDLGIGDFATLSDGMKIENHKHLLKSEKKLKKLQRQLSRKSRGSNNRDKAKIQVARMHEKIANQRNDVLHKLSTHMVRDYDIIAVEDLGVQKMMKDHRLAKFIGDAAWSEFLRQLEYKAEWYGKRVVKIDTYYPSSQTCSVCGCVNPEVKDLRVRSWNCPQCGTAHDRDVNAARNILSEGLKQIA

SEQ ID NO: 21226 - protein, 427 aa, unknown
  TnpB Polypeptide
MKGIKTKISFNNKQITMAKQHCGVGRHAYNWGLALCKEILASGGKLPSAIDLHKRLVAEVKTQFDWYYDSSKCTPQQKLRDLITAYSNYFRDVKNGTIQAKKNKYIAQRKRKGLPINYDKLNDIGKPKFKRKDAESDCFYLEGSVIEIKGKRIRVPIFGWLKTFEVLPECKPKNVVISRKADKWFISFKREFETAHTIKTHDIEGTDWGIKKLATCSNGKVYDNPKAYSKNKRRLKLAQRKLSKKHKKDVKRQSNNYYRAALKVALIHAKIANIRNDNIHKMTTDFSKNHAVNCFEDLNILGLAQNHKLAGAVLDGGYGEMMRQMNYKAKWYGSEVIYIDRYYPSSKTCSCCGNVKEVLKLSERTYHCEVCGHEQDRDLNAAINIKKKGVELFMRQQPVEDKTSQTTFGCPTKQEENSNVQHCVSFS

SEQ ID NO: 21227 - protein, 432 aa, unknown
  TnpB Polypeptide
MMLVDGKTASELNHACGCARYAYNWARDTWFEKKRSGQKSVTCAELRKEFNEQKTAWMYESPKGSMDQAIKNFVLAKKRHYEHPELFGFPKRKKYKSKRSFYIENDKAKIVDKYHIKLPKIKVPVRLSEPVKDECINGKINNFVVSKGSNDCWYISISYAYDDTNRLYGTDDNGIVGVDMGIKTLMQLSTGECVANEHINKQHAKRLKRYQRMMSRRKYNSTHYKDIKKTFNKKNSYVKNYRKDLIHKATTEIVKYNMVVAIEDLNVKGMMANHKLASAISDCGFGMIRRFLEYKSAKYGTLLLKVNRWFPSSKTCSGCGHTKEKLSLSEREFICEECGLVIDRDTNAAINILAEALFNELNKRFNTDIARRKFTPADLVALASSLSGSGESTEVDARGLLTRDGRMASVDGFFDRLWNQVANATVNCYICA

SEQ ID NO: 21228 - protein, 253 aa, Bacillus sp.
MEQDRFMKIPKLGLVELVPAQQVKGKILSATVSMNATGKYFVSLLTEQEIEFVQPSLFQVGIDVGLKDFATFSDGTKIENPKWLRKLEDKLIKAQRVLSRRKYNSSNWNKQRKKVAKIHEKIVNARTDFLHKITSSLVHENQVICIEDLRVKNMLKNGKLAKALSEVSWFEFRRMLEYKCKWYGKTLVVVGSNFASSQLCSCCGHKNPEVKNLGVREWTCSECNTIHDRDVNAANNILAEGLRIFVDGQSMIA

SEQ ID NO: 21229 - protein, 418 aa, unknown
  TnpB Polypeptide
MKSMKEFAYHSGIKLRIYPSRKQKTLIFRNANAARYIYNKMVALGKERYLLKKTAALCPADAARLDYVESIYGSATGISNMAPFLNEPGIDAQAKANAIQNYRKAWNHFRDAPGAGAPTFRRRKTEFSYQTNPHYKKGAMDMNDANARFEDMYHMILPILGRIRVKGSPARMQRLFKMNQYIRIGTITVFCDASGRYFVSLQLASDVPFFDPLPKTGSSRGYDLNLDNFYTDSDGNVVDNPHFLKERLAKLQKAQRKLSRMAERAKKEKRDLGECKNYQKQKAKVAKLHLQVRSIRLDFQQVLSKREVESQDLLCFENLAVRNLIKNHKLARVISDVSWSQFVSLCEAKAHAYGKQFVKVDPKQTTQMCSSCGHILKGENKLTLKDRFWTCPICGTFHVRDENAAKNILAKGALSLLA

SEQ ID NO: 21230 - protein, 540 aa, Fusobacterium sp.
  misc_feature (442)..(540): Xaa can be any naturally occurring amino acid
MANYVLTLALKTELWQEHILEKRLNIARMIYNSCLSEILKRHRKMINSSEYKEIKKLDKKEQSKRYKELDKKYSISKFELNKYMKPMTQKFKKNIGSQMGQELAERDFATYEKFKYGKAKKVYFKSYENFYSVREKGNITGLRFFKEDCCISWLGLKIPVIIKNNDKYAQSCFLDKLLYCRLLKRVVNEKNKYYVQITFEGVPPKKHKVGGENEIGIDIGTSTIAIVSDNKVELKILAENIGINEKEKIRLQRKLDRQRRANNPNKYNKDVTINIENKEKWKKSKSYVKTKLKLSNLQRKIAEKREQSHNILANSILEIGTIVKVENMSFKALQRRSKKTEISEKTGKFKKKKRFGKSLSNRAPALLIEIINRKLEYIGKNIIKIDTFKVKASQLNHSTNEYEKKSLSKRWVEILGNKIQRDFVFCIFNKECKRKFRRSKYXXXXXXXXXXXXXXXXXXXXXXXXXXXXXXXXXXXXXXXXXXXXXXXXXXXXXXXXXXXXXXXXXXXXXXXXXXXXXXXXXXXXXXXXXXXXXXXXXXX

SEQ ID NO: 21231 - protein, 414 aa, Glycomyces sp.
MKVVRAYRFALDPRAEQVAAFLSHCGGRRFVYNHMLALVKANLDQREAERSYGIAEPDLTPNVEWSAYGLRKAWNSRKDSVAPWWSENSKEAYASGCADLAAALKNWRGSKQGRRAGRPMGFPRFKTRRSRLSCSFTTGAIRVEDDRRHLTLPRLGTIRTCENTAKLHRHLRRGTGRILSATLSKGRGGRWFVSFTCEIEHRERVPERPTAVVGVDLGVKHLAVLSTGEFIPNPRHLDQALSKLRRAGRRLARRQGPAPGTPPSARWLRAQDALAKAHARVAEQRRDALHKLTTRLARTYGTIVVEDLNVAGMVKNRRLARRISDAGWGEFRRQLAYKTAWNGGNIVVADRWLPSSKTCSNCGTVKAKLSPSERTYRCEHCGFVLDRDANAARNLANLVHAAVDLELPGDAKTA

SEQ ID NO: 21232 - protein, 200 aa, unknown
  TnpB Polypeptide
MAYRYRLYPTAQQSVFMAERHCADARFVWNLAVEQFNWGRAGRSAPGPADRMHQLAEARQEFEWLRRGSSAVQQQALRDFDWAVKEFFNGTRGRPTWRKKHRHEGFCVRDTKVRVHSRKWAQVAVPKLGWVRFQLSRALPAGALGMARITRDKAGRWHVSFPGRQPAVADAGRSGRSVGIDRGVAPRWRPRMGRCCVHRS

SEQ ID NO: 21233 - protein, 413 aa, unknown
  TnpB Polypeptide
MKINKAFKFRLYPNDQQIQFLAQSFGCARFVYNHYLRQRIDYYAETGKGLTYFNNSHALTQLKKQSELEWLNDINSQSLQAVLRNLDIAYNNFFNKRAEFPKFKKKRNKQSFGVPQNFQIHDNVVDIPKCKGIKIKLHRDIEGTMKSITISKTPSGKYFASILCELEIPEPTYSGVVPPITFRRLGSPSGFTEEQSDGRKNEIGIDYGIKSFITTSGGVTIDPPKYLRKSEKRLKQLNKSFCKKQPNSKNLYKAQKQLARQHEKVSNQRQDFLHKTSKQLVSDNQAIYIESLAIRNMIQNHCLAKSISDSGWNTFVNMLKYKGNWYGCRLIEIDRWFPSSKRCHICGYIKDNLTLSDRSWLCPECNTNHDRDVNASINILIFGRAGIAQTILPSLPDFAGTGTRNACGEGSST

SEQ ID NO: 21234 - protein, 410 aa, unknown
  TnpB Polypeptide
MEEKETTHCFVVKLKLRVDSAGRRVLARDFLFALQLRNATLSTVLKRDRKMKQSAEWKEICELPKGPERNQRFQKIRKDYGLSSANDFEKILKAHAEKSGRKKQLNSNLGQIIADDLYRSYADWLFHKKGRPRFRGRNRGLHSLRGKNNATGVVWKHQERSVRYGKKLYKAVIDPKDRYVQEALADPKDPSKPRRVRYCALVRKQIRGKEVFYVHLVLDGVPPTRTVPAPKEECIGIDPSLRTMTCVHSNGAVAKINISAPEEDAKEMRRLQREMERSRRATNPDNYNEDGTVKKGAHKWVRSKHYLALKAQFADLKRRNVETRKNIHGRLIRILMGLAGTFRVEENNWKAFQRGRYGKSVLSGAPSEFIERESERAQTLSTRSHERHIHQARTLGKTVSSRRHGFLCGS

SEQ ID NO: 21235 - protein, 226 aa, unknown
  TnpB Polypeptide
VAFTMPDVALPAPDPATAVGIDLGLKDFAVLSTGEKIAAPRFYRKGERKIRRAARTVSRKQRGSHNRDKARQRLARVHRRIAQQRQDFLHQLSTRLVREYDIICLEDLAVKALGRTNLGKSIHDVGWGAFRRMLEYKALWQRQRIIVISRWYPSSKRCGYCGAVYADLTLAERTWTCATCQTTHDRDLNAAANIRAEGLLLLAQGLGESLNGCGSSCQTADGGRGR

SEQ ID NO: 21236 - protein, 319 aa, unknown
  TnpB Polypeptide
VTFKQAAVQWNPRTSTVRLSIPKDIYDKQFVYLKVRMPYGYRFTSDNIQIGRLVYLKGDWYVHLVYKMLLPELKGNGEAMGVDLGMVNIVATACTDGSTSLWLGGELAALERYFEKQKSKTAKSRSRKSCALNQKRSRQRTHLLHSFTKSLVRDAEARGVSTIIVGTLKDIRTGKDWGDSGNQNLHKWPFDRIVKILTYKARLKGILVVDLNESYTSQTCSQCNTINKSSRVHRGLYVCKQCGAVINADVNGAINILKRYLPEQISVSWSSGCLAQPAVNRFAWRKTRLATSAHKPGTWQITLPHLRTESAVALSSCRV

SEQ ID NO: 21237 - protein, 470 aa, unknown
  TnpB Polypeptide
MHGSEREVGVAMPLSTLPDCKPYWSDLCAEISSRLLLPVETDCADSDLNYSSLWSNKTVEKSWFSQILYTVHRPNSQPIFLPSFTATVAGCTPGEATARKSRKIRIFLNPEQKALLKRWFGVSRFVFNTTIKFLQEPGTKANWLAIKTDILNSLPDWASSVPFQIKAIAIKDACQAVKKAKADFKNNGQVHRCKFRSRKDTKQSVFVPKTAIKDCGIYHTILGQSKLKEALPKAFSDGRLTLAYGEYYLIVSEEVQSRQTDNQGRVVALDPGVRTFMTFISEDSYGYLGNNSNLQIQKLCFKLDKLISKMSKATRAQKRRFKKAADRLKSRIQHKVKELHHKTAKFLVDNFDVILLPSFESSKMVSKSRRKLRSKTVRQMLTLSHYQFKKHIEWKAWELGKVALTNINEAYTSKTVSWTGEVKKIGGCRVIKDRDGRCMNRDLNGARGIFTGEASVDTPWLREHLNLCVC

SEQ ID NO: 21238 - protein, 331 aa, unknown
  TnpB Polypeptide
MSSYRRYNYRAYPTKGQRAVLACLYGACRYAYNWVIDQREIMRTRHGKMQTYAQLSSMFTQLKQDPDHQWLQDIPAVPLQQAIRHADTAYKNFFSLYNAGKTKIIVNKRTGKKRITGKPRFKSRRDGEQSAEFTKAARFKVEHANGCKWGFLILPKIGRIKIRWTRDMPSTPNSVSMMKHADGTYEVSFVVQVDDIIIAPESLHDACGIDMGLDSLMSIVYTDGTREKIPHPRTLRKHAHKLRKLDKQLARQKKGSNNHAKTRTLRAREYSHIQNQRSDMAFKLASKVAGENQAVAMETLNVNGLARTSLAKSLLDANWSRIINRIRELSA

SEQ ID NO: 21239 - protein, 377 aa, unknown
  TnpB Polypeptide
VKLTAQVRLQLTLDQSGALLRTLEVANAACNRLSQIAWESKQFGQFKLHKLAYHQIRQEFPLSAQMVVRLNAKVADAYKLDQQRQRTFRKHGSIAYDERILSWNLTESRVSIWSVEGRLAIPFVCGEQQRELLAFQRGETDLVFRDGNWFLLTTVDLPEAKKRAALDWIGVDLGIVTIAQTSDGVRYAGGHLNGLRIRHHRLRKKLQAKGTRAAKRLLHKRRVKEGRFATAINHKISKQIVTVAERTGHGIALEGLGGIRGRTRARKAQRGRLHSWAFGQLQRFVVYKAERAGVPVAFVDARNTSRACAKCGHVDKRNRKNQAAFCCAACGHRDNADANAAENIRRAAVNLPNLTGVEVSGVHGHVTRQSLVKSCLL

SEQ ID NO: 21240 - protein, 128 aa, unknown
  TnpB Polypeptide
MMQNRHLSKSIADSSWSEFARQLTYKGEWYGTKVVQIGRFVSSTKTCCICDAVNHDLSLKDRVWTCPSCKTVHDRDINAAIVIKKVGQDMPDIKPVEKRASILSFKRKGKPASVKQEAHVKMYGVLTP

SEQ ID NO: 21241 - protein, 397 aa, Lachnospira sp.
MCYAAYKLWNVCNYERLHYKELGFAEYPDWFYQKKAHKDELWARQLPSQTAQEVCKLLDKSWKSFYELNSSHGIANPRPPRFKHDCIAITYMQNAIVHEPGSVIVRLTLSKHLKMYMSESYDINDKFLFLENKIFESIDNIKQIKIYPPSNGECRIIVIYETDDIVPKPDNGNYLSIDLGIHNLMTCYNSRNGETFITGRKYLSLCHYYNKEIARVQSQWSNQQYNNGVKYPKSSKHINKLYTKKNNAITDYIHKTTRYIVKYCIDNDINTVVIGDITNIRRNKDFGNVTNQKLHALPYKKIYTMLDYKLAQEGITLVKQKENYSSQTSPLMPCVDKINADKLNRVKRGLYRDGLYSWNADCVGAYNILRLFLAKQKIDVRLNPASIKEPFILKVAA

SEQ ID NO: 21242 - protein, 379 aa, Lactobacillus sp.
  misc_feature (173)..(373): Xaa can be any naturally occurring amino acid
MFDIILKRKEGTNVLKGIKLRLYPNRTQQNQLEQMFGNDRFVWNQMLAMMNERYQNNKALPFLGKFKLNYLLKPLKKEYPFLKTSDSSSLQVVNEFLTQSWKNFFQDKTGQIGKPRFHSRKYLKKSYTGKSIIKTAGKRYLKIPKLGYVKTSKTGVLQNTKVKRYTVVLEPTXXXXXXXXXXXXXXXXXXXXXXXXXXXXXXXXXXXXXXXXXXXXXXXXXXXXXXXXXXXXXXXXXXXXXXXXXXXXXXXXXXXXXXXXXXXXXXXXXXXXXXXXXXXXXXXXXXXXXXXXXXXXXXXXXXXXXXXXXXXXXXXXXXXXXXXXXXXXXXXXXXXXXXXXXXXXXXXXXXXXXXXXXXXXXXXXXXXXXXXXXVRDWPW

SEQ ID NO: 21243 - protein, 444 aa, Acidimicrobiaceae sp.
VTTTGPTAGTLITITQAYVFVLDPTPSQVSHLRSHIGGTRFVYNTLLGMVKANWDENRAKKLAGEAVVKEDHLGTRHFDLQKIWYQQRDELAPWWSENGSSTYNYACLNLSKAFVNHRAGRAKFPTFKNKGSPRSVSFLANVVKLTDSHHVRISRIGELKSFESTRKLYRHLERGTGRIVAATVTERGGKFTISLTVKLERRVPVTRSPEKVIGVDVGISTLYTGAGPNGELLLSVENPRHFVTSQKKVAHAQRVASRRCGPKPGVAPSNRWKKANLRVQKIHTSTANARRNLIHETTTMLAKDYDVIVIEKLNIKGMVKNHSLAKHVSDAAWGEFARQLEYKTQWYGSTLVKADRFYPSSKTCVQCGAVKAKLSLTERTFACDSCGHQVDRDLNAATNLARLGLPGTNSGTGRGGAVRPVQQKLVVRAHPDEASTETLTFVSV

SEQ ID NO: 21244 - protein, 366 aa, unknown
  TnpB Polypeptide
MKAYKVRCYPTEEQKLLIRKTFGCCRWYWNEALRDNIDFYEKNGKGKINTPASYKKRYEWLKEVDSMSLCFTQMDLQSAFSKFFKEKNVGYPKYKSKKHPKNSYKTMQSSGYIVTENDIKITKLDKVKIINHRHKTGIAKSCVISMTPTNEFYISILWREEEPTVKLKPTDKEIGIDLGLKDLAICSDGEKIPVLRSLRKGLPKLKREQRKLSKMTRDSNNYKRQKLRVAKLHQHISNQRKDYLHKVSYKLINENQVIALEDLNVKGLMKNRHLALSVFDVGWAEFVSMLEYKAVAKGRIIQKIGRWFPSSQICSCCGTITGKKPLWIREWKCPVCGTVHDRDINAAKNILVEGKRIIGASACPDR

SEQ ID NO: 21245 - protein, 369 aa, unknown
  TnpB Polypeptide
MGNYMQKGIKFRVYPNKTQKNLINRIFGGCRLVYNKGLVMRRDSYKNGISVGYSGTCAMLTALKQQEEFNFLKELDSIALQQSLRDLDKGYKKFFAKKSKYPKFKNKHNNYQSYRTINHVNTIRIVGKYIRLPKLGYIKIKQSMEVGHINNVTVERTPSGKYFVVLNVDFEPQLMNNANGTVGIDVGIKDFYTDSNGNKIPNPKFLEKSARKLIRAQRGLSRKQLGSNNRNKQRIKLACIYEKITNQRNDFLQKQSTMLIRENQTICIEDLNVKGMMRNHNLARSIASASWSKFFAMLKYKGEWYGNTVISVPTMYPSSQTCSYCGYKNPLVKNLDVRTWECPECHTKHDRDINASVNILKKGLEIAYS

SEQ ID NO: 21246 - protein, 380 aa, unknown
  TnpB Polypeptide
MAVTKGILVRLYPTEEQEVLINKTIGCCRFVHNQTLENCIQSYEQTRHFPSKNERIKNLVPLKEENEFLREVDSTALQQSVRDLNYSLNNFFKNRKHFGFPKFKSKHNSKQSYRTPYNNGAADVLDNKHIKLPKVGRVKTKRFDMPDVYKIFNITVERTTTGKYYASICIETEVQPLPKTCKQVGFDMGLIALLIGSDGTRYERPRDAYVFKDKLVKGQRKLSKMRTKLERANLNLDECKNYQKQKRKVAKLHEHAANCAKDFNHKLSINLVRNYDFIAMEDLNVSGLVKNHKLAYSISDVRWSQLLTFIKYKCLWYGKDFRQVARFYASSKICSECGTYHKDIVNSLKVREWTCPDCGTHHDRDVNAARNILNQALSVA

SEQ ID NO: 21247 - protein, 405 aa, unknown
  TnpB Polypeptide
MRTAYRCRAYPNAEQQAALNRTFGCVRVVWNRSLAERRRRWHADRKGMSYAESDRALTRMKQDSDLAFLSVVSCVPLQQALRHQHQAFRAFFAKRARYPRFKSRRSRQSAHYTRSAFSMREGVLRLAKMSAPLRYVWSWPQVDVTALDPARVIVAREPDGRWFVTFTIDTHDPEPLPPAGHDAGVDLGVRDFAVISDGQRIANPRHLERNARRLARYQRRMARCQQGSANRARAAAKVARAHRKVRNARADFLNRASTRLVRQNDMIVIEDLNVTGMVRNRRLARAISGCGWGEFRRQLAYKCQRYGRELVVIDRWYPSSKICSACGHLLAKLSLRTRHWACPSCGARHDRDLNAAKNILAAGRAVARGVPGDACGADVRHSGSSRVRSAMKQEPRPVTAGIPVL

SEQ ID NO: 21248 - protein, 253 aa, unknown
  TnpB Polypeptide
MLVRELKLKLTTKQKNLLNDWLHTLTGVYNWAIKKVELNAKNQIYFSKFDFMNLLSDHGKKLGIPSHTIQGILEQAFFSWKRCFKKISRKPKLKSIRNKLNSISFPDPIPFSRLKSRIIRLPKLGQVKFYKQNLPVGSIKRARIVRRASGWYCQLTIDAVNRFPVKQTGAKVGIDTGFNNLATLSDGQKFYNPRNYRKSQVRLAQAQRGINRKLVARLHERISNRRKDYNHKVSRDIVENFQEIYITKDNLTG

SEQ ID NO: 21249 - protein, 307 aa, Symploca sp.
MILTYQYRLKPTTDQEATMLNWLEWLRRHYNWALGQRFDYLKRTRSLVDRCSLVSEPIGEIPGKFPNYNTQAGQLKQTKVLFREYKNIYHDVQQQNLKRVDKTWDRWIKPDKSGKRGGRPKFKKASELRSFTFPRTNCPKAGAFFENSVLRLSKIGSIPVIVHRPIPDGFTLKTCTIVRQADGWYCCISIEDESVPVAKPLNEVKTAAGIDVGLKEFLTTSEGETVAIKQVYRKTQNHLAHQQRRLERKQKGSNRHKKQHNFIARIHQRLGRQRKDFHYKVAHKLVKAYDLIAVEDLNIKGCAIRFS

SEQ ID NO: 21250 - protein, 407 aa, Lacrimispora sp.
MGTKQGYAITTWRLRLRCKHPEWLETTQNFYNEIQKFYYDLYLERPELWNENSQNALRGLETLSIPGRTRKQVEYPLPWDNALLYFRRSAANAAIAAAKSYLTRTVGGYAGKTETFHSAVTYYKGMYRELTSHGVELRVWTGDEWHWMHCRLYGKEFPEDGQLMSPSVVYEHPYTMLQVPVKEVVQDASGIKERIAAERNVCGVQFGTKDVFAVASVLTADGKEAAVRYFKGGNRYTDQCRRVVEHIDKSHASHGENGKGPVNQRYWMQIKHLNSHYAHQVSREIVEYCKAHEVGIIAFPKYAESYEKHVKKASGNYSALHLSTRIREYLTYKAWQSGILVIDINAKGLHENCAVCGANIVSVDKKTQECTCEAGHKTNRYLNIARNTAKRCLAQFQKKQKTSETAG

SEQ ID NO: 21251 - protein, 376 aa, unknown
  TnpB Polypeptide
MLKAFRFRLYPTKAQKTMINETLELLRWVYNETLAVRKNSWEQAKKTVSLIQTNKLLTGWKKQRLELNDVYSQVLQDAQVRVDLAFQAFFRRVKAGEKAGYPRFKGYRRYDSLTYTQFGFKLEANKLTLSKIGTINVNMHRKVEGKIHRVTVRRASTGKLFVSIIAEVEPKHVPFKDDSVVGVDVGLESFATLSNGEKIENPRFFRTEEHELVKAQRKLSAERKGSEKWRKRLKVVQRVHERIANKRSNFIHQESRKLVNRFGVVAFEDLNVKEMQGNHCLAKSIGDAGWSMFINATRYKAEEAGSKVVLVNPNDTSQVCSRCGLIVKKDLSERTHRCKCGLELDRDLNASINILRLGLESLGLKTIEAHPLQGWE

SEQ ID NO: 21252 - protein, 370 aa, unknown
  TnpB Polypeptide
MLKAYKFRLNPTKKQETVINKHIGSCRLVYNWALEQKIKTYERTGKSINHMGLDKLLPELKTEKPFLKETNSQSLQGMTKHVDAAFVRFFREKNGFPKFKSKKNPIQSFPVPQHYTVDFENRTIKLPKIGKVEAIFHRKFEGTLRTATISRSCTGKYYISILVDDGKELPDTQKYSESTTIGMDVGIKDFAVLSTGEKVENPKYLKNSLKRLKCLQKRVSRKVKGSKRRDKARLLLSKIHEKISNQRNDFQHQISSKLISENQAIALETLNVKGMVKNHHLAQAISDSAWSSFVTKLEYKAQWFGKTVLRIGQFEPSSKLCHVCGYHNSELTLKDREWICPDCKTPHDRDINAAINIKKFSLLDQNLITT

SEQ ID NO: 21253 - protein, 408 aa, Pseudoalteromonas sp.
MKKTLRYNYRLNPTPEQEVKLFEFSATSRGIWNMLLSENMRRYEYDKTFLFYKDMASVLKELKPFEEFNWIKAFDSAAAQQVARDLETALKNAFSKGRLQRFPKHKITYKKKKLHNDSFRAVNNSNCIRIENGAISVPKIGRVPIILHRKLASKIKTVTVQYCHGKWECSITQEVECKAALRVLKTITGFDINSKQTVVGSNGYVADNPKFLKQSKEKLNQLQRQLARRKKGSNRWHKTKQRINKLHGKISRQRLDFAHKISRQITNENDILIFENLNVKAMQKFNGSMVADNVMGLITQLSKYKTELEGKIYHEIGRFEKSTGICSECGQHHVLTLKDRNFTCLACRTYQGRDLSAAKSIAKTGELDLIAAGIVARVNPISQQKSAIKTKVFELSKFAVGSEKKVAA

SEQ ID NO: 21254 - protein, 369 aa, unknown
  TnpB Polypeptide
MERAYKLRIYPNNKQIELLNQTFGCVRYIYNYFLNRKINFYEKNNESLTYNACSKELTQLKKENEWLKAPDKCALQNALKNLDAAYQNFFKKRANFPKFKSKKSYKESYRTNNGNNNTSIRFENNTIKIPKVGWIKIKGYKKISGRILSITISKTKSNKFFASICVTEFEPEQFEKTNQNVGIDLGLKEFAIFNTGEKINNPKFFVRSQKKLAKMQRKLSKKIFESNNYFKYKIKIARFQEKIKNQRLDFLHKLSIRLIKEYDIICIETLKVKNMIKNHKLAKSIQDVSLSEFIRQLEYKAKWYGKIISKIDTFYPSSQLCSNCGYKNPNIKNLEIREYDCPECGVYHDRDINAAINILNEGLRILNSI

SEQ ID NO: 21255 - protein, 290 aa, unknown
  TnpB Polypeptide
LFLKSDSDKDNIEFKVNQPVCYNNQNYTIDHHIISIPLYTTKCQRFAFPVKQTERFEELQQHIKNGCKLGKASLFYKRGKWYFAVTIKIAAKKTTNSNVMGVDIGLRQLAVASVKNPQGKEINRQFHDGKQAGFIRKKYRSLRRKLGQSKKVKAIETIDDKEQRWMVDLNHKISRQLINLAVQEQVGTIIMENLENIRNTAKSFNRADRNIHSWTFYQLQQFIKYKAELAGIKVEYINPKYTSQSCSKCAKVKKSNRKANLYSCECGNHIHADLNAGRNIANKYLEQQSA

SEQ ID NO: 21256 - protein, 315 aa, unknown
  TnpB Polypeptide
LYRKNCYIRESDYAASIKVWVNNTWDWVTVDFRKSDADYILKHCSGRKECVPILRKRGKKWYLDFSFEEKTKLHDTPAEDQLVLAVDLGINNACTCSVLAADGTVAGRGFLSLPAENDCLEKATGRIHKAQRNGAKRMPGLWARAKGISDAIAVKTAAYIVDMAVRYSVDTVVFEHLDTSGKKKGSKKQRLHHWRAQYVQSMVEDKVHRLGMRVARVCAWGTSRLAFDGSGRILRGKESKKTAGNYSLCEFQTGKIYHCDLNASYNIGARYFIREILKPLPATVKQDIGAKVPRCLKRSTCTLSDLISLAAVLAA

SEQ ID NO: 21257 - protein, 631 aa, unknown
  TnpB Polypeptide
MALDQIRSYNISALDTQISYPRLWWVGRDASAYPHLPVRRECSDTRCRNRVTNRRGSSGQHSVTVHVSVPRLDFPLFPQYICHDRTIVCSTDEDHTARNVQPQLPHSVDTEVPPLGTDGRGCRPCGVHPPRNRRRKRTGNSEPHRPVGPRSPVREQPAETRSLASRQLVQRHQFAEIQPPTRRPRRRENQVGTRLLRRNSGTRFERDCREVHPASRGGRTVTELTETLELKLVEPNAHKHRKLCETKQAYQDALEAAFNANCTTQSAANGVVVNYDLSGYAKNALKKYVPQLCGGSYDAKELHDDHPVRFTNEGPKLDHKPQNAIEWYVKIPHHDDYHLWLPAQPNPEQREWLEALHAGDAKMGECRLFNRDGEWYFHIVATRDVEEQETGSAETPIGVDIGEASLLTVCHRDERGSPTSPNLWNDEGKRVRQLRETYFTATRRLQKRGSERISESYGDELWRHIDHILHTVTSEVIAYADQFENPVLVLEDLTHIRENMDYGAFMNRRLHGWGFAKMHAQIRYKAAEEGIHVETVNPAYTSKTCHCCGEQGYRPKQATFKCSNSGCWVSEYQADVNAALNIVDRYLSGESHSREYTSGDDSAGEGGRLTVPQDSQADADTQQETLGTYAS

SEQ ID NO: 21258 - protein, 508 aa, Microcoleus sp.
MILSYVYKLRPSGSHSAKMESWLNMLRSSYNWCLADRIETYHQQFIQGLYCSLRTKAEAYPLTCCIVKNGATGNPWKNNGKKRNAGTIQDAALVDLKTARPWYKSIDSDVLQRNIARLNTAYKNFFDGRGFPAFKNRSNFRSFEYKPGRVKFKGSKVYLPKIGWMRFFNSRPIPDGFAIRSVTIRRRTDGWFISVRLEDKSVPMATPRPTSEVKTAVGLDMGLTKLVHCSDGSDIPNPRFATNQKTKRTLSIRQRRVSRTKKGSVNRKKRAAEVAKLHSNVFNRRNAYQWQVANKLVKKADAFVVEDLNIQGMVRRCKPKPEEETGRFLPNGQSAKRGLNRSILDASWGELINKIQYVAVKSGKVLLKVNPRDTSRECSACGHIDEANRDRERFICTRCGHFDHADQQAARNIKRKAVVEYGLKLVIRKVRRDSAKPKQLTLFETPSTELTVPSPERLVPSEVEVSRRAKRRKHDTRKGKRRVPGNLGRQLELFSQDMWNVSSAESPF

SEQ ID NO: 21259 - protein, 332 aa, unknown
  TnpB Polypeptide
LRDLDKAYQRFFKTQKEGEKYAKAKIQKSVRTGKLLGVYDLKGHPKFKSKKKAEPKFYSRYDKIYFKEDIVNLEKIGKVKYRCDYELDLTTIEKFTNPRVIFSGRVWILSVGVDIENPNTQLEDKVLAIDLGIKKLAVVNIDGLDVVNINKTKVVKNLEKKLKRLQRQCSRKYEINKTKMKGGENRYQKTANIVKLEKKIKKLHGQLKNIRLDHIHQATAKMVKAKPSVVVMEDLKVSNMMKNKYLSKAIGQQGFYTFINQMKYKCQWHGIKFIQAPTFYPSSKTCSSCKEIKKDLKLSDRIYKCKCGFTCDRDKNATYNLENYGLVKSQAV

SEQ ID NO: 21260 - protein, 358 aa, unknown
  TnpB Polypeptide
MLCTLKIKLVPTPEQFKQLVETMKRFNLACDYISRLAFDSKTFGKIGIQKICYYDIRTKFGLSSQMVVRAIGKVSESYKTDKNALHTFKETGAMVYDQRILSFDGLEIASLLTLDGRIKVPMVLGNYHQGLLCGKRIRGQADLILQEGVFYLLLVVELPEPPKMDTHDFMGIDLGVVNIATTSDGQVMSGSTVRGIRRRHAALRKKLQQKGTQSARRLLKKRRRKEQRFATDVNHCISKRIVSAAKGTERGIAMEDLGGIRERLTVKKAQRRELSSWSFSQLRLFVTYKAVLSGVDVQFVDPRNTSRECSKCHTTDKKNRKTQSLFECTACGFVAHADINAAINIGRRAVVNKPYAGV

SEQ ID NO: 21261 - protein, 362 aa, Nostoc sp.
  misc_feature (266)..(266): Xaa can be any naturally occurring amino acid
MLDVLKVRIYPNKEQEMSLAKSFGCSRFVWNFYLNKTNAQYEETGKGMTYCQMAKDLTQLKKLADYEWLQEPTAAVLQQSLKNLETAFKNFFVKRSGFPKFKSKHSKQSIRFPESCSIKDDGLKLPKLGIVKASLSKNVNGKIKSVSVSKTSTDKYFAAILFETGDLTNNKQGKISGIDLGLTSLITVFDGETCYKVDPIKPTREYAKRLRIRQKALSRKAKGSNNRRSSVKVVAKVHEKISHTRQDFLHKLSRKLVDDNQVIVTXNLCIQGLARTKLALSIHDAGFGMLLNFWICSSCQTTHDRDENASRNLRAEGIRILSTNTVGHTEIQACGEAVRLVGTCTKKRVSEKQESPATPLCG

SEQ ID NO: 21262 - protein, 434 aa, unknown
  TnpB Polypeptide
VNCKDSYAWLSEGGRGMLLSHRTSVNIRPEYSNIIGHMCYAASKLWNVCNYERRRYKELGLEKYPDWYYQKKAHKGDLWYRQLPSQTAQETCKQLDKAWKSFYALKKTGEIKAPNPPRFKQDNIPITYMQMGIRHEKGSDQLRLSLSKDLKSYMEETYGIHEKFLYLENKIFRNMDHIKQLRIYPPEHGKCDLIVIYEVKEPEPLSLNGHYLSIDLGIHNLMTCYDSGNRRSFILGRKYLSLERYFHKEISRVQLIWYAQQVENGIKYPRSSKHIKRLYRKKQNAVKDYLHKVTRWLAEYCKKERISCVIIGDIRNIRKGKDIGHKTNQKFHGLPYNKLYIMLEYKLKLYGISLTKQEESYTSQCSPFSPEISKRYAEASNRKERGMYITDGVRYNADAVGAFNILRKYLSVSGKQKELSVTGLKNPEIIKVAV

SEQ ID NO: 21263 - protein, 627 aa, unknown
  TnpB Polypeptide
  misc_feature (112)..(112): Xaa can be any naturally occurring amino acid
MAKTQTLSFPIRLPDAMQAEALRLLDASREAINQILVELWPHLDRFVSDRTGPAWKHVEKHLLTRSGHGNRQERNEMEQAGRMLRAQASRKQVFQTILPLLGEGLIRPAEGXRPARKDHRQITEQVRALRTQMHDAGEDADAFMAMTNVLEQACNRYLQSGEFSATYEELQPPPVLSVGHLTFAGDDGMKAGQTYRARIELSQFCECSTRQEHHQASLWLKLRSPDALGKWAWGTWSEAIPLPPTVCAYLWQGATTQAPTLREIRSDDGSRLAVLDLMLEVQAQYVSPLEQEKRVLGFDWGIRSLITVSILEKPEDDEPYHQVSRPVFLDTGGIDGRQARLRREIDRLKACRDRYALLIKQARDSRAEHQSPLPAHFALWQERVSGYEARIKQCWKTYERRNRELAHLASNLLILFALLSDCRLICGENLTTLKTIGRGRGVRGRFRNWRNNTTVRGELWRVLKYKCHVLGIRARQVDPRGTSHSCPHCGLPAKTYASPAPSDRKKALDWGPWLCCSNPDCLWNGARDYAAALNIARLGMAFLVTYHETKRYVPYRMTSSEVKPALYISSGATLLLPSQGFIARPHKGKHIYYAGWSSSIALRTSQPKSVLAVLSTARLRKYLLDSA

SEQ ID NO: 21264 - protein, 436 aa, unknown
  TnpB Polypeptide
VSSKRSETVKLTARFKLDGEVDERLFETYKRIVNELLDYAHSKGITSFKRLKSEKYHELRQEYPELPSHYIYTACQMACSIYKSFRKLKRKGKTKSEKPLLRKDVIMLDDHLFKLDLEKWKVRISVPDGKLEFKLLHGEYHERFKDWKVGQAWLVRKPDGVYLNVVFSKNVEMLHCVDVIGVDVNENNITVATNRGFVNFGTRERVIRTAYFLKRRRIQTKIKSKRVKARILAKYRDRERNRVLDIYHKVANEIVRLALKMRSAIALESLKEIRSRINYSKELNGRLHRWSFRRFQQILEYKAKLNGIAVIYVDPHKTSRLCPICGRKLSPNGRRRLKCECGLVADRDVIGSWNIRLRGLRSLKIDVGSTVPPESPSMNPETGRLSATHASKVVKVAESQNGFKAQSDRHKGIPNRPCTHNIGSSRIENSTPLQRN

SEQ ID NO: 21265 - protein, 215 aa, Lactobacillus sp.
  misc_feature (8)..(85): Xaa can be any naturally occurring amino acid
LQKLYKRXXXXXXXXXXXXXXXXXXXXXXXXXXXXXXXXXXXXXXXXXXXXXXXXXXXXXXXXXXXXXXXXXXXXXXXXXXXXXXANIQNDLLQQFTTKLVDNYDQIVIEDLAVKQMMMTHVASKGMQRSLFSRFRQILTYKCDWYGKELILADKTYPSTQRCAACGYVKKGEEKITLQGNKKHGTKHNEYICYECGYSNDRDENAVLNLLALVK

SEQ ID NO: 21266 - protein, 654 aa, Streptomyces sp.
MSRKLLLADGETSRTACARALIRTGVDEKTSELLTAAALVERVGWCTDLVAQMTGTLLAEHWNTTDVDVLAAGQDAGGRRLPSNAWMALRRLGWTTGPDEDVKVNDRIVRMAQEQAGRTLRSVKWRADVVGGVLAAWPADLKKRTPEEWDQVRAAIPGGEYLPSSIIRSRTRQITAFECEHGRLAADVFELEPTPRLPRMLLLAACDGQQATIERSATEPTKALLRLQLPTRPDPQKYADWTWVECPIALPPTVPANAVIHLPTLRIAGGQVRADLAYTHPVPKTQRTGHTVALGVDWGLNTLLSAGAARLHDDGRITALGSGAQFRAAGVLAKQYRLRRISERLHARTDHYMRLADPSLDGKNAVLAEEIRRVSERRSNLNGALAWAAARWTVDQAAAVRATVIYLEDLRSMEAGGMGHTQNTRMSQTVRGQIADRMRHLAAEVGIAVVTVPPRNTSKHCPHCLTPLRHRKAPDRPTVSGWKWAICPSRDCGWQGDRDQGAWRRIAARGLAHQTKTVVDRASGTMAIRTVVDTMEARAVVAATPKTSRWDRSKTGPTRPRTNHLMPRRREVPSPVRPSGRAGQRPEGHAPTDRRRLPRAAHRHQSVTTISTPTTGHRPRGAALGAGFHLHAHAAPPRWADPVSDLTVRIGSLS

SEQ ID NO: 21267 - protein, 483 aa, Acidimicrobiaceae sp.
MDQPYRMRAIMVPLDPTPAQAQLLRSYCGASRFAYNWTVAIVKENLDTRAKERMAGKDETQLTRSLSWTAWSMTPLWNSVKNDVAPWHRDVTKHAFVSGVTNAAIALGNYETSRNGVRKGRPVGFPKFKSRHSKQSFRLIDLKRTGSWFSEDSRHVRLILPRFATDPRITRRREQLQWMHTTESLRRLKKKVMAGEWTVQSVTISFTGGRWQASFLVRQFVNAFPSAIRPLGPLVGVDVGIEYLATLTVPIPGVSDEHGHVENPGHLDAELDRLAQLDRHLARCQKGSKNRAKILKRRQLLYGRISRTRELNLHRLTATLANNFETIVLENLNVVRMVNKSKKDTTKILSRSIYDAGWYEFRRQLEYKTKDRGHRVVVVERYYPSSKKCSHCGETKAKLALSDRVFECRTCGISLDRDVNAARNIRDEGIRLLAIEASIVAGHQPETLNADSRDRETEPPRRGRGDRYQSRTTQPARELSPLA

SEQ ID NO: 21268 - protein, 434 aa, Thermococcus sp.
MRRTVTVKLQPSKAQEKALFELAYASAIIWNRLNYQRLKQFKEFGKIDFSTTEKEAYHEFKNWIGGSTVQQLARKNAEAWRSFFSLNRKKKKGELPEWFKPKPPKFVREKKGKKLFIIPLRNDQYRITGNVLELRRLGKFGRLRIQFKGRIHLRGKQRRLEITYDEVKRKWYAHVSFNVEEKLESGEWIKLPRKPKGSLSAGIDLGVNNLMAVYVENGESFLVNGRALKSIDFYWRKKIAEYQSKLNKSGAKTSRKLRRMHDRAKLQAKHYINTAVRQTVKRLYELGVSRIIVGYPKGIARNSDKGKKQNFLLSHVWRFNYVIKRLKEVSEEYGISVVVVDEAFTSQTCPLCGQRHSGGRISRGLFKCRREGVVMNADLVGAFNILKKAVRTITPNLPGLSGGRGNWPKTGPEGLKTRFILGLNETPQTSLPLG

SEQ ID NO: 21269 - protein, 623 aa, Modestobacter sp.
MDEDTAGVGPVDASDATVLLDLEGLAVRAVQRAPDGERVVHLETAEETAAACPVCGVLAWRVKGYVRTGPRDLPCGGGGLQLVWRKRRWHCDQPGCPRASFTESVPAVPARARLTTRLRAHAGNLVVDGICATVSAAGRATGLSWPTAMDAARNQAAPLADEAPAAVEVLGIDEVRRGRPKWRAPDQPPEPPPAAAQPAASQPAAAQPAAATAKARVLADRWHVGFTDISGGQGMLAQVEGRTADDVAYWLASQPAAWRDRVRYVAIDMCTVFVSAVRRYLPHAQLVVDHFHLVKLANDAVAEVRRRITTTTRGRRGRDSDPEWKVRNLLGRNQENLTPKAFAKMWNTLVDLGAPGVTILTAWVAKEELRSLLALAGTGPDRSQISSRLTRFFTWCADSTIPELHRLAATIDRWWPCIEPFLHTKITNAASEGYNRVVKLDARNAFGYRNPHNQRLRTRCATTRRARGCLDPGQLRRPAKVRRQRADFHHKTALTLVRDHDLIVVEDLRVANMSRSASGTLEEPGTNVAAKSGLNRSILDAGWSAFTQILTAKAESAGRQLISVNPTNTSRTCPTCGHIAAANRPTQATFRCVACGHSGHADVVAAGNILRRGLASQPKPLAA

SEQ ID NO: 21270 - protein, 500 aa, Vulcanisaeta sp.
MLRRAVAVELEVTRELNRLLYSVESVYLGIVREVVEYAVKHNATGASQLHGLFYHKYRSEYPSLNSQLVVQAIKQASEIAKSFITRRRKGLVSKPYPEVRNVSLRFTEKAWGYEQFIKSIAPIRLSLSLLGERKEVWLRLHRRFWLYWWRVLNGEAELASTLIIKRKTNKWYAVFVFEIKPKQETPQAIVSFDINENTVAVSKIDLPSTVGMVADWNRQYLTPQLYTIRTDFGRLAKRYEKTRNVIIEKLKPDFLLPNGNYVNVTNTREYRKLVKRLRERGRKVGRVRHVANELTKTPAIIITEELGDNPQESMIEDIMKDELRHRIKQTPFKSIEKAVEDKALERGSKLVRVSSYRNSRVCPIHFTRLEKTDDWHILQCPLGHYADRDHASILNMLWKTTPEAWTKGIWWDLRRENMDWGKYEDRHNPLVPYGIVTLLQHIMENTKASLEQSPAMLARGKPMNPTGYKMKVAARKPPKKREEAGAESAVNGQAPQTHVE

SEQ ID NO: 21271 - protein, 442 aa, unknown
  TnpB Polypeptide
MTGKSVSLPGNKKVEVDIYERNIEADIRKLKSRLKLLISARNHMQDKLDCLKKNPPKRIIFGSKKMYSEKDSEDINIEIWKQEFFNKRHASMSLPGRHTSKNCNFLVRKASAADFATRKELDGHKEALIITCMDGKEAILLDFQLSRDNNLWLDALNAKPDDRKPVCYNFQLKCDEKGRLYFIPSVTMVLENTYCNESFEDGCVSIDLNYDHVALTDIDKDGNRISGKVLRFNPENKTSGQISDEIGRIMSKVGQYCEDRKKPLVMEDIDTTISKHGMKYGNAKGNRHASIFAYRKMESCIENQSYRRSFGVIKINPAYTSQIGKILYMRRLGISIHEAASYVIGLKGMGLRDKLTLEEEMAARLTDSLKKELSDGEDIYSLMKVWKYISSKLSGICTHSFYRSIPYEYKKGDGLTKTGKPKKPKSLKAIAAEMKGWTACYY

SEQ ID NO: 21272 - protein, 338 aa, unknown
  TnpB Polypeptide
MRLELWSKNNRAGICKFHGHAIQVRVREGKYLWLPLITTEYNERMYIQDWQAGKTKAGEISISLGPNSRANIHVPFKREVELKQAEGVCGIDINERSVDLCIMKLNQEPKHVKLDTSKLASIAHSMELKQKSIQEKLDSLPQRPIQKARLKWKYSKRRRNRTNQVLHVVSKEIAEVLSKERVEPVFEDLTNIRQSMRSKQKSENGKALRKDMRRRLNQWPFRKLQFYVEYKTLQQGYSTHYLPREQVKGTSSTCPMCGAKSKPNGHVFSCKACGLSADRHFVGAYNIAARWTKDVARNVPAEWRQMQPIAELVVPVEKLSAETQESPMQNLCGNLGRR

SEQ ID NO: 21273 - protein, 272 aa, Escherichia sp.
VKRLQAFKFQLRPGGQQEREMRRFAGACRFVFNRALALQNENHEAGNKYIPYGKMASWLVEWKNATETQWLKDSPSQPLQQSLKDLERAYKNFFQKRAAFPRFKTRGQNDAFRYPQGVKLDQENSRIFLPKLGWMRYRNNRQVTCVVKNVTVSQPGRNVRAKSGLNRSILDQGWYEMRRQLEYKQLWRGGQVLAVPPAYTSQRCACCGHTAKENRLSQSKFRCQVCGYTANADVNGARNILAAGHAVLACGEMVQSGRSLKQEPTEMIQATA

SEQ ID NO: 21274 - protein, 375 aa, Micromonospora sp.
LLEGFVVLVVLGVVVPRRRDPAAPRVVHRTARVALRVTPGQRRRCFGLLRSAGDVWACVLEVNGWRRRRRDAPLVGYQELCRELSVSGPGTFGELDSTGARVAGVDLGIIHPYAVAGPDGAGLLVSGRAIRAEHRMHLADTKARRRAVARRAPKPGQKGSRRWRQYRRRARLVEGRHRRRVRQAQHEAARQVVSWAVRERVGVLRVGDPRGVLDLDAGRRHNLRLRQWQIGRCLQVLTDKAVLAGITVHLVDERGTSSTCPACRRRVPKPRGRTLTCPHCAFAGHRDLVAAATIATRTPGGGTTTPTPARVPGVITHRRAGRHLPGAGQSRRDPRRPNRAARGSVGPRRPAPPPGGESLAQKARIHNQHRTPGER

SEQ ID NO: 21275 - protein, 624 aa, Micromonospora sp.
VKVTRIAYSVRLNPGKYAALAEQARRLGRVRSEVWQRYGSINGVGAGLRDRQVRDRWLADGTHVQFAVLANAWKETVRDAMADIAANLAAAKVDIRRAINRRTNDPAERRRMFTALKADQWVDDPFLARQMRKHWRRGHNRTHDQIVVRADRYNTAVDGRGRLWLAIPGLEPRKMVRIPLSTTIAPTGTLRLILRGGRVEVHYQIDAAQMRSSQRPCGEATIGVDKGYTEALTDSDGQPHGEQLGDLLTRESDRLKERNRRRAKLRSIANSAALRGDHAKAHRIKANNLGTIKRERQAARHRAQVRTEIFTAVHEVVDKATTVIAEDLTKHFTGRKQLPKNINRRLAAWTKGVTAEALKNVSERRGSALVPVNAAYTSQTCHRCGRFGRRGGDRFHCTSCGVVWQADVNAAINILHRAGDPDIALDTPYQKVKQILQDRTDRHRTRLPVQDSSPATTGRRANYPNRSTRATSRKQSHVEAAAARIRDHHAPEGEPRRHRHGPTRRPAGLRGHLVPVGGRPDPGEHGRGPPPAGPHPQRSPGHPDGAGRAGMVHPRHDRRARRRTPRRRGPGRHRPARRALHGEGVSAAGPPSGQCADRDRPLARVGCAEGQQPDRLTRRHRPPA

SEQ ID NO: 21276 - protein, 381 aa, Alkalibacterium sp.
MRHKAYKFRIYPNKEQEILIAKTIGCSRFVFNHFLAKWNELYESTGKGLSYNSCSAQLTELKKEIDWLREVDSISLQSALRHLDDSFKCFFRKQNKAPRFKSKKNAVQSYTTKCTNGNIAIVGNHIKLPKLGLVRFAKSYDVDGRILNATVRRKPSGKYFVSLLVETEIEQIDKTGSAVGIDVGLKDFAILSDGTVYQNPKFFRKIEQKLAKEQKKLARRRELAIKRNCPLLDAKNYQKQKQKVACLYEKMVNARTDYLHKISTEIVKNHDIIGIEGLQVSNMVKNRKLSKAISEVSWSEFRTMLKYKADWYGKQVVTVAKNFPSSQLCSNCGYQNKAVKNLTVREWACPECNSHHDRDINASMNLRNEALRLTVGITGLA

SEQ ID NO: 21277 - protein, 564 aa, unknown
  TnpB Polypeptide
MAMVRSKGVTIAVKVPINWESMTERTKQRLRQTVGRDTRVIRAFLGIIEQYEDELLTGKNRDRIHDGEVDKLTMTAFKVKQGYSQRLTVPHDFKVRFPRISQNEIVECRQTAVALYESYLKLRKKNGWNASRPTSINSSRRIPRWVFSQRFEVIEKKTSASRWWLDIRDALDSVQEKRTHHDRLTVPLKISPFHLTQIRKGEVKAVQIFTDKKRKWWVTIAVRIPLDESPNESHPVAILGIDLGIEKAACATLLTPEKTRQASYFIQRDKVNTIKKYDRLVAELQREMYTRRNQGLSSDRVAEKLRRMRSKRENVAKEYDRVLVRQLLDYISELSKKYTLYVAIGRLKNIRMHARKGNYQGRRFRGMIHSWAFARISDSLKHGLAQQGWKVEGKDTQFRTVPEAWTSIMCWKCGAKGERPRQNYFHCPSCGLKLNADRNGSINIASRMLTLTKSLHSVRGLGLWTRAVVRGTTNRRAPLKAQKKKPSSQGKSLLSKKEQVSSSGESAAVHFVQSDLASFSDGTIKSDNDPAVVRTVETLSVAGSDAPASIQEKEARSSGGIPSR

SEQ ID NO: 21278 - protein, 344 aa, Moorea sp.
VYRTIPVKANFLEEEKVFWEFQCQQANSLFNCAVYYAKQKHYKWLEEQEAFTSYWREDELRCGWKTYKCATKYPELDKALKMSPHYKGMAAQSAQQTLKTVGEAIASYNKLVGLYYQGKVDRPRFPRYRKSGGFASVTFPSQALTYKEGLFHPSVSKESKPELLTQITLDPPDFIDPDWVKEVTVRPCYGQLWVDWVIDDGKQPVTDNPNLDYSDAIGIDHGGDNWLTCVSTLGKSFIIDGRKLKSMNQGYCRLVAKHKHGKSMKYWDSHLDRIQLKRNNQMRDAINKAARFLVNRCLNDGIGNLVFGWNEGHKSRSNMGNKGNQQFVTIPTKRLIERLKQQCR

SEQ ID NO: 21279 - protein, 271 aa, unknown
  TnpB Polypeptide
MGYPARKMKKEDFVELLKKLRERPVSGRKLFVWVGDKQSITDILPAEITNEVDLLQIIPEENIKDVEEFIGVDFGVNNIATLSDGIQYNSKQLDKVRNRYSRTRQSLQSKGTPGGRKCLKRLKGREARFATVTNHAIAKQVVEKAKSLNMGIALEDLTGIRERTKVRKVQRRKHHSWAFAQLRFFLQYKARLAGIPFVMVNPRYTSQTCNICKMIGHRKGPSFSCPNCGNISDSDVNAAKNIAQLGIAVTDPERGSMICSIPLMPCQLAAG

SEQ ID NO: 21280 - protein, 383 aa, Thiofilum sp.
MKVKRAYQFRFYPDPQQQKLLAQTFGCVRFVYNHLLRYRTDAYYQAKEKVSYIGANAKLTEMKQLPEFAFLNEVSSVPLQQCLRSQQAAFKNFFEGRAKYPRFKSKRHQQSAEFTYRAFTYRNGELKLAKCDKPLDIKWSRQLPSDPTTVTVSKDAAGRYFVSCLCEFEPTLLPITDKKVGIDIGIKDLFVTSEGFKSGNPRHTAKYAIKLAKYQRRLAKKKLGSKNRLKAKVKVARIHAKISDCRLDNLHQLSRRLVNENQVICAENLAVKNMTKNPKLAKHIADASWGEFTRQLEYKASWAGRTYVEIDRFFPSSKRCSCCGFVCESMSLDIRSWTCPECSTQHDRDINAAQNILAVGLTVLAFGESVSGDSISMLLSRSR

SEQ ID NO: 21281 - protein, 403 aa, Moorea sp.
MIILEFKAYGNKSQYQSIDEAIRTMKFVRNSCLRLWMDNKGLNKYDLNKYCKTLAKNFPFANELNSTARQAAAERAWSSISRFFDNCKKKVPGKKGFPNFQKNCRSVEYKQSGWKISPDQKSITFTDKKGIGKLKLKGTWDLWRFDKKQIKRVRIVKRADGYYVQFCVSVEVKEQLVPADATVGLDVGLKDFYTDSRGKTEPNPRFYRTGEKRLKFYQRRVSRKKKGSTNRRKAVNRLGRQHLKISRQREEHAKRLARCVVRSNDLIAYEDLRVKNLVKNHCLAKSINDAGWYQFRKWLEHFGTKFGRVTVAVNPAYTSQNCSGCGEVVKKSLSTRTHTCRCGCELDRDHNAAINILNRALGTVGHTGTWIIDSNASGDLASTVLGFGQAQQVESMIEESPRL

SEQ ID NO: 21282 - protein, 390 aa, unknown
  TnpB Polypeptide
MTTTYKFRLYPNREQTEKLDFAIDICRQAYNIMLGELRGQAIVDRNMIQSILPDLKICEPRFKEVYSKALQYECYKLFSNLSALSALKKQGRKVGQLRFKERKFFDTMTYNQSGFELEHTYKKNGRLKLSKIGDIKVKLHRLPEGDVKQVTIKRINDKWFAFVISDGMIKLEHGDKFLGIDLGINHYFVDSEGNKVKHPKFYEKTQKKLKIFHKSLSRKQKRSKNRLKARKLLNRIYEKLNNQRKDFLHKTTTDLIRKCKIIVAEDLNIKGMMEQKYFNAKNIADSSWAKFIQMLEYKAENSGVQIIKVNPKDTTKTCSNCNHVQKMPLWVRTYKCENCLFEMCRDENSAINILNKGLGSERAYVEIMSDSSSEGQLSMKQEAITSTLKC

SEQ ID NO: 21283 - protein, 476 aa, Acidimicrobiaceae sp.
MRAVLVPLDPTPAQEQLLRSYCGAARFAYNWTVAIVKENLDKRDEERRAGIVESHLTKSLSWSAWSMTPLWNSVKDEVAPWHCDVTKHAFISGVTNAATALKNFDESRKGVRKGQPVEFPAFKDRHSKLSFTMIEFKPQYWLSEDSRHVRLVLPRASTDPRISRRRKQLQWLHTTESFRRLKKKVISGEWTIQAVTISFVGGRWRASFSVRQYVVHARSAIRLRGSLVGVDLGVKYLATLTVSVNGLSDENGHVENPRYLDAHFERLAKLDRQLSRCMKGSKNRAKLLLRRQRLHGRISRTRYLYLHRLTTTLTGGFETVVIENLDVAGMVRRKKKNTAKALRRSIHDAGWSELRRQLTYKTDDCGHRVIVVNQFYPSSKKCSHCGETKAKLALSDRVFECSNCGISLDRDVNAARNIRDEGIRLLTNEASTVAGHQPGTLNADSRDRETKPPRRGRGDRYQSRTTQPARELSPLA

SEQ ID NO: 21284 - protein, 466 aa, Acidimicrobiaceae sp.
MVPLDPTPAQAELLRSYCGASRFAYNWAVARAKENIDTRRDERRAGIDEANLTKSLSWSPWSLTPLWNSVKDDVAPWHRDVTKHAFRSGVTNAAVALKNYHESKKGVRKGEPFGFPKFKNRYSKLSVTFTETGTQGGWFAEDSRHVRLILPLRATDPRIARRRVQLQWIHSTESVSRFKKKVTCGEWTIQAVTVSFVGGRWQASFSVRQFVAPAPSMIHHLKPLVGIDLGVKHLATLTSPVIGLSDVSGYVENPRHLDAQLVRLAKLNRQHSRCVKGSKNRAKVLKRRQRLYGRITRTRDLHLHRLTTTLAGGFETVVIEDLRVAGMVKKSKKNTTNELRRSILDAGWSELRRQLTYKTEDRGHRVIVVNRFYPSSKKCSQCGETKAKLALSDRVFECGKCGMSLDRDVNAARNIRDEGIRLLANEESTVAGHQPETLNADSRDRETDALRCDGGDRYQSRTTQPV

SEQ ID NO: 21285 - protein, 406 aa, Beggiatoa sp.
MIVPRVERHIVDMNQQLIDLSYASKNLYNCATFIMRQNFIKNHKIINYSLMDKIIKRDYAEVYKGLPAQSSQQVLRLVEKNWKSFFKSNQEYKKNPDKFKGRPKLPKYKDKEKGLNIVIFTNQQCKLRDNQIHFPKMAGLSELNTTVDNLQQVRIIPKYQHFVIEVVYKKEVSNYELTHDNVLGIDLGLNNLATLVSNQPDVHHKLINGKPLKSINQYFNQKKAFLMSFIGNKGTSHSIARLSRKRSQKMDDYLHKASSCVINYAVETNSGLIIIGANKHWKQKINIGKKNNQNFVSIPYDKFKAMIAYKAEELGIDVVVTEESYTSKSSHLDNDPLPVYTEGESLMFTGKRISRGLYRWSKGIINADLNGAIGIIKKVVPEALDLLIKLLHAGAGFAPFKVVNTF

SEQ ID NO: 21286 - protein, 226 aa, Rhodococcus sp.
MLARSFGCVRVVFNDAIRCRQDARVAGEKISDAEVQKLVVTSAKTTPERGWLAEVTSVALVQACQDERRAYRNFFDSLSGKRKGRRVGAPRLRSRKDNRQAFRLTRNGFTVTSRGVRLAKIGDVELVWSRDLPSEPSSVTVIREADGRCYVSFVVERDEQPLPQAPTVAGIDLGLTDLAVIARSDGHSGEDARTPAPACCGETFGQCAVSNEAGTHRTENTSCVPA

SEQ ID NO: 21287 - protein, 309 aa, Escherichia sp.
  misc_feature (309)..(309): Xaa can be any naturally occurring amino acid
QNENHEAGNKYIPYGKMASWLVEWKNATETQWLKDSPSQPLQQSLKDLERAYKNFFQKRAAFPRFKKRGQNDAFRYPQGVKLDQENSRIFLPKLGWMRYRNSRQVTGVVKNVTVSQSCGKWYISIQTENEVSTPVHPSASMVGLDAGVAKLATLSDGTVFEPVNSFQKNQKKLARLQRQLSRRVKFSNNWQKQKRKIQRLHSRIANIRRDYLHKVTTTVSKNHAMIVIEDLKVSNMSKSAAGTLSQPGRNVRAKSGLNRSILDQGWYEMRRQLEYKQLWSGGQLLAVPPAYTSQRCACCGHTAKENRLX

SEQ ID NO: 21288 - protein, 384 aa, unknown
  TnpB Polypeptide
MRAYKFRIYPSKKQEKQVLHHFWLAKTLWNELLEHCKRTYDDFGYFPTEYSLKLMVKKYGLFSQTQQEVAHRLHAAIMKVLTMRKLGKNCGFPRFKSLDKMKSIHYPQNGVGFQLGNKFKVNPFGEIKIKKHREVDGRIKTLTLKRKATGKWFAIFCVDEPKKQPKENKGERIGIDLGLTNFATFSNSEVIHNPRHVRKYESRLAFSQRKLSKKKKLGKNRQKAKLRVARIHEKLANTRRDFLHKVSSNLVSAYSLIALEKLAVQAMAKNNFGKSINDAGWNMFANMLAYKAESAGCQVVFVDPKDTTKECSVCGTKTGKELKERTHNCPCCGLSMNRDMNAALVILKRATAGTAGSNASGDAAESASLNEDATRVLGSSSLLQ

SEQ ID NO: 21289 - protein, 384 aa, unknown; identical to SEQ ID NO: 21288
  TnpB Polypeptide

SEQ ID NO: 21290 - protein, 469 aa, Paenibacillus sp.
VSEPTYRTYQVWIKPGHRLYAYSERLCREAKNLHNTTNFYIRQVFTALRQDEPLQPLQQQVLDTLQANIGLMNERQREAHRKRLRNQLLKPADPRKDSRCCLFELWARASPFVSYAFLDCLFKAMEQPDYRALPAQCSQSVMKGVYANWSSFFASIKDYRVHPDKYTGRPHIPGYTRAKAKEVILTNQDCKIKDRKYLKLPLTKQRLNIGKLGCTDDLLKQVRILPKYGQYVMELVFACLTETADVKKEHVLAMDLGIDQLATLVTNTGHRPVCVKGKTIKAVNQYYNKWKAHYTGILRQGKQPQEGAHTSKRLERLHLKRHRRIKDMFHKASHYIVRFAAEQRVGTIVIGYNPGWKMETGMGRRNNQSFCQIPHQMLVSMIHYKAAALGIEVILTEEAYTSKASFLDGDPLPKYEEGVARTFSGRRICRGLYRSRSGLIHADVNAAANIMRKVFPEAIADGIAGLGGI

SEQ ID NO: 21291 - protein, 759 aa, unknown
  TnpB Polypeptide
LADGGWWVSDTPPPSSRATGPCSAAHDPVAWCSGLRLLVHGLVVPRARGTVTHPALSRVLLHRTFDQAPVDLSATYRFKQRMASFGLALADAAGQGVLGLVVVAQPGTTIRCNAALAWRSPPRLSRCRQVLPEDASIGDAHTAEQFTNPGGAPPRGGADDAVVVTPGRSPWVRPTPKTRNGVAAGVARVRYHGHRRPTWILTGIFRAQAPPFRAGSAGSTGGVLANVRFEWLQRRATSRGRDIRRRPQVLPVGTHPVALAQPPSGDALAGVHQPGDRDLRRGGDEQLDGVVLGGQLDQLGADVGTHAGEHLAKGAQVLAGQPPTPKLGHQDQLQVEPSDDVSAWTVVVSLSHRAHILSGMLVRYRYRIDPTPSQRQALARAFGCARVVYNDALAERQRAFAAGEKLSDSEVQRRVVTLAKQTLQRAWLAEIASVVLVQACQDARRAYRNWFNSRSGRRKGRRVGRPRFRTKHGRQSIRLTRNGFALHGTRLSVAKVGELRVRWSRALPSVPSSVTVIGEPDGRFYASFVVERDPTPLPPVTRTAGIDLGLASFAVVAGSDGTVEAVANPRYLRTAQRRLARAQRSLSRKQKGSANRAKARVRVAVAHRKVRDRRADHHHKLALRLIRENQAVAVEDLAVAGLGRTRLAKSVHDAGWATLVRLLEDKAAQHGRQVLKVGRWEPTSQLCSACRHRDGPQPLSQRAWQCGRCRTVHGRDANAARNILVAAGLAETQTACGGSVSPGLPLAVASEAGTRRGAA

SEQ ID NO: 21292 - protein, 405 aa, Haloferax sp.
VNYSYRYRLRPSDALEEQLVWTVDTCRQVYNHFLHRLNRNNDTSAYSEQKLLPSLKTWWGDLKQVHSKVLQKVVQRLYNNLSSLRGRKENGHRIGTLKWKQKGEYRSFTYSQSGFKLKNTSGRTRLWLSKLGEISIIFHRELPEDAEIKTVTVKQEPTGKWYAILGVETPNDPPGKPENPERCVGIDVGILKYTHDTDGYAVGSLDSSKERERVERAQRDLSRTEHGSANWEKQRRVVAERYADLKRKRRDFLHKLSNYYATEYDFVAVEDLDAKGLIELPGNSQNRASASWGTFLRMLEYKCEREGTHFIAVSPHGTTKECASCGVSADKPLWLREHSCPTCGFEADRDANAAWNILSRGLKDLGVGHSESTPVETALPVDTFVSAKRVVEAGSPTPRSERRQP

SEQ ID NO: 21293 - protein, 412 aa, Haloferax sp.
VEHIIRTVIVKLDVPDERCDDLHQTKNQFLHCANTTAEWAWRYPNDYCVTSKQKAEKALYEQLRSETELTANLVQKGIRRAIEASKSGVARLKKGENTSQPHFDAWSVVYDKRSATFYRDHVSLSTVNGRVECNYVLPDDPDGTPIGEYLLNEDFEFRMSTLQYDQSTESFYLHARMRRPVRELPMKTSDSKHRTVLGVDVNVDGTLAVTSTGSFIGNANKMNHRRREFETTRGSMQRTGTRSAHLSIQSMKYRERRWMKDELHRVSCEIVSEARGHGCTHIAFENLTDIRTRMAGTKKFHAWAFRRLFEYVEYKAEMLGIAVEQVDPAYTSQRCSKCGFTHKSNRPSKHAFVCRKCGYQSNADYNASKNIARKLMKTLHSEQKSPGGGAPCQCALTSGTLNLHGDFSAYSL

SEQ ID NO: 21294 - protein, 372 aa, Clostridia sp.
LLTVSLKAKFLAPNKGKLEKMSRMVETYRRACFWFLKQAEALDTASRAELNRETYRQACELFDLNRGTLQCAMLKALSARRSYVSRKRNGKKTSLPKFDRPIPVMVRQDCYSLHQLPSGTWVIKFPVSSGRSKIAVPLAVSAYHARRLQDLAGGSCRQGSIEIWQSKNGEWYVSISLVYETYYNEPGGVIGVDFGIVKLAVLSNNAFFDGRPVRWRKERWAERRKALQQAGRLSRVKKEAGRERRWMRHINHCISKRIVEIAKAENKAIALENLLGIRERAKGSRKFNRMMSGWNFRELASFIEYKAALAGVPVIYVDPKETSKTCPKCGNVSRYNRKEQGWFKCTRCGYQSDADRVGALNIAAKALDALGA

SEQ ID NO: 21295 - protein, 396 aa, Blautia sp.
MDKTAYYSVTVRKFSVLSRHRAQMEKTQELYNEILEFYYRLYLDTFQENSTGTTEALRSLEKITIVGRNREPVPYPLPWKKVPLYFRRAAINGAVAAARSYLSRDVQKDRSQEFNESVTFYKGMYRDFTENGISLKLWDGNSWKWMHMRLRGNKIPQDGQMMSPALVLRRKSIELHVPWKMPVRDGRTAKDRMKAGENICSLVFTNRDACIVCCILDSHGKMVDSLFLRGGAEYAHHCRFFGEKLRKSQDSGGGRENPRGNIMYWEKLKNISDHYAHQFSRQVINYCRENHAGILVLPVFDDCHRKIIIRSSGRYSPIYLSTSIREKLKYKAWQAGIVVLETQQHKISSVCSICGSSIKKNNSEFVCEKGHRGNRYLNTAKNLGLKCLSGFQKKLL

SEQ ID NO: 21296 - protein, 427 aa, unknown
  TnpB Polypeptide
MKKEMLQVDVPPRPDKPTPMYQVRRVHLGKTSQLDALAHECGQLYSQTLVFFWRTVRHKGIWLKAKHLMRLFTNPKLHAHTADACVQAFFAALASWRERRKIDPNTKPPRKRKWYYRIEYKQSAMNLHDGYLRLSNGQGNDPLVLLWPWPLPQTVVIHWTGTQYEAIATYRLIGPAGTQVRPEGEAAVCVEHSAGIDLGEIHPAVSHDGHYSHLMNGRLLRSKRQYCNKLMEHLNKKIASTKKGSRRRKKLVRSKQKQLKKIKYQTRDIEHKLTSRLVSTLHQEGVQTLVIGDVRDIRQNLDVGSKQNQKLHQWSHGTIRHYLTYKALRLGMRVVLQEERYTSRTCPVCGHRRKSSPAGRLFRCTNKHCGWIGHRDGVGAANIRYKYRGEFGFRHVVGAMTPPTGCGYVPHLSVAGGLRLPPETPRR

SEQ ID NO: 21297 - protein, 515 aa, unknown
  TnpB Polypeptide
MPRQRQTSAEQQTRTRKPTPTFLLELPLQVTPGQAKRLRAHLEAARQFYNAILSEGQRRLLRMRADLAWQAARAIPRTQKLERQRAFGVLRQQYGFSEYALHDVAKGLNCAWIADHVDAVLAQTLASRAYRALNRVCLGQARRVRFKSRGRGLSSVENKRNDTGLRFVLQPPEGGNTGYLLWQDDRLEALIDWKDPVVTYSLRHPIKYARLLVRQASSARAQGADAQSQRYCVQLVLKGVPYHKPKHLVGQDTVGLDLGPSTIAIVPRKGTPRLEVFCAELAPDASAIRRLQRQMDRQRRASNTANYDERGRVKKGRLSWKHSKRYLATRQRKATRERTLAAHRKTLHGRLVHEIVAVGKTILTEKISYRAWQKQFGKSVGLRAPGMFLDMLKRTVARTGGTLVEVPTRSTRLSQFCHGCGQFIPKPLSQRWHQCPCGIGPIQRDLYSAFLAAYLDPADSLPSCAQQRYAACWEGREPGLQAAYEHAVQRASVGQHLPRSFGIPRVRARLPESPR

SEQ ID NO: 21298 - protein, 353 aa, unknown
  TnpB Polypeptide
MILTYKVKHIKDFSSELNLARKVAKFAIKTKSRSSKDVKKFGLKSMISNQILKKYSKNKKCKSIKSVKLTIPNQGIKVNQEARNIKIPCVKLEFQYQFPNNFTKINQIEIDNTYCYISCEVPNKQEISTRDYIGVDLNTTGHCAVVAIPKTKKVIKLGKEANYIHLKYRNLRTKLQKKNAKYQLKQIKRREQNKIKNLNHNISKKIVQIAQENNCGIKLEELTKIREKRNKKTQHSFKYSLNSWSFYQLKNMIEYKSKILGIPVTYIDPHYTSQKCSRCGLIGNRNGKEFNCVSCGHVDHADSNAAFNIAAFEFSVKTLSNDHLVLDRDNTKRNTDILRLENQMPNVSEAFVN

SEQ ID NO: 21299 - protein, 386 aa, Hydrocoleum sp.
MASESTNKKSKKIRIYLSREQRQLLRQWIGTARFTYNRTVEYLQQPDTKANWRAIKGEILGNLPEWAKPVPYQIKSIAVRDATIAVREAKAKYSQTGQFQQVRFKSRKNPVQSCYIPKSAVSEAGVYHTQLGQIKFSETLPESFGDCRMVVQRGQYYLCLPVDAPKHKSENRHRIVALDPGVRNFLTLFSENSFGWIGSNDIGRVQRLCYHLDDLVSRLTKAKSKTKQRMKKAANRMRSKIINLVDELHHKTALFLVPLSEELRYQNFDVILLPTFEVSQMTIKSNRKLRSKSVRQMLTWAHYRFEEFLKHKANEYKKTVLDVSEAYTSKTVSWTGEILNNLGGKKIVTGSDGFRLDRDLNGARGIFIKSVVEHPSITLGDTPSIS

SEQ ID NO: 21300 - protein, 387 aa, unknown
  TnpB Polypeptide
MSIKQRAYPTAAQAAVMRIHCGQARFVWNLAVEQAAMWRRHKGPTPNNAVRMRQLTEARGAFEWLREGSTVVQQGALRDFDQAQRNWWAGTHRRPTFRRKGVSEGFVVRDLTLKRASRRTGMALVPKVGWVRFRLSRPWENIEAASSARVTLKHGQWHVSFTTPPPDFKRAPTGAVVGVDRGASAHNTLALSDGRMLAAPTLSVRERAKFLALERRLARQIKGSNRRQATKDSMGVLRLRLNSRRTDWVEKATTMLVREHDVIAIEALNTKGMTRAPASKPDPDAPGVFLPNGSAAKAALSRMILASQWGKIEQRLHHKAARATSPVTIVSVPAHHTSQRCFACGHTAPENRDSQAVFECVACGYAANADTNAAENILARALELVPA

SEQ ID NO: 21301 - protein, 425 aa, Lactobacillus sp.
MRQKSNPALDEVKYGVAQIRMYPTTAQKTYFWRLFGANRWLWNQIKDMTDKRYQNNKKLLFPSTASLKKLLPRLKQEYPWLKKANSTSLQATVEYYCNAQEAFFKQTPVGRKPPKFKGRHFYRQSATLKNVPSKRKDGSLLYPIQTVNKYCLRIGTRKPIFVETSSLNRLKHKVIKRMMVVYRADLDRFYLSFVVADQKEELPQYQAKVQKTGKMIGIDVGLGNEWLVTSDNHRWSVPQTFEAEKAKNLRQSHCDRNRTAVEKRVARFNQKHKETKIDKYDFANWQKLRKTKSKYQVKINNIRLDYIQQATTWLVKHYDVIAIEDLKTKNLLGNHKLAHNIANAGWSMFRRMLAYKCKWYGKKLIIVPPQYTSRICSDCGQKNPAFAHMKTRDWLSVREWTCPFCRAEHDRDVNAAKNILARAVC

SEQ ID NO: 21302 - protein, 538 aa, Micromonospora sp.
MADLRSIEEPFVALGPTGVAIHDRLKGLTAGDEEILRLVGAHLGSLAAKDLKVRCADRLEHSTDRWAARKRELTPGSSARWAGAITKATHDQWALARRCQLAHIGNLEAEVATIRHRLSLPVGQRGVKGVPGGYRSRQEWFAKSRRLHVLMERLGRERANREAGVVHVARGGKRLARNRHNLAQAGLTEAQWRERWTAQRWFLQADGESGKRYGNETIRVTADGEVSIRLPAPLVGLANAPHGRYALAAKVRFPHRGSEWVDRIEANRAVAYRIHFDPQRQRWYITASWQHAPTRTVPLEAALATGAIGVDTNADHIAAWRLDAHGNPVGNPRRFHYDLSGTADHRDAQLRHALTRLLNWAKVCGVEAVAIEDLDFEAEKTREKHGRRKRFRGLISGMPVSRLRARLTSMAEATGVAVVAVDPAYTSKWGAQHWQKPLISKKRKTTRHDAAAVAIGRRAQGHPIRRRTAPPPAHRSDGLGHRTVQAGSGVPEREGTRPRNSGPRTRSVRAGYGANAGDQRAQDRSGHAAEHAQLVLSS

SEQ ID NO: 21303 - protein, 364 aa, unknown
  TnpB Polypeptide
MNKSYNFRAMPNAEQRVLFAKTVGCVRFVYNRMLADKIAYYKETGKMLHNTPAQYKDEFPFLREVDSMALCNAQMQVQTAYKNFFRDKVIGFPKFRSKKSSRKAYTTNKIKGNIDIVGNCLKLPKMGLVRVKFHRQIPESHHIKSVTFSQNLSGKYFVSILTEYEADIPERTLNTDKALGLDYSSPHFYVDSQGVEADMPHFYRQVEQRLAMEQRKLSKMVKGSSNYQKQKRRIALVHEKVRNQRKDWQHKESRKLSDKWDIVCVENINYKGMSGSLRLGKATHDNGFGQFRTFLSYKLAEQGKKLITIDEWFPSSKLCHHCGYVNDGLTLSDRVWVCPSCGETILRDENAAINIRNAGIAQIA

SEQ ID NO: 21304 - protein, 268 aa, unknown
  TnpB Polypeptide
MRCYINNQNFRISDDCIGFPVIINGKSKRISVKTKISKRQKSIFSSSKLGTMRIVVKGHDLVAQIVYDAKEGAVSSNDNVMGVDLGIKCPAVSYCPDGSVKFYGNGRKNKYIRRHYNNLRKRFQKAKKPKAVVKINNKEQRIMKDIDHKLSREIVNTAKAHDISVIKLDRLQNIRSTTRTSRKNNHSLHTWSFYRLATFIEYKAKLAGIEVEYVDPAYTRQICPICGRIQHAKDRNYICRCGYQTHRDLLGAINICNSTEYIGNRYTA

SEQ ID NO: 21305 - protein, 398 aa, Streptomyces sp.
MAGSQVKRAFKYRFYPTDAQAAELSRTFGCVRKVYNLALAARTEAWARQERVNYNQTSAMLTEWKKTEELAYLNEVSSVPLQQALRHLQAAFAGFFGKRARYPRFKSRKKSRKSAEYTTSAFRYRDGELTLAKMDQPLDIVWSRPLPEGAVPSTVTVSQDSAGRWFVSMLCEDPSVRPLPATNTAVGIDMGLDHLLTLSTGEKIANPRHERKDRARLARAQRELSRKAQGEGANRAKARRKVARIHARITDRRRDHLHKLTTRLVRENQTLVIEDLTVRNMVRNRSLARAISDAAWSQFRSLLEYKAAWYGRDVIAVDRWFPSSKLCSHCGILQPEMPLSVRTWTCACGTTHDRDENAAKNLLAAGLAVSVCGAGVRPQRRTPGGQSATKQKTSQREP

SEQ ID NO: 21306 - protein, 375 aa, unknown
  TnpB Polypeptide
MLKTYKYRIYPTTKQKAAINSTIDLCRHLYNCGLEQRIKAYRQQRKNLNYYAQANELREIKEYLYGYKEVYSQVLQDVLKRLDKSYQNFFRRVKQGEKPGFPRFQGYNRYHSFTYPQPKDNMVPSGGKLYLPKIGKVKINLHRELPGKIKTITITKINGKYYTCFSVEVDSIKLTPANKQVGIDVGITSFVATSDGLIIEAPRTYRNTEKRLRTQQREVARRKKGSSRRRKSVQRLAKTHEKIANQRKDIAHKTARYLVNNYDLIAHEDLRIQNMVKNHHLAKSIQDSGWGLFFDILAYKAEEAGRKVVKVNPYNTSQICSSCGKVVKKSLAVRMHKCDCGLILDRDINAARNVLAIALKQGSDGAIGDSFAVAG

SEQ ID NO: 21307 - protein, 316 aa, Thermomonas sp.
VIGTVIRLPKVGEVAMTEALRFDGKILGATVSRTADRWCVAIQVEVPDHIFHRHRTGNGIVGVDLGVKAAMTLSSGETIAAPKPLKAALRRLKIRSRRVSRKVEAAKVAAGFAPNARLPKGTRLPISNNRRKSARTLARLHMRVANLRVDFIHKLTTRLCRENQAVVIEDLHVKGMLANDRLARAISDVGFGMIRSQMEYKANRYGTRLVIADRWYPSSRLCSVCGWKNEALTLSDRAWTCPECGTRHDRDLNAARNLERLATATALPVASPSSNGGTAAGRVPVVVGKVTPVRDECGQQATSGQEKNHAHLCAHS

SEQ ID NO: 21308 - protein, 305 aa, unknown
  TnpB Polypeptide
LKKQNENYKKVDSLALCAEYSNLVRGMELFYRGHSKLPKFKGRKDKNSYTTSQVNNNIRINKNKIRLPKLGFIKVRGMREIPCNFNIKRAIIFEDKKGKFYISIIFEYEESCNKRTIINSKVIGLDFKINNIFVSSDNFIPEFSTRFFYLLQDISKLQIKINKKNRFSKNYWKSINKLRNLHRKIVNIRSDTLNKLSSFLYKNYDLVIIEDISIQEIVFKLGNGKNTYNTGFMLFVKKLLYKFNEYLIKVNKWFPSSKKCSKCGKRKKKLKISQRIYRCKYCGLVIDRDLNAAINIKNEGIRILK

SEQ ID NO: 21309 - protein, 370 aa, Enterococcus sp.
MKVLKAYKYRLYPTLAQEEFIKKTFSCVRFVYNLLLQDRISLYKALKENPSLTVKLPTPAHYKKEHPFLKEVDSLALANAQVYLDRAFKKFHREKSVGFPKLKQKKDSVSSYTTNNQNGTIKIIDDKYVKVPKLKSVVKVKMHRPLKGKIKSATISLTPSHKYFISILCEEEVPSVAKTYSAIGITLGTSEFAVLSNGRRIDNDKYTKAFKQRIAREERKLTRRKEIAKLKGVELSQQKNYQKQKLKVAKMREKLMNQRTDFLNKITTEIVQKYDVICIEDIQQSDIYRNSKLHCGISDVSWAMFVSKLEYKATWYNKRLIKVSMCNECSEHSDNNKRSNLFIQDIDKQKGQCDPETAASIQVLNKGLSS

SEQ ID NO: 21310 - protein, 950 aa, Actinomadura sp.
MDVPVSVVRLPLVVPDEATRVRVERLFAAAWQVKRALRRDARARVDAYWAASARRTAPSAVPGEDAAEWREKLGLSREGLERAAYRHLDSSGHLKHHLSKAVAMHIADEVWAGVERHLFPNTAGRRHGRPRHGSWWKFTRIPGRARSHTQPRKWETFRLHGTLDGHLDTYRHPALPAGLTPAQVAALAGRPAPLGRAAARGRTGRRNIMRGHSVLAQPRRMPAPALPAVPGRSSWWEYQGPLALVYAGGPASGRGDLVLPVRLPQGAGQWPHLLHTLGDPGCWHKVDLVRRPTSHGWVYEAHLLILKPAYLSPGTRARRAAAPKDRRGGVDGNVSNLATVSFPVPADPVPPHETACAASTMLTLTPAERGDLARAARKAGSRQRAMERSRRAANAAQYELSRRQRKREKRRAERGLPARAVPVPGGARRARTNGIPLRSPRRDTLSRSHQRIRARHNRAAEQAAKVRAAHARDVAGALVGVHGPHLVIEDCDIRTWHRRWGAACARFTPGLLITALARECAATGGRLLRASTFTTALSQHCLCGRRTPKTLGDRVHRCDGEGGCGLQGDRDLVAAALAAFVHFGDLDDPRTARVDYTASRHAISVFGLSTGPQGALTASTDTLDIPARSGRPGTPATANSARPPRRRKWKNNPVASARRTRQRAVPTPDETPGKPGDHAGQTQPPTRLAGESITDLPHRPEERSVTTIDPNSPVPKYFQLRAILLDLIDGAELPVDAPIPSERELCTRYGLSRMTVRQGVDQLVTEGRLYRVPGKGTFVARPKLEMPLRLVSFTEDMLGRGLRPGAVDLDRRTVAADARLARLFDVEPGTRVHVVERLRTADGEPMALERAHILASLAPDLLDRRLADRSLYGVLEAVYGLVFDAGDQTIDAGLADAAEARHLQIPRGSAVLLLQRRSFINGVCAELGVSTYRADRYQIHTALGNPPSLP

SEQ ID NO: 21311 - protein, 379 aa, unknown
  TnpB Polypeptide
MAQMSITAKIQVVASDEDKTLLDETMSVYREACNYVSDYVFRTHDLKQFSLNKALYPTLRAEFGLKSQMTQSVFKTVIARYKTILENQKEWIKPSFKKPQYDLVWNRDYSLTQDRFSINTLGGRVKLPYFAEGMSKYFDRSIYRFGTAKLVNKHGKYFLHIPVTYDVEESNLSDICNVVGIDRGINFIVATYDSKHKSGFVRGRPIKQKRAHYSALRKELQMRHTPSSRRRLKRIGQRENRWMQNVNHCVSKALVVNNPAHTLFVLEDLSGIRHATERVKTKHRYVSVSWAFYDLEQKLIYKAKQNQSSVIKVNPRYTSQCCPVCGHTEKANRNKKIHLFTCKNCGYKSNDDRIGAMNLYCMGINYLYDSQVPDTVAAE

SEQ ID NO: 21312 - protein, 386 aa, unknown
  TnpB Polypeptide
MTRAYKYKLKPTVKQQKLFSQAFGNARFIYNWGLNRKKETWEKEHKNVTYIQLAKELTLLKKDGEHDWLKQCANVCLQQSLRNLDNAYTRFFKAKKGFPKFKSKKNSVDSVKYIAAVHFDFETMRVSVPCIGKVKFLKNCEFDVNTVKLGTLTVTKDKCGDYWCTIVVDDNKPNVSKTKICEEKTVGIDLGVKDYAILSDGTKYGNPKYLEAKQQQLAKAQQWLSRTQKNSKRHEKAKLYVAKLHRKIANRRNDFLHKLTTMLINGEYDTFCMENLNITGMTQNHNLAKSINSVAWNEFVRQLTYKCEWCGKNIVFIGRYEPSSKTCNKCGYIDKELKLSDREWICPICGEHHDRDVNAAINIKNMGLHPQALIGIEQKIEEINNK

SEQ ID NO: 21313 - protein, 375 aa, unknown
  TnpB Polypeptide
MIKAYKYKILPSEEQKQLLNKFFGCARYIYNWGLKIKTQTYKEYGKSISYNDLAKQLTVLKQQNETSFLCECANESLQQSLRNLENAFTGFFRKKSNYPNFKSKKKSRESAKFINCAHFDFENWKVKIPKMGWIKLCKNRTWNQDTSKQGTVTVSKDKCGTYWVSVVVDNQQSNNDKKTIITETTVGIDLGIKDYAILSDGTKYSNPKHLDKSQKMLAHWQKTFARTKQGSNRHEKARLQVAKCYRSITNQRNDFIHKLSTDLVRKHDTICLEDLNVKGIEQNHHLAKAISDAAWGEFVRQLTYKSEWYGKNIVFIGRYEPSSKLCHCCGYVNRELKLSDRQWACPVCGEHHDRDVNAAINVKRIALEKQNLIGL

SEQ ID NO: 21314 - protein, 418 aa, unknown
  TnpB Polypeptide
MILRTVKIRLYPNKEQEQTLNKVLGCYRFVYNQMLAHKQKAYNADKTNVGLCELSKFFHGELLKNEQYSWLKEQNTKVMKQAIRQMLSAYDGFFTLGKGFPKFKTKHNDNSALFPYEAISKTNTFKTKHISLTKNLKNLKFRCSNLYFNRLKTYKDNIKCATLSKTKSGKYYLSVLLSMNEEEFRQFRHTGNRVGIDLGVKDFVITSDGEVFENKHFFKKSENKIKKLQRQLSKKAKGSNNRNKARVKLAKEFERLNNQRIDYVHSVVNSLLENYDYVFMENLNVQGMLKNHKLSKAIQEVGFYAFKNTLKNKAILNNKFVIEVDRWFASSKTCHCCGYVYKGLTLDERLWDCPECGEHHDRDLNAAINILKEGERIIGSRTPEYTLAEKPTVDDRLSNEVLKSSVSLKQEMGTKNCS

SEQ ID NO: 21315 - protein, 471 aa, Gammaproteobacteria sp.
MVDLVTNRNCLYQTAYHVIWCPQYRRAALTGPIAAEVGTLLEAICGERGWPVISKEIQPDHIHLVVSIPPAIAVANAVKVLKGVSARHLLQRFPALKKRLWGGHLWSPSYYVGTAGTLSAADACNRLVPLVQAARCWNRVALHQLGYRALRQQTSLGAQMVCNAIFSVCKAYRSQGALGRIPQDTPVPPLSFHRTSVHFDHRTYTLKDETVSLNTLQGRMRVPMILGDHQRKILTSGLPKEAELVFRAGQWFFNLAVESADGERVASGPVMGVDVGENTLAATSTGRVWGGETLRHRRDQHLALRRRLQSNGSQSATQRLRQVSGKERRRVRHVNHETSKAILEEARRIGAATIVMEDLTHIRDRLRAGRRMRARLHRWAFRQLQGFLEYKARAIGISVVYVNPAYSSQTCSACGQLGTRRKHRFECSCGLRAHADLNASRNLARIGETAVSPRAVVNTPDVGCVACHASP

SEQ ID NO: 21316 - protein, 382 aa, unknown
  TnpB Polypeptide
MKTAYKFRMYPNRLQEAQLDLTLETCRHLYNTALADRKNAYETEGISRSYEDQAAMLTVERENGNFLGIYAHCLQDVLRRLDKSFKAFFRRVKAGENPGYPRFKGRGWYKSFTYPDSETGYKMEGSKLTLSKIGTIRIFKHREVEGKIKTCTIKKDLLGHWYAVLVAEIEDAPAVEPTTTAGVDVGLKSLITTSAGESIQYPRNYIQLEEKLAAAQRSLSRKKRGSANRLKAKAKVAKISKRIQNLRDEFLHQVSRKLVDSADIIVFENLNINGMLKNHHLAKHIQDHAWGKLIQFTQGKAAKAGKVVELVDARCTSQKCSQCGIMVPKTLADRVHLCPKCGLEMDRDLNASINIRTLGLRGRAYRDAANNQPVSDVGSPGI

SEQ ID NO: 21317 - protein, 317 aa, unknown
  TnpB Polypeptide
MVEAENQSYRLDRRSGMLRIPIRAGQHVVLSLPVSRWHEKYLTDPAWSLGALTVVPGRVIIAVRREAPNRYDPESAIALDMNEESLDEVFSDKNHAKLIRVPLKDIRTIQERHHRRRRSFSARKSHDHRVLSKLLAKEGVRERNRVDSRLHFASKRLVEFAAAKRAAIVLEKLTFHGAGGPSHNWKRRFTSWPRGRLRRLIEYKANAIGVPIIFIDPHYTSKTCPACGAQRRGRVGRMFECECGWRMDRQTNAGLNILKRALASNEALARAVRFQPDPLRHDVVISLYDLRVFREVARGESSEADLTKSLTEARQGN

SEQ ID NO: 21318 - protein, 469 aa, Desulfurococcales sp.
MTRVTRTVIVKSVKLSRKVFHTFIELKGMYRNIVKQLVLYAVSNSVKSFTKLKALKYRDTRNLYPQLPTHYIYTACQDASIRAKSFLRLKKLGLVEREYPEVRKISIWLDDHLWKPNGLTSIKIATHKGWIIVELEPHKHYWRYINRGWRLASEAKIKLDKRNRQLIIYLTFVKEAGEYEPRGYLSVDVNENNVTALVDGVAYLFETNQEKLVLGYHYRRKRIQEKYDRLYGKKSRIKRRIMKKLKERKKKSDIKWKIANIIVRVAHEKQYAIVLEKLGKRVANSMISRIMDRQLRHRIFQASFRAIQRAIEEKAREYGVSVIYVYPKNTSRLCPIHNAPISYSNGSRIGRCSKGNEIWHRDVVACWNLLFKALRADGSNAPSPVGLTPLDVRLIPLASKATHDPIGIPKSLWARQKSLPQTLYDTTLNSNEAVGTNGLGLEPGVHEGWRGNLPARPQRPYPQLHPHGH

SEQ ID NO: 21319 - protein, 221 aa, unknown
  TnpB Polypeptide
VSVYVEQPEQVSPQLKDIGLGIDLGVKDFAVISNGIVKKNINKTAKLKKVEKQLKREQRCLSRKYESLKKRNKNEGGKATRQNIREQVVKVQGLHHKIENIRTDYINKSVNEMVKTKPSYITIEDLNISGMMKNRHLSKAVASQKFYEFRAKLGAKCREYGIELRIVDRWYASSKFCHECGCIKKDLKLSDREYVCECGYHADRDYHASLNLRDAISYKVA

SEQ ID NO: 21320 - protein, 325 aa, unknown
  TnpB Polypeptide
MYAIKLELKLNNRERTLMARHSGYARFCYNYALALYQGVKDIQGSSKKVAAIERVFTNHVKKLPEYQWTNTLSSRVYKTTFRHFGTALSRSFQGLGKFPKFKRKKDGDSFTVDAADWNHAILLKPQKSIKIPTLGNFRLKEAIGFPCMAQTFTVSRTADKWFVSFTIKAQKMPPLSHPIVATVGLDLGVSTFATLSDGNCYESPRPLKTAKTKLSKEQWRNRNKQLGHKRLGVKASNNARKHYRRIAKIHAKIANQRRDFLQKTTTEISRKYAHIRIEDLNVRGMIANHKLAATISDCGFYEFRRELEYTAVPAVMRYTQLILNI

SEQ ID NO: 21321 - protein, 429 aa, Anaerolineae sp.
MDMLTRRITFRLYPTDSQAATLYQWRKLHQLLYNAAISNRKTQYQNFGHSVNYFEQQNSLPDFKEVWPEYKALGSHALQATLKRVDFAFQRFFKGLGGCPKFKSIRHFSGWTYPCIAGWKADSDGGNGYLNLSKLGRVQMRGQARTWGTPTTCTIVYRHEKWYASITVQCEPQRTTGSGAVGIDLGCKDAITLSTGEKIAKPAFIKAGQAKVKAVSKNLRRKRAPNCTKKIKASRRWKSERKIVSKLQRKVARQREDWLHKQTSIIVSSNSLVGGEQLNVKGMTSKAKKGKRKAQKAGLNRSILEVGFGMIGQMLSYKLAEAGGFYIEAPTRQLKSTQRCVKCWELTPKTLSDRMHICSNPKCGHIEDRDINAAQVNLVWAQGAGTVLLDAESTSSTKCGSMRQLGAKKRQKRTTFPDGENPNSACGGE

SEQ ID NO: 21322 - protein, 315 aa, unknown
  TnpB Polypeptide
VLPGRKRVQLPRIGVVKTHESTRKLARRLEQGTARIVAATISRRADRWFVSFIVEVQRAIPTTNGKPSVVGVDVGVRHLAVLSTGQIIPNPRALERSLRKLRRLNRQLARRPPGSKRRNRTRRRMARVHARAANLRQDALHKLTTSVATQHGTVVVEQLNVAGLLRNRRLARAIADTGMAEPRRLLAYKTGWYGSRLVVADPFFPSSRTCSGCGWVKAKLTLAERTFTCEACGLVMDRDLNAARNLAKLVELIMAAGSGPEALNARGADRKPQPAGQVAVKREAGTGSRPGKTGAVDAQALTARTSTPGNGRLAL

SEQ ID NO: 21323 - protein, 604 aa, Rhodococcus sp.
MADTGFTALRQFSFTTRPYLAVDHETGEPIGRGDLDVRVGWLLDLISGAEAHLLARLWQPATFDVLAAGCDSHGRTLPMQGHVAAARLGWTPHYPDGVYVPSRVTRVVTAQAVGTLRALAYRDTAIIALSARFDPATGRIAAPTTAAEYVPSGFARGVVRQLTARARAAAGAADSADARLRITDVQAPPKVSAMARLSAADRQLSHLTVTGAVMTLTVKLPTAAAPAGRAQWRRVRLTAAIPPHLHRRPISEWHLPTLHLDHRGLLLRCAATEAVPAADLTSGTTAVGVDWSPATLGAAAITTQTPEGLVSDYRGFTYDDRGLGIKLARLQTEGQLLHAKAARLRRLATTAPPEVRAGLETKIVVLDEHRTAVGVKRAKINREMAFHFGCQVTGLAAAAGASVIAVEDLTTLETRGHGRVNNNRAAQSARRQAVDALTHTAAGVGVTVVSVPARGSSALCPGCNEPLSRPGGYHRAWCEQCKIGGNRDHVAAVNLAKRALLGREKAVRKRGRNPQIRVIEHAPVRRCRDKMCPTPRRPRHRRVRRSAPATTPRVGVNQTKTVPAPQASVWDTVKPATPQGVTGSREEHTSPTPATSVAGNTRSM

SEQ ID NO: 21324 - protein, 499 aa, Rhodococcus sp.
MLGRKNYTQDEVDHAEQSVAQQIAAYTALTAAISGEVTGKEVFAASEDFEPLFFNNMVLVLDRYFVHRIRAVTGKDGNPLNEVEIIADSLIRESFGAIPVLQVRDSRSGLSDGVASVWVMAGRVVKRAFKYRFYPTAVQAEQLARTFGCTRYVYNRALAERSRAWSQERRRVSYADTSKMLTGWKRDTETAWLSEPSKGPLQELLRQLQGAFDRFWRKQSRYPQFKRKDHSKDSATYYSSCFTYRGGQLRLAKQSEPLDIRWSRPLPEGAVPSQVTVSRNARGRYHISILVEDTITEPPPTDRVVGLDAGITSLYTLSTGEKITNPRHERKDRERLAKAQRVLARKEKGSRNRAKARLKVAKIHGRIADRRRDYLHTLSTRLVRENQVIAVEDLSVRNMVRNRSLSRAISDASWSEFRSMLEYKADWYGRRVVAIDRFYPSSKMCSVCGSIASTMPLDVREWACRCGVVHDRDVNAAKNIVAVGLTVAACGDGVRPPRT

SEQ ID NO: 21325 - protein, 404 aa, unknown
  TnpB Polypeptide
LLTHPYRTSASNLARALDNFGKSKSGKRAGAAVGFPRSKKRSTAKLSINFENRARLSTDSAGVVVPRIGRIHLLGDVTGLRRDLAAGGKINSTTISYRGGRWQASFQIFAPVPVKHRHRANTTRRQPIVGVDVGVRDTVVAATPDGREVMRIPAPRHLKAAATTMARLQRKAARQVGPYDAATRRRQTPSAGWRKTQADISRLHAWTADLRANHLHHITAALAARFEKVVIEDLNIRGMMAKPAPRPDDAGGFERNGRAAKRGLSRSIADASLGELHRQLDYKVSWAGGQLARVDRFFPSSKTCSNCGVVKAKLLLSARVYSCDDCGRSLDRDLNAAINMARHTAGHPHAVSGPGSGLVSGRGAHSRPSGQHRPNDTATPTEIRGLLRRKAQTVSSTRQKYQVA

SEQ ID NO: 21326 - protein, 496 aa, unknown
  TnpB Polypeptide
MAELATEIQNISAYATYVVRNDEALESELAHVKATIPAEAGRRAGVNMPDFLETGRVGRSRKERLVRYNVVASFRSWQERAKAANGESSKYVSLGWKRTANATAPSYGEDTINLGAVDRSYATIENNPFTDGEIVLKMVIRGAWYYLIFNFDNRRFTEGKVTLPLIKVEDNQPVFIFSVVTDNPIVQFSGDYTIGVDVGINDYATVVVRNAKTGKITYQTTLSQRVHSLWNSIRASERQVKQLRKKATRILQDSLYERQAIMAARDEADLHRKAASRKKRELAIIAAQEIAYLSHQFNNAVVAVEDLSWISDTMRNGYWNRGAFTQWLTHYVSQNGGWVVSVSAAHTSQVCHVCGEEVKHPEYQVSRCLEHGVMDRDVNAAANIAARAVPKVEKACKKRSKNSKLQPQAPLKTPVTRCSLKYPGRDRSKHVPTPKRKSHPRNVKGVTLPISPARAQAHRLEASVLADCGTYGVPETSKAAIEQGNMTYTCRLYNPI

SEQ ID NO: 21327 - protein, 418 aa, Halothece sp.
MLSLNYQFKLKVNKKQASAIDEWLDICKSVYNFALRERKDWVNSRKCPIDRCSIESEYIIPADSARPTYANQCKGLGEAKKKFPRLSIPQSQVLQQTLKVLDEAFANMWKRGFGFPRFKKKMRSFVLPQVKPDCIQGKTITLPKLGKLKLVISRPIPEGFIPKQVRVIKKASGYYVNINLQLDVDVPDVPPHGYPIGIDLGLEKFLATSEGELIKGHKFLKKYGAYKHLGKPQMTAPPEGKLKSLQGQLKNKKKGSRRWRDISRRIARLYEKITNCRKDFFYKTAHYLCNQAGMIFVEDLNLKALGRSALRKACLDAAWGTFVGILSYVCWKRDVYFAKVNANGTSQICPECGVNCGKKTLSERVHKCPDCGYEQDRDVAAAMVVKKRGESTLGARGRMLAQGNDVGDGVSTLSSVTQ

SEQ ID NO: 21328 - protein, 428 aa, Advenella sp.
MVGMDSTGSKGHHFLARFSVSTILNPMQRLQAYRFELMPNGQQQRAMRSFAGSCRYVYNQALHLQQERYKAGEKKLGYAGLCKVLTAWKKQAETDWLNNTPSQALQQALKDLERAYKNFFEKRAEFPRFRKKGRADSFRYPQGIQLEQGNNRIFLPKLGWVRYRNSRNVQGQVKNVTVSQSAGKWFVSIQTEREVDQPLPKATTAIGIDMGIARFATLSDGSYIAPLNRFKQHQVRLARYQRAMSRKVTFSSNWKKARAKIQKLHTGIANARKDFLHKASSQISQNHAMIVIEDLPIRNMSRSASGTRERPGCNVKAKSGLNRSILDQGWGEFRRQLEYKTAWNGGWLIAVPPQHTSQTCPACGHVSKDNRQTQARFHCVQCSFEDHADKIGAINILRAGHARFACEVSDAVRSPAAGTHRGELASVG

SEQ ID NO: 21329 - protein, 446 aa, unknown
  TnpB Polypeptide
MQLSHKIALCPTPEQVDYFKRACGTARRVWNWALAEWDKQYAAGGRPNAMALKKQFNAIKYTDPQWLDENGRPWLQDIHRDAHAQPFRNLAKAWERFFADLKEGKEAHEPRLKKKGRCRDSFYVANDKFTLEGKTIRLPRIGEVAMTEELRFAGKILGATVSRTADRWFVSVQVEVPDAQFYRRRASHEVNGVDLGIKAAATISSGEVVKAPKPLKVALRRLKIRSRRVSRKLEAAKEAAGFGRHALLPKGTRLPVSNNRQKSAATLARLHARIANIRADFIHKLTTRLCRENQALVIEDLNVKGMLENEKLARSISDVGFGMFRSQMEYKATRYRTRLVIADRWYPSSRLCSVCGWKNEALTLQDREWVCVECGTHHDRDLNAALNLKRLATETALPVASPSSNGGAASGTVPAVVGKVTPVRYECCLQEASGQEKNCAHLRALS

SEQ ID NO: 21330 - protein, 306 aa, Borreliella sp.
LRIVIFLEKLKKEIECKDLPKYKSNKNRQTYRTNNQKNSIRIENGYIKLPKIGFVKLCLHRCIKDNELIKNVVVEKDTDDKYYISITVECLDTKNNNETKGDKKEIVGIDMSMKHFLVSSGGEKINHPKYLLKNENKLKKYQRKLSKKQKGSINRAKSRLRVAKLHKKISNQRKDFLHKLSYYFVSNYKSIVIENLSIKGMQKGMFGKSINDLGWSEFVRQLSYKSEWYGSDLYKVDRYFPSSKLCSSCHIKNTTLRLSDTRWTCSSCNTLHDRDINAALNLKAYYYKEIKTKAGTALGKACGPCS

SEQ ID NO: 21331 - protein, 339 aa, unknown
  TnpB Polypeptide
MLLTFKLRHNRDLGAELAKARKVAEYAMEHRSRSSADVKHIGLKSAIANQILRKYGNDRRARTVKNVVLIVPGQGIKYDLRTRIIRIPCLKLELDAHFLPWFEKVNQIELDHEFAFVTVTINEPPLMEVKEWIGIDRNTTGHVVVVSNPETGKVWKMGKECKHIHDKYKNIRRRMQKQGRYKEVKELRNRENRIVRDINHKMSKKVVDIAVHNACGIKMEQLDGIRNNRKQASSFRYSLHSWSFYQLQTMIEYKAKLLGVPVVYVAPQYTSQECSRCGLLGHRDGKDFSCPHCGHVDHADVNASFNIALRPSFEESVGRFGTDRDVPKGRIDTPQEATL

SEQ ID NO: 21332 - protein, 314 aa, Clostridia sp.
MLEIVSKNNDLYNVLDTEDGVVESCSFLDIISAMQTGVDINGVSLVSDEYVFEIDGLKAHKVMKGYKFRLYPNKKQQTYFQKCFGCCRFLWNHMLADKIAYYDEYKESLDTQPPVYKADFPFLKQVDSLALTSEYRDLNAAFKNFFRDTSVGYPKFKKKHDRHKSYTTYNQKGSVSIVNKHVKLPKIGYVKMKQSQTILGSIKNATVSQVPSGKYYISFNVEIWVQTLPYIDKELGLDLGIKELLITSDKEHFENPKTLYKYEKQLAKLQRQLAHKKKFSNNWYKQKHKIALLHEKITNIRKDNLHKISHKLVM

SEQ ID NO: 21333 - protein, 278 aa, Streptomyces sp.
VEANRAVAYRIHYDVARGRWYVTASWQIPVSRTIPMAAALAHGVIGVDTNADHLAAWRLDTHGNPTGNPRRFFYDLSGTAQHRDAQVRHALTRLLNWAKTCGVKAIAVEDLDFQAEKTREKHGRKRRFRQLISGMPTGKLRARLTSMADATGIAIIADPAYTSKWGAQHWQQPMAGPTRKTTRHDAASIAIGRRAQGHPIRRRTTPPRAHQSDALGHRTVQADRRALGREEPRPRTPGPRTRSVPPDAASTRATRTSKTVRDVRSDQEWVQDSLLLTD

SEQ ID NO: 21334 - protein, 442 aa, unknown
  TnpB Polypeptide
MPDFLVSGKSGRSRKEWLVQYNAVTACRSYQERVKAANGESSKYVSQGWKRTANGSAPSYGEDYVNLGAVDKQYAAIENNPFADGEIILRMVIQGAWYRLIFNFDNARFTEGRVTLPVIKVQDGEPVFIFTVVTDNPVVQFSGDYTIGVDVGINNYATVVVRDTKTGRIAHETTLSQRVHSLWNSARASQRQVHDLRKKAATLLHDRQARMAALDEAQFHREAASRKKRELAILAAQEIADLSHAWGNAVIAVEDLSWVRNTMRNGRWNRGELVKWLTHYVSQNGGWVVAVNPANTSQQCYKCGSKVAHPTHELSVCAEHGTMDRDVNAAANIAARAVPRVAKARVTRAKNRKLQPQAPLKTPVTRNSLKYPGRDRTKSKPTPKRKNHRRASEGVILPSCPARAQAYSLEASVLADQGACNTPGTIQAALKQGCVTYNCMLL

SEQ ID NO: 21335 - protein, 434 aa, unknown
  TnpB Polypeptide
MFEAVKVALDPTPSQERRLLSHAGAARFAYNAGLARVKAALDAGEVLDWSFFALVNWWNSCKDELAVGGDGEPWWPENSKEAYSYGVRPLASALSNWSKSRRGDRKGRKVGFPKFKAKGRAVSRFSYTTGSFGLVKGDPKALKLPRIGRVHCMEDVASRVGDGRVLRMTISQRAGRWFASLTVEREDKPVAKHPKGGAVGVDLGVKHLATLSDGTVIENPRPLKKSERKLKRAQQALSRKAKGSNRRAKARVKVARIHAHVANQRLDAMHKLTTRLTSKYSDISIEDLHVAGMVKNHHLAKSISDAAFGEFRRQLEYKTARSGARLHVVDRWYRSSKTCSGCGSVKAKLSLSERTYRCDSCGLVMDRDLNAAINIQVAGSAPETLNAHGETVRRSDRSSGHRTRVSVKCEPSVRESAVRLGADSRKAVLQTAAR

SEQ ID NO: 21336 - protein, 517 aa, unknown
  TnpB Polypeptide
MSDEEYKKLLKQYHKLSDRHILVVETDMPYPDVLKVVALSDKIRKAGNELVSLMRKNYDQLMRTKKYRKLLKLYGNTEDKDKRKALADQLNDMQKSYNVTWDLCRTSMIPIGKKYSIDAVFALTKAEDIWRGMEKCLYDNGKTTHFSKYGELPCIRAKQINRGIPMFVEDGKLRFKLRKMQFGIQVNDRFQSDEVNAVLSYLENPDKMDADAVNTLIEEACCIDTYRPCYATLVPRLIRGKYRVYLHLTIEGKAKPKYDRSGNPRHKYGKGMIGADIGTQTVAYTSDTEVGLKNLSERGNSIQTSERKERLYYRAMDRSRRATNPQNYNPDGTIKKGKKTWKYSDRYKKLKAKHGLYFAKGKEQVKQHRLKEPDKSKYEIYTAVKNEIGKSRNWQQLQQRLAEMGIAIQFKYKGQTSEIQGISISKGEYTFKGSEIDRSFSFSKLDKCFGDAGMNVAESQRQTTFAPVREQAPAPSKADSPLITGSLGLFSASSPPVDEEPNFNLRKKKKKKKQLKL

SEQ ID NO: 21337 - protein, 386 aa, unknown
  TnpB Polypeptide
MKSATKVRLYPTDEQAAFLNAQFGAVRFAYNKALHISRYMYQRHGVSLRPARDIKPLLAVAKKSRRYSWLKEYDSLALQQAVINLDRAFANFFQKRAKLPTFKSKRGRQSSYHPNGKVLTDAIRLPKIPPVRAKIHREIVGRVSSITITRNAAGKYYASILADDGQEAAAKPTYITAVTGYDLGLSHYLIASNGGKVANPRHLINAYRRLRRDSKALSRKKLGSANRHKARLRLAAQHERVASARADFQHKLSRRIIDENQAVIVETLKSANMMKNRRLARHIGDAAWSGFVAKLAYKAESAGVHLVKLDQWFASSKTCHCCGHRMPEMSLKVREWKCPGCNAAHDRDINAAFNIRHKGITELMAAGLVVKAYRGLRKSGAMLVAA

SEQ ID NO: 21338 - protein, 357 aa, unknown
  TnpB Polypeptide
MKRACKVSLRFVTASKQRQISALLQSYRSAVNHYIKILWKFNRKRNAGTLALLKGSRLSERYKQAALKQALDMVIATKKSAKAIGKPCSVPVFKGKAVLDSRHVVVEDGEHAFDLIVKLSTLKSGNRTIIPTKHTTMTRKWLTKPNAKFIQGCALSESSLTLWVEIPVQSDKQDGRVVGVDMGVNNLMADSDGNFYGKDFKSISNKIRRKKPKSKAKQGAIKERDNFIGRAVNQLPWSKLKAIGVEDLTGIKTGKKKGRGRQFRKAMAPWIVRQVVNRISNKASENRVRLIKVDPVNTSRTCPICGGVSKENRKGELFQCIACGYKGDADHIGALNVLAKTFVTLGSLQSPRQRKVA

SEQ ID NO: 21339 - protein, 411 aa, Microcoleus sp.
LQHQAIKVRIYPTSGQEQQLAQAFGCSRWWWNFALHQSIETYKETGKGIGQIALNALLPKLKKQEETSWLADCYSQVLQATTLNLVTAYKNFFEGRARFPRFKSKKGKQSIQYSQNVKILANNKIKIPGGIGEVRAKIHRPIDGKVKTVTVSKTLTGKYFVSILAQTEGERPLTSTEGKVIGIDLGVQDFAVTHNGEKVSKYNNPKHLAKSEKNLKRKQQKLARKKDDSNSRLKAKKIVAKVYERVSNARQDFLHKLSRKLVNENQVVVVENRPVTGMVRNHKLAKAISDCGWSMFTNFVAYKLERKGGKLVEINRWFPSSNLCSNCFYQMDEMPLNVRDWTCPHCGTQHDRDGNAAANIRAEGIRMLQTDGTAVSAVGGEVRPKSGRKSVLRHSPVNTEAPTIPLAVGGG

SEQ ID NO: 21340 - protein, 197 aa, Hydrococcus sp.
MKQLVLTIVCKLNPSPEQKSKIDATLKAFADACNYINEVVAPKITNNVRIQTLVYDDVRTKFGLSANLAIRAINRVAGNRKTAKKDNKPVQSFKPTSADYDARIFAFREKDWTASLTLVGGRERFELQVGNYQIGKLKGQKPTSATLAKRRNGTYTLNIQVKSDVPMAKATDKMLGCDLGRSDIAIAVREIIGRENK

SEQ ID NO: 21341 - protein, 376 aa, Rahnella sp.
MKRAYKYRFYPSPDQAELLTQTFGCVRFVYNSVLQWRSDAFKNHQEKIGYADASAYLTSLKKSPDLVWLNDVSCVPLQQSLRHQQTAFKNFFQGNSSYPSFKSKRHKQSAEFTASAFKYVDGKLYIAKSKIPLNIHWSRSLPSTPSTVTISKDAVGRYFVSCFCEFEPASLPITASTVGIDVGLKDLFVTDSGFKSGNPRYTAKYAARLGLLQRRLSKKMNGSKNRSKARLKVARIYAKIADCRMDALHKATRKLINENQVVCVESLKVKNMIRNRTLSKAIADASWGEFVRQLTYKAEWAGRSMVAIDQFFPSSKLCSCCGFTMKKMPLNVRMWKCPECGAEHDRDINAARNIKAAGLAVLAHGESVNPKPLIAA

SEQ ID NO: 21342 - protein, 377 aa, Erysipelothrix sp.
MKRAYRFRIYPNQEQIIFFAKTFGCVRKTYNLMLEERLQMNEDYRNGLPTNDKIPTPAKYKEDYPYLKEVDSLALANAQLNLDRAFKNCYRDPKVGEPKYKSRKMEQSYTTNNQKGTISIKDHKYLKLPKLKSLVRIKMHRHPKGDIKSATISRSTTGIYHVSLLVEETIEHLPKTGSEVGIDLGLIAFAVLSDGTQIPNPRFTNQEAQTLKREQRKLSKRKREAKKRGVPLSEAKNYQKQKLKVARIHEKIANRRNDFLNKVSKELIENHDVLCIETLKVKEMMKTKRVSKSIADVSWSQFVAKLEYKADWYGKKVIKIDSWYPSSQLCSHCGHNDGKKPMEIRQWECSNCNITHDRDLNASINILNEGLRLSHQS

SEQ ID NO: 21343 - protein, 524 aa, Massilia sp.
  misc_feature (440)..(440): Xaa can be any naturally occurring amino acid
MLLAHRIRLEPSLDQRDYFTRAAGTARRVWNWALAEWHRQVALGLRPNAMALKKRFNSIKYTDPDWLDEDGQPWLRTIHRDAHAQPFANLARAWACYFEQRRAGQPAHQPRFKKKGRCRDSFYLANDKFRMEGMAVVLPKLGRVLLREPLRWPGKIMGASVSRQVDHWYLSVQVEVPEQLAMRSRSGDAVIGVDLGVTAAATLSSGEKIAAPRPLKTALRRLRIRSRRQSRKLEAAKQASGITGPMPKGSRLPASKNRTKGALSLARLHERIARVRADFMHKLTTRLCRENQAVVIEDLNVRGMLANHKLARAIADVGFHEIRRQLQYKSARYGTRIVLADRWYPSSKLCSGCGARNGELTLGERGWTCAACGICHDRDVNAAVNLQRLATGAFAARTALPEASQAVTPGTAAGTVPAAGGKVTPVRHEHGQQDGSGQEXSFDRASRTSTRAGAAWRSIWRAMSLRLAGEKMRFSRSRIGGASVSTASPLRSAFICRARPTQARIMMTAKGRAAIRVAPIQGLA

SEQ ID NO: 21344 - protein, 369 aa, unknown
  TnpB Polypeptide
MLLAHKIELRPTEEQKEYLNKACGTVRHCYNQLLEHFSKKETPFSLQAANAFYREIRAAFEWYSEISYHISQNAVQDLNNAFSHFFRRVRLGQNPGFPKFKAKDIRESFSLRSPTRFGVFGRSLRIEKLKTRIDMRQPIRLQGKLKQVTISKRAGMYFASFLIDTEDYVQDYPNRQESVGVDLGIKTLATLSTGETFPNSRPLQKNLRKLKKLQRNLARKKKESNRYARAKLKIQKLHFSIARQRAAIAHQLSNYLTKTFDRIVIEDLNVKGMIKNRKLSRAISDVGFGMLRHFIEYKAKLRKCIVVIAGRFFPSSKTCSNCGTKKQNLTLADRIFSCDCGLVIDRDLNAAITLNNYGRDQCQRDLKRT

SEQ ID NO: 21345 - protein, 402 aa, Escherichia sp.
VKRLQAFKFQLRPGGQQECEMRRFAGACRFVFNRALARQNENHEAGNKYIPYGKMASWLVEWKNATETQWLKDSPSQPLQQSLKDLERAYKNFFQNRAAFPRFKKRGQNDAFRYPQGVKLDQENSRIFLPKLGWMRYRNSRQVTGVVKNVTVSQSSGKWYISIQTESEVSTPVHPSASMVGLDAGVAKLATLSDGTVFEPVNSLQKNQKKLARLQRQLSRKVKFSNNWQKQKCKIQRLHSRIANIRRDYLHKVTTTVSKNHAMIVIEDLKVSNMSKSAAGTVSQPGRNVRAKSGLNRSILGQGWYEMRRQLEYKQLWSGGQVLAVPPAYTSQRCACCGHTAKENRLSQSKFRCQVCGYTANADVNGARNILAAGHAVLACGEMVQSGRPLKQEPTEMIQATA

SEQ ID NO: 21346 - protein, 387 aa, unknown
  TnpB Polypeptide
MHKVKRRFRFYPTPAQKTALAQVFGCARFVYNTGLEWRKAEFEAGRKPSYNKSSAWLTMFKREHEFLNGVSCVPLQQGLRHLQTSYQRFFKKQAGFPSFKSRDNRQSCEFTQRAFTFKNGQLSLAKIGGLDVVWSMPLASKPSTVTVIKEPSGKYFVTLTLLEADKALPPSNASVGIDLGIETFVTLSTGEKFKQPAKIRKLRRKLAALQRSHSRKQKGSKHREKARVKVARLHEHIASIRNDFLQKLSTKLVRENQTVVLEDLYTKGMMRNRKLARVIGEQGWRQFRDMLKYKCEWYGRKLELCSRWLPSSKTCSACGEKTKLALSDRVWTCACGAVHDRDVNAAINILAAGLAASARGGSVRPARTYVLKARPAKRETLLKAGTS

SEQ ID NO: 21347 - protein, 326 aa, Microcystis sp.
MPPYRTIPSNEKPHLQTAFTNFFAGRTKYPNFKKKHQGGSAEFTKSAFKFKDKQIYLAKCTEPLPIRWSRQIPESCEPSTVTVRLHPSGRWHISIRFDDPTIKPLPVTDKAIGIDLGISSLVITSDGDKVSNLKHFKRHYRRLRKAQKSLSRKQKGSKNREKARIKVAKIHAQITDNRKDHLHKLTTQLVRENQTIVVENLAVKNMVKNPKLSQAISDVSWGEITRQLAYKCRWYGRNYIEIDRWFPSSKRCSNCGHIAEKMPLNIREWDCPDCGTHHDRDINASKNILAAGLAVSVCRATIRPEQSKSVKAGAKNPSGQKQKLKS

SEQ ID NO: 21348 - protein, 175 aa, Microcystis sp.
  misc_feature (175)..(175): Xaa can be any naturally occurring amino acid
VEKQEELDFLNEVSCVPLQQGLRHLQTAFTNFFAGRTKYPNFKKKHQGGSAEFTKSAFKIKDKQIYLAKCTEPLPIRWSRQIPESCEPSTVTVRLHPSGRWHISIRFDDPTIKPLPVTDKAIGIDLGISSLVITSDGDKVSNPKHFKKHYRRLRRASKNLSRKQKGSKNREKAKX

SEQ ID NO: 21349 - protein, 385 aa, Methanoculleus sp.
MLRAYKYRMYPTQTQIPLLMSHIHACRFVYNRSLEQKIRAYEQNGKRLSCFDLNNQLPALKAEYPWLADVNSQSLQYANRNLDNAFTRFFREKKGFPKFKSKKNPVQSFQVPQHYRVDFESNRVKLPKIGDVKTMLHRVFAGKMKYATVSVTSTGKWFISILVDDEQPEPTPVSFTSDMTIGIDVGLTDFATFSTGEKVANPRYLKNSLQRLKVLQRRVSRKVKGSKNRQKAIRKLATGHEKVANQRNDFLHKLSYQVVSENQAIAVESLNVAGMQKNHKLARSINDVSWSTFFTMLNYKCRKYGKTLLTIGRFDPSSKICSCCGYRNRDLKLSDREWICSDCGTVHDRDINAAINIKKFAVQEQNLVGVLTGAERAIEPVDLPQ

SEQ ID NO: 21350 - protein, 410 aa, unknown
  TnpB Polypeptide
MNCFFLFFIKYYGIIKTIKDKDRGVDIMNTKTIKRAYKLRIYPTLEQISFFVRSFGCVRKVYNLMLEDRKKAYEEYKSTEIKIKYPTPAKYKEKYPYLKEVDSLALANAQLNLEKAFKNFLKNKDFGFPRYKCKSNPVQSYTTNNQNTIYIDKGYIKLPKLKSLVKVKMHREIKGVIKSVTVSRNSINHYFVSVLCQEEITELPKSNKNIGIDLGIKEFAVMSDNTKVENLKLINKYEVKLKREQRKLSKRKEIVKISNKKLSDSKNYQKQKKKIAKIHNKIRNKRKDFINKLSTDIINNHDIICIEDLNIKGMLKNHKLARSISDVSWNAFVRQLEYKANWYGRKIVRVPRFYPSSKTCSCCGNVKETLKLSERIYHCECCGLEIDRDYNASINILRKGLEILKEEKIS

SEQ ID NO: 21351 - protein, 386 aa, unknown
  TnpB Polypeptide
MYKAIKIEIKLTEEQKIQVNKTIGVERFIYNEYIKYNQEQYKLNNNFISAFDFSKYINNIYLPNNPDKKWIKDVSSKSVKQAMICGEKAFKNFFKGLSSFPVFKKKGKKELGAYFVKNNKKDFEFYRHKIKIPTLKYVKLKEYGYIPNNANIKSGTISKIADRYFLSLVIKSEDTIKVTNTNTKGLGIDLGIKDTAICSNGMVFKNINKTKKVQKIKKKLKREHRKMSRSIEYSKFNKIKLKECKNFNKKKSTVQRLFYRLNCIRDDYNNKMIDKITRTKLKYITIEDLKVSNMMKNRHLSKAIQEQNFYSIRTKLINKCRERNIELRLVDTFYPSSKTCSCCGNIKKNLKLNDRIYKCNNCGLEIDRDYNASINLEKSEIYKVIA

SEQ ID NO: 21352 - protein, 396 aa, unknown
  TnpB Polypeptide
MNRPTFLRSLCLNSLAVVMQRTVKLTLPSDEVLVKTIKFYNEVCNEVLKVAFEARTHSKSRVHRLTYRGIRQKYPSLQSSMVQCLRDQACDMLKREKLERLPQKKPYSSIRYNQRIFKPYLQKGIVSLSTIEGRVKIAVSIPRCYEQYIDWQVKSATLSYDVRLQKLRLHLVVKKETPQKLERNSVLGVDSGILNRAVLSNNVFFASNHIRAVKGSYQFLRQTLQALGTRSAKRLLRKRSGREKRFQADVNHRIAKLVVAQPFNVIALEKLEVKKVKKNGKRFNRKLGNWAWRQLQRHVEYKAEALGKTVVYVNPAYTSKTCSRCGQIGTRKGLVFKCKHCGFQLNADLNAARNIALRGKLLLEQASVNEPNAPLQHASQPKAEATCKPPLSRGGS

SEQ ID NO: 21353 - protein, 391 aa, unknown
  TnpB Polypeptide
MIQLAHKVELDPTQAQARYFAQACGVARFSYNWALAEWQSQYQAGKKPSEAALRRKLNSLKVASFPWMSDVTKCAPQQAIKNLGSAFKRFFKKKGVHDSFRTDNGPRDKQSSAVQIVGREVTLPRIGRVKMKEGLRLVGRVISCTVSRVAHKWFASFQVEIDHKIPLRESQATVGVDLGVKTMATLSDGTSFDNPKALRSNLKKLQRLSRSLSRKQKDSANRKKARMELARLHYQISCIRKDALHKLTSYLTKTFTVIGIEDLNVRGMVKNRKLSRAISDVGFYEFRRQLEYKAVLYGVRVVVADRWFPSSKTCSECGEVKPSLELSERIWLCACGAKHDRDVNAAINLKGMAESSSVTACGEPSSGLSHKALVKLNSTKQEPGESYVGPA

SEQ ID NO: 21354 - protein, 405 aa, Caldicellulosiruptor sp.
MYKTQKNHIRCDKKTYKILRKLCHFSKNLYNFALYHIRQHYFQTHKHLRYESVYHIAKGNENYMLLPSQVAQQTLISVDESFKSFLSLLKAKKEGKVKEKVLMPRYLPKDGMYQIVFPKDQFKIEDRKVRLSLGRSFSKEFGVRYLYFDLPKNIAGKKIKEVRIIPRYHGKWFEIEYVYEEKEQDCKLDKSRILAIDLGLNNFAALTDTIGTAFLIEGRFLKSVNRWYNKEKARLQSVYSKQGIKYGSKLAQISLKRQHIVENFLNQAVNVVVKHCLENKIGIVVVGNMKEIKKEIELGKVNNQNFVGIPYKRFKQKLEAKCRLYGIEYVEVEESYTSQRCSRCGVVDKSNRKHRGLYVCKKCGNVLNADINGAINILLKVAGESAIKQIISSGCVNHPVRIRVA

SEQ ID NO: 21355 - protein, 516 aa, Caldicellulosiruptor sp.
VVTVQAKLIFGSYEDKQKVFELMRRWSSCMRFAYKRLLEGYDRNSLKKDLQGIFDLNSRYVDDAIMKAKAVLESCKQRGEDPRKAIFGGRQLFEKLKKRHINGKPYKKLKIEWQEKRKGNLYSRGDRSKKGNLNTRIVVNKSGTFLRINVGDRKYIFARLSAGYKKGKDRGEILQEIAALGVPYSVELKLKNGNVYAYFSAEELFPATEITRENGAIGIDTNAYPNHMAWVEVDRSGQFISYGKIPMPELESGNHDKREYYRWQYAHEIVKIAREKRKAIVIERLNIKDKGTRGDFSGRKSRRIRHFFSYRSLLDKIRILAKREGIEVIEANPAYTSVIGMLKFAPQFMISKDVASAYVIARRGLGKKERIPANYMKLLNSLDVSSLEELKEYVRKEVKNANLRKRQIKEIEYVMRKIQSSGSEPGRLSAPLDGTSAISCSAGYNLWRVLRVAVVTPLSPDRVLRDMSVLKRILVSGQVGGPKIGVSSCHLKAGAIGVLKYRLLGMSTPQIRADYK

SEQ ID NO: 21356 - protein, 403 aa, Caldicellulosiruptor sp.
MDKTYILPVPNEYQNLAKELSMQSGKIYSKAVSFLKKMNRKGLRIKQKTFYKYMEWWIHQKSFILHSQSKQAAYQQAWTNYTATLRKIKKAKKKNKNASKIRLPYRNKKYNKVCFKNSAINLEGDNLILVNMKGAERIVIDGVRLGIKPKYAELLYHADKGKYYVHVVVEIAGRKKDRGQKGNVLAIDPGVIHPMVCFDGKKVALYNGGVLNSILRYRNKKLAELQSKLSRCKKGSKRWVKLQRAKKKLLGRLSNQIRDVLGKYTSHLIGYCVKNGITTIVMGEVKGIRDSKKNSNKVASQKVHQWLFRKISMMIEQKAEFAGIEVVYVKENMTSQTCPVCGSKNKPLDRNYECKSCGFRYHRDGVGAINIYRKYTGIKSLVVGLLACPVGVRYTSHLRCPVE

SEQ ID NO: 21357 - protein, 342 aa, unknown
  TnpB Polypeptide
MVIHCIKCGVVGLTSSKMRDLDHEFEGFQWWMQFGIDKNILSQHKRAKGYSYKNNSIKYKDYPLIIPYSQVRYRYKDTKLTKHWIKISVRKRKGIGIWLPVSPHKKLPDFKFLKDSLLLKNKKDNYELRLIFDIPIPKIKPQNILAIDLGERNIATVCDSQGKVAFFGREVRGLRRHYALLRRNLGRKRLLKKIIAMGQKEKNRINNVLHQISNTIIAWAKERKAIIVLGDLKGIRNLAKGRVLRRLLSAVPFFRLTNMISYKAEQNGLQVFKINEKYTSKMCHKCGSLGTRDNQSSFSCDCCGLHYNADLNGARNILNRAIEQCLIARALADAPKIIETND

SEQ ID NO: 21358 - protein, 396 aa, Leptolyngbyaceae sp.
MIVLETKLRGNSVQFALLDDAIRTAQFIRNKCVRYWLDNKGVGQSDLSKLCAVLAKEFEWAGKLNSMARQASAERAWSAIKRFYDNCTAKKPGKKGFPKFKKTGRSVEYKTSGWKLSEDRKHLTFTDGFKAGTFLLMGASDLHFYQISQIKRIRVVRKADGYYAQFCLEIDREETIQPTGKAIGIDLGLKYFYKATDGTEVDNSRVLRKSEHKLKRLQRQVSKKQKGSKNRRKAINRLGRQHLKVSRQRKDWAVKQAGALVMSSDFIAYENLQVQNMVRNHHLAKSISDAAWSLFVMWVVYFAQVFGKVHQPVPPQNTTIDCFDCKQPVQKTLSTRTHVCPHCGSVRCRDENAAWNILEKGLRLAGINTVGHTEINASRQNDLYLNQAIGSDKSAG

SEQ ID NO: 21359 - protein, 359 aa, unknown
  TnpB Polypeptide
VDRDMHSFFGLLKLKKLGKYSNPIHLPKYKDKEGMMTCSVQGRSVRIRNGKARIGVTKELMEKYNFSNKFVEFTIPKNLLSVTKFNEVRIIPQYGGKQFSVEFIYDSAHLPSYEQAQGNGFMSIDIGMDNLMACTVFSNGQSCQFLIDGKPLKSINTYYNKTIARLKSEYSKNKGIVSQNTKRMLRLYNGRADRINDYFNKAVSLLVRKCIDMNVTHIVIGYNKEMKQEINTGKVNNQNFVSVPFYKLRQKLQCKCELHGIECISQEESYTSKASCLDMDFLPKFGDKDIPQFSGKRIKRGLYSSSDGSLVNADINGSVNILRKYFKERKWNWTFQDHVRAFVNRPCQRVNPLCSSSIL

SEQ ID NO: 21360 - protein, 441 aa, unknown
  TnpB Polypeptide
MYKTTKIQQTKQHHEVDLSILKAMCFHSARLYNVGLYSVRQHYFNTNTYLPYNSNYHECKGNENFKILLSDCSQQILRLVDRDFQSFFKLLILKKSNKYSEKAKLPHYKKQDSVMVCPIQGRSCRIQKDGKVAIGLTKEFREKYNISERRVLFTIPKNIRHIQQFQEIRIIPIHNGKEFSVEFIYNETNVKPQVQGNGYMSIDLGVANFAACTIFSNGDAQQFLIDGRRLTNINHYYNKKVSGLKSEYAKNNSITEALTPRMMRLINGRNNRLTDYFNRVCHFLINKCLAYGVSTLVIGYNKGQKQDINLGKVNNQKIVAIPYHQFRRKLESICSEYGITYISQEESYTSKASALDYDIIPTYGEHTDKVIFSGKRIHRGLYCSSEGLCLNADINGSVNILRKYFKERNENWIYQDSVRALVNVPCQRVSPFAQAPSFRWV

SEQ ID NO: 21361 - protein, 446 aa, Gloeocapsopsis sp.
MYLYGCQQVLLHPNNEIKAVLEFICQQANSLINCGIYYARQLYFKAQKLIGKYDLEAKYKSNKHFKVLYSQSAQQILRSVAESFESFKKLKAAFNRGELADKPRPPSYRKSGGLALVTYPKQALRVKNNSIRIPLGKQVKCWFGIDSFTIPMPSNLEFANLRELRILPRNGYFYAEFVYQRESIKIDLDRNKVLGIDPGLNNWLTCVSNIGKSFIIDGHKLKTQNQWYNKRVGKLKKGKPQGFWSEELAVVTEKRNRQMRDNINKAARFLVNWCLKHRVGTIVFGWNQRNKDGIEIGKKKNQEFVQVPTAKLKERIKQLSEQSGIEFVETEESYTSKSSFLDNDILPTYDAKLQEQYQFSGKRGQRKKGKLHNLGRGGYQTTSGIRIDSDCNGAANILKKVAIQLGLNLAEIGRAVLILPQRYDVFLHLSKSYRKQCEAARFQTAA

SEQ ID NO: 21362 - protein, 229 aa, Moraxella sp.
  misc_feature (229)..(229): Xaa can be any naturally occurring amino acid
MTVIRGHIIRLDPTNKQATHFSKACGVARLAYNWALGQWKKQYEQDKNYRDDCQAKGITIDENRLNKPSQGKLRRQLNAIKREKYPFMLEVTKCSPQLAIMQLGDAFKRFFKGESGYPTFRKKGVNDRFSLSNDQFKLKLKKDKPFIQIPNLGLVKMRENLRFDGKILCAKVFTKGGQWFVSIAVELDNNTQVRQLKTNQTLKTLKTGNAVGIDLGITDLATLSTGEKX

SEQ ID NO: 21363 - protein, 671 aa, unknown
  TnpB Polypeptide
MENKPTVKIKTMTYYIKNNITKQILDWMTKISKNIYNTTLFIYKVYKIYQNDIYKNVYDYIIEKNLHINFINSPKKNKKDKKHIKYDKTAKKEEKHPDLVKIETFFYGVFDIYYKSYIKNKLIVDSNNKIIFKYIINDINKNNIVISNINYKQLIDKYLDNVIKLDNVNYNKSNKSITIDNIVKSIIKSLYCKNYFYVQKQMKNSIKIDNKFIDVINAIKNNNYIYEDDDENYRNKIINELNIEKLSSIENFISRITYKYIGDNKEKIPSDVIINIISKAYSNIKSYYNLLKSGKQANTKMCKYLGKDDKFNLFYYCRSYLKLEDGIRLNVGAYINNNFNTITNNNYKYIIVGNTKKYYNENNLINLDKKTLAKKKKKGIKYQKIVDKYINKEHLISYNYVYISLPKKIEFETIKLIEIKPEHGNIKICINYEKIYENEIKEYDMKAYEKLSVEKKLKLTTSIDTGVYNLLTIYNPTGEQHIIKGGILLSINHFYNKKIDRLNSINKKENDKSDYKRLHSLLKERENKINGFMDKVVEILVTKYKEKEVFIIGYNPNWKNKTNMGKKNNRNFYMIPYKKLIEKLEEKLKCINKKLLIVNESYTSKCDALALESLCAHEKYLGKREERGLFKSSTKEIINADLNGAINIMRKRIEMKEIKGEKLKNPSVIKL

SEQ ID NO: 21364 - protein, 371 aa, unknown
  TnpB Polypeptide
MSKKTFRYRLYPTAAQRDVLDGQLRLCCELYNAALQERRDAWRMARVSVRFAGQSAQLPAIKVDRPDVAGVYSQVLQDVLHRVDKAFGAFFGRVRRGEKAGYPRFRGRSRFDSLTYPQLGFAVEGRHLNLSKVGAVKIKLHRPIDGTIKTLTIKREAGKWFACFSVDVEPAPLALSVESIGVDVGLTHFATLSDGTQIANPRHARRAEAQMRRAQRRIARRRRGSAGRREAVRLFQLAQAHVRAQRADAHHKLSRLLVNRYGLISVEDLNIKGLAGGMLAKSVHDAGWSSFIDKLAYKAESAGRILQKVDPRGTSQHCTCGAHVPKTLSQRWHLCPECGLSAARDHVSAQLVDWLGLSLQDPTWAVAPCVS

SEQ ID NO: 21365 - protein, 273 aa, Blautia sp.
VRKINRAVKIRIYPNAEQRVQIEKTIGCSRFIYNYMLADKMEHYKKEKKMLRNTPASYKKEYPWLKEVDSLALANVQMHLESAFHKFFREPSAGFPRPKSKKSSRKSYTTNVVNGNIFLEGKYLKLPKMTAVRMKLHRPISEKWKLKSVTVSREPSGKYFASLTESFDAVCVEDLNLKGMAGGLHLGKGVHDNGYGLFLSMLEYKLEERGKYLIKADRYFASSKICSVCGNKKEELSLSDRIYYCECGNRMDRDVNAAVNIMKEGKRIFAECA

SEQ ID NO: 21366 - protein, 360 aa, unknown
  TnpB Polypeptide
MKLTAQIKLLPAEEQAESLLRTLERANEACQHISDHAHESGEHSKYKLQEVLYHEVREEFNLSAQMTVRALGKVADAYKTNPDAHNQFDIRGGFPYDSRILSFYTDRQEVSIWTLGGREQIEYEVGENHRALLEQDKGEADLVYRGGTFFLLVSCRMPTANMSDEDVEAIDGYLGIDRGVNNIATTSDGDNWTSEEVDNCRQWYQDRRNTLQSVGTRSAKRRLQKLSGKQSRFQRDTNHTISKRLVSKAKARSSAIVLEDLSGIAERTTVRRQQRARRSNWSFYQLRQFIEYKARIAGVPVVTVDPAYTSQTCSECGHCDSKNRNGSDFECRECGHSMDADKNAARNIAVRAKHAQGCSQ

SEQ ID NO: 21367 - protein, 242 aa, Microcystis sp.
VIKDAADRHFLSFVVEVQPQTLPNNGESVGIDLGIATFATLSTGEKIDAPKPLKKRLKRLKKAQRNLSRKQKGSKRREKTRKRVAKIQAKIKDTRTDFLHKLSTKIVRENQTIVLEDLNTSGMVKNRKLSRAISDLEWRYFRDMLSAKSDKYGRDFRIISRWEPTSQRCSCCGNIGGKKALNVREWECLFCGTFHDRDINAAINIKVAGGQSETLNGRVGKRKTTAKVAASCEALTPLTRPF

SEQ ID NO: 21368 - protein, 444 aa, unknown
  TnpB Polypeptide
VKLTSSYAIKLNGDLKALENSITTYRDALRFAVPIVNMHWGEMKDFKYSGQRMVYAEKLVHSTKENRARYHFDEEFPKFPSYLRRAVLIDAIGTVSSYRSNLENWEKESKGTQPKLGSTHFAYPAYYRGNMFRNFDPVNQTIELKVFKNNDWVFETYKLKTSDCTYYQKYLTGKKQNVPIIQKKGRRFYATFSYEEETTLIPEESINKICAIDLGLNTDATCSIMDKDGTVYARKFISFREEHDRLDTQIGRIKRNQKRGSRHNKTLWRKVSGISQDSADKTVKAIFDFGIEHGVDVFVLEYLEFQGKNVVKRAHFWRYERIYGVLTHKAHQHSLRIARVNARNTSRLAFDGSGWSKRGSEITPNTPYALMQFPNGKIYNADLNASYNIGARYFIRHLLKTVTVTQRLALEAKVPEVAKRSTCTLSHLINLRSELADLTAETQA

SEQ ID NO: 21369 - protein, 405 aa, unknown
  TnpB Polypeptide
LKLTKEQERLAWWYSTVSRKYWNLLVDIDKRNNKGEFDEIVKGRGKKTYHSEGYDRDIYRLSQSDYMYLANIVVAKNYDKDSEEWSWYYQPKQSFIYAYISKEIERVRRKNKGRLNFRSVERTRPNFPVRCAISANGKRPSRIYLKDDGKLQIPSIGDVRFGSVRDGFDLSGAKQNAKISFDGKYWYLAYSEDVEAKPLDLPEYTDGVGVDLGVTVLATVSDGTTVPNIKTFRRMRILNKRLKRLQRKVSRKYHINQCNRHNKTKNIIKLERQMKLIYRSIRNIRINHIRKFVSELVKKQPRYIAIEDLNVIGMMKNKYLVKDIVNCSFYAIRKQIIRKATERQIPVRLVDRFYPSSKTCSNCGSYKADLTYSQRVFRCNHCHVEIDRDFNASLNIAKTDQYTLA

SEQ ID NO: 21370 - protein, 390 aa, unknown
  TnpB Polypeptide
MIKSIKVRLHPNNKQLTKLFEYAGCARFAYNWAINRVRESYNRGNKFVSDNELRKEFTQLRNQQHSWLKNVSNNVTKQAIKDACNTYKRFFKGHCRYPKFKSKKRSTPSFYQDTVKIKFTDTHVKVEGFSMSKRRNKQRLNWIRLCEKGRIPTDCKYLNPRFTYDGIYWYVSVSIEVPDTPDNTINDGIGIDLGLKDLAICSDGNTYPNINKTPRVKKLEKRKRRLQRSISRRYELNKKGERYCKTRNIVKRQRELLKVSRRLTNIRHNHIHQITSEIVKRKPSFICIEDLNVSGMMKNKHLSKAVQQQGLYEFRRQIEYKSTWNHIPVIIADRYFPSSKLCSCCGTIKSDLKLSDRIYRCNCGNIIDRDVQASLNLKRCGETVLEQSAA

SEQ ID NO: 21371 - protein, 331 aa, unknown
  TnpB Polypeptide
MQTVSSYGVELRKQNIPVRQTLEIYRSAVSYLTEIYEQVWEELAEIPDAKRRFNAAEHLVHTTKKNPARFDFDLRFPKMPSYLRRAAIQHALGSVSSYETRMELWEKSGEKAGKPRLAYENHAMPVFYRDVMYREEKEGKDEAYLKLYDGHDWKWFCVRLNHTDMEYLRRNWSGKKASAPTLEKRHHKYFLRFSYTEEVTLTKTPVKEQIICSVDLGINTDAVCTIMRADGTVLGRKFINHPSEKDRMYRTLGRIRRFQREHGSAQSREDGIYETPEHRAGKKNCRCDRKKCRREPCRCDRIRVSGNAGKDIRKEKTETASVEKTGYPETL

SEQ ID NO: 21372 - protein, 218 aa, Lactobacillus sp.
MKRMSSLAYHFGVKLRFYPSSKQKKIIKLNYDAQRFVYNSYVGRNRSNYHAKHYLAVRQYQAMPFAFSILNNYETRLAEEVVTNSELLDKPRNIRDTYSFLRVKEIDSLAIANAIQNYQKAWNNYRKIGHGIPTFHKKRSDWSYQTNCQYPKQSEAYLDNGTARFIDAKHIKLPKLGIVRIAGLRKLIKERLLKQIPTRIGTVTIKRPLMTSSTCLCN

SEQ ID NO: 21373 - protein, 388 aa, unknown
  TnpB Polypeptide
MELPKTVVCKLKPTPEESEKLLATLKAFKDACNYISKVAFERKVFNPVALHHMVYRETRQMFKLPANLAIRARDRVAKAYKLRRDTLLQFKALSMDLDERIFRLIYKPERIFASISTLQKRVKPPLDIGEYQRRLLEDAKPTHAVLVYRNNKFFLHITVTKEIPEPKGNNPVGVDVGMKNLLAASNGFKVKGGETLRKRHHFRGLRSSLQAKGTASAKRSLKRLSRRERRWVNTILHQVSRAFVNSLKEGDIVVMEKLTGIRNNAKHRKSQNGDFHSWAFRRLQSFIEYKSLERGVPVVYVEPRNTSITCPRCGHVDKANRKSQSLFRCTKCGFQHNADYVASLNLSRLELAPPGRAPVNEPNAGMNGDFKMNHYDSPASPQASAVGS

SEQ ID NO: 21374 - protein, 347 aa, unknown
  TnpB Polypeptide
MLVIKTIRIPVHYSITTHKLSILDSLTARITYGAWTWSELFGEHKLKGSYADRRLFHARVKEQAKLSGAITQCCFDTAAWMWWSYREAHRAWRMEAAIARREGDSKWLRKLLRREPQPPFMNGMQGKVPIWFDSRIGSIEKSKHLKLCSYVARVSTLRRGVKLTIPLNPAKHHLDVLGQGTVKSFQLVKRYGKYYVHVKVEYTVPTHPVYAVRGIDLGVKRSMASVMLRPNQPLRSTDFTILQDGLKRDQLNRLEKRTAELQQARKWEPLKRIRHKRLHVSEYYDRLAANKLLQPHRMLSSWSGIRRASSMRTSRATIRQGFAKYSPVGRMGEKSATFKKNARKSVF

SEQ ID NO: 21375 - protein, 381 aa, unknown
  TnpB Polypeptide
MTLKAFKFRLEPNQQQRVLINKTLGCTRFLYNRMLDEKQTKYKSSDKSKTKTEKEYKIEFNWLKEVDSIALQQARIDLQVAYTNFFRKIKSGQPANLKFKSKHNPKNSYRTINVNNSIRVEENKIRLPKLGFVKFKKSREVSGIIKSVTVSKNILNRYYISILCETEVEILPKLNTKIGIDLGLKEFCITSNNEFVSNPRYLRKSEDRLQKAQSKLSKRKRGSYRKFKQQQKVFKIHQKIRNQRLDFLHKLSTKLISENQVICLEDLQVKNMVKNHCLAKSISDVSWSKFVELLKYKVDWYGRELVQIDKFFPSSKLCSNCGNIKKDLTLKDRVYQCSSCGTTLDRDYNASLNILSEGLRIISGRDDHSSSVNIQTLVCSS

SEQ ID NO: 21376 - protein, 343 aa, unknown
  TnpB Polypeptide
VWKPVNPTKININGVENIFFTSIAINTHRGWVHIDLEPSKEFYKLLARGFKPTSHAKIKLDRRSRRVLFHLSLEKEIEIYRPENVKPVDVNENSVATLYGAFSIILETDLAEITLGYSYRKESIQRRNGSDSRETRKAMKKLKEGKKKRDYRWKAANLIVRDALRTRGIIVIERISGDDIRVMIARYRNRLLRHRIYQSALKGELNAIIDKAREYGVPVLMVDPRNTSKICPIHNAPIEYGEDRIGICSKGGERWHREVVALINLYLKALEALYEGPAQKGFGVLGIDGSPFPLGSTATSEPIEIPRSLWGRWKSLENHRDAIASLWIKKHSNTKQKKINDNQ

SEQ ID NO: 21377 - protein, 364 aa, unknown
  TnpB Polypeptide
LYPNREQENLIQRTFGCCRFVFNHYLAQRMESYKGTGKSPTRFAQDKDLTTLKQQDETSWLKEVDATALQSSIRDLDTAHQNFFRRVKQGKNPGYPHFKSKHHHRQSYKSKCVGTNIKVLENAVQLPKLGAVKCRISKQVQGRILSATVSQNSSGKYFVALCCTDVDIQPFAPTNQSVGIDVGIKTFAVSSDGAEFANPKYLRKSEKQLARLQRSLSRKTKGSRNREKARMKVARLHEHIANQRKDMLHKLSTELMKNYDVICLEDLAPSNMMKNHHLAKSIADASWSEFRRQLHYKADWYGKRIVETDRFYPSSQLCSNCGTQWEGTKDLKIRKWECPHCGTALNRDTNAAINILNEGLRLLA

SEQ ID NO: 21378 - protein, 391 aa, unknown
  TnpB Polypeptide
MIKKSFQYRLYPNDEQATLLDKHFGSARWLWSWALAEKIRVYEEKGESLSRFKLQAQIPEMKRTERPWLAEVNAQSLQASLLFLDRAFMNFFKHKTKFPRFKKKNHRQSFQVPQRGQLDFENCKLIIPKFLEGIRCHISRRFEGETKTFTVSKTTTGKYFVSVLVETPDEVPEKRPVTEDTTIGIDVGIKDFCTLSTGEKVENPRHLKEELKRLKVLQRRASKKKKGSSNRKKAVLKVAKLHEKISNRRNDFLHKLTHRLTSENQIGSIAVEDLNIAGMMKNHCLAQAISDVSWSEFNRQLEYKCEWRGVNLLKIGRFEPSSRTCDACGTVNKDLKLSDRTWTCACGTEHDRDYLAARNIKRFALTNDNLKYSGQGLPGEPVETRCCNGGR

SEQ ID NO: 21379 - protein, 223 aa, Microcoleaceae sp.
DLGVSTFATLSDGKFYESPRPLKKAKTKLIKEQWRNRQKQLGNIKLGVIPSNNAHKDYRRIAKTHSKNPKKRRDFLPKNTTKISEKYPHMRLKILKVSGMVANPKLAAAISDCGCSEFRHQLEYKSEMYGTKVGTRRALSVLNRWFPASKTCSNCGHTQPMPLQEPVFDCGCCALLINRDWNAAINLSPCSELVRPVRSLRYTCGQEGADSLGRCSSRTSNLP

SEQ ID NO: 21380 - protein, 435 aa, Chloroflexi sp.
MKQLIIAKLKLQTTSGQFQALRATQMAYRDALNAVSRYAFEHGKMSNQRTLQREMYAEIRAKYHLPAQMACNVPRQVGATYKTLWTKVKQNAAHRQAGRTKKRYKGLDKPPKYVSPTLTYNYHHDYSLKEDAQVSILTLEGRVIVPYTAYSPHVALLGEGAHIGAARLWYDKPKKQFYLLLSLEIARAEPTPQDHAHVVGVDVGQRYLAVSTDTEQHSHFYSGKAVRAKADHYARLRKRLQKKGTRSATRRMIVISGRERRLKQDRNHRISRRIVDAHPQSIIGLEDLTHIREHPKRKHGKKATKKQRRANRHASHWAFAELHSYIAYKALLTGSMAVKVDAHYTSQACPRCGYTSDANRPNKGLLFVCQSCHYSLHADLVGARNIALRTLLVRQDWMSTGVLSVRPDVSSDEAKAARLQRYAELRWSFDTSPQL

SEQ ID NO: 21381 - protein, 542 aa, Streptomyces sp.
LGGLREVAAPFVVPGPAGVAVRDRFKGLTTDDERVLRLVGDHLGTLASRDLRVRCADGLEHDAGRWAERKRELTGESSSRWAGSLTKATHDQWALARRGQAAHIHSLEAGIDTVTRRLSLPIGQKGTKRAAGGYRNEKEWFAKSRRLRVLGDRMERERADREAGRVRVVRGGKRLLTTRHHLDAAGLTQDEWRRRWEASRRFLQADGESGKRYGNETIRVSPDGEVSIKLPAPLAPLANAAHGRYVLTARVAFAHRGETWRDRVQANRAVAYRIHEDTDRQRWYLTASWTIPPVRAVPLATARANGLVGVDTNADHLAAWRLDKHGNPVGEPRRFDYDLTGTAAHRDAQVRHALIRLLHWAQRHHLAIATEDLDFTAETSREKHGRRKQFRKLISGMPVARLRSRLLSMAAELGIPLIAVDPAYTSRWGAQHWQKPLTGKNRKTTRHDAAAVAIGRRALGHPIRRRTTPPRTHQSDGYGHRTVQAAPETPGREGPRPRIPGPRTRSVDAGRGAKAGNQNAQHRSGRSAEHGFWQKDSLPLSL

SEQ ID NO: 21382 - protein, 509 aa, unknown
  TnpB Polypeptide
MMMKRILSIRMSSKYRGKVKSFIYDVAQFQNLLRIFILEWNKKTNDIFRLFNQSLLYSLLADRIRSNKSEWQKKELEEVKGIIEEDEKLKVWIEKLREQKKKVKNSVACQSVIIQEVNNLKSWIRAVREFKRNPEKFNSKPGLPKPRKLKNLIRFSVIVPFKVESRKLWLKLRNGEKSLEVLLPKEFNYKVKEVRVVYDMEWVEVHIVYDKDIDIQNDGVYQAGIDIGLNNLLSIVSDDPELRSFIVSGKELKSYNRWWNKKKAEVQSHIDRILNMIKEEKDEEKRKSLEKHYWWFKKYLWNLSKARDRKLSNWMHQITRRLADLLYQTGHRIVYIGKNAIDKHEIPFSKVVNQNYVYIPHRKLVNMLKYKCEELGIQVMEVDERYTSKASPISDDVVEIQSKRENGEKVKFSGKRVSRGLYRDLKLGKVFNADLVGAMNILKVGAKLRGLLLNLKTLFVKLCNPVRFKMFDLIYKSNPESLLRVGIGDSKPAMMREALAYEGAGGRMG

SEQ ID NO: 21383 - protein, 277 aa, Tolypothrix sp.
VLVLEYKAVVKKAQSKAIDEAIRTSQFVRNKVLRYWIDNRGVGKKELYQYNTQLRGEYEFVRNLSSHATQASVENVERAINRFFANCKAKKQGLKGYPRFKKHSRSVEYKQQSWKLHPTKRRIAFTDKKGIGELKLLGKWDIHAYPTELIKRVRIVRRADGYYVQFCVKVENKQEAPSTTSEIGIDVGLEYFYSDSSGNHEENPRYLRKSEADIKRVQRNIYKKKKGSSGRRKARGIYARKHLKVTRQRDEHAKRLARNLCLANAKVVLEDLVRFVD

SEQ ID NO: 21384 - protein, 396 aa, Tolypothrix sp.
MLVFEFKAYGKLAQLVAVDDAIRTAQFIRNKCIRLWMDVKDTGKNDLQKYCAVLAANFPFANELNSMARQASAERAWSSISRFYDNCKKGIVGKKSFPKFKKDCHSVEYKTSGWRLADDRKSITFNDKKGIGRLKLKGTRDLHFYQINQIKRIRLVKRADGVYVQFCIDINRSENIEPTGNTVGLDVGLKEYYTDSDGVMVENPKFLAIGEKVLKRSQRRISRKVKGSKNRGKARQILGKRHLKISRQRKDHAVKLARCVVQSNGLIAYEDLRIKNMVKNHCLAKSINDASWYQFRVWIEYFGKVFKKVTVAVNPQYTSQECSSCGEIVKKTLSTRTHVCKCGCVMDRDENAARNILFRSLGTVGHIGTSALDVGNACGDETSTQIGENLFEQVMS

SEQ ID NO: 21385 - protein, 395 aa, Tolypothrix sp.
MTQKAFKYRFYPTSEQETLLRRTMGCARLVYNRALAARTEAWYKRQERVGYEESSKMLTEWKKKEDLQFLNLVSSVPLQQGLRHLQTAFSNFFAGSAKYPNFKKKHNGGSAEFTKSAFKWKDGKVFLAKCLEPLAIRWSRQLPSCVEPSTITVKLSPSGRWTVSLLVDIEIKALPKTSNQIGLDLGITSLIALSTGEKVANPKSFKAKRAKLRKAQKALSRKQKGSNNRHKARLKVAKVHAGISDARNDFLHKLTTRLVRENQTIAVEDLAVKNMVKNRKLALAISDASWGELTRQLEYKCDWYGRQFIKIDRWFPSSKRCGHCGHNVDKLPLNIREWDCPKCSTHHDRDVNAANNILAAGLAVSVCGANVRPDRHQSEGQLRNPSNGKKQKPKS

SEQ ID NO: 21386 - protein, 470 aa, Tolypothrix sp.
MNSLGQTEFEMFLESYAPIFRSAAIETVNHLLPGNEFNKSQWNTHLQKTYGINKRHANGVISFSKGRVDAAKTHRELHIKTIAGKIKSIEKWLKSSERKLKLARKFYAKKNWQYSKTGCNFPLSCSLKYHNSNWNHLRFQIHGKKRKLALFNNKLEYLKIKPLKVSVPHGNIFIVGSKDESYGNQVAQWDSQVITIRVPQCLESRFGKTVSSNIGDFDRNINRLPESGSKTWHFFYKNGRWVVAVQFTPKAVKQQSHSVSYGCIGIDMNPGSIGWAYVDNEGNLKVKGQIPLQMGLPSGKQDAQIVDACLQLAALAISFECPVVCEELDFSEKKQRLGEESGKYARMLSSWAYSRFYELLQSILSNRGIELITVNPAYSSLIGLVKYMKMYGLSSDCAAALVIARRGMRLSEKPQNSITAYASVNEDKHVWSFWSELNKKIKRSSEINRRHDYFTVSNWSFLDNLRDGEV

SEQ ID NO: 21387 - protein, 567 aa, unknown
  TnpB Polypeptide
MSELLCDGTMKEGKIKAIPPLDKKDMRLNPTLLESKKTEPQLSTPELVPKINDLTLIEKLPPSVTCTRQQKSSGATRDGEQSLDRRSRYANAITESAPIGKSEEALTSKEKKLQPYWGESCKEISQELLSHTKTDWQNSVSTSINGLVSNLTAQSWFSTRKTCLQNQKCLKTSSPSYTASVADYYMDSVNIKLRSRKIKIYPSSDLKKEWNKWVAACRYCFNQAIAYQKKHGKVGKQKLRNIIMQSELPEWVKATPCHIRQNAIFDAHQAYSFSKNCKFRSCHAPRQTLKFNNSNYTKGKWYSRLTKGKDFQSSEPIPISSAYATRIIKTKCGDWFAVFLKEVKLKTNNVDGIIAIDPGVRTFLTGFDGQSFLEIGVGDIGKITRLCQHLDRLMSKIGKSKSKRQRQKMRKAAARSRKRIRNLIDECHRQAASWLSKNYSYILLPTFETSKMTKKKKRKIRSKTARQMLSWSHYRFKQVLKNQAELSGCQVIDVTEEFTSKTCTRCGHIHPKLGGNKLFKCPECGHEINRDFNGALGILLKALRDTSFTLYSDAIVIQDDNISLCSA

SEQ ID NO: 21388 - protein, 359 aa, unknown
  TnpB Polypeptide
LLRSNEVCQILELVRSYFVPIRDDRVWGLITWYVKALQNAIDMIWDNIGWRYCFPELVRRGGKLITNMGLKMRVPIIPKDRAFKKRLRDELMKGNPYAAHWVDAVIRTAYSIMENWRRRYLRGRAGKVKPRVRRRFARCKITLMKIDYQARTIRITLKQGEYLTISWRSTWFEHRVRGWTVGEVIIKDDRVVIPFKSSKEIYVRRVIGWDSNELSLDGYEPSIGFIHVDLKPLQSMKIVYERKKAIAQSRGKRELYEKYVRRERNREKDFINKLSAGLRRLFQNTIHVFEDLDKEDLVSRKKRRKKRRKRNARTPWRRIHRRMSEAALTAHVDPRNTSRECPRCGYVVETQGGACLRMP

SEQ ID NO: 21389 - protein, 413 aa, unknown
  TnpB Polypeptide
LEKLLKTLTRTVTVECYANRYARRALREIESAYREMLREMVEYAVKHKASQSTLHKIFYSRFRERYPWLPTRVIKGAYRDAVRRAKSFRELKKKGRAYTDKPEVRRVTVTYSDPQDWKLGDGVIKLRTHVGWIELHYRNHKQLHRYLYGGWKLSGELKFKLVGRRVVVYLAFAKHFEVEYDPRNAVAVDVNENNVTVALFKSGALAEVYRVETGLGKIVIAYSERRKKIAEGNSTKTREVRKKLRKLRERERKLDILKKATRFIERLVIENKAVVVIGNIGRKAKEKMERGKNAKLRHRIHQWSVSTLIRLLEEKPVHVVKVSEKGSSSTDPFTGARINGYTPLMIRSAVKGVKRVRVVKLMLRVARVNGRALERDVVGAINIGLRYLNPDGSPVALSSTGAHEVRVKLVSPR

SEQ ID NO: 21390 - protein, 408 aa, Okeania sp.
MKLVERHVITKSYYLWSQVDHKAFLSKNLFNLANYYYRQYLFENKKKLNFNQLYHLVSKSYDYQALPTKVSKQIIRRLDSAWNSYFSALREWKKQPNKFLGKPKIPKYKHKTKGRNILPYPNESIYKKALKTGIFHLSMSEIKIPTAQTEIIEARIIPKSSCYIIEIVYEKSEETTENKQIAGVDLGVNNLIAVTTNKTGTAPLLIKGRPLKAINTFYNKQRSYLQSQLKTNHNRCNSNRLKKLTHQRNFRVENYLHTASKRVIDWCVNHEIGILIIGQNQNWKQEIKLGKKNNQQFVNIPHYRLIEMLTYKAQLRGIKLIITEESYTSQSSCLDGDDLPKYGDKKPKFSGKRVTRGLYKTRENKLLNADVNGSFNIIKKVIPDVFDQGIKGLPFNPVVVVPLRTTKL

SEQ ID NO: 21391 - protein, 355 aa, Okeania sp.
MYCCQQVLVGKNPELIAILKFLCEQSHKLTNMGIYYGRQLYFKSHKTLGKYDLEKVYKKNNHYKVLYSQAAQQILRTVAESFRSYYGLIIAYSEGKITNRPRIPNYRKKGGLATVSYPAQALKLKGNQIRVPLGNTCKRWFGLDCFLIPIPSIRAFYAIKELRILPRNRCFYWEFMYKKEVVIKPLLNQENVLGIDHGVNNWLTCVSNVNTSLIVDGKHPPLSPPGRGNKGVGWYNKQISTIKENKPLGFWSNRLAAITEKRDCFVPRNQIRDGINKAARIVINHCLKNSIGTIVLGWNKGQKNQIELGKKSNSEFVPIPTARLKERIAQLCDEYGIIFIETPRELYKYCFIFRW

SEQ ID NO: 21392 - protein, 736 aa, unknown
  TnpB Polypeptide
MHWAVPFTNPLKVHGTNLFDTRLPLCSRTCLGQWLGYVRFTRPRPFCTKLHKPCTSRTLPYNLYTSRTHTYTHTNVHTDTGKRFESLKLGLERLQAYRSSGNCLPLGKQLKRFNKKSSVQRWAGACYFQFWVMARGLKKAKDAGPQPPRKRKKVDTVNNAATASKRPRPGDMCPWWKEELLPIYDKVPMVESNPNIQSIPLMGNSKSWFSVQSIPLRNVSNLDFRSKMEFDPADVWSQEAGADKKAATARKGKELDPIPKKQTRCRKIRIRFLHTEQGNHRKQEATLRKWMGAYRFTYNHAVNLVKQNKGWLGAEGQYLNEQLVYETKNGRTSRPTNTEEEKEFAKECAANMEAKRSRLGVEVGALVRAHPWLLEVPSKIRKEAVRDVLKAEKSNEGMRKSDPHHKWSLKLKSRKQLSAWTMSVPSECITRVSVEERPVDETRIGRNDSQPFPETNVRKWTRLTLSPTYNLGEFWLNEAVPEGKISKDCKITVDGLGRYYMIIPYEIEPTPPTQKPLSERSVGSVDPGDRVRACVADVRRGEVIKYAEGKEFGGKDRIYALCKLLDETISESKAKAVDAKQRLWYKKKMNKLRAKAHNLTTEMIHKIALDLVRRFDTLILPPFKTSEMVKKRQTRNGMAGMVGIQPRKIHSKVARSLLSGRHYEGSVHIMNVFLRAGKEVARMGEEYTTMACKECGVLNDKHSKESWTCKNDCCETFHLRDPASSLCIFKKALARN

SEQ ID NO: 21393 - protein, 472 aa, Acidimicrobiaceae sp.
MNLEVSGDFSRTSIGNLGWQWRAVNVTRPADTCSVTSTPTAVTQAFTYALDPTLEQASVMASHVGGTRFAYNALLGLVKENWDENRTKEDAGLEVTKGDYVSTTHFGLLYLWAKHRDELAPWWAENGSSTYNDAAQRLSRAFVNFRQGRASFPHFKRRGPNGSIRLVGSAVHLADSHHVRIARIGEVKTYESTRKLFRHLERDTGRIVAATLRHRNGTWQVSFTAEVTRQLPTTRLAERVIGVDVGLTTLYTGATPGGEQILDVVNPRHLVKSERSLARTQRIASRRQGPKCGVAPSNRWKRANSRVQKVHSRVANARKNLIHEITTHLAKDYDVIVVEDLNVAGMMKNHFLAKHISDAAWGEFTRQLEYKTRWYGSTIVKVDRFYPSSKTCSRCGAVKAKLPLTERIYACDSCGHKVDRDLNAAINLARQGLTGTSSVTGRRGEIRPEQQILGATAHPVEASTETLTLVGT

SEQ ID NO: 21394 - protein, 462 aa, unknown
  TnpB Polypeptide
VWSQAGGGGSDRDEGRSGAGHDRSPDQLLCTSLRPAGGQEASGESLSCGGERNMIMAHKIALDPTAAQEVYFRRACGTARFAWNYALAEWQRQYRAHRENEGLPKPSQLSLRRQLNAVKRQQFPWMLEVTKAAVQHAIINLGTAFKNFFEDLAKYRRGELKRKDIRRPKFKKKGQHDAFRADNGPGTFACDGYRIKLPRVGWVRMREGLRFAGKPLSVTISRMAHRWFASIAVELDHVPPTRENQAVGGVDLGVKTLATLSDGMKIEGPKALRRYLGKLRRLSRSLSRKVKFSANWRKAVERLARLHLRIANIRRDALHQATTCIVRKFALIGIEDLNVRGMLANRKLARAIADIGAYEFRRQLAYKAPMRGSQIMATDPFFPSSKRCSVCGWLYAELTLDEREWTCANCGARHDRDENAAINLKQFAESSPATACGATSSGFGGRMPKVKLVAMKQESERG

SEQ ID NO: 21395 - protein, 217 aa, unknown
  TnpB Polypeptide
VCRGRLQSQRRLGGVLSKYSNRERNRARKHQLEIARVIQSMCGSVGLEELKKQGMYTRSRLWNRRISRSDWRSITRILVGRMDEARVKELDPYGSSSYCSRCGWENKDLNGAVFECKECALRINRQTQCGDKPVHEDELRLHCKVGGGRKRVELRMEGASQREWWDTVVLPSLLGGCVETGGKLKGTSEPVRFLNDAVKPKLYAYDRYNDMYLRTPT

SEQ ID NO: 21396 - protein, 366 aa, Streptomyces sp.
VLAASDRFYPTTEQAELLHRTFGCVRYVWNKALAERTRRYKDEGKSTSYVDTAKWLTAWKKDAESEFLREVSNVALQQTLRAQQVAFNNFFAKRARFPRFKSRKKSRKSATFQNNAFTFRDGKLTLAKTSEPLSIVWHRPLPESAQPSTVTVSCDSAGRWFVSLLVEETITPTPSTGAVVGIDAGLDHLLTLSTGEKIANPRHERRDRRKLAKAQKTLSRKARGSQNRARARLGVARIHARIADRRRDNLHKVTTRLVRENQAIAIEDLTVRNMLGNHSLARAISDAAWSELRSMLEYKTGWYGRHLLLVDRWFPSSKLCSTPGCSYRNDKMPLNVRSWTCPRCGTVHDRDVNAAKNICAAGLAEQ

SEQ ID NO: 21397 - protein, 282 aa, Sulfolobus sp.
MKESLIEAKIIDYGKLKDIHKDIIYYKLYIESLRKSGVKEKVNPPPNIPKPIISSMMSGGIPRDGPLQLDIIRKNIFKIKGYNALIESKEINETPLYAVVEYRDDGIKVYLAYREKPIIAGIDLGIRHLITIVSLKENKLWKVRFFDEPKLMEYFLNYLGDEQGVLMLEEFKNKSKKIVYEAINFIENLEPNVVALEDLNSFETKAGKGLRALQSMLESELRKRGIKYKKVDPYNTSKICSKCGYKKGEVMGSIFVCPSCGYKADRDFNAAFNIALKCYYTC

SEQ ID NO: 21398 - protein, 396 aa, unknown
  TnpB Polypeptide
MYAIYNINYKLKKVGDIMYKAYRFRMYPNNDQIILINKNFGCVRFVYNYFLNKCKNNKYYKAFDMCKELKELYVEYPFLKEVDSCSLRCSIFNLEDSFKNFFAKRSSYPCFKNKFSKQSYRTNAIRSSYKGNNYCNIEIYKDINKIKLPKLGIVNIRGYRNLNKIEEKIINATIEKESTGKFYVSVVVETKDIEVAKLEPTSIVGIDLGIKDLVVLSDGTKYTNPKELNKREKQLKRLQRKLARQINHSKNYNKTKIRLARVHSKIKNSRKHNIINIVNEIVKEYDCIISEKLNTKGMSQNHKLAKSIIDASFNKICQLLKWKTKILGKYYYQVDTYYPSSKTCSHCDYKTNITNNLNIRNWECPKCGNLNDRDINASINIMFEGLKIHYLNKVNN

SEQ ID NO: 21399 - protein, 448 aa, unknown
  TnpB Polypeptide
MSSASGSARRSGATVIQAYRFALDPAPAQERMLRSHAGAARFAWNWGLARCQQRYQAEGRWYSGSELHKLWNAGKKADPALAWWAGNSKCVYQEAFRDLDRALRDFIASKKGQRKGKRLGFPRFKKRGRCRDSFRFSTGAIGCTGTTVTLPRLGVIRTHESTRKLARRLGAGTARILSATVSRTAGRWFVSFTVEVERAIPERHARPGSAIGVDLGVRTLLTGVDDQGTVVTVAGPKALRSSLRRLRRASRAHSRKAAGSANRRKSAARLARIHARVATVRADALHKATSSLAARYENVVAEDLNVAGMTRNRRLARAIADQGFGMARRMLGYKTSWNGGYLLLAGRWYPSSKMCSGCGAVKAKLPLSERTCRCDCGLVTGRDVNAAANLLNLAASGAESLNARGGTVRPGPAGRVPVKQEPGAAHADQTGTASEQPLAAEQELTHAH

SEQ ID NO: 21400 - protein, 373 aa, unknown
  TnpB Polypeptide
MRKSYRYRVYPTKSQRSALERNLELCRQVYNDTLALRKDAWEREKKSISIYETNSILTTWKADRPELSQVYSQVLQNVQVRVDLAFKAFFRRAKAGENPGYPRFKGWGRYDSLTYKQFGVEVKNGKLHLSKIGGIKIKLHRPIEGKIKTCTIRRMPTGKWFACFSVDMGDIPLPPWKDGSVVGIDVGLESFATLSNGEKITNPRFFREEEKELARVQRKLSKAPKGTPERKNALKVVERVHERIANKRNDFANQVSRQLVDRYGVIVFEDLDIKNMLKNHSLAKSISDVAWNTLIKSTESKAVYAGSKVVLVDPRQTSQMCSRCGLIVKKDLSERVHNCLECGLSMDRDHNAAINILRLGMQSFRKSDRSPVL

SEQ ID NO: 21401 - protein, 389 aa, Klebsiella sp.
MLRATKVRIYPTAEQAEYLNAQFGAVRFAYNKALHIKKHIYKHNGVSLSPRKEIKPLLAVAKKSRKYGWLKEYDSIALQQAVINLDVAFSNFFNPKLKARFPAFKSKHGKQSSYHCVGVKVLDNAVKIPKLPPIEACIHREIIGKIKSITLSRMATSKYYAAILCDDEAEAPAKPSLITTVTGLDMGLTHYAIKSGGEKIANPRHLINASRNLRRKQKTLSRKKKGSANRRKARIQLAAVHERVANARADFQHKLSRTIVDENQAVIVETLKAANMMKNHHLARAIGDAGWAGFITKLEYKAAEKGVHLVKLDQWFASSKTCHCCGHKMPEMQLNKRIWQCPGCGVEHDRDINAAINIERKGILELQAAGLVVSAHGGQRKSVTQTVAA

SEQ ID NO: 21402 - protein, 390 aa, Aromatoleum sp.
LVSAWRLLLFDVCRFVFNKALALQKVHYESGEKKLGYSGLCKLLTEWRNGPETPWLADAPSHPLQQALKDLERAYANFFAKRADFPCFKKKGQSDSFRYPDPKQIKLDQGNSRLFLPKLGWLRYRNSRNVLGELRNVTVSQSGNKWFVSIQTQREVEQPLSATTTSIGIDVGIARFATLSDASFIAPLNSFKKHQQRLARYQRRMNRKVKFSNNWKKAKARVQKIHTGIANARRDFLHKATTTISQNHALVCIEDLQVRNMSRSSRGNSEQHGKRVSQKAGLNRAILDQGWGEFRRQLDYKLAWSGGYLVAVPPQNTSRTCPCCGQVSADNRQTQAKFLCVDCGYENHADVVGAINVLERGYRLLACGESAQSGCSMKQEPTEATTQPIA

SEQ ID NO: 21403 - protein, 351 aa, unknown
  TnpB Polypeptide
VKRLQAFKFQLRPGGQQECEMRRFAGACRFVFNRALARQNENHEAGNKYIPYGKMASWLVEWKNATETQWLKDAPSQPLQQSLKDLERAYKNFFQNRAAFPRFKKRGQNDAFRYPQGVKLDQENSRIFLPKLGWMRYRNSRQVTGVVKNVTVSQSCGKWYISIQTESEVSTPVHPSASMIGLDAGVAKLATLSDGTVFEPVNSFQKNQKTLARLQRQLSRKVKFSNNWQKQKRKIQRLHSCIANIRRDYLHKVTTTVSKNHAMIVIEDLKVSNMSKSAAGTVSLPGRNVRAKSGLNRSILDQGWYEIRRQLEYKQLWSQVLAVPPAYTSQRCAYCGHTAKENRLSQSKFRC

SEQ ID NO: 21404 - protein, 401 aa, Actinomadura sp.
VAVLDGQAHAARALWNVLHEYFTFRQGCCPSVKDCDEAIRVARREIGWMGQLPAQAAQAVLKNYRQAWSNCFNPDHPAKRPTFKARLRSRMAVDIPQAGHMKIIRLNRRWGAINLPKVGRARFRWTKDLPGVTEHGPAGRVTGGRLVKDAHGWAIVFRAESEVATPTQHEGPTVGIDRGINVALALSDGSMRRHGPWLTSGEQEHLRRLEKKSARQRAVGVSGQAMSNRLARTYRQIARIRAKAKQRSVDWQHRTTTELATAFSAIKVEDLKIANLLRSARGTIEQPGTNVAQKSGINRKIAGEAWARTVRMLEYKSQDRGGRLIKVAAASTSQICHRCGQRDPSARHGTVYACTNLECGWVGHADINAAININNADGIAVSGRGDLGATRSVKRQPPHAA

SEQ ID NO: 21405 - protein, 544 aa, Erysipelotrichaceae sp.
MKTTVRTERYYLDEMTDEKQRLDFMKMKVTVQELSAIRIRGYNAYWFYKNSPEDPRNFLDDTVKSPVYAYARSLGLSSYYANILDPVITGIYKSQETNSKNRIDDLKADISETKRKLKSLKSSLANTRKLKQSLVRYGTTGKFSKPYKCCRLGIDSDGMMKGTQKPCTWQEYEHTIDERIRSKRAHIGQITDRLHRLEQNLKKVKSEPPKRSIFGGRRFYKTKDTVGCDDAWKRAFHDARYGSFTVGGRADLDGRNAVVLYENGGLTWTLPFGLGKARLEKFVPVRFSEKYYAALENPKYPIAYTFAFKTDRDGREYMTVSVCFTVPDERKAFDASHGVIGVDLNADHFAWTETSPSGEKMKSGVIGFDVLHATKGQTDEALGRAVAELIGICMAAKKPLVMEDLSMKNARRGMHYQGRLRNRIISQFAFDKMTALIASRAERNGVPVRCVNPAYTSLIGKTVYMRKYGISIHEAASYAVALRGARLEPPLLPSGIMALVPEKKRDGIVIGDWSDYFRLLKALQAAVKKIPKHMFYLPPERIPH

SEQ ID NO: 21406 - protein, 549 aa, Lentzea sp.
VLRPIATSFVVPGPAGVAVRDRLKCLAPRDVEVLRLVGAHLGSLASRDLKTRCADGLQHCMDRWAARKQGLTGASSSRWAGAITKASHEQWGLARRGQAACIRRLEAGVATIERRLALPVGAPGVKREPGGYRSRHEWFAKSRRLGVLQDRLAAVRADRDAGRVRVVRGGRRLLNARHHLDAAELTEPQWRAKWESARMFLSADGESGKPHGNETIRIDPDGQVRIKLPAPLAYLANAPQGRYVLACTVTFRHRGDQWAARVAANQAVAYRIHHDVTRDRWYVTASWQNLVVPASPLPVALAGGVVGVDMNADHLAAWRLDAHGNPVGGPCRFSYDLSGTAAHRDAQVRHALTRLLRWTRRSGAKAIAVEDLDFADCKTRERHGRRKWFRQLISGMPTGRLRARLVSMAVEHGITIVAVDPAYTSQWGAEHWQKPLTSTTRRVSRHDAASVAIGRRAHGYPIRRRTAPPPHDQSDRAGHRTVQAGPSGRMREGSRPPAKDHAHDARSRAGTRTRDPSVPNTVRDTRSDRNRAQLSLLLTEQERCGIPIP

SEQ ID NO: 21407 - protein, 365 aa, unknown
  TnpB Polypeptide
MKLSVQLKLLPTPEQADALTRTLAAANAACDYISQVAWETKTFRQFAVHKLVYQSVRETFGLAAQMAVRCIAKVADAYKLDKKVQRSFAPHGAIAYDDRILSFALPKSEVSLWTLDGRHAIPFVCGERQRQVLASRRGETDLVLVGSTWYLFAPYDIEAPEPIDVAGVLGIDLGVTNIATDSDGDIHSGTAMKNVRYRHRRLRQKLQRTGTHGSRRRLRKLAGQERRFAKHVNHCLSKEIVAKAKRTKRAIALEDLTHIRTRVRARRSQRATLHRWAFFQLRAFLVYKAALAGVPVHFVDPRNTSRTCPACGCIDKNNRKTQASFVCTSCGFAGPADVIAAGNISSRAVASQPDYPDADVSVAPG

SEQ ID NO: 21408 - protein, 366 aa, unknown
  TnpB Polypeptide
MGRKPKGLQNTLQVRLYPTPEQSHVLMSHCREYISTVNVLVSALDADVIAHDDTFSTKDFVTALPSCVKNQALRDARSVFKRALKIDCIPVLKKPICQWNNQNWSLEQGILTVPVWLGGKTQQIHIHCADVALEGLPGILRIKKKRGKWIADVTMTIVKPKPVEQDGVMGIDLGMKVPAVAYVSGKGARFFGNGRYQRYMRRRFYARRKSLQKVKKVRAVKKSQGKEVRWMKNINHKLSRQIVNHAAEQGVGTIKLECLAGIRKGTTRTSRGAKARKNNRMKNTWSFSQLTHFISYKAERLGIRVEAVDPAYTSQECPACSTHNKAQDRTYVCAACGWIGHRDTVGAIIISRRAGLAGDRRGATGA

SEQ ID NO: 21409 - protein, 397 aa, Streptomyces sp.
MPTHVKRAFKYRFYPTDAQAAELSRTFGCVRKVYNMALAARTEAWTRQERVNYNATSAMLTAWKKTEELAFLNEVSSVPLQQCLRHLQGAFTNFFAKRAKYPRFKSRRKSRASAEYTTSGFRFRDGKLTLAKMKDPLDICWSRPLPEGASPSTVTVSRDSADRWFVSMLCDDTPAPMPATAGAVGIDAGLDHLVTLSTGEKIANPRHERRDRARLAKAQRALAKKVKGSANRGKARLRVAKIHAMIADRRRDGLHKLTTRLVRENQTLVIEDLTVRNMVKNHKLARAISDASWTELRSMLEYKAAWHGRNLVVVDRFFPSSKLCSACGTITSMMPLNVRTWTCEGCGTTHDRDANAAKNLLAAGLAVTVCGAGVRPQREFSRTGQSATKQKTPRREP

SEQ ID NO: 21410 - protein, 435 aa, unknown
  TnpB Polypeptide
MGGLEPRALELESRLARGAGYGGRNRKKREKGVVEGFRVLTLLYYVSELPAGAFQRLVELFEAYRAVGALYFWSKRLNIEEGVELALERARQLLPYYYRHAFDEDSHVYQFSEVEKMRRPRKIVLKLPLADALHPNHGAYIEGGKLVVRLGNGERLELPLPERALKWLQEKEAEVAPLKVTKIARIQWREDKRPEYLKVQIVLRVERKEPVMPDPKSALLCYVDANGDYGIACVLALSDGVRTKVLETPKLRPPNRGRRLREAARRRRAAARDRKPSVNYALARLSERFDSRGWVKAAARTFKKSFKRASGRSVLMNLDIPDPESVKGSYLQKTLLSLEKVAKNLVNWFGVYATFECYPSTVCPYCGSKLKMAYTRRTRIAYCTRCGFYDDRDYVPFYHWVKELGLPMPKHPLQRIELPEELRRKLSSVRPGSPG

SEQ ID NO: 21411 - protein, 456 aa, unknown
  TnpB Polypeptide
LKTQWSEKEYFIMPQRVERIVIGRSYPNWKACGRLCSLSRKLGNCAVYLLRHRVFENLAPMSRAELDRALREQYLTDYRAMPSAASPQRHGQIIAKQFKSFAKASGEYKKHPEKFLGKPNLPGYKKKYCAFCVGRNGYKIEDHRLSITGGELVDFQPLIVKCQSSQRFNVKATGGGLAGDLRMIPRGNSFIIELTYQKKEEKEPVLLDRDEGAFIDLGVNNFAAIVTTKSGEKPILVKSGFLKSINQSYNKRAAELRSKGYKKHLESVTFKRQRRIDDAIHKISRGIVDYCAAQDIGRIFTGRNKNWKQSTQMGRRNNQNFVNIPHAKLIEQLRYKGEAFGIEVVEVMEDYTAKASAVDYDPIPEYEAGKKRGPFSGKRILRGLYRTKDGKIINADINGAINIGRKGLGDGWLKKLLGLDEGVFVNTPTVIRTLYGERKPLEFGVRPKEAAAVSLR

SEQ ID NO: 21412 - protein, 317 aa, unknown
  TnpB Polypeptide
MQIQLMKQFCGYARYVYNRTLSLEKSLYKKDSKHSFKYTEAANRLPEWKKNNPFLKECHSQVLQQSLKDLDQAYTIFFRKQANFPKYKKKFQHDSIRFPQGVELDEAKQQIRLSKIGWVRYRKSRVIIGTIKNVSVSRRGEKWDVSIQTEYEVSSPAPNPSEIGIDMGVKRFVTLSNGDFVEPLNPFKQELEKLAKLQRKLARQKKGSRKTKRKIARLHRYIADSRRDFLHKTSTKIAKNHSIVYVEDLKVSNMSASASGTKESPGKNVKRKSGLNRSILDQGWFSFFQMLPYKLQRRGGKLIKVPRNTSRTCPCRE

SEQ ID NO: 21413 - protein, 451 aa, Nocardia sp.
MSESKPSSRPPAGLVRQAYRFALEPTFDQEQALRSHCGGMRFAFNWARHKVLSNWNQRKAEASYGIPEEDRTPWIDKSAYSLRKAWNAEKDDVAPWWRENSKEAYACGLARAADAFANHSASKRGKRSGPKMGVPQPKKKHSHQSYTVTTGCYGLGEGSHGVKIPRVGTVRTAESTRKLARRLRNGTAEIGSATYSYRGRRWYVSFSVRVRREDPKPVHPDAIVGVDVGVKSLAVLSTGEVIPNPKHYQRAHALRRRLARKRSRRRGPHQRTGTPPSNRWQKANDKANRLERRVTAMRADGLHKLTTHLTRMYGTVVIEDLNVAGMLRNRSLAQAIWSTAFGQLRRQVEYKTNWRGVVLVIADRWYPSSKTCSACKTVKNKLMLGERVFRCEACGLVLDRDLNAARNLAALASSASCVGTLNSPAGNHVRPGLPGDGIATGRPETTVAGQP

SEQ ID NO: 21414 - protein, 309 aa, Enterococcus sp.
MSVLKAYRFKIYPDEAQKQFFMATFGCVRFTYNHLLVASQQKKEQKLTPAKLKKDYPFLKETDSLALANAQRNLEKAFRRYFTGKSDFPKFKHKSNPWQSYTTNNQGHTIYLKEGQLKLPKLKSLVKVNYHREITGQIKSATISAKNNTDFYVSILCVEEIPSLPQTSQSITIAYSPSELLEGSQSLLQITFNQDSLVTKIDKVQKKLKIRAKVARKNRIPLAEAKNYQKLKERLARLQVSQKEKKEDFFDQLSYYLVCHFDQITVDAKIIENNHEACAVVFTKADWHCFYKKLVYKSNWYGKKLIDLD

SEQ ID NO: 21415 - protein, 172 aa, Okeania sp.
MVPDVSFSLEDKSVPNLIPTENLKTAVGIDVGLKEFLTTNTGETVSVPNFYRKSQSNLARKQRKVSRKEVGSNNWRVAQNRIARLHQHIARQREDFHYKTAHKLVKEYELIAVENLNIKGLARNSKLSKSIYDVAWGAFIEKLNAVAVKRGIHVSRGEWPFARTSSQYITKL

SEQ ID NO: 21416 - protein, 412 aa, unknown
  TnpB Polypeptide
MVQENSLRIVKAYRLKHIHDVSQFITDYLNILRYAIWIIWNNISWKNDKPILPSTRGFKRKLRSELKSKWCYASHYVDSAIKQAYSIMKSWRKRYIKGKAEKRTPVIKRRFVRIKNTLFTYNEGVIKITIKPYEEYLVIDLSPIIDIISRDLSKNPCKSDIGELILKDNEVVITIRKNFTRRKVRGFIAWDVNLRTLDGLKVDLENNTAEWIRYDISYLHHVHRVYEIKRRKIQKKLHRKQRLMRRLLRKYSRRESNRVNDYLHKLTSFIVREFNEYDHVFEDLTYIKDRIASTRSRRVNRVNAKHDYRKIQKMIEYKALWNGCQAYYVKPHYTSRTCPKCGFKVKTRIGQVLTCPRCGFKADRQFVAVWNIAMKYLQMWGIRGLPESPQRVMTPQTLCWGKGELNKNHKIS

SEQ ID NO: 21417 - protein, 573 aa, unknown
  TnpB Polypeptide
LGKKQFPDMSRQKKQQINSESIPEHSSGGKRKEKSKPSAPHLGKGDTTLNHIQLVLELSGTQSSTPECRAEHSNQILIDKSQLSPLCTQTPKSSAKSGEGLISSEKNCKPYWNESCKKLSALLLSHTKIDLPDSVLTTFNGYANNTGVKSWFSMRQTCLLKPRWLRISLPSSTVSALDSTVSENTKLKSKKIRVYPSQELNKLWKQWNAACRYVYNQAIALQKADAPNVANASLSKKRWSKLSLRNAVMQSALPEWVKETPCHIRQNAIFDAHQAYSASPDCKFRSCRAPKQTIKFNDSNFSKGTWYPKLTKGLTFRASEPIPKTCERASMLIKEKDRWFAVFPEPVLGTATQSISVIALDPGVRTFLTGFDGSKFLEFGRGDMGRITRLCQHLDKLISRAAKCNNRRQRQKMYKAAARMRTKIQNLVNEAHKQVACYLTQNYRLIFLPTFETSQMVAKAKRKINSKTARSMLTWAHYRFKTFLKQAAQTRGCIVVDVTEEYTSKTCTACGHIHLKLGGAKKFRCPECGHELDRDFNGAFGILLKALQDTAFTISPDGVAIVALPDNVSSCVA

SEQ ID NO: 21418 - protein, 414 aa, Natronorubrum sp.
MAEVVRNIQVKLNIPESRHSDVDQTFEQFRQAAQHVADYGWDDGPDHLVKAKNKLHKATYTEVREKTNLQSSLVQSARNLAATALGNCKDLLNDDKNTSKPEFRGTVIVYNGRTITYNDDHVTLATTGDRVTAEYVLPHDDEGTLFEDYWDDEEWKKKEATLHKRDGEYYLHVAVEKEVEPISSDEKTENGVVLGVDLNVDGYLAVTSTGAFLGNANELNHKRDEYERRRGNLQQTGTRSAHLTIQSIGGRFAEWSRHRLHAVSNGIIREAVENDCTHIAFERLKYIWTRLSNGSKFQQWAFREIQRQVEYKAEEHGIEVDTVTPQYTSQRCSHGECGFTHEENRDGDEFECLKCGKELHADYNAARNVAWRLVQNWLKSGAGRATSQLALKSGTVNANGDFTPPLNGGRVRVH

SEQ ID NO: 21419 - protein, 417 aa, Natronorubrum sp.
VVDDYVCRTAITCLSVDGEQRELLEETISEWKRGCQIATDMAWGKCNTKSDVQPLAYDDVREHTDLGSQHAILATHQAAQAITGCIERRSKGKKVSKPTFTAPTVKYDTRTMTLFDDGTVSLSTTKSRVRCELALPDADDGYQRQYLDSDTWSVTESTLTTRDGDYFLHIGFRRPKNDTEQNTAEDGTVLGVDLGIENLAVTSTAYFFSGRESTHDLREFEKVRAGLQQTGTRSAHRTLEQSSGRELRYIRDVLHQASNAIVDEALRYECNVIAFEDLTHIRDRTGASWGHRWAFRTLYEQVKYKAEAEGFSVKQVGSAYTSKRCAECGFTAGENRSTRNDFRCVNCESEANADYNAAKNIGMRYVRRGQQSSRRTGNSQLALKSGTVTPSGGFTAHPEGFDAESTDKFHPQSAEGA

SEQ ID NO: 21420 - protein, 232 aa, Fischerella sp.
VFTTKPACSDGTIIDDPKFLANTQQKIEQTSKKLRRKRAPNFKKKIKASKRWRKVRKQISKLQNKVANQRQDWQHKVAAQIVSGNSLVATEKLNIKGMTRKAKKGSKGKHQKTGLNRSLLDVGIGNLISLIRYKLDECGGVFVDVPLKIAPSQTCPQCGYKKKKELSQRVHNCDNCNLIADRDVAAAMVMLNYAKGLGTSLSNVDADPLSKNPQLCGGFRKVQQLKRQKPRT

SEQ ID NO: 21421 - protein, 382 aa, unknown
  TnpB Polypeptide
MMRDHCGHARYVWNLAVEQYAHWRPGRACAPGYVEQCRQLTEARAEHAWLAAGSQMVQQQALRDFGQAMAAFFDPHNPAGRPGWRKAGRNEGFRIVAVRTGHVRRLSRKTGQVWVPKAGWVRFRWSRPVPSEARSYRVSMDRAGRWHVAFAVIPEAIPAPGNGQAVGIDRGVAVSAALSTGELLRVVGLTPPEHRRMRRLERKLTRSRRGSTRRGRVRLAIARLKVRESDRRKDWVEKASTSLARRFDLIRVENLKVKNMTRSAKGTPQDPGRNVRAKAGLIRGILRSGWGLLVRRLEEKAPGRVERIKPAFTSQRCSACGQVDGKSRESQAVFRCTACGYVCHADVNAARNIAAGHAVTARGGDGITVPVNREPQLLLQSE

SEQ ID NO: 21422 - protein, 419 aa, Lentzea sp.
MRIAAPFGRRNTRYGRDVRTAYKCRAYPTPDQVELLNRTFGCVRLVWNKTLAGRSHRYRVKGVRTSYRETDAALTGWKRSEELGFLSEVSSVPLQQTLRHQHTAFRNFFAGRARYPRFKTRAGRQSAHYTRSAFRVRDGALTLARTTEPLRFVWSFDEASLVTLDPTMVVISREPDGRWYVTFAVDITATAPLDTTTGAIGVDLGLTHLLVTSDGERIANPRHLARKARNLARYQRRLARCRQGSRNRRKATLKVARAHRKVRNARRDFLHRTTTALVRSAQTIAIEDLNVAGMVRSRSLARAISDASWGELRRQLEYKCDRAGRALVVIDRWFPSSKTCSTCGWRLADLALSTRHWTCPGCRTRHDRDLNAAKNILAAGLAVVRDVPGDACGADVRRRGSSLPLSATKQEVRAARHSG

SEQ ID NO: 21423 - protein, 459 aa, unknown
  TnpB Polypeptide
VYRANTAKLAVDKEADERPREVNEVTRTVVVRSEQLPRRIFRIFVELEGMYRNIVEQLVLYAVNNGITKFTRLKAEKYRELRSLYLQPPSHYIYTACQDAAERAHSFLRMRKMGRARKPYPEVRNVSIWLDDHLWRAEGLTSISITTHKGRLRVSIELDKHFLRYVNRGWRLSSEAKIKLDHRERRLILYLTFRKEISEYRPKGYITVDVNEDAEAVLIDDVVYLFETDLSRITLGYYYRRKRVQEKYDRVYGPGNRPTRRVFKRLGSNERLLKKEIRWKLATLIVREAAKRQAAIVLERLGKEPAKNMIERIKDPQLRHRVFQAAFKGIQKAIEEKAREYGVPVIYVDPRNTSRVCPIHGAEIIYGRNRHGVCSKGGETWHRDVAACYNLLRALGGDGGSAPSRVRALVPVDGGPVPLGPTAAHEPIRISRSLWARWKSVGQTVKTPKRFYTSIISPI

SEQ ID NO: 21424 - protein, 255 aa, Microcoleaceae sp.
  misc_feature (6)..(21): Xaa can be any naturally occurring amino acid
  misc_feature (250)..(251): Xaa can be any naturally occurring amino acid
LENFNXXXXXXXXXXXXXXXXKGLLRKDIQGLLPKLKKEHEWLGTDVYSQCLQVVALNLSTAYKNFFDKRAKYPNFKSQHHRQSIHYPQNVKFDGDNIILPKIGKVHCVRHRDFEGTRKTVTISLNPDGKYYASVLVDDGKETITPSTEGNAIGIDLGLTHFCITSNGSKYDNPRHIKKHEKNLKRKQKKLSRKVKGSNKRKNARKLVAKVHGRIARSREDFLHKLSRKVVNENQVLAVENLAVKNMVKXXSQGN

SEQ ID NO: 21425 - protein, 464 aa, Thermoplasmata sp.
MKVTRTVKIPIHHETTKKKISHQDNLTARLTYAVREWYKIIDENELENKSDCSPYESEVQEKTKLSAGFVQQARDKALWTREQDKESHKEWERKLEKAKEGTKWYKKLKEREPSKPFTSKRSKQKKIPVRFDYRTGSLEEADLALTDSVIRISTLKKGERIVILLNPGEYHKKKLKKADKICSFELVHHPERGCKYMVHVTYEYDIKTRSVDWIRGVDLGVLRGLASVKLPWTRKNFSIRKTDKLAEIKELNDRIAHSRRLEKYEALKKLRKRRSNLTKDYDRKLAKEFAEHTDGEIVIVGDPQEIRYRKFKGNGDKIGRKVLQNWTFGRLGYQIVEKCRERGTISIRFNEWNTSNRSYCCGEKVKSTGRRVECTNCGQNYDREFNSCVRILQTQQEFSRKILRSSEFFQNSERKASSYLENKSSEALERSQKLAGATDELARTMDDSGLEPWMSMEAHTLGCG

SEQ ID NO: 21426 - protein, 477 aa, Caldilineaceae sp.
MAKPVKVTRTLHSQGLNRSKHDRLADMAVLCGRVRADTWRRCGGIATVRQSPYDIRDDWMSEGYDWYGLPARLGKAMLTDALGDIKAARESAKVPVRKAIRHRTRGDKAERKRLYTLLKLDQWDEDPFLHRQMRNRWKGGRSHVTNQIVADSGSYTTKVWKGRAWVYLQGMERGQRIAIPLKGTHLPSGTLRILLQPNGQVAVHYAVDETEVCSTRPCGDATVGVDKGYTEAYTDSDGERHGQGLGDLLAAESDHQKDKGQRRNRLKATAEKHEAKGHHRKADNIRRHNLGRNKWNRRKRRHKKRTRDHLCHAAHAVVDKANTIACEDLTASMKSAQYRHKDTNRRLNGWVKDVMADTLTSISRRRGSAPALVNPAYTSQIDSRTGLLQGRRQWDRFYCCDGAVLDADANAACNILARLYDDEITLYTPFREVKALLVERTRLSVGTAPPGLELRGPATTPPSTESELPASVPKCAE

SEQ ID NO: 21427 - protein, 285 aa, Lactobacillus sp.
  misc_feature (66)..(66): Xaa can be any naturally occurring amino acid
  misc_feature (170)..(285): Xaa can be any naturally occurring amino acid
MVSSTALLTQNGWKNKPLGGNVSMPDVVTLLNARCGSGIITALTIWKSLMIIPTGSVQESIKPAAXMLFRHRGGYPHFKNRHSLRQSYTGRSTCKVLARRRMQLPKLGSIRTSRTGLVGDANIKRYTVSYEPTGRYYLSLQVEIEVNQLPEMHQSVGLDMGLADLVISSXXXXXXXXXXXXXXXXXXXXXXXXXXXXXXXXXXXXXXXXXXXXXXXXXXXXXXXXXXXXXXXXXXXXXXXXXXXXXXXXXXXXXXXXXXXXXXXXXXXXXXXXXXXXXXXXXXXX

SEQ ID NO: 21428 - protein, 514 aa, unknown
  TnpB Polypeptide
MRAQTPSYVVSVKLHLPKQIENRLEKSFHISNSAYNEIISLGLKRFEALKRNPYYQELLEARRLANAGIDKLKKAKKKTKGLTQQVKLYDKALFELRKAYGLTECELQKHLAQQRRKSGSPYQQLSASEIQIIVGQAYKTLEKVLFYKIKPHKVRFRSKFDLDVSYRNRVNTEATRLVPSDKKGMAYRLYIHKKSTFVDIPVKAFNNYQQISLMRSEKIKYVQIIRKTIRGKKVYILQIVCQGFPPSKVTKGKGVVGIDPGISTVAFASQKEVALVDLVPKDITKKERLLKRLDQAIDRSRRVNNPDCYNENGTIKKGARFKRPSNRQMHLRNRRRKAYRSLSEERTKLKGQLVNRLISQASIIKIEELNVKGLQKRSRDIRINPKTNRPFSKKRFGKAIFRAAPSAFRTALETRASQLDVDFEVISPKNVKPSQYNHITQTFEKKSLSTRVYDLSNEYKNVQRDLYSAFLIGHIENDRYQQKQLERDFPDFYDLMKTFLHQPIKTKRLAWYLN

SEQ ID NO: 21429 - protein, 382 aa, unknown
  TnpB Polypeptide
MEKGFEFPLYPNLGQVRLLARTFGCVRWVFNRFLEEKIKVYKETGQSLRYGDCSRLLTELKKQEDAAWLSEVEAAALQQSLRDLDRAYKNFFRAKNIGFPNFKKKKSRKTYRTYRARVIDDNHVFIPKLGVVKARISRPIEGRIVSATIKQVPSGKYFIVFTCVDIPEAPKAKTGKAVGIDLGIASLVTTSDGEKIGGVADTRKLEKKLAREQRKLSRKKKGSNNRAKQKIRVARAYEKIANKRKDHLHKVTAKLISENQVICAETLNVDGMLKNHHLAKSIAMQSFATILGFLEYKAKEKGKIFVQVDRWFASSKTCNSCGVKADAMPLNIRSWRCGSCGAVHDRDINAAKNILAQGLRILNGTEGHSGTTAKSLAVTLVE

SEQ ID NO: 21430 - protein, 425 aa, unknown
  TnpB Polypeptide
MIPKRENLVRITMYLHVIHGIIDSMNTRSSLHQRTLSVRLDMDKADLELFQKVISEYNRLWGDIVAWCNENQTANRTRLQKSLYHKARKKYPDLPAQFVCIALRDAAGAVKSWNSNNKRKRWQLKPVRRKQTINYDRRIMALRGNLLTLSTLTFHKRFKTLIDLPDWFFQRYPGSKINAAKLSLKNGYAIIHLIYRVNPTKTCAGTQIVGVDRGIRNIITTSKGGEYSSAKVRGIKRKYAHNRATLQAKGTRSAKRRLKAVSGREKRFISDVNHQISKTLAMDPEVKTYVLEDLNGISKKKEKSSRKAGKKLRSWLSNWSYAELEFFLTYKCDFVGKTVELVPAAFTSQRCNRCGFTDKKNRNGARFDCKQCGHSAHADHNAAKNIRDKYLFAIDSKAGRSQSPTWMESPKNFHVQAPPLVGAGN

SEQ ID NO: 21431 - protein, 356 aa, unknown
  TnpB Polypeptide
MKNRECWKDLNAQSSQKVIEELSDAFQSWFDLRHKDPKANPPGYRKHGDTRPRSTVTFKADGFKHDPENNRVRLSKGSNLKEHRSDFLLCEYQTRPDVDLSEVNSVQNVRAVWNGDEWELHFVCKVSLETNDAAGDGVAGIDLGIKNIATVAFPDEYVLYPGNSLKQDKHYFKRSEYDTESENGPSEKSMWARRKLTERETHFYHTLADTIITECVERGVGTLAVSWPEDVRESDWGKTGNKKLHTWAFDRIYQYLHYKGEERGVEVLKENEWNTSKTCSGCGDDTKANRKYRGLYVCSSCELVGNADCNGAENMRQKITPSPHGEDRSNGCVAQPSTHLFDRESGTFRTREQVVS

SEQ ID NO: 21432 - protein, 394 aa, unknown
  TnpB Polypeptide
MQLAERIQVRKTPALCLLCHRAKNLYNLSNFYVRQELFHLGNVLTYFDLDFMLRKQQAYQVLPAQTAQQVLRQVAGDWRSYFAACRVYRKDPWKFLGAPRPPRYKPAGGESVATFTKQQCQITGGWVRFPRKAELPPVRTRVTAFQQVRVVPKGSCYVVEVVYNVEPADLKLDRRRALGIDLGVANLITAVNNVGQPPFAVKGGVAKSVNQFFNKRLARFRSIAARANGMLTTKRISRLSRVRVNKLGDIFHKTSRAVVDFCVRHDIGTIAIRYNPRWKQGCRLGRTTNQNFVGLPFQALVRQVQYKAALVGITTVLVDERYTSRSSFLDSESVGRHARYAGLRVQRGLFRSRTGTIINADVNAAYNILRKAVQEAFADGIAGAGLHPVLLGIA

SEQ ID NO: 21433 - protein, 416 aa, Ktedonobacteraceae sp.
MQLVEQHVIDRDDPRFALIGEAAFKSKNLYNAGLYEMRQAFIHQGLRLSYEEMDRRMQLHEAYRALPAKVSQQVLKQLAGAWAAFFEAMAAYKENPSTFIGRPRLPRYKHKTEGRNMLVYTVQALHGGQSKQGIQGVIRPSGLAISVQTQQQHIDQVRIVPRHGHYVVEVVYSKDPIQAPVDPALCVAIDLGVTNLAAITANREGFVPRLVNGRPLKAMNQWYNKRMKELTLCLPKGDRERVTKQMERLTTKRNRQVNHYLHAASKSILDFLVQEGVGTIIVGKNPLWKQEVGMGRKNNQNFVSIPHARFIDMLTYKAALVGIQVEVQEESYTSAASFLDLDPIPTYQPNDETAYTFSGKRIGRRNRLYRAKDRRIICADINGSYNILRKRRPDAFSEAKGVAAYVVQPVRLAIPV

SEQ ID NO: 21434 - protein, 668 aa, unknown
  TnpB Polypeptide
MEVKEKPSDEFFKCVKVSLKHVLKHYEVNQPKINKTVIKAHKIVIHTLQFMKLYLLYYYDINNKLPKIDKKFVNSCMKIICKKKSVGRPPKKEIKELKEKLTTFYNIHYKSLCQDEELDYTHMNTILDYLTIDILTMYENNIKQHYIKYIERYVNIVWRKKEMIHFIRKVKKSKKERETAVKQLCNQLRRIKNDLLNIENTNYKSNSIYHKWINKQHKLVIPDKKKFRKNNLYYDLQCNPQDYFSCMIFMMKQVEKNECSINNVFPLRNDIIPKHIRLDTTTLVHLLMTKKQGKKSDYLFKGNLKRFEDKIWNFFFRTEKQCFSKKWYSFHHMIETDGISCSILLLRKDKVGKRIRTNKIPNQEQYIDEVKDYSNLQDKNIIAIDPNMSDLVYCVDDDTRERNHFRYTQNQRRKETKQKKYQNIILKYTKEKIDGKTIIELETEISLYSRKTLDIGEFKKYLKKKNEVNSKLFQFYEKQLFRKLKLNGYWNRLRSEQRMMNRFSKIFGKPTDSIICIGDFEQRKHRKFKEPIKGKGFRTLFRRSGYKVYLVDEFRTSCRCSNCEGGECSKFRKYRNPKPMKNNSILSHGVLVCKTCSALWNRDENSSRNIYKIAYNAIHQNERPTYLSRSKVISGTTSVGKLQCHSFSIKEREPAQPQFTCPETGKLC

SEQ ID NO: 21435 - protein, 373 aa, unknown
  TnpB Polypeptide
VSDESLRKAYKYKLKPTPEQVRQFEQTLWRCRTLYNTALEQRKVAYERCGVTLSAYQQQAELPDLKTALPEYAAIHSQVLQDVLARLDNAFQAFFRRVRAGEKPGYPRFQGGNRYHSFTYQQFGHGVRLENGSLVLSKIGRVALRWSRPLEGTPKTVTISQEADGWYAVISCAAVPAQPLPATGRETGIDIGLKVFLITANGELVENPRHYRKAEKELVKAQRRVSRRKKGSKRRRKAVGCLQRAHQRVQRQRADFHHKTALALLLLYDTIYLEDLRVANLARNRHLAKSISDASWVAFRSILEAKAAWAGRRVVAVPPAFTSQDCSGCGERVPTSLSVRTHVCTNCGLVMDRDENAAKNIQRAGQALRGLAA

SEQ ID NO: 21436 - protein, 378 aa, Chloroflexaceae sp.
MDKMLKTTYKYRVSLTRTQRRLLEQQLEICRWVYNQTLALRKVAWEERKETLSAYDTNKFLPVWKTEHPELKQVYAQVLQNVQARVDLAFKAFFRRTKTGENPGYPRFKGKRRYDSITYPQYRKGMRLDGNRLTLAKFGTVQVKLHRPLEGQIKTVTLHRTSTDKYFVSFAVEKEQKQGLIIPEVAVGVDVGLEKFATFSTGETIPNPRFFRRDAKDLARAQRHLNKEGKGSSERNKWRKVGARIYERIANRRKNFAHQVSRSLVNRFRIIVFENLSISQMLKNHCLAKSIADAAWGQLAIYTRYKAEDAGSLYIEVDPRGTSQRCSKCGATVKKSLAVRVHKCPFCGLEIDRDLNAALNIKAVGLHSVGSPLEALAL

SEQ ID NO: 21437 - protein, 382 aa, unknown
  TnpB Polypeptide
MKTKRAYRYRFYPTPEQETLLARTFGCVRFVYNTILSWRTEAFQQEQTRIGYKDASARLTALKKDPERAFLNEVSCVPLQQCLRHQQLAFQSFFEQRAGYPAFKSKKHRQSAEFTASAFRFRDGQLFLAKCREPLGIRWTKQRETLPSVPSTVTVSRDTAGRYFVSMLCEVETQPLPVTLRTTGIDLGLKDLFVTADGKRTGNPRHTAKYAARLAKAQRALSRKQRGSKNRAKARQKVARLHAKIADTRLDGLHQLSRRLINENQVVCVESLAVKNLIRNRALSKSIADAGWGELVRQLEYKAQWAGRQVVKLDRWFPSSKRCSCCGHTLASLPLSVRIWVCPECGTEHDRDMNAAVNIKAAGLAVLALGENVSGIGRVPLS

SEQ ID NO: 21438 - protein, 399 aa, unknown
  TnpB Polypeptide
VVEEYRIERIRLYPTVAQRWQLESYAGAHRWTWNWALATRQAHFTEHGATLSYYEQSRALTVLQQHPDTIWLTGVPRRVKVGALRDLDKAYRAAFRRVQRGERAGFPRFKARKRGDASFEIPAETRFDGRRVKVSGIGWVRARGGRVIATSTTSGRFFRDRAGDWWAALRYIVAVPDTAVRDVAAVGVHLQLEYAMTLSTGEIIPRSAFVGRADRKLRRLKRAAGRTQRGSRNRRRAHLRLARTVRHVANQRKDWQHKVSRSLVDTHPLLVMQECKTRALPTGPENQRAVWGGRKRTSRISDATWGGLIRLIQEKAAAAGCQVVTIAAEVPTAAICSQCEHERAPLSELVSIWLCEHCGTLHERGTNTARNILSVGLRGDAHGPSPGSARRRKTPVDSS

SEQ ID NO: 21439 - protein, 457 aa, Thaumarchaeota sp.
MLASGQLLGDEGREPIPPAIPEGGIREVKHASRRANVVRLLPSGFQGRKLRRLASTSAKLFNEVNYERRQQFFHGEKVDLEGTWDKYYGRYKGALGVNAQAVLQKNNEAWSSFFSLLKLKKEGRLPPHVRRVGPPKYWKDRETRERRLILVVRQDRYVVDEQNHRLVLRDFNMEIDFAGRLRWHGKQGRLEIRYDEVRRAWYAFIPVEVGVEETKMGKKSKYIVRGERRSIRIAGPRGDGAAGVDLGINILASAVTSGGAWLLYRGSRAKEDFFYITRKIAKIQSKADIARKGGDEAKFRRLDRRRRRLFRKLVGRVAHLYWNLANHLVRGLWELGVSRIYLGYPYDIAQDRGSKLTVNVWRYKELMRAIELKAQEYGIRVYEVLEYNTSNHCAIHGTKVTRGPRGVVTCPLGHKLHSDLNGALNILRRGAGSMPTTLGRPLSFLVDHGGVAPAKGA

SEQ ID NO: 21440 - protein, 187 aa, Okeania sp.
MPGNYILNLKKALASMTWKKSTKRTIITKFYIRSSAQQILRTVAESFRSYYGLIKAYSEGKISYRPKIPNYRKKGGMATVSYPKQALKLKDNQIRVPLGNTCKCWFGLDSFLIPMPSNLEFSSLKELRILPRNKCFTQEFVYEKEVVVKPQLNQDNVLGIDHGLNNWLTCVSNVGTSLILDGKHPPL

SEQ ID NO: 21441 - protein, 418 aa, unknown
  TnpB Polypeptide
MGGGAGKCRRASTTMPGKRIRTVVASLVEPTTHKEKKLRGLQSVYQEALCEAFDANATTMTAVNDIVTPYDLPYQAKDALKRHVPGLLKSGSAELSKTQPIRFTNRSAVFDYSSDRNHSFCWEVPQPGRGTNFWIPLAINPDQREWWLQLLNGEATAGQLQLITQPQQSRWDLHVPIKLKTMDREVDCESCTPIGFDVGEAILLTGCALLNGRPVDPLLVDGSRARHLNQTLQTTLQRLQEREAAEWRIDEQAAYFQNAIRDEIETATRKAVEYAAGFDQPVIVLEQLTSIHDDLNFGTHMNRRLHVWAFDQLQTRLADKAADAEIPVRYVDPAYTSQICHACGEIGTRPRQAEFRCTNDDCWVSVYQADINAAANIAGRLDPWGESCPWKPGSDDMPWNGRTRDSATGPREQSPSQR

SEQ ID NO: 21442 - protein, 471 aa, unknown
  TnpB Polypeptide
MVGSVLDQGASCGDRRQARWAHDGCAVYQAYRFALDPTPTQRRSLASAVGGARFAYNWGLELVKGRLDERAAGQDVQIPWTLPALRREWNRAKQQAAPWWADNSKEAYSSGLDGLARALRNFTASRHGRRKGRPVGFPRFKRRGHRDSCRFTTGAIRVLPDRKHVQLPRIGIIKTHESTRKLARHLEHGAGRILAATITQTAGRWYVAFTCEITRRLPTSKARMSAVGVDLGIRHLAVLSTGEKVPNPRPLERLQHKRRRLQRRWNRQERQRIGSLRPHPSHRQQETRRRIAVVEARAASIRRDGLHKLTSRLVTEHGTVVVEHLNVAGMLRNRHLARALSEAGFAQLRHLLRYKAIWYGARLVEAGPFFASSKTCSSCGTARATLRLNERTFRCDNYECGLVLDRDLNASRNLAKLADHVAQSGWETISARGVDVSPGLAGRTAMNREAGTGSSLDQTGTVGAQAPTART

SEQ ID NO: 21443 - protein, 351 aa, Gammaproteobacteria sp.
MIQVQLKLRPNQALDAKLDEWLWMLTGVWNWSVRKIENDAQGGIYYTPKDFQNILAEHGKKMGVPSHTVQGILAQAHTAWVRCFKKMGGKPKLKGQRNKLNSIPFPDPVRAPEGNYIKLPGLGKIRFHKQELPAGKIKCGRLVKRASGWSLCVFIDADRKPIEGSTGTAVGIDPGFRDLITLSNGEKVNHPKELQESLARLGQAQRGGNKKLVARIHERIKNQRKDRNHKLSLRLVKDYSVIALSKDNVKGMARVYGKSVASSGIAQLRSMLDYKSRAGGVRYLEVNSRNSTRICSACGSLTGPEGRAGLKVREWACIECGTQHDRDINAAINTLTAAVGTTVEMEVRYAA

SEQ ID NO: 21444 - protein, 386 aa, Lachnospiraceae sp.
MNKAYKYRIYPTKEQRTLLAKTFGCCRFVYNQALNWRVAAYRADGTSISYVDTAKAITQMKNNPDTAWLKEVDSVALQQALRNLDAAFKNFWNNKSTGFPKYKSKHRCRSSYTIPVTNHNVMVFDMAVRLPKLGYVKAEIHRAAPSDWKLKSATVSQDSDGRYYASILYEYEKAIRPVEVDPGKTLGLDYKSDGLYVDSNGDCAEMPHYYRKSQKQLAKAQRILSRRKGSIKREPKSHNWKKQHLKVNRIYTHVKNQRKDFLQKRSAEIANQYDLVAVEDLSLKEISARHKDRHQKLRLGKAANDNGYGMFVNMLTYKLADRGKWLVKVDKFYPSSQLCQCGYQNPITKDLSVRTITCPVCGRTYDRDINAAINLKKEGYRLYKSA

SEQ ID NO: 21445 - protein, 383 aa, Bacilli sp.
MLTILRGYVFRLYPTNRQKELINKTIGCTRFIYNHFLSEKINDYKKAGKSKSCYDQIKELPALCREYPWLSEVDSCALRTSLFNLDDAYKRFFNKQNEFPRFKNKDIGNSYKTNNIKNTYKDKKYETIKVDFKNKIITLPKLKEVRFRGYRNKTNFIGNIKSAVIRRIANKYYVSALVEEPLILPEFVPKSIVGLDLGIKDIIITSHNEKIENSLSSLEVKKRIAGLQKGLARCKSGSKNRYKIKLKIQRAYMKLKNIRKHLIHNVTNKLVKENNIIVMENLNIKGMYQLHSIAKSLSNLPLTEIKRVLEYKCKWQNKRLLTINRFYPSSQTCSVCEYQNKEVKDLAIRSWECPKCGSLHDRDINASINIMFEGLKMYMQSLV

SEQ ID NO: 21446 - protein, 384 aa, Shewanella sp.
LYFWLNIIQGNTLTKIDQVKLIAFKYRFYPTNEQALMLAQTFGCVRFAYNSALGFSKEQYDLGNKTNYNDWSKNLTLLKKNADFSWLKDVSSVPLQQALKHLDKGFKSFFKSGFGYPKFKSKHNHQSASYMSNGFKWDESKQALTLAKMKQPLKIKWSRSFNGTPSSLTISKTKSGKYFVSILVKESINQLPIVNKTVGVDVGIKDLAICSDGTKFNNPRTSNKYAKKLAKASRNLAKKKKGSHNFNKQKLVVAKIHEKIANSRKDFTHKMTSKLVIENQVIGIESLKVKNMVKNRKLSKHMHDANFGEIVRQLEYKADWYGRTVSAISQWFPSSKMCSNCGAMYSGEWSLAIRTWSCECGVTHDRDQNAATNIHIESLRLLVA

SEQ ID NO: 21447 - protein, 368 aa, unknown
  TnpB Polypeptide
MKTYKFKLYNSKKNRKLQYQLWIASKVYNHCIALHKRYWHLFHKSLNKNELQKHLTKLKKQKKFICWQDIPSHTIQDITEGIDRGYKLFWGNLKRKKKTAPPKFKSWRKYRSFSYNSVGQKIIKGNTIKIAKNKYKFFKSREIDGKIKLLTVKRDACGDFYVYLVCETPEVKIESRLGKSIGFDFGLKGKMLVAPNKGDDIIAPDFFKRQQKDIAKANRKLYTKRLRSNNRRKAHLVLARLHRKVVNQRKAYHWQLARELCNEYAIICLEDLNMKWMQKGHGKKVGDYGFGEFLNILEYIASQFGTKIVRVDKFYPSSQLCHECQYQNPEVKDLSVREWDCPSCGHHCDRDRNAAQNILDEGLRILSA

SEQ ID NO: 21448 - protein, 413 aa, Streptomyces sp.
VSNGHSREAVVQVPLPSDRCAGSGAVPHFRLRAQGLQHGTHGQKRGVGAAGACQLQPDVGDADGVEEDRGTRLSQRRVFGPTSAGASAFADCLHSFLRQTRDVPTLQEPQEVPPERGVHTTSAFRFRDGRLTLAKMSEPLRIVWSRPLPAAATPSTVTVSQDNAGRWFVSLLCEDTGVKPLPPNAEAVGIDVGLDHLLILSTGEKITNPRHERYDRTQLAKAQRELSRKAKGSKNREKARRRVARVHARITDRRRDHLHKITTRLVRENQTLVIEDLTVRNLLKNGRLARAISDAAWSEFRGMLEYKSQWYGREVIAVDRFFPSSRLCSACGALKDRMPLNVRTWTCDRCATTHDRDVNAANNLLAAGLAASACGAGVRPQRRTPGGQSAMKQEFGGATRRVPVRRAGEEVKR

SEQ ID NO: 21449 - protein, 227 aa, unknown
  TnpB Polypeptide
VSLGLDQSCVISIDLGLSNLVIIVNHTGLQLWCVKGGVVKFINQYYNKQRARLFSIKDKQGLFIQSRRLLRLKLKRDNKITDFFHKVSRRIINYCIENDFGCIAIGYNKAWKQGISMGKRTNQSFVLIPFFKLVRQIQYKATLVGITVIIVGERHTSKVSFLDDEPIKHHKIYAGKRVRRGLFKSSRGHIINADVNAGYNIGKKPVPEAFAVDGIEGVGLHPYSVTV

SEQ ID NO: 21450 - protein, 285 aa, Halobacterium sp.
VLGEYQRSYLEDDDYEKRMGTLHYRPDEEAFYLHVVIQKEVDQRDGERVLGVDLNLKNVAVTSTGRFFDGGELLWGQNHYFRVRRSLQNKGTRSAKQVLRRLSGRENRFVLNRLHTISRGIVEEALRHDCSYIAVEDLTHIRSRMDAHDDRLKRQMHNWAFRELQEQIEYKAAEYGIRVESVNPAFSSQTCSKCGHQSSTNRDSETGWFVCNECGYEVDGDYNAAKNVGLRLLALPPGKRPDGLGNGQLALKSGTLNVSDTSSVHSSLEFERESTDKPTASAVGC

SEQ ID NO: 21451 - protein, 438 aa, Microbispora sp.
VVISSRRRKPEGYDQGVELTRQSRAHVARLDLTAAQVAVLDGQAHTARALWNLLHEYCTFRQGRLASVKDCDTAIRQARREIDWMRRLPAPAAQAVLRTYRQAWANFFNPGHPAGRPTFKIRSRTRPAVDVPQGRDLNIARLNRRWGAVNLPKVGRVRFRWTKDLPGVTRGGPAGRITGARLVKDAFGWQIVFRTEAVVAAAPAAHPGPVAGVDRGITVALALSDGTMREHGPWLRDGEQQRLRRLEKTSARQRRTRTPGRPASKRLARTYDRIARLRATAKRRAVDWQHQTTTELARTFGVVVVEDLTITTMVRSATGTIERPGRNVRQKAGLNRAITGQAWGRTVTLLEYKTRDRGGLVVKVPAPGTSQTCHRCGHRDPASRDGTRYSCANPACGWTGHADTNAAINIRNAAGTAVSGRGDLGAARSAKRQPPHAA

SEQ ID NO: 21452 - protein, 250 aa, Ruminococcaceae sp.
VDATALQSSLRNLDNAFQNFFRRVKNKERPYGYPKFKSKHVHRKSYVSKNNHGTIALSDKKIRLPKLGMVKCRISKEVQGRILSATVSQNPSGKYFVSLCCTEVEIEKLPAAGKVTGVDLGVKALATTAEGDIYPNNKYLNQSDKKLRRFARRLSRKKKGSRNYEKARIRKARLEEHIANQRRDDIQKATTDLIRKYDVICLEDLKTKGMMNDHRLARSIGDASFFEFRRELEYKAEFYGRTTTETSMPR

SEQ ID NO: 21453 - protein, 410 aa, Nocardiopsis sp.
MTSKSVKRAYRYRFYPTGAQAAELSRTFGCVRLVYNRALAERTAAWHQRQERVGYSQTSVMLTAWKRSEELSFLAEVSSVPLQQTLRHLHTAFRNFFDKRARYPRFKSKKTSRASAEYTRSAFRYRDGHLTLAKMADPLDIVWSRPLPEGARPSTVTVSRDAAGRWFVSLLCEDTITSAPAIRDAVGVDMGVTSLMALSTGEKVANPRHEQRDRARLARAQRALSRKQPGSANRDKARRKVARVHARITDRRRDFLHKLSSRLVRENQAVVIEDLAVANMVKNRRLSRAISDVAWRELRSMLEYKCAWYGRDLVVVDRFFPSSKACSTPGCGYLHASLPLRVREWTCPRCGVAHDRDVNAALNLEAAGLAVVACGAGVRPQRESSRTGRPATKQEGHGATRDEALASNHR

SEQ ID NO: 21454 - protein, 373 aa, unknown
  TnpB Polypeptide
LLVAQLKLLPTEQQANQFVATADAFRKACNYASAVAFDTNTRKPAGLQKLVYRTLKKDYGLGAQSACLSVRTVCAAYTTMKANNRPATKPAEFHENSATVYDCRNFSADIPKQTISLWTTTGRVRVAYQQGERQQNLLASGLWKQADLILRDGSWFLFVSVELPDPPLVPVADFLGVDLGVANVASDSDGNLYSGQTLKNVRYRHRRLRTKLQRKGTKSAKRLLVKLSGKEYRFASWVNHNISKELVRLASGTGRGIALEDLTNIRNRVTARKRQRAVLHSWSFSQLRQFVAYKAVLAGVAVVFVDPAYTSRTCSECGCRDKRNRPSQSVFHCVSCGHSGHADLIASENIRRAAVNQPNARNGLSVARQSPRL

SEQ ID NO: 21455 - protein, 409 aa, unknown
  TnpB Polypeptide
MHIKLIPIRNMIRLSYKHRLKPSAEQVTVLEKQLHLCRMMYNSLLEHSLSERRAGRGTPTHKALTYLIPAMKARTPELNAVFSQVLQNVAKRVRSGFESYWNRKRAELRAHLPRFRGEDRYDSLTYPQFGFRLKDGVLCLSKIGDVRVVQHRPVEGRVKTLTVTRSRAGKWFAVFSCEVEEKGVHGRLPAVGVDLGLDSLVALSDGTLIEAPGSYRGLEAKSRRAHRNLSRKRKGSRNREKARVRLARVEERIANKRRDYAYKTARSIVDRYDKVYLEDFRVANMMRNRRLSKSIGDAGWGMLRSALTYMAQRSLGVIALVDPRNTSQVCSGCGAYVEKSLSVRVHRCPGCGLTIDRDVNAARNMLKRGLEIGLERAEYTPVGEVTTTQLSEAGQVASVNQEAHLIRGG

SEQ ID NO: 21456 - protein, 416 aa, unknown
  TnpB Polypeptide
MNRTNTILLTPTPAQEQELHGLADASARVWNMANYERRRAYFSDRRVPSYENQWRTFKDSEAFKRLGTCKGQALLLKLREAWGSFLALKRLQRNGQLPDHIKRVSPPRYMKDRKTRNRRAEAIYVRNDGYRQREDALVLSKNLRIRYKAGELWVGKQGRLELHYDRLRKKWYGRIPVCVKWSRKDRPHHSTPRRASIDLGICNLATCVVEGGDRAYVYSGRAVLSDWRYWTKRIASYESELKKTSMRDNSKRLSGLYQTRKRRLNHAIKGMLRDLYDRLENEHVTDLVVGDLKHIRDDKNHGAVGNQKLHNFWPFMQIRQRICELGEEYGIRVRFKSERGTSKHCSICGQTHKNGRVHRGLYKCETTGRTVNADVNGAYNILYGLQGKVAAGSGSRPMAWPLLLKWNLQEWRVNAA

SEQ ID NO: 21457 - protein, 419 aa, Moorea sp.
MIVDRERQRLNMIVYEMKLQGTKSQYRRLDEAIRTGRFVRNSIIKSWMDGQIKSCLDAYSYCKVLSDSPEFPWVSKLNSMARQAQAERAWASIERFYRNCRQKIPGKKGFPKFKKYQVRASVEYKTSGWKLSEDRRYLTFSDKFQAGTFKLWGSRNLHFYQLKQIKRVRVIRRHDGYYAQFLIDHTREEKKELTGKQTGLDVGLNYFYTDCSGTQIENPRFLRKDERKIKKLQRRLSRTQKGSQNRKKARNRLGRAHLKVSRRRNDWVCKLAQHVIQSNDVVAIENLRIRNMVKNHKLAKSISDAAWYRFREWLEYFGRIYGVPVIAVEPAYTSVDCSNCGEQVVKTLSTRTHRCEHCGYVADRDQNAAINILKSALHKLSNTVGQTEINASGEINHYLNGETQSSKLARSNRKRKPKS

SEQ ID NO: 21458 - protein, 241 aa, Moorea sp.
MQRAFKTKLKLNNKQKTLMAQHAGYSRWVWNWALNLWKEAALAGLKPSANKLKKFYTNHVKPQYTWQSTLSSRVYQFAFLHLGEAFSRFFQGIAQHPKFKKKGRNDSFTLDNCGKVMEFSGTRLKLPFIGWVSTYEPLPEIQTKRVTISRVANSWYISVAYEVESESTPKSREYLGVDVGVKVLATCSDGTVFHNPRAYKQAQNKLARLQRELSRRQIGSNNRNKTQLKLAKVHQPERCNP

SEQ ID NO: 21459 - protein, 315 aa, Desulfotomaculum sp.
VNAPKPCVNRGIPNGVTRKKRFFTVTWKPLGITRKERVLTLSNGRGRQPLKLRLPKRLSGAVIKLVQLVWHRNQYWLHVTVEKPALQKVRGDVTAAIDPGEVHTATITDGKEALVVSGRLLRTLHRLRNKVLRKFQKAISKTHKGSNRRRKLLAAKYRFLNNIERRIEHTMHTISATVARWCLVRNVKTVYIGNPDGVQKKDCGRKHNQRVSQWAFGKLRELLEYKLKRHGIELVPVDERGTSGTCPVCGEYTKQTGRVYRCGNTSCGFTGIHRDVLGASGILDKCVNGGFTRGRKLPAAVDYLRPQVLAPKRAA

SEQ ID NO: 21460 - protein, 258 aa, unknown
  TnpB Polypeptide
VTLVAHQEIENKPRAVLMEDNTIGIDLGVTDACVTSEGEIVPAVRSYRTTQGQRRKAGRVVSRRTGAKKGEKASNRFKKAKATAARIDRKAANQRADFLHKLSTRLVRENDGIVIEDLSVKGLAKTKLAKSVLDAGMGAFRHMLEYKSDRASKTVVVIDRWFPSSQLCSAGTCDYRYQSLTLSDRWWTCPQCGTVHQRDMNAARNIKTEGLRVYRTWVQDQGQSLLDGGYVAAGQVETLNAHGCRVSLPLGAVAATPV

SEQ ID NO: 21461 - protein, 311 aa, Oscillatoriales sp.
LLGREPSWFQWLYNLSVIPHLFEKGYIKACAVRKRQNGWYVSLRIEDKSVPDYKAKSLQDVVKVIGCDLGITKLVHLSDGYQIENPKFSTNKKVKRTLKIRQRRVSRQVKGSKNRKKTAKKVGLLHQKISNRRQAYQWKVAHKIVERNIDAIALEDLHISGMLRRCRVKIEEKTGRFLKNGQSRKKGLNRSISDAGWGELILKIEYLAAKQGKVVIKVNPKYSSQECRNCGHIDKSNRDGEKFICVECGYHEHADIGAAKTIRDRALKMVRGDSAKPGTMYLDAQKVSPRSKSKCGEFGNPSHRDIKTEMS

SEQ ID NO: 21462 - protein, 415 aa, unknown
  TnpB Polypeptide
MAKMGVQQVLLSPDKETKPILEYLCQQSGKLYNTGVYFARQTFFKTGKILTGKFDLDYEPSISKSTLKASMPSTPAQQTLRSVIEAFKSFKELRSLFLRGQLNFRPKAPDYLKGSKLFKVAHVSGGKLPPGTLRAYPNSGGQKPKLVDGTLRFSLGLAVRRWFGISEFFLPMPSNIDYSQVKEFTILPKNGAFYLEISYEKARQEHDLDINQALAIDLGTADNLAACVDTLGNSLLIDARAMKAMNQLWNKKVSTRKEGKPEAYWDSWLDRATRKRNHQMRDGINKAAKLIVDHCWRHRIGTLVVGWNEGFKDNANLGRLNNQKFVQMPLGKLKDRLKQLCELHRIRFVETERSVRGGSFPLGTSLEAYTSSASFLDGDSLPKYGEKPLGWKASGKRCDSFWRNPAMGGFQTLVE

SEQ ID NO: 21463 - protein, 505 aa, unknown
  TnpB Polypeptide
MSAVLRTDLLDHGMNAGKEHQVKAMLRAWRSCAVLVGREQWRLLFDDGRLNKKCRSPVEDALAAVAGAANRVQMVRFQVVGILDSFLSNRQHEFSRLVECSSLPGETKHQLHFVNRWKAWFGREPLVMKNGAEIPAETRALARRIMRHLLSKHRKPTFARINMVIDHRAVKVRASDRARSFDLWLRLATMTPRQPIEIPLRGYAYHHERQGVRKQTVQVNERGGRLFFGIVTDMSDVCRKQKESYQPQCEEIALDYGLRTLFASDQGDLLGQGLLRRLEFYDRRISRLAAYRQKHGLRTRSPRYDREVNRLRGFLRSEIGRVLNRLVEVQRPGRIVVERLHFRNPRLSRRMNRLVTNAGRKVIEAKLTDLHERFGIEIDYINPAYSSQECSACRYVDAKNRAGEKFTCRWCGRKLHADVNAPRNLRSRRSRPAVGSVKQTKAAVLRALVLGFQRRNAERWGNPQGRRGTSRDPRKQNAYFARYAPEVTLNRTGATSAKAACATGR

SEQ ID NO: 21464 - protein, 346 aa, unknown
  TnpB Polypeptide
MLVSKTIKCRIFKPTKIKYNLLDQEWNNYQDFIELEKNDLDWLADKVPVYSSYKQQARWYWDKMKKQNFPVSISNQVLKIKETNLKLAKYWIRIPVKAKKGGIWLPIKPHYEFPENYKLGESKLIKKKDYFEIHIVIRKEIEIRKSYSSVIAIDIGEKVLATVLLNGRPMFYGREIRGIRRHYAWLRKRLGERKLLKVIKRISDKEKRIVNQKLHEISKAIVGLATSTDSLIVFGNLKGIRKSVKGRRFNRIVSNMPYLKLTQHITYKANWLGIQIIKVDEKGTSKTCSKCGYEDKSNRRSQGLFKCKNCGYQVNADFNGAKNIKKRFEDYTSSNGALVQALKSRN

SEQ ID NO: 21465 - protein, 451 aa, unknown
  TnpB Polypeptide
MRVTQAFRFELDPNQKAQIALAKHVGAARFAYNWGLARCREALARGERIPSAMDLHKEWNTWKRENALWWVEVSKCAPQEAFRDLERAFRNWREGRAGFPRFKRKKALADNKARLTGSIRVTPRHVQLPRIGKVRTKERTDKLLALLHAKKARILSATISREADRWFVSLTCEVERPDPEPREVRGPEDGVGIDVGLESFAVLSDGTRIEAPKPLARALRLLKRRSKKLSRKQRRTVVEQDPETGEERKRTVFSRNYEKAALGLARLHRRVRNIRRDFLHKITTELAKAKPVLVVEDLNIRGLARNGSLSRSIQDVGWGTFRRMLEYKCAGYGARLVVAPRDFPSTRRCSRCGWVGPRIPLSRRVFRCEVCGLEMDRDLNAALNLRDYGLAALKGPTGSSPGSHACRGVPSRSKTGWGAPDPSGGGTVKGRSTSHGSLKQEAAGRLFRPSG

SEQ ID NO: 21466 - protein, 304 aa, Okeania sp.
VIYLYGCQQHLIKPDGDLKSILEFICSGSHKLTNCGIYYGRQWFFKSKKIIGKYDLEKEYKSNKHVSALYSQAAQQILRSVAESFKSFKELNKKYNKGNLHFQSRIPKYRKKDGLAMVTDPKQGLRLIEDNIRIPLGTTIKRWFKLDSFLIQMPSNLQFSDIKELRILPRNKCFYVEFVYKKKIVVPEVLNPKNVLGIDPGINNWLSCVSNLGTSLIIDGRKVKSLNQWYNKRVSILKEGTAQGYWDEKLAHITEKRNRQMRDAVNIRCKNSYQSLSEASNWYSSFWVESRTTTRVQQLIMNNE

SEQ ID NO: 21467 - protein, 457 aa, Okeania sp.
MLLKYKYKLKPHKSQAVIIANWLEMARKQYNYRLAERLNWFESTRTPVNACPLNVSVVGTLHATSVHRIYQNIPEFRTQTRDGRKKDSNGNPITNKGDKHPNIINGYVLWETVQLADLAQTKNFFPEYKSMHSQVLQDVIQRVQTTMDNFTKPDKNGKTSGRPRFKGKHYYNSFSYPQLSNTNIVKNANGLTSANLPKIGLVPFVYNRQITAGFKVKTGTVIREADGFYISFTIEDKTVPVEVAGIKPTLDNSKGIDLGLLYYAVTSDGEFLEVPKFFRKSEHRLSKLQVRLAKKSKHSKAWKILKRKISKLHQLIARQRLDWQFKLAYHLFSDVSVIFVEDLQIASLVRRCKAKLGKNGQFLHNGQSAKLGLNKSLQDAAFGQFVQVLEYVAWKLGKRMIKVDPKGTSQHCWECLNKVSKSLSERWHSCIECGQELDRDYNSPTPLAPLPGGDGGG

SEQ ID NO: 21468 - protein, 532 aa, unknown
  TnpB Polypeptide
MSVKTKTPKHLTISLPKTLDNLDDNVKEFWNEESDKLHSKIWHPHQTISDNKSSNYQAKTGEYWKEVVRPTYNSNSSLSINIPDNLLSFLKEDSVSLKKDGTPVKQSARTLSNKEKHKDTISKKIRIYPEDESLWINSLNQYRRAYNISIEMFKKGRKPSTEMRRRISRMIKHEGARNGWIDNVNLVQEAFREAKTVRTAIIRMRMAGSKCDYRFKSRMEPCQTFVVSRISPKKSIYPRVLGSCFYTESVPDVAVGQNAKVTYENNQWHVSVKDTYKAKDIKANDLSVIALDPGKRTFMTGFSADESVKYGDKFVEDKLLPLMLKVDKLLSKRDHLKKHKSEAFKLQRLKGVNNRIKKLRARQDNLVKDLHRRVAFDLVMNNDVILLPTFETQKMVKRSEKRKSNKQVARTLLGLAHYKFKQTLKWMAKKYGKVVIDVNESYTSKTLWDGSIKTNLGGKHQFRFDGKIVDRDVHGARNILIRFLTKVNNAKNGVKEKVIDVLSPNATYALNIIETADPYRNIRCLGGFGVFK

SEQ ID NO: 21469 - protein, 403 aa, Nitrospirae sp.
MYLVRKRKLGRSETLDLFALESGRVYTMAKVWFWRIVRRKGIWLSEGTLQRLLANGQPTLLHSQSAQKSIQCFFEALRTWRRARTRNPDLRPPRKRKKFSKIIWKDQAIKVREGRLVLPNTRGTAPVIIDDWLSAKPVQVELGWDGKQYELRASYKTEPRETSQGFVASVDLGEVHSAVMGTDDVHVILNGRLLRSKRRYRERLKAKLSAKIDRKQKGGKRREKLITSKRRQLKKLDNQIRDIEHKLTTAGIKALHEAGVRKLVFGDLRDVRVGYDKGRGQNQRMHQAPLGRIRSYLVYKGLRLGWQESDFQDEAYSGKDCPRCGQHNNPKGRNYSCASCGFKAHRDVVGQVNILHKYRGVRSSHVIGAMASPIGIRWTPHLRCSSKLVGADHAVSLSRIPRL

SEQ ID NO: 21470 - protein, 472 aa, Thermococcus sp.
MKRTITVKLQPSKAQEKALFELAQATAIVWNKINYERLKQFRAFGKIDFAGTEKEAYHNFKDWIGGSTVQQISRKNSESWRSFFTLSKKKKSGELPSWLKPKPPAFIREREGKKLFVIPLRNDQYKIENNILELRRLGKFGKLRIQFKGRIYLKGKQGRLEITYDETRKKWYAHISYTVEEKLINGEWVRVPRQPIGDLSAGIDLGINNLMAVYVENGESFLVNGRPLKSIAFYWRKRIANYQSKINKSGAKKSRKLSRMHQKAKLQARHYINTAVRQTVERFYYLGVSRIVVGYPKEIARSPEKGRKQNYLLSHVWHFNYVIKRLKEVAEEYGIEVIITDEAFTSQTCPLCGQRHKNARFVRGLFKCHREGVVMNADLVGAFNILKRVVKTITLSLPGLAVGRGNWPETRPEGLKARYSWGFNEASQTFPHLVRGFLDGNPALKGGEEVITFKYYFTLMKVGGEYGRAFKG

SEQ ID NO: 21471 - protein, 335 aa, Herbidospora sp.
VAQIVKRAYKYRFYPTPGQAEQPSRTFGCVRLVYNKALEERTRAYKEGRRVSYAQTSAALTEWKRTTEWGFLNEVSCVPLQQALRHLQAAFANFFTGRARHPVFKSRKKSRALPDGAQPSTVTVSRDAAGRWYASILVEEKIVPLPPAEAVIGVDVGITALMTLSTGEKILNSKQERADRGKLARAQRILARKTKGSANRAKANLVVARIHARITDRRRDHLHKITTRLVRENQVIAVEDLAVRHMVKNRSLARAISDASWRELRSMLAYKAAWYGRELLVVDRWFPSGKLCSACGARAASMPLSVREWVCACGASLDRDAPQGLRRSETPAEPM

SEQ ID NO: 21472 - protein, 410 aa, Halostella sp.
MDVTLRCRAYPDEETASEAWRHIEIPRQMRNHAIRDYYSHDYGNRPTAYDQHRKLTDWKQRWPLFSEVSAHAAQQTVSEIHKNVETQKGRRENGHKTGQLKWQGSGERRSVAYQSEGFDVNHTTGQDGYATLRLSKIGYIPIRAHRELPATENIKRVVLKKERTGDWFVCLVTERPDENLPKKPDPSTLNPADCVGVDLGILSYIHTSDDTAVDMLDLSDEYDRYGREQRKLDRKEHGSNNWEKQRQTVTRAKRQVKRKVLDYQHKLTTWLVREYDLVAVEDLDVKPMLETSQNAKNKQDAAWSRFLDLLEYKADLHGTHVVRVEPAGTTKECSECGVETSKPLWIREHSCPACGHTEDRDLNAAKNILSRGRSQIGAGRSESTPVQTALPTGTRSVPAKRVVEAGSPEA

SEQ ID NO: 21473 - protein, 373 aa, unknown
  TnpB Polypeptide
VGIRGIPISLIEGKKEGKLPNWIKPRPPGYWKDEDGNYKLMVIIRIDRYEVDEENRTIYLKDFKLTLKFKGKLKWHGKQGRLEIIYNEARRSWYAYIPVEVQSNAKPKGSLRASVDLGIVNLATVYVEDGSWYLFKGGSVLSQYEYYGKRIAVVQKILTRHKQRRSRHLKLLHDKRRRFLKHALNSMVRKIMEELKEKGVGEVVVGYPKEISKTNGNKLTVNFWNYGYIIKRFEEISEELGMKVIKVDESYTSKTCSLCGEAHEGGRIERGLFRCPHIGKVVNADLNGAANILYIPESQGSRRRGQLPVRDRGNGLKAQPAVYRWTNGAGWVTPTSRDVMRVKAVNREPVIRPEGTLALKGGEEVSHSPFPDW

SEQ ID NO: 21474 - protein, 348 aa, Bifidobacterium sp.
VSSVALQQSLRHLEAGFVNFYNKRAGYPKFHSKKNGGSASFMGTAFRWDGKSLRLAKMSEPLHVVWSRTLPRKARPSSVTVTLDPAGRWFVSILMRETIPCLPACDKTVGIDLGVKDFAILSDGTKIPNQHFAERNQKRLKRAQKALSRKQPGSRNRRKAALRVARINAQTRDRRRDFLHKLSTRIIRENQTIVLEDLSVRGISRRVRAVEAPDTGRYLCNGQARKRGLNRSILDQGWRELRGMLEYKARWYGRDVVVIDRFYPSTQLCSACGAKTGPRTLDVRRWTCPECGMRHDRDVNAARNILAAGLAVRACGDSRTRKTAEQLASVRLSGKQETRPVRNGILRL

SEQ ID NO: 21475 - protein, 499 aa, Blautia sp.
VSVITALADLCIFEDIPPHSRDFSHELGSYPIKEPFFLHKNANEIPYLLRYRKINQERGSFMAIQLKVEEDGTCTFYGRTMQPVKEKNKLLLPYGKQMHYYGQVLRLYPSKEQKAILNQQIGNARFVRNQYLNLWIQKYQDEKKTLYASDYKKNNLPALKEKYPFLKQSDKFALENALLAVEDAYKNFFAKRAGFPKFASFRKPNGKKYTTNYTNGNIALVMEKGIPCVKLPKAGKIPFAMPKGFTLETLIPQNSAIKKATITKQTDDIYEVSLLIETIVDIATCVEELHIKDIVSIDLGLSFFGIIGNYEHYEKIENPRWIILHEKRLRRLQQSLSRKQYDRKTHTGSQNWEKARKKVAKEQRKTANQRRDFHHKLSTKIAKQCEAFICEDLNVKGMVQNRHLSKAVASVGWSSFLTMLQYKMERAGKRFYKVSRWFASSQICHVCGSQNPEIKDLSVRTWECPVCHTFHDRDRNAQLNILEEGIKLLKEDGVTVIAA

SEQ ID NO: 21476 - protein, 437 aa, Chroococcidiopsis sp.
MLQVITAKLKLETNPEQKELLREVSLAYRDALNYTSQINFENGKSSNGTKIQKLVYQDLRSRFGLPSQMACNVPRQVGATYKGLLTKLRQNEEAIRKGRTKKRFKGWYEAPKFVSRTCNLNYLRDFTFKPNRQVSIISLQGRITINYSGYSKHLELIKSGCKIGGAKIYYSKSSKTYYLLVSCELELPELEPTELSRVVGVDVGRRFLAVTTDVQNKTQFFSGKETIHKANQYQRVRKILQRKGTRSATRRLTLVSGRERRFTADVNHQLSASVVTPNTLFGLEDLTHIRDRTKPKKRGKKASKKQRKANRKQAKWSFAELHSFIDYKAVFAGSLAIKVDANYTSKGCFKCGHVSDNNRPNKGLIFRCECCNFELHADLVAARNITLRTLLSRQDWERTGILSVCPDVSSGEAKAERLSRYSELRWSSDTSPRSTVG

SEQ ID NO: 21477 - protein, 250 aa, Bartonella sp.
LLATISRKADRWFVSFSVETDNQESLSENQAIVGLDLGINALATLSTGETIGSVKPYKALLNRLRRLSRRLSRKQKVSSNRHKEKQKLAKLHARISNIRTDNLHKVTTDLIQRFGTFCLEDLHVKGLLKNQHLSRALADQSFFEFRRQLEYKAARYGRQIVIADRWYASSKICHHCGCKIEQLPLNIREWRCSHCGTHHDRDINAAINLKNLAVSSTVSACGEEGSGQCLVTLVKPASKKQEINSIFYQK

SEQ ID NO: 21478 - protein, 406 aa, Synechococcales sp.
MLLVERHFIKSNHALYQECDKLSFLAKNLYNAANYIYRQNFFANQKTDAVAVYHQLKTGTDYQALPAKISQEVLRMLFKSWQSYYAGHREYLANPTKFKAPPKIPNYKGNIKDRSNGRYVVSYNNQAISKRELKKGIIHPSQTNIYLKTKVKKAEQVRIIPKKRAYIIEVVYSLEITEQSLPKKRVAAIDLGLNNLATLSSNIPNYQPKIYDGRALKAVNQYANKETARLQSHLKETRITKKISKIWQKRTQKMDYYLHCTSKAIIAELVRNQIGTLIIGWNQNFKDSINLGKINNQKFVNIPHKKLIEQLKYKGLLAGIEVRETEESYTSKCSAIDLETLKKHEQYLGKRIKRGLFKTSQGKLINADLNGSLNIGRKVVGNGFMVSSHSGCVVPPIRICPYKQKI

SEQ ID NO: 21479 - protein, 400 aa, unknown
  TnpB Polypeptide
MLLAHQIELRPTATQADYLARACGSRRHCYNQLLAHFKQPGVKWSKAAAYQHYIKVIRPAFPWYNEVSSRVTRNAIDDLDNAFKHFFRRVKRGQKPGFPRFKKKGVGDSFALRESAKFDVEGRTLRIERLNSRIKLRQPLRFTGQAKQVTIRQKAGTYYASILVETQDYNPHAPEREAVGVDMGIKSLAVLSDGTVFPANQKLKANLRRLKRRQRRLSRKVNGSQRRAKAKLSLAKLHQRITRQRQAVLHEVSDHLTRHYKVVCLEDLNVRGMTKNHRLARAVTDAGFGTLRQMIEYKAALRGGTVVVINRFAPSSKTCSACGQLHEMPLEKRRMECDCGNVMDRDLNAAKNILNFGLDTLTPDLKRAQESGKPTVRRGKDVDGAKMTTLHDSHRSARLT

SEQ ID NO: 21480 - protein, 406 aa, unknown
  TnpB Polypeptide
MQRLQAFKFELRPDGQQERQMRRFAGSCRFAFNKALALQKARYEKGEKKLGYAGLCKLLTEWRNSMETAWLADAPVHPLQQTLKDLERAYSNFFAKRADFPRFKKKGQSESFRYPDPKQIKLDQPNSRLFLPKLGWLRYRDSRDVLGVVKNVTVNQSCGKWYVSIQTEREVALPLPQGGAVGIDMGVAQFATLSDGTFYVPLNSFKRHEVALRKAQQAMSRKTKFSNNWKKAKARVQKIHSRIGNARRDYLHKTSTTISKNHAMVCIEDLQVRNMSKSAAGTSDAPGKNVRAKSGLNKSILDQGWFEFRRQLDYKLAWSGGWLIAVSPRNTSRTCPCCGHVSADNRQTQARFACVECGFEENADVVGAINVLRAGHARLACEVSGAVMPPAAGTHRSDSGAAQCRA

SEQ ID NO: 21481 - protein, 345 aa, Lyngbya sp.
VQSFSLTAAKLRKRNKFWKLVGSQSVQDICQRIEKAYQLFFKYNKKGVRPPNFKKVKKYKSFTLKQAGYKFLGGNRIKIGSKIYQFWNSQPIEGKVKTATVKRTPLGELFLIIVVDNGSKPSAKSETGKIAGAECTPTFLSDFKSERVGGFDFGLKTFLTCSEGFSIQSPQFLKQALTDVKKASRNLSKKRKWSNNWEKARKHLVRQCEKVVNRRRDWFWKLVHQLTSQFDVLCFETLNLKGMQKLWGRKIGDLAFGEFIEILEWVATKKGKLIVFIDQWYPSSKTCFHCGHVLEKLELSTREWRCPSCSNINGRDENAALNIKRVGASTLGLDGVRLAPPATVA

SEQ ID NO: 21482 - protein, 395 aa, Lyngbya sp.
MQRAFKTKLKLNNKQKTLMAQHAGYSRWIWNWALNLWNEAYAADLKPSVNKLKKFYTHHVKPVYPWMKTLSSRVYQFAFMHLGEAFSRFFKGLAKYPKFKKKGRNDSFTLDNCGKVMQFSGTRLKIPFIGWVSTYEPLPEINTKRITISRTAENWYLSVAYEFEPERTEKSREYLGVDVGIKVLATCSDGTVFANPRAYKKATQKLARLQRELSRKQKGSNNRNKARLKLTKVHERVADIRKNTIHKLTSWLCKNHAVIGLEDLNVSGMLKNHNLAGAIADSALYEIRRQVEYKANWYGSIVVFADRFYPSSKTCSNCGHIQEMPLKERVFNCKVCGEVKDRDFNASLNARTSWPLAIRFEPVDRVLPTVRDEAAQSPISAVSVEKELCKTGTKL

SEQ ID NO: 21483 - protein, 459 aa, unknown
  TnpB Polypeptide
MAKIVSSYCTKVVGENKIFKETIRIYRDALSLLIRIVDAEWDSGLGAIYALSTLKARRVVELLIHSSRTSTPKYPEFDKRFYKYPSYLRRASITEALGAVSSYRAALSRWEEAGRKGKAPKLQTLRSAMPTFYRDNMYEDNGDGTALLKLYHKNDWVWVKVRLRKQDTDYIREHWGKASMSAPKLVKRNRRYALCFAFEETVAFGKKPLEDQTILAVDLGVNTDAVCSVMRSDGTVLARKFIDFPSEKDRLGTQLGRARRGQRKHGHRGGNLHMKKAVRINKDLSKKVAPAIVQYAVSVGADVIVMEHLDFTGQKPKYKKQRLHMWKKRDIQKIVTHQAHRNGIRVRFINARNTSKLAFDGSGEVTRDSTNMALCRFPGGKQYNCDLNASYNIGARYFIREYLKPISETKWSLILAKVPELERRTNCTLSTLFSLYAVLNCQSASATESWPHGGNGSGA

SEQ ID NO: 21484 - protein, 367 aa, unknown
  TnpB Polypeptide
MPDLWACDHKDNGMAQPSQNLAIARRQRCYPQPSAATPKLPQTITPSRRFNSCTASWQQGVGDGLSGMFGNGHVPFLGEGAMATSLPLPDHQAALVTDTGKGVIVSGRGIRTIKKGRNRAIADLQKKQARCTRYSRQWKKYQRARDRINGKTERRVRDLRHKGTRLAIEHAQKEGVGNLYIGNPHGVRRHNSGHHHNQRLSQWEYGKDLQYLKEKGARAGITVRTGPERGTSSTCPNPACRHKQKVRGRDWRCRLCGGSWHRDLVGATNMFALAFGSSVTIAVPERRNITYRRPGPVAHGRQRGGRSGRRSSPDRGLCGTPFPAELITSAAGHPPGPGSAPAPPGAGPGGQALGLLDRHGSPHAALA

SEQ ID NO: 21485 - protein, 424 aa, unknown
  TnpB Polypeptide
VCAVAFHATRLPRWAEPCQSVRLRQREDKQRRSLAKGDLRRRTNAVQSSAQMACNIPRQVAATYKGLWSKATANTKARASGQTKKRHKGLDKPPTYSQPTVTYNYGRDYGFKCDSRVSILTLEGRLVLPYSGYDTHTALIREGATIGAAKLWYDKPKKRFYLLVSLAVQIAAPTPNNLPAVAGVDLGLRYLAVTSDTAGQAAFHSGKAARQKANHLARVRKRLQQKGTRAAKRRLVASGQRERRQQAAANHTIVRRIVAANPMTLIGVERLTHIRERTGPRKRDKRASVKQRKANRVTSKWSFAETQAMLAYKATLTGSQVVWIDADYTSQMCPMCGHTSRANRPNKGLLFVCQMCRYTLHADLIGARNVALRTLLTRQDWVGTGVLSVRPDVSDVEAKAARLRRCAELRWSLGASPRVYAWGH

SEQ ID NO: 21486 - protein, 424 aa, unknown
  TnpB Polypeptide
MIIFVLLLVCLDFLNTRNKINIKDVKKWKKKVIIILLTEQIQMKKSKELSKLCHLAKNLYNLANWYFRQDFFNLNNFLDNYDLDFILKDKEVYKNLPAQTSQQILKLIIKNWKSYFRANKDYKKNKNKYKRKPKIPNYKKKNGESIIIFTNQQCKIRDGYLYFPKKAKLKPIKTRITKKLNQVRIIPKGACYVIETVYERKIVDLKLNKDHIASIDLGLNRIIATVNNNGYEPFIIKGDDVKSINQYYNKQLAHYRSIENKKGNFQDTKRIKRLHSKRNNKIYDIFHKVSKKVINYCIKNNIGTIIIGYNKGWKQKINIGKRNNQNFVQIPFLKLIKQVEYKGELVGIDVITTTEEYTSQKCSNCGIIKKSNRVNRDLYVCSECGLKIDADLNGAYNIMKKVFPKAFCNGMEVLGLKPQIVTIS

SEQ ID NO: 21487 - protein, 463 aa, unknown
  TnpB Polypeptide
MSVVTRTLHAAASSLPAIGAVCDAMAFVRADLWRRYGALGTVGKSAADVRKEVSAAGWYAGLAVDGTIRAETTKDIVNDILTYKAAACAKVRQAIAKRTSDQAERKRLYALLRADKWLDDRYLHRMMRKHFRHGVSRCDNQFIVRSDRHESRIVDGRLTVTIRIARQYGPLLVLTTTSSGKNVDLTGCNLRVILKGETVEIHYAREKGEGRPCGTAEIGIDKGYSEAFTDSEGCHHGENFGAIMTAYSDQVSNTGKARNKLYALEKKHRAAGRIAKADRIKANNLGRVKLEARRERTQNRLRNIAYQAAHAIVDKAAVVGSEDLTLPIKGKVQWRKFNRRMSAWAKGVLAQALKEVCTQRGATHVVVNAAYTSQMDSFSGLLEGKRAGDKFYRANGDVLQADFNAARNVRNRIHDQEITRYMPHQQVKAILVARSSGATERQGASVGRPQSRQRSADKSNAQL

SEQ ID NO: 21488 - protein, 343 aa, Streptomyces sp.
VERSWLDEVSAVVLQQSLRDAEAAYKNFFASPKGTRKGPKLGAPRFKSRKDARQSIRFTANARWNITDKGSLNLPKIGAVKVKWSRTLPATPTSVTVIKDAAGRFFASFVIDTDPAEDAARMPESDQSIGIDLGLTHFAVLSDGTKIDSPRFLRRAEKKLKKAQRDLSRRQKGSKNREKARLKVARAHAKVTDARKEFHHQLSTRLISENQGIAVEDLSVTGLARTRLAKSVHDAGWTAFVTMLEYKAERYGRTLIKIGRYEPTSQVCSTCGIKDGPKPLHIREWTCTACGTVHDRDHNAALNVKQAAGLAVSACGAPVRPESVLAQREETGSHGFPTGNRAA

SEQ ID NO: 21489 - protein, 492 aa, Mycobacterium sp.
MSGLVWMARFEVPEGWVAQAYRFGLDPTPIQLRVLASHAGAARFAHNHMLALVKAVNDQRAAERSYGIAEDQLTPVLGWSLPALRKVWNQRKADCAPWWGENSKEAYNTGLDGLARGLDAWSKSRKGQRAGRAVGFPRFKSARARRSVRFTTGVIRIEADRRHVSLPRLGAVRTHESTRKLARRIEAGTARILSATVGQDSAGRWHCALQTIVAAKTRPAHALRSVHPVVGVDVGVKADSLLVVATPDGVEVDRIPAPKSLSAAQSRLRALQRRAARQHGPYDPAARTRRAPSMRWRRTQARIGRTHAHAAAVRRDVLHKATTVLAQQHQVVVVETLNAAGMRSKGGAYKRGLNRALADAALAQIRGMLGYKTQWYGCHLVEANRYFPSSKLCTACGRRKPNLTLADRVFACDECGTRVDRDLGAAINLARLGVPTPVGERSPAGSGPVAGRGATRETEPAPAGDAAGDETSTPHHHPVDQTGTASPQGEAA

SEQ ID NO: 21490 - protein, 368 aa, Escherichia sp.
  misc_feature (278)..(322): Xaa can be any naturally occurring amino acid
VKRLQAFKFQLRPGGQQECEMRRFAGACRFVFNRALARQNENHEAGNKYIPYGKMASWLVEWKNATETQWLKDSPSQPLQQSLKDLERAYKNFFRKRAAFPRFKKRGQNDAFRYPQGVKLDQENSRIFLPKLGWMRYRNSRQVTGVVKNVTVSQSCGKWYISIQTESEVSTPAHPSASMVGLDAGVAKLATLSDGTVFEPVNSFQKNQKTLARLQRQLSRKVKFSNNWQKQKRKIQRLHSCIANIRRDYLHKVTTTVSKNHAMIVIEDLKVSNMSKSXXXXXXXXXXXXXXXXXXXXXXXXXXXXXXXXXXXXXXXXXXXXXVAVRCLLFRQRTQASVARAVVIQRKKTACHKVNSDARYVDIQRTPM

SEQ ID NO: 21491 - protein, 419 aa, Oceanobacillus sp.
VGDESFVLSEIIDSYFLFGYNRTNVPIEGVSIMYRGKRVSFHASKEAIDRLFACNRLSAYVWNACLEVAKNHHLQAGKWINRTHLQQAIKKMVPLHSQSIQAVAHNYLDARDSTKKAREKGISTARYPYKKKRHYNTKWVDKAFKIEGNKITLSMGAKRKPIVVFVSDLPSGDIKEIELCYDNGLYLSVSFDDGQLPEERVGTQEAGVDMGEIHSFASIAENGEGVILSGRKLRSIHRFRNQKLKELQRKMSKCKKGSNQWKKYQRAKKYILSKSDKQLRDASHKITRNFMEWAVEESVHTLHVGDARNVSKHTKKRKRLNRTNRQKMSNWNVGQLLGYLVYKAEATGIQVVLVDESYTTQTCPVCQNRRKPSGRTYTCSCGYEAHRDLHGAANILTKSKYKKMLPVPTSKKITYLRVA

SEQ ID NO: 21492 - protein, 400 aa, unknown
  TnpB Polypeptide
MRTAYKVRAYPDAEQAAMLRRTFGCVRLVWNKTLAVRQERYTTEKRSTPYKETDAALAAWKQTEELSFLGEVSSVPLQQVLRHQHTAFQSFFNKVGRYPRFKNRNGRQSAHYTRSAFRIKTDGLWLAKTVAPLKVAWSWPDIDMNSIDPTMVIVSREPDGRWFVSFAVDQPDPTPLPPTGETVGVDVGLKDFAAMSTGEKIANPKHLAKRERNLARYQRRMARCQKGSNNRAKAKQKVARAHSKVRTARKDFLHKTSTELVRKYDRIGIEDLAVKNMVRNRSLAKAISDVGWAEFRSMLEYKAQRMGREVVATNRWYPSSKTCNACGHLLATISLGTRHWTCPGCGTRHDRDINAAKNIDTAAGLAVAASGGTVRPVQATAGRVPVKEETSQATVGIPCL

SEQ ID NO: 21493 - protein, 388 aa, unknown
  TnpB Polypeptide
MRTVAHGIAWFPEPIKHQIFNLMQWQCSATRSSYQAIQQGKQGNDIRLHVKQNFMQALNQRYINDACSLASQINHKHAIFGGKQAWKDMISGNMSKQKWQDKRNNRLYSRGDKSKQGNPNIKIQGNKILINDPSQRGKWLEGSVFVPEKFQINQECYDVRIIFRNNRFEVKIGYEIPDSLPQPQVAGAIGIDINPDGVALVEVDSNGNLLSHRYIEKQRIQFAQENKRNSDIYELAKEVVAHAAACNKPIIIENLKFARKNRGKKFNRIASNFPYRKMIESILRRAEKQGIEVRQVNPAFTSILGLLKFKEMYSLNRHTAAALCVARRGMGIKERQDFVVQKDSEKKVVNLEGRGTRIALSLKAWRWLETMVKPKQAGLTALALAAGP

SEQ ID NO: 21494 - protein, 283 aa, Lactobacillus sp.
MKSMAKMKYHYGLKMRCYPSDQQKQLIKINSDASRFIYNEMVAINKELMQLRRVKLPIDIVQDRIKQLTMRQNAKQMSNHYQFLEDERIDSLTKANAIQNYRKAWNAFRKVHATGVPKFHRKSYHWRYQTNCQYPGQKTALLTNGTVCFLDNSHVKVPKIGLLRVTGSQARLLKRICETRIGTVTLTKDSADRFFLSMQLASDESFVKVSKATHGHVGIDLNTDNFLTDSEGNIVPNPRYYRTIKGKLAKEQRILSRRQQRAKKEHRSLRDSKNYQKTALVSR

SEQ ID NO: 21495 - protein, 260 aa, Lactobacillus sp.
VPKLGRLRVKGSHQRVLARSAETRIGTVTIVKDASGRFFLSMQLASDTPFVNWPQNTGKQIGIDLNTENFLTTSNGDTVANPRYYRIIKGRLAKAQRILSRRARRAKQEHRPLRTSKNYQKQRLLVAKLHAQVFERRRDFLHNVSTTLIKNHDFVAAEELRSKNMLKNHALAMSIADVGWRTFLGMLAYKAELYHRQFLTVDPKNTTQACHECGFVMGTAGTEKLTLADREWTCPKCHAHHDRDHNAAQNILTKGIIKLA

SEQ ID NO: 21496 - protein, 409 aa, unknown
  TnpB Polypeptide
MHYNYKYRLDPPEALSETLLHHVDTCRQLYNHVLYKLNEDDEIPARYKVQGTLPDLKTWWTDLRDVHSKVLQMVVKRVYDNLSTLTAQKENGRAVGMLTWKPPREYRSLTYNQSGFKFKNTSGRPTLWLSKIGEIPIHLHRDIPEDATIKQVTVKQEPTGEWYATFGIDVDEDTPEKPETPEKVVGIDVGILTYAHDTDGYAIESPDFSDERERLERAQRDLSLKEHGSNNWEEQRKAVAERHADLKRKRRDFLHKLSNYYAREYDLVAVEDLDAKGLVELPGNSRNRASAAWGTFLRMIEYKCEREGTHFVAVDPKDTTKECASCGVKTDKPLWVREHSCPACGFEAHRDANAAWNILHRGLEEVGVGHSESTPVETALPVDTPVSAKRFVEAGSPTLKERTASAVSE

SEQ ID NO: 21497 - protein, 714 aa, Escherichia sp.
  misc_feature (322)..(322): Xaa can be any naturally occurring amino acid
MRRFAGACRFVFNRALARQNENHEAGNKYIPYGKMASWLVEWKNATETQWLKDSPSQPLQQSLKDLERAYKNFFRKRAAFPRFKKRGQNDAFRYPQGVKLDQENSRIFLPKLGWMRYRNSRQVTGVVKNVTVSQSCGKWYISIQTESEVSTPAHPSASMVGLDAGVAKLATLSDGTVFEPVNSFQKNQKTLARLQRQLSRKVKFSNNWQKQKRKIQRLHSRIANIRRDYLHKVTTTVSKNHAMIVIEDLKVSNMSKSAAGTVSQPGRNVRAKSGLNRSILDQGWYEMRRQLEYKQLWRGGQVLAVPPAYTSQRCACCGHTAXLRPGGQQECEMRRFAGACRFVFNRALARQNENHEAGNKYIPYGKMASWLVEWKNATETQWLKDSPSQPLQQSLKDLERAYKNFFRKRAAFPRFKKRGQNDAFRYPQGVKLDQENSRIFLPKLGWMRYRNSRQVTGVVKNVTVSQSCGKWYISIQTESEVSTPVHPSASMVGLDAGVAKLATLSDGTVFEPVNSFQKNQKTLARLQRQLSRKVKFSNNWQKQKRKIQRLHSRIANIRRDYLHKVTTTVSKNHAMIVIEDLKVSNMSKSAAGTVSQPGRNVRAKSGLNRSILDQGWYEMRRQLEYKQLWRGGQVLAVPPAYTSQRCACCGHTAKENRLSQSKFRCQVCGYTANADVNGARNILAAGHAVLACGEMVQSGRPLKQEPTEMIQATA

SEQ ID NO: 21498 - protein, 495 aa, unknown
  TnpB Polypeptide
VPHAAFDKDGEPLDLKEILDGIRKDAELVAHYALLEMTEQNLALVTYFDRLKPAEAGRRMGLFLPGEVKNLFRSGASRLEKMFQEQAVTALRSWAARSKAASGNYTGYISAGWRRTVRDSKPKTLQPRLALSATDKGYHKNFSVTPEHIFLDMVVQGQWVTLLFPTPPQLVEEDVTPGVPDIWINDQDRVVFGFHGKTNPGRPKFSERYVIGVDVGVTNPASYVIWDIREKRVVKKSLLGQRARSLGNKIKRAQIQVSALQRKNRPEEAASHREHLSNRRKELSILIAQEVADAAWKYGNALVTFEDLSHIKNTMRFGRWFCGEVYRRTRDMVEADGGRVLKVNAAYTSRKCHVCQSDLDMSNYSQPRCTACGVTHHRDINAAANIAQRANHVKACQTRKRHATKTKRVRRSKCHVKPLKHPGTKNRPTPKAPQNQPKTHAHLSLPEREVSKGMCPADVRVSAVDHDTWFQTTSGTTNPKENQFTNMVDVVHLKE

SEQ ID NO: 21499 - protein, 325 aa, Acidiphilium sp.
MILAHKIALDPTVEQAIHFARAAGTARFAWNWGLAEWKRLYEAGGKPSATKLKAQWNAVRRTEFPWSCDVTKCASGQAIMNLGTAFGNFFRDLKKPKGQRKAGYPKFKKKGQHDSFALWNDQFEAHGCRERFGKDRGEIRIPNLGWVRMREPLRIGGRILGAVVSREAGRWFVAIQCEMPDAEAPHPAPGSVVGVDLGISALMALSRQLPDGRTKIENPKALRKAMRRVKKLSRRISRQEDARKKRAAKTSRRMRNRRAQLAKLHGRVANIRRDAIHKATTAVASTFETIVLEDLNVAGMGRRPERRRHGQEPRPCRLCLRRGFR

SEQ ID NO: 21500 - protein, 537 aa, Acidiphilium sp.
VPYAVTFSCLYAHRRSRCLSRAWREDASAVGPRGQTFSGRQDQDRAAGLHAGAVGHVPWSADRTPRAAPGHRLLSRLVGGAEAGPEKSEARSGGIRCGTRPCGCRVDRRSRRGPQLQPQAVPRNHGRRITPGGADYRSGTQGSAGAVRLPVVRASLQGARLRHPRAEQRKPVAGTGDGPRPDDHRALFFKPALRFAQLQEEAQRSHRPGCEAMILAHKIALDPTVEQAIHFARAAGTARFAWNWGLAEWKRLYEAGGKPSATKLKAQWNAVRRTEFPWSCDVTKCASGQAIMNLGTAFGNFFRDLKKPKGQRKAGYPKFKKKGQHDSFALWNDQFEAHGCRERFGKDRGEIRIPNLGWVRMREPLRIGGRILGAVVSREAGRWFVAIQCEMPDAEAPHPAPGSVVGVDLGISALMALSRQLPDGRTKIENPKALRKAMRRVKKLSRRISRQEDARKKRAAKTSRRMRNRRAQLAKLHGRVANIRRDAIHKATTAVASTFETIVLEDLNVAGMGRRPERRRHGQEPRPCRLCLRRGFR

SEQ ID NO: 21501 - protein, 429 aa, unknown
  TnpB Polypeptide
MNKTINRVERHIIVKANKNYSNIKELCHRCKNLYNYANYILRHSLFKGEGLPKEYDLTSLLARENQSDYKTLPAQTAQQVIKLLYKNWKAYFKALKSYQRDKSKFLGCPKIPKYKPRGEKGYYIASFTNQQVKIKDSKIVFPKFANLKPIRTKVSSIEQVRIVPSTSCFIVEIVYEKEIIQAETNDEAIASIDLGINNFVTFLDNQGYQPFIINGKGAKAYNQYYHKVKARLQSELKEGRYHSNNIQLLGLKRSMFMQNFLHQSSSIVIKTLKERKISTLVIGLNENWKQGSKIGKVNNQNFISLPHKKFIEQLLYKCEEIGIRVVLTEETYTSKIDHFINEPMRKHEKYLGKRVHRGLFRSSTGKIINADVNGAIGIMRKVFPEEVAKLIRDSGVAFTPIIVHPINCRKVNNIAFDNCIMMDTIKKVS

SEQ ID NO: 21502 - protein, 477 aa, Micromonospora sp.
MPRRRDPAALRVVHRTARVALRVTSGQRRRCFGLLRSAGNVWACVLEINAWRRRRRDAPLTGYQELCRELAASGPGTFAELDSVGARSVLRCFSDAWFAAAKRRKAGDLSARFPRRRRALMPLRWHHGTFTIDGRRVRIPTSRGTPPLWVRLARDLPYPLEQIRSITLLCEGSRLFLDVTAEVPVTVYAPGCEPDPQRVAGVDLGIIHPYAVAGPNGKGLLVSGRAIRAEHRMHLADTKARRRAVSRRAPRPGEKGSRRWRQYRRRARQAEGRHRRRIRQAQHEAARTVISWTVRQRIGVLHVGDPRGVLDLPAGRRHNLRLRQWQIGRLIQVLTDKATLAGITVRLVNERGTSSTCPACQQRVPKPRGRTLSCPHCHFSGHRDLVAAATIATRTPGGGPTTPTAVVLPQVITHRRAGRHLPGAGQSRRDPRRPPMAARGSVGPRRPAPPPDGESLAHPARIHNNHRKPGERSWTPH

SEQ ID NO: 21503 - protein, 417 aa, unknown
  TnpB Polypeptide
MSGKIYKLIKDLVERRNASMKLAEKHKIYKSHPTYAKLDEMSRKANNLYNQCVYFAKHSDNLSEDLKRLDKVMKSFPDEHDNYRSFGYARCAQQILRLFQQNLRSYFASIKDYKKNPTKYTGRPNFPKFRKSGERFQIIFTNQSAKLTGQTITIASKTFENKLSIRLRTSSAKKICQVVFAPRNDYFLVYVIYEVDDRVISQNSNKAAAIDIGLKNLATVTFSENDEPILYRSDLMKINNDFNRITSKYVSILKKTQNKDTSKRRKRYSEKYAGLIEDRLHKISRSIINDLSHRGVSTVIVGKNTGQKINNKLKNFARVPLFRLITMIKYKAELAGITFIQVNESYTSGTSFLDNELPTKEFYDKSRRKYRGLFLSNDSKQINADVNASFQIMKKVYKEFVYTNSVKYANPIVKTIC

SEQ ID NO: 21504 - protein, 432 aa, Bifidobacterium sp.
MLEAVKVALDPTPVQERLLVAHAGAARFAFNAGLAHVKTMIDSQEKPEWSLYALRRWWNANKNTLAVDGNGVPWWPENSKEAYNSGLESLSDALMNWSKSRKGRRKGRRVGFPKFRARNRTTPRFAYTTGSYGLIDGDANALKLPRIGRVHCMENVTARVGGARVLRMTVSRHAGRWHASLTVERADPTPTIPSKGGAVGIDLGVRTLAVLSDGTMIANPRTLNMGERRLKHAQKALSRKTKGSNRRHRARERVSRLHARVANQRRDLLDKLTTRLAVTYSDICIEDLNVNGMVRNHRLAKAIMDASFFELRRQLEYKTARTGTRLHVIDRWYPSSKRCSNCGKVKAKLSLNERVYHCDGCGLIIDRDLNAAINIKVAGSAPETLNARGAGVRPATLRGGGQSAVKREPSSRTHGVRLGANTRKSVLQAKTN

SEQ ID NO: 21505 - protein, 565 aa, Holophagaceae sp.
MPRCITPSFACEFPLKAGLREVAVLGSRFEAARQLGNAVLGETQRRLARVRRDPAFEVAKALPRGSWKADATSEQKAQSKVRQDAFRTVKAKHGFEEWGLHAYSSLTAGSWIRDHLDINTAQKMASRVFKAVERWSYGQAGKPRFKRHGEVVCVEGKSNLSGIRFRFQPEGNPVVLWNGTFADLRMEVVVDPEDPFQAHALALAREGKVKYVRILLRTIRGRRLVYAQLVLEGHPLRKLKPDGALKHPTGDALVGLDLGPSEVAIVTEGQAEKVSFCPGLDRKEKRRKKYQRKLDRQRRANNPDNYEADGQVKPNAERKPWKASKSQMKTRASLADLQRAMAGHRKSLQGTLVHRVLARGNRLKSEKCNKRAWAKNWGRSVGHKAPGMFQARLGVLAEASGGSTDKISTRTSCLSSRCLCGLRRKKPLKEREHTCGCAYVPEGMQADRDEFSAFLALFCQEGVLDEGAAREAWRAWRVDILLHASSREGCGSRSGGASSSHRVQTANEGALLPKRKAETARRSRSQRRDRSGRKAPGAVLPGGERVAKIPVPAGGAHAPPGTLAF

SEQ ID NO: 21506 - protein, 390 aa, unknown
  TnpB Polypeptide
MIVERTIKLKLELSDESKETLRQTMVLSNRIFNEIARYGFDNHTCSKVSVHHATYYGIREQHPELPCSILQGIRDVACEALKGLELKTLPRSKPFSAIRYNKRVHKINLIKQNVSLSSVKGRVTATFSIPEYYKQYLEWEFKTSTLRYNKQQNVFYLHVVIHKPSPEPVGNKVLGIDRGIVNIAVTSNNHFFNSKPIKNVRAKYAFLRAKLQSKGTKSAKKLLRKISRKEQRFVSKVNHCISKEIVAMPFDIFAIEDLTSIRVQSRTRGIDFTQKLNNWAFYELEQFIRYKAEAVGKSVVTIDPRYTSQKCSVCGHIYKGNRKGNSFHCVKCGFQIHADLNAARNIAVLGISGNGRLSVTQPYIACDEVEARKGIDTEHSDNAAHFIVRS

SEQ ID NO: 21507 - protein, 392 aa, unknown
  TnpB Polypeptide
MLRRTFGCVRVVWNRTLADRRARWRAERRGTSYAETDRALTALKQDPALAFLNEVSSVPLQQALRHQHQAFRGFFAGRARHPRFKSRAGRQSAHYTRCAFSLRSGALRLAKTATPLRFTWSWPGVDVAALDPAMVIVCREPDGRWYVTFTVEAAGPEPLPAAGRAVGVDLGVTDFAVTSEGQRIANPRHLERRARNLGRYQRRLARCQNGSNNRAKAKAKVARAHRKVRDARRDFLHKTSTRLVRQHDVIVIEDLAVKNMVRNHRLARAIADCGWGEFRRQLDYKCRRYGRDLVVIDRWYPSSKTCSACGRLLAELTLSTRHWTCPSCRARHDRDINAARNILAAGRAVARGSPGDACGGDVRHSGSSRVQLPANQEPQPARAGIPVLQVGE

SEQ ID NO: 21508 - protein, 435 aa, unknown
  TnpB Polypeptide
VSEVTRTVVVRSLPLPRKVFRVLVELEGMYRNMVEQLVLYAVRNELTSFTRLKALKYRELRSLYPQLPSHYAYTACQDASTRAKSFSRLKKEGLAKRDYPEVRKVSIWLDDHLWRVRSLTSIEMATHRGWIAVELEPHKQFWKYVNGCWELASEAKVKLNKKSRRAIIFLTFKKSFEVYKPRGFITVDVNENHVAVLVDGKVYLFETGFRDVVLGYYYRRKRVQERYDKLYGVNCRVGRKILRKLKERKEKSDLKWKLANIIVRVAKERQYAVVLERFGKNPGKEMVDHVNDKQLRHRIYQASFKGVQKAVEEKAMEYGAPVIHVNPRSTSKTCPMHNAKIIYSNGSRVGKCSKCGEPWHRDVVACYNLLLRARLGNGSTAPSLGGLKGGLNLDGSPVPLGSTAAHDPTTVTRALWARWKSLGATNKHELMRMSI

SEQ ID NO: 21509 - protein, 529 aa, unknown
  TnpB Polypeptide
MSEHFITSIPLYVNEYAYSVLTKRFNVAHHIYNCFLGECKKRRDKYLKSDLYKEAGTKYKEFAAKKVGDKKEINELFKSAITESGFYLRSNSHGRDNSLEQFAASTIQRTWLGDHIDSHCRNKLMERAFKAAQRSLKKELNKRTGGYERPKLRFKRFGRDYICSLEGKNSISPLKFEFKNEIYQVVWRGLSLPVYFDENDDTIKHAINNIENISYIRLKRKPVRGKWQYYADLIIDGKRLLKEKNKLGEGVVGGDLGPGTLACVSNEFVILRSTASNVLESNAYLKLEKQRRIIQRQIDRQRREANPDNFNENGTIKKGSKWIVSKRQKHNENQLADLQRRIKEMRRDNHGAIANELRSHGDEFRLDKDSYKGWQRSRYGSSLLKHAPGMLVELIRDKFENTGGKIDEINTYDSKSSQTCPNCGDISKKQLDERIHDCKCGFIMQRDIVSAIVNKFWNTEKKTLDVDKSKRFIKDKRSVLQAGIEKILQSVREGHLLPSTFGTIPELERIACQFDDQISSDACCLQKTT

SEQ ID NO: 21510 - protein, 209 aa, unknown
  TnpB Polypeptide
LGLEFFYTDSEGNHVENPRFLRKSEKSLKRLQRRVSKRQKGSTNRKKAINKMARKHLKVSRQRREFAVKTARALVTSSDVIAYEDLKVLNMVKNHKIAKSISDAAWSMFTNWVDYLAKIHGVHVVAVSPHFTSQDCSGCGTRVKKSLSTRTHKCPACGLVEHRDFNAAKNILAKGLGLKSTVGHIGTQTLEEIEPLVFSEQSGRVKFGH

SEQ ID NO: 21511 - protein, 516 aa, unknown
  TnpB Polypeptide
MAKKGKYRTFLISMPTELIPIYDFVQKKLNQFLSDPVFRSKLLALDFSKHRGNIWRDIRDIVGKEELTSWKEDIPNPVWYFYMLCDNLLRIVKSKDNAIACFNTLKENGNKIDQELWELLNDQGIYPTVGFLRNLKRSDEPPTLVRKATFVMDYSISAEQNCQRITDNIFGFNYESGKYLTYEVVIPLSVRKNLTGRISKPRFIKRKSDGRYVGHCSYHVEIPTAKGKNVLGVDLGKKKLFSSVVLYSDGDYSNEIINSRLSHRIDKKLKRKLKDLEHLLEKNRNLENLINGDINLFNSHLEEIRQNRVNQIMELRENISNTKRYIAKLIASEIVSIAKENDCKEIHVENLSWLESQGGRWNHAEVQDFISEFAELEGIKVVKIYAKYTSSTHPITGELGKKQNRNIQFQNGDVIDRDLLASINIAKRNKRNQKENKVTKLRKHHTSTPKKVKKPSNRKVSLAIRQKLLTNQRGTEIVVLYPRKTGNRTWEVLDVSSKPHKLNLMSHLLYQCQFVT

SEQ ID NO: 21512 - protein, 407 aa, Acetobacter sp.
MTMKIQKAHVVRLYPSLTQEEFLCQIGGATRFLWNLALEQRQTWGQRHDLNRFSQSKELTQLQSEVDWLKACPSQVLQQVLCDLERAFRNFFARRAGFPKFRKKSRGASFRFPDGKSALYERLTGKGGGLKLPKIGWVRFRGWRDIPGQIRNVTVRCDAGQWFAAIQYEHDVTEPAKKILPAAGIDRGIAATIAVSGQGRTKGPDAYRKAMKRLARAQRIVARRKKGSQNRRKAVLRVARLHQKVRRVRADFLHKVSHWLAKNHGTLVFEDLKIRNMVRSASGTVAEPGRNVRQKSGLNRSILDQGWGMLRQFCGYKTAERGGRCLDVPARNTSRECRKCGHTAAENRVSQSRFACVRCGHAENADDNASVVILKRAVDNSLLPVEALRQHALEAGISVGSLLVSHQ

SEQ ID NO: 21513 - protein, 522 aa, Nonomuraea sp.
VSIRDRLKNLTPADEEVLRLVGAHLGSLASGDLKVRCADGLEHSATTWAGRKRDLTVVSSSRWAGSITKATHDQWALARRGQAAHMRSLEAGVETVAYRLSLPIGAKGSQRAPGGYRSKSEWFHKRRRLQLLQGRLAEVRADWQAGVVRVVRGGRKLLNTRHHLDAARLTEPQWRDRWHSARWFLSADGESGKRFGNETIRITPEGEVSIKLPAPLAHLANAGHGRYTLAARVSFPHRGSEWADRVVANRAVAYRIDYDVARQCWYLNASWTFAAVPAVSMEAALAQGVIGVDTNADHLAAWRLDPHGNPVGRPRRFGYELSGSADRRDAQVRHALSRLLNWAKTCRVAAIAVEDLDFTDSRTRERHGRKRRLRQLISGMPTGRLRARLTSMAEATDIAIIAVDPAYTSRWGAQHWQKPMHAPTRHDAASIAIGRRAQGHPIRRRTAPPRNDQSDRCGHRTVQARPETLGREETRRPVTDRAHDAPARTGTRPRTRATSASTTVRDTRSDQGWVQDTLLLTD

SEQ ID NO: 21514 - protein, 375 aa, unknown
  TnpB Polypeptide
MLLSFRYRIEPTSAQATALAAMLADFCDLYNAGLQQRIEAYQRCGLSLNYGMQAAELRTVRAECADLARWSFSAEQQVLRRLDRAFKAFFGRIKRGENGFPRFRAKARYHAAEMRVGDGLTIRKSGRLGFVGVSGEIKVRWHRTLPSKPASAILTRQNGKWYVVFHVEVAAAAAQANTNTIGIDLGLTALVALSNGEKVERPRWTKRTEKGLRRRQRALARCKRGSKRRARRKIVLAKYHAYIAALRSDHLHKESRKLVNRFGRIGAEDLNIKGLARGMLAKHVNDASWATLIAMLTYKAERAGCQLIKVDPRGTSQECPECGRVAVKTLAERVHRCDCGCVLDRDVASAMVVHFRAFGFWPGAGLQALSVRSAA

SEQ ID NO: 21515 - protein, 400 aa, unknown
  TnpB Polypeptide
VSLGYEGSLTLTVKVRVRAEPETFRELVSLMYKYREALNYAIKVVVDNKALTLGKAHRLLYNILKEKYGLPSKVAVDCYREAIAIAKSWLNNPNRGNTPRAKTLRIWLTHKYSYRINGNHVELLGGYRLEVIGLDRRYDNYPSGDARLMFRDGKLVLEVSKHIPRPQKYPPRGVLAVDVNEKHIVVGNSKLEYRFKIPIERALHYKRLAEGLQKKYSSMRYNAWFRRRGIRKRIRHFYTKARCIIEDWVKKMSHEIVALARRYRYAVAREDLTGLIESLRKLPREHRVSLLILSYRRISRWIDWQCEKHGVQVVAVDPRDTSTRCPRCGGKMRENGYRVFKCLRCGFEADRDTVAVLNIEVKALSKMGGSLTTPTAPQMTDVAPNRCGEPVNPLKATLAP

SEQ ID NO: 21516 - protein, 251 aa, unknown
  TnpB Polypeptide
VKSYRVTLDRARRWHIAFAAIPESVPGPGTGEVAGLDRGVNVSAALSTGEMLCVPRLSPRRRHRLSHLQRRLARAKLGSNRRAQVKLAIARLRAREADTCKDWCEKTSTDLARRFDVIRVEDLRIKNMTRSARGSVASPGKNVRQKAGLNREIMRSGWGRLVRRLEDKAPGRIEKINPAYTSQRCSACGHIAVESRKSQALFACVACNFACNADVNAARNIAAGHAVTARGGDGVARPANREPQHDGLLVA

SEQ ID NO: 21517 - protein, 239 aa, Thermomonas sp.
MLIAHRIALDPNNVQASYLAKAAGVARFAYNWALAEWKRQYEAWHADNSLPKPSQAALRRQLNAVKREQFPWMLDVTKCAPQMAIIQLGQAFANFFAGRARYPQFRKKGRDDRFTLTNDQFDIDGCRMRIPNLGWVRMRESLRFTGKIMSATISRVADRWFVSITVDTPDNPHLPKAENQGAVGVDLGVSALATLSTGETIPGPKPHKALLARLRRLSKSLSRKQKGGSIASGVERAAG

SEQ ID NO: 21518 - protein, 322 aa, Bacillus sp.
MEVNQMIINKAYKFRIYPNQAQAILINKTIGCSRFVFNHFLSLWEHAYKETGKGLTYGTCSAKLPAMKKEFVWLKEVDSISIQSSVRNLADAYTRFFKKQNSAPCFKSKKNNVQSYTTKQTNENIAVVGNKIKLPKLGLIRFAKSREVEGRIVNATVRRNPSGRYFVSLLVETEVQELPKTSSYIGMDVGLKDFAILSDGTIYKNPKFFRSLEDKLAKAQRVLSRRMKGSSRWNKQQVKVARIHEYISNARKDYLDKISTEIIKNHDVIGIEDLQVSNMLKNHKLAKAISEVSWSQFRSMLVYKAKWYGKHIMIGILTQVSI

SEQ ID NO: 21519 - protein, 441 aa, Actinokineospora sp.
LSIRLATFGSRRNLTRSSLECRGVPAGEESPPAGAMTWAARAVVSPSSQGLSVVIGRLLGMPRFRLQPTPAQERALLEHCAHARYVWNLAVEQHAHWRPDRRAAPGYTEQCRQLTQARAANPWLAAGSVIVQQQALKDFDQAMANFFGRTHRRPTWRKRGRSEGFRIVAVTAGDVRRVSRKVGEVRIPKVGWVRFRWSRAIPYGVKSYRVTRDRAGRWHVAFTAVPEPIAGPGTGAVVGVDRGVVISAALSTGELLSVPALRGAEMARLLRLKRKLARAQRGSSRRGKVKTAIAKLMAREADRRKDWVEKTSTRLAREFDVIAVEDLKIANMTRSAKVTVEAPGRGVRQKTGLNRGTGQWVGPARDSAGAEGSGAGGEGRFAFHQSALFGVRGRGSGGAREPSRLPVPVLWFRLQRRCERGAEYSNRGRACRDRTGRPAVG

SEQ ID NO: 21520 - protein, 292 aa, Bacillus sp.
MTKHNKAYKFRLYPTEEQAYLMRKTFGCVRFVYNRMLAERKEAYEKYKDNKKQLKKQKLPTPAKYKAEFEWLKEVDSLAFANAQLNLQTAYKNFFRGQNDFPTFKSKKDRKSYTTNVVNGNIMLFNGHIKLPKLKMVRIKKHREITRRNKGSERWHKQRIRVAKLYEKVANQRKNFLHQESKKLATHFDVVAIEDLNMKRMSQALHFGKSVTFNGWGRFTSFLAYKLNEQGKQLVKIDKSFPSTKTCSNCGSMKNMTFSEQIYSCIWGVNLDKDYNAAINIKNEAIRLLALG

SEQ ID NO: 21521 - protein, 422 aa, Methylobacterium sp.
VTLRHAYKFRASPDAAMAEALTRAIGCTRLVYNLALAQRQMFGRLSRRLDPSAELVALKREFPFFASDAFSQSLQQALHDLDQAYKAFFEVRAGYPTMRRKFVNDSMRFPQPYTKTGVAIVLGRNSIKLPKFGSLGIIRHRKIKGRMRSVTLTREGEQWFVVILTERNVPDPVLRTDLPAVGLDIGVNRPIATSEERTVFMPQVTREEMEKRAHRARRVSRCQNGSKGRETARARLRAFDRHLANRRKDASHKATTDQVQNHGLIGVEALRVRAMTASARGTAEDPGRNVCQKAGLNRRILDVAPGEIRRQLEYKAAWIGRVVIAVNPAYTSQDCSACGARGHIERGERTFTCEACGAEIDRDTNAARNIRARAIAEHGRRTGGDSPRIEPQWRPEAGTPKAAMIAHHAMQAGRSPCLQAGE

SEQ ID NO: 21522 - protein, 344 aa, Methylobacterium sp.
VRAVYVSCQQQALRDLDRAFQNFFAGRAAFPRPRKRGVDDSFRFPGREVAVKPLNGKWSAVRLPKIGWVKFRDTRPIRGTVRNVTVSLDPLGWHVAFTCEIEYEAPAPRPEIVGIDRGVATTLALSTGEMMTMPTSLERIEARKRKAQRVVARRKRGSNRRRRAQARVARLQARQARIRRDFHHRAALDIARRYGVAVLEDLNTRAMTASARGTVTEPGRNVRQKAGLNRAILNAGWHLFAMILTYKMEERGGQVVMVPARFTSQTCASCGLVDARSRESQARFTCISCGHTDHADVNAAITIRRRANSALLDVEGLHQRPYEASTGRDLTVSENPRPSGRGRC

SEQ ID NO: 21523 - protein, 461 aa, unknown
  TnpB Polypeptide
MFYIYMSTIIDDNEPPPTYETSIIQDRLVTPFWNDKSESVSKKLWVPYAIVNHKTRDIHTLEHTGMTHSISVDVPSQPILKDVIVAKKLRIYPDAQQISFFQKCFNAHRYMYNKSLADFRTHNERSSISIRKRVLIPDKSMPKDHPERWLKKVPYYIRDEAIRSLAKNVKTCMSHIKSKLITHFKLSFMSKKYSDDIFHVAKAAISKDFRICPQSLDKEISMSAKSKKWLTQLGRVQHDCKITRNKAGHYYIIVPYKRPTEVHEVNKTRIVALDPGVRTFQTFYSQTECGKIGDAAINDIKKINAVIDKKISSMTTVRSKTKYNLKKRCNKLRTKVSNIVSNLHWQAASYLVKNYDIILLPTFETKKMVNKESRCITKGTARSMLNLSHYTFKLRLQHQGMMHNKKVILCNEAYTSKTCGTCGVLKPKLGGSKVFECSHCGNKVDRDINGARNIFIRSFSH

SEQ ID NO: 21524 - protein, 531 aa, unknown
  TnpB Polypeptide
MAATDGSLSVRTKCSATPESARLSNSQASTPKEKSLQRSTQTPNSSVTLPVLSTLNEKDCKPFWSQQCKDIQSMLWLPQKTELPVPASSLSNGSLNYQVEGSRCWIKRLVPLKSSTPPSLSVLLPHSAIATTAKEVPKPKSAIAVKKIRFYPENERAYFDLLSLFRRTYNLAVEQYINDEHKDDEGNWRNLRPEIKAIAKPEFESSNRAYNSLVADNGVLAAKTTFKSVCKKNKALKGASSGFSKIRFKSRKDSEQTFTLDRFPKGQHPCVKALGKIKLTEKVPEECFDKSCSVTFKNGRWFIQVQQIIPLQPEIQGDVKCISVDPGVRTFATCYSDQEALIIGENLAKERLYPLMKKVDTLISRKQKVLNTQKGVLFEDMPQWARDEIRHCNRLIDTLKCKKDDILLDVHNRTAHYLVTNYDVIFLPTFETKNMVRRRGKVRTIRRNTCRQMLDLAHYKFKMRLKWYAKKYGKHVVDVNESYTSKTRSWDGTIDEKLGGKKVIKGIGFSVDRDINAARNIYIKSLARKAA

SEQ ID NO: 21525 - protein, 375 aa, unknown
  TnpB Polypeptide
MIISRKLKLNPTQEQKDILFETLQQYKQAISLPLSYGFKNKISNGIELHKFSYFTLREQTDLPSQLVCSARCKATEILKSIRSKTKGKFNTKEPKSHKFPTIRFDMNSCSIKENTIKFTTIQGRIEVPIIRYPFVNQNWNNISTTCELQYKYSKDEWYIIIFLNIELQPVKSENKVLGIDRGCKHIAVLSNNQFFNSKELLRVKSKYVYLRKKLQSKGTKSSKRLLRRLSGKENRFTRDINHQISKQIVNLPFDTFALEKLNIRTKKKNGKRFNKILSSWSWKQLETFLSYKAELSGKKVCFVDARYTSQKCSVCSHTEKSNRKSQSLFTCKRCSFNLNADLNASRNIKQNYLTTLGITSSSRVFSVTQTSQPLG

SEQ ID NO: 21526 - protein, 335 aa, Clostridioides sp.
  misc_feature (315)..(318): Xaa can be any naturally occurring amino acid
VIAVEKAYKFRMYPNKNDKETFTYKQCSSDLTNLKKELKWLKEPDKFSLQNALKDLDNAYKKFFKEKAGFPKFKSKKINRFSYKTNFTNGNIMYLGQHIKLPKLGMVKIMDKQVPKGRILNATISKEPSGRYYVSLCCTDVDIEAFKNTNNQIGLDLGIKEFCISSCGEFIENPKYLKKSLNKLAKLQRELSRKTIGSLNRNKARLKVARLQEHIANQRNDFLQKLSTKLIKENDIICIEDLQVKNMIRNRKLSRLISDVSWSEFIRQLEYKANWYGRKIVKVGKFFASSQICNKCGYKNEEVKDLNIREWICPXXXXSINILKEGLRLITIQNK

SEQ ID NO: 21527 - protein, 418 aa, unknown
  TnpB Polypeptide
MYLTQSNVIRGLSKEDYAILREMCHYSNNLYNVALYNIRQRYFQEKKFLKYAENCFVCKSNKTYALLQAGVAQQTLKAADRSFKAFFALLKKAKEGEYSFQNIKIPRYREKGALFTLILSTNSISIKDGFLTIPMSRAFSKLHSGKKIRIPFPERLEGRTVKEVRICPMQQGRYFKVEYCYLQETEPQDVSFENTLAIDIGLENLATCITNTGTTFIMDGRKLKSINQYWNKRKAYYQSIADKQGCKETHRLCALARKRNNRTKDYIRKTVRYIINYCIENRIGTIVCGYNGDFKRNINLGRAMNQQFTQISFGSLRETLKYLCERYGMKYIEQEESYTSKASCLDLDEIPVYNPEKPYAGTFSGKRIHRGLYRFADGRIANADVNGAANILRKSKQNFDFEELCKGLLDSPLRIRVS

SEQ ID NO: 21528 - protein, 374 aa, unknown
  TnpB Polypeptide
MAPNPAMERALEATAKAFAGAANRVLAESRKLKTSNKVKLQHAVYRELRDTFGLSANLAIRAIARVAWAVKVVAKRRKYVDEFRPTSIDYDRRIFDYRPKDETVSLTTLEGRIHVPLVLGGFQRQGLKGKKPTCARVVHRDSKWEIHIVIEEDAPQKRNGPPLGIDLGIRNIAVLSNEKRFSGASIRAVKDRFSRIRASLQSKGTQGAKRVLRRLSGRERRFIAWKNHNIAKRIVSEAVAGGFGLIRMEDLRGIRERTRTWNPHLNRMMSGWSFGQLQEFVLYKGERAGIDSEKINPWRTSQTCHKCRRPGIRKGEEFFCATCGRMDADWNASCVIAAGGVEPGAIPGDRNATRIAAEVVGFFSRPLHAKAVGI

SEQ ID NO: 21529 - protein, 441 aa, Micromonospora sp.
VQLRYNYRLYPDAAQREALAKAFGCARVVFNDGLRVRQEAHEAGLPYPTDAELSKRVTVAKLTPERAWLGEVSSVVLQQALADLNTAYRAFFASLSGMRKGRKVAAPRFRSRKDSRQAVRFTANARFKILDNGRLRLPKIGDLEVRWSRELPAAPTSVTVVRDAAGRHFASFVVQTADQPLPELDSEVGIDLGLTHFAVMSDGTKVSAPKFLRRAARKLRRLQQGLSRKQRGSNNRKKAVRKVARAHAKVADTRRDWQHKLSTQIIRDNQAVFVEDLCVAGLARTRLAKSVHDAGWSQFAAMLEYKAARRGRTFARVDRFFPSTRMCSDCGRINDKMALNVRTWGCPCGSLHDRDVNAAKNIRAAGRADLNDRGAQVRPAPVPAPRGEAVTRRELAPSGAQQTGIPPSRAERTSSVHPRLSTSTRVTGTSGRPRCTTASPG

SEQ ID NO: 21530 - protein, 405 aa, Amycolatopsis sp.
VIAVQARYRYRLEPDEVQRGMLARTFGCARVVFNDAIRCREGAYRLGVNLSPAEVQRQVITEAKARDERAWLSEVASVALVQSVRDAHRAFSNFFASVRGKRRGRKIGRPRFKSRKDNRQSFRLTRNGFSLRPNGRLYLAKVGEVRVRWSRALPSEPSSVTILREPDGGYYASFVVEVERTPLPPVDREAGVDLGITRLATIADTTARRLEVPNPKHLSRKLRKLARLEREKARRVKGSANRAKTRHRVAVQHGKVARARRDHHHKQALILVRENQAVHVEDLNIAGMVGNHRLARAILDVGWAQFVRLLEEKAERHGRTVHKVSRWLPSSKTCSSCGHVLASIPLEIREWSCPGCGAVHDRDYNAALNILAAGQAERLNAGGAPVSPSSREVQGDEAGSNPNAA

SEQ ID NO: 21531 - protein, 361 aa, unknown
  TnpB Polypeptide
MKLTAQIKLNPTSEQHAALLATLAEANAACDAISAIAWQAREFRRIPLQKISYHQVKDSFRLGAQILVRCIAKVADAYTLDRNVKRTFRPHGAIAFDDRNLSWYTDKQAVSIWTVEGRQHVPYSLGEHQQQLLLFRKGESDLVYHKGAFYLLAVCDVPEPDEQQMDGVLGVDLGIVNLVSDSDGEIYQGGEVERKRHWYTRRRAALQSVGTKSAKRRLRQMSGRQKRFQKDTNHRISKRLVAKAERTKRAIAVEELTHIRQRTRARGPEQRARHSNWAFAQLRQFISYKAQRAGVPVVAVDPRNTSRTCAVCGHCEQANRRSQAEFCCVVCGHKAPADVNAAINISNRAACQTAYGVQPSG

SEQ ID NO: 21532 - protein, 372 aa, unknown
  TnpB Polypeptide
MEYSYKFRIYPNIAQAQQIHRTFGCCRFVWNHYLAQRIEAYRETEKSPTRFMQDKDLTSLKKQEKTIWLREVDATALQSSLRDLDTAYQNFFRRVKKGEKPGYPKFKSKRNHRQSYKSRCMGANIKVLEGAVQLPKLGRVKCRISKPVEGRILSATVSQTPSEKYFVALCCTDVDVEPLPSTGAVVGIDMGLKAFAITSDGVEYPNHKYLAKSEKKLARLQRQLSRKSKGSNRWEKARLQVARLHEHIANQRQDAAHKLSTQLIRDNGVICIEDLAPKNMVQNHRLAKPISDAGWGEFRRQLQYKAKWYRKTVVTIDRFYPSSQTCSCCGAQWSGTKDLSVRIWTCPECGAVHDRDINAAKNILNEGLRLLA

SEQ ID NO: 21533 - protein, 260 aa, unknown
  TnpB Polypeptide
MADLNTNFWYVTKNENSFRWINLHSGFRFFVPFNKTEMWNKWEKEGFTLSKSMRIFIRKDKLILEFFLEKDALGLKSEGEIEGLDLGYRNLAVCSSGQTVGGRMDKVIKSFSKREKHTHLQIRQKSFQELKKLDLANVSMLVVEDLKHVKSGTRGTFSRQGNRRMSHWLYAKVREWLKQRCEEQGIRLEFKSPFATSQYCRFCGKWDRRNRSGDRFQCIYCGHEDHADSNSSWNLKLLGLAGVYSLRLLTSSMIGRLGNI

SEQ ID NO: 21534 - protein, 434 aa, unknown
  TnpB Polypeptide
LEERNIKGLEKEIQEATERQALGRCLLVRKLLPHNDRTNDIGSAEKICRKTGRENMRAYKFRLYPNKEQAREMQTHLWLSKNLWNDGLELAKQLYADYQKFPTRSTYQEISKNSGLHSQVAQNVFIRLYLALKAKIRRKKMGSKGGFPRFKSIDRVKSLHYPQSGFSLKERKLKVSPFGEINIRKHREVEGTIKTLTLKKEADKWYAILTVETETVHTPKKEGEKVGIDLGLMTFATLSNGEKIKKPKHMRIYEDKLADAQRDLSRKKLRSRNRRKAKLKVAGVYAKITNRRKDWLHKSANNLISRYSVIALEDLDVQGIAEEHGKGVSDAGWSIFTNIISYKAESAGCEVVFVNPKNTSKDCSRCGICVPKELWERQHNCPSCGLSIDRDLNAAINILKRATVGMTGSNACGDGTIVLSVKQEAITSAQARLG

SEQ ID NO: 21535 - protein, 407 aa, unknown
  TnpB Polypeptide
VQIGKAFRFRIYPTTEQAATLDRWSDALRFLWNLAHEQRLMAYAHARCDRHYPSAFDQINELTGLRSEFPWLADVPRNVSSQLLMELDHAWQRCFKKLARTPRWKRKGRDVVSFCEPHSKVWRIDADGLHFPKLGVLRIIVHRPLEGMPKTCTIVRDGDQCFASIVCVIEREAPAPRAEPVVALDRGIINFVADSDGNIVENPRNLRRATRRLAHAQRVVSRRRKGSRNREKAKLRVARIHRKVRRQRDDFVHRLSCHYANSHGRVIVERLNIKGMVRNHCLARAILDAGWGRFVQFLRYKLAWSGGTLEEVWAAYSSQTCSVCGCVDSRSRVSQALFACVHCGHRDHADINAAKVQRLRGTAVEATVAACRGLAEVRLPVKQERCIARCGQRTQGLGSKAPAFRPG

SEQ ID NO: 21536 - protein, 384 aa, Lachnospiraceae sp.
LLKSFKTEINPTAEQKVKINKTIGTCRYVYNFYLDYNKSLHDKGEKFMTGKSFSVWLNNEYIPNNPDKAWIKEVYSKAVKKSIEDGCTAFTRFFKHQSAFPNFKKKGKSDVKMYFVKNNPKDCQCERHRINIPTLGWVRLKEKGYIPTTKDGWKIKSGTISVKADRYYVSVLVELPDVKIINNSNDGIGIDLGLKALAIVSNGKTYKNINKSARLRKLEKQLRREQRCLSRKYENLKKGESTQKSNIQKQKLKVQKLHLRINNIRTDYINKTIAEIVKAKPSYITIEDLNVSGMMKNRHLSKAVASQKFYEFRTKLKAKCDDNGIELRVVDRWYPSSKICHCCGAIKKDLKLSDRIYRCACGYVGDRDFNASLNLRDAVTYEVA

SEQ ID NO: 21537 - protein, 441 aa, Lachnospiraceae sp.
MRIYTTYKVKIKHYNHIFKDTVKIYRDVVDYLINVCLENWDSISMYKGQNRLTYIEALIHSTKENPVPKYDFDVKFYKIPSYLRRGAINEAIGKVSSYKSNLANWQNNPVGKEPSYPKAGYVFPSMYRTVMYNQTDDYIAQVKVYIRNTWDWITISLRKSDMDYIYRRCKNRKQCAPTLQKRGKEWFLDFPFEEKVTLCDTVVYNQTVVAVDLGINTAATVSVMRSDGTILGRYFCKLPKETDHLTHSINRIKKAGQYGNYKTPRLWAKAKGINHDIAVKTANYIMDIAVLYNADVIVFEHLDKNGKVRGSKKQKLKMWRSQEVQSVVTNKAHRLGMRISHVCAWGTSKFAYDGSGRVLRGKDGGFSTYELCRFQNGKTYNCDLSASYNIGARYFIREILKSCSVTDRLGIEAKVPQCAKRSTCTFSTLISLNAELTPLAV

SEQ ID NO: 21538 - protein, 402 aa, Escherichia sp.
VKRLQAFKFQLRPGGQQECEMRRFAGACRFVFNRALARQNENHEAGNKYIPYGKMASWLVEWKNATETQWLKDSPSQPLQQSLKDLERAYKNFFRKRAAFPRFKKRGQNDAFRYPQDVKLDQENSRIFLPKLGWMRYRNSRQVTGVVKNVTVSQSCGKWYISIQTESEVSTPVHPSASMVGLDAGVAKLATLSDGTVFEPVNSFQKNQKKLARLHRQLSRKVKFSNNWQKQKRKIQRLHSCIANIRRDYLHKVTTAVSKNHAMIVIEDLKVSNMSKSAAGTVSQPWRNVRAKSGLNRSILDQGWYEMRRQLAYKQLWRGGQVLAVPPAYTSQRCAYCGHTAKENRLSQSKFRCQVCGYTANADVNGARNILAAGHAVLACGEMVQSGRPLKQEPTEMIQATA

SEQ ID NO: 21539 - protein, 427 aa, unknown
  TnpB Polypeptide
MPNKTKSKNSQLSYQIVLSYKVSHNHPIKTFLIECRDKLNTAISIIWDNIEYPKENKPKLPKSNEFKRELRNKLLKDWNYASHYIDGIIKTAYSILESWASNYKRGYRTKTKPIVKRLFVRVKTTLIKYDKDDGIIRITIKPRKEYLTLNIKNEWFFDKVRNLTIGEIILKETEAFLTFKDNLSYSDKEIIVGVDSNLKSLDLFHPIEGWIRIDLSELHRIKEVYDRKIDFLKTLLKKYPLRALRKIKRLLERRRNRVNDYLHKLTIQLSRLFPDAVFIFEDLNKRKMYKNKHHNRRIDRANWSGIIEKLSYKSIVILVNPAYTSTTCPICGSKMESQEGQVVHCCNCMSSFNRQFVGCFNIFRRGFKRFKKLMGGLGVASTGAEVSLGKLMTPNPNVEAKLPVRKIEDFPLMVYKIDYNGKYLKCL

SEQ ID NO: 21540 - protein, 406 aa, unknown
  TnpB Polypeptide
MATTKIKRVSNKAYSIIEYGTNYSASGNMYPLWPKLGAQENNNQAVSKVPFHTMEQAQNIQETQMILTYKVKHGRNFSDELRKARKVAKFAIKNRGGLSSKEVAHIGLKSAMSNQILRKYGRDKKCKFVRRVKLIVPSQGIKFHDGTITIPCLKLSIPFSKPCEGIRQVEVDNTWCYVSVRVKDGIRYEPEGWVGVDRNTTGHCAVAACTSTGKVMFLGKKAQHIHEKYRKIRRKLQRLKKLRKLKVIKRRESNIQRDLNHKISRKLVDYAKQHKCDIKLEELEGIRQRAKQAKSFKYSLNSWAYYQLQQFVEYKAQLAGVLIAYVAPQWTSQMCHKCGHIGIRNGKAFKCPHCGYAAHADSNAAWNIAYRGQLLEEPNQECRGFPDRHAIDVVSTSNDSREKVIA

SEQ ID NO: 21541 - protein, 386 aa, Lactobacillus sp.
VTTVVKGVKLRLYPNQAQIDQLWQLFGNDRFVWNQMLAMANKRYENNPKSHFVGEYDMNYLLKPLKQEYPFLKASDSTSLFVVNHNLAIAFKNLFQQRGSQPRFKSRHSAKQAYTGQSICAVEAKRRLRLPKLGSIRTSKTNQLADAKIKRYTVSHDATGRYYLSLQVETEVHDLPKTHQMVGLDMGVADLAIASNGVKYGTFKAKWFEKQATRWQSKFSRRKHQATVAMRQWNHHHQLSKLALNDYQNWQLAKMNKARYQAKIANQRKDYLHKLTMDLVKNYDVIVIEDLKTKNLMHNHHLAKSIASASWSQFRTMLEYKCEWYGKQLVVVSARNTSRICSACGQNDGPKPLAIREWTCSKCRTRHDRDINAAVNILNCGLKAIG

SEQ ID NO: 21542 - protein, 265 aa, Lactobacillus sp.
VEAKRRLRLPKFGSIRTSKTNQLANVKIKRYTISHDATGRYYLSLQVETEVHDLPKTHQTVGLDMGVADLAIASNGVKYGTFNARWLEKQATRWQAKFSKRKQRATVAIRQWNHHHKLSKQELNDYQNWQRAKMTKARYQAKIANQRKDYLHKLTTALVGNFDVIVIEDLKTKNLMRNHHLAKSIANASWSQFRTMLEYKCAWYGKQLVVVSARNTSRICSACGQNDGAKPLAIREWTCSECRTHHDRDINAAVNILNCGLKAIG

SEQ ID NO: 21543 - protein, 381 aa, unknown
  TnpB Polypeptide
VPQLRSSVSTLKHRERVKVNTVYRFRIYPNKAQRELFAKTFGCVRLVYNRMLAEKKAHYEKTGKNLSLTPARYKSEFPWLKEVDSLALCNAQLHLQTAYKNFFRDASVGFPKFKSKKKPVRSYTTNCVNGNIALQNGRLKLPKAGWVRIRQHRKIEEGYQLKGATITQEADERYYVALLYSCEEPVHETRKAETAIGLDFSMKELYVDSNGNHAAYPHFFQKARQKLAREQRKLSRCVKESRNYVRQKKKVARCHEKIRNQRKDYLHKLSRRITDQYDIVAVEDIDMKAMGQCLHFGKSVQDNGYGMFRNMLDYKLAWKGKKLVKIDRFFPSSKKCSKCGKIKKELGLSERVYRCTCGNEMDRDRNAAINIREEARRMLAV

SEQ ID NO: 21544 - protein, 420 aa, unknown
  TnpB Polypeptide
MNFAVQSNVIRGLSKQQYQTLKELCQYSNNLYNVVLYNIRRYFFQEEQFLTYESNYHECKGNENYTLLQAGVAQQILKAADISFKSFFGLLNKCKTGDYSYHDVKIPHYRKKGGYFNLILSTNAISIVDGYFKLPISKRYKKLHPTMKDILIPYPKRLTDAELKEVRICPYANGRYFKIQYVYHWYKEETLVNPDNIMATDLGVENLATCVSNVETPFIMDGRKLKSINQYWNKEKARLQSIATRQGVRTTHQINRITIKRNNCVNDIIKKTARYIINNCIEYKIGTLIVGYNKDFKRCVNIGKINNQNFVQIPLDDLRQQLEFLCWTYGITYIEQEESYTSKSSFIDDDILPKYKPEQHYFGQFSGKRICRGLYKSKDGIIINADVNGAANIGRKCKQNFTFEELSSGFLVSPKRIQVA

SEQ ID NO: 21545 - protein, 400 aa, unknown
  TnpB Polypeptide
METTTRHRVYRFRAEPTPAQDEGFRRYAGARRFVWNWALQQCRAHYQETGKGLSRIAVSALFTALKKQPATAWLTEIDSQLPQQAIIDLYRAYEAFFDRRAKYPRFKHKKTDRLHFRIPQRVILSDGYVTVPKIGRVKVRQSQEVEGTTKSATFTRDACGHWFVSLVAHMEMPAVALPAPTDEQTIGIDLGLKDAIVTSDGERVAAPRFYRRGQRKLRRAERSKSRKQKGSKNRAKARLQVARVHQKIAAKRNDFCHKITTALVKNHGAVCIEDLNLKGLAKTKLAKSFTDAALGTIRRQLAYKGVWYRVHVIAVGRFYPSSKLCHECGYKHDALTLADRVWTCPVCHAVLDRDLNAARNIKREGLRLLASTVAEGHPETLNACGQDVRPALPADLAMPA

SEQ ID NO: 21546 - protein, 404 aa, Virgibacillus sp.
MSLGVSQNFPKHGIIGTQVPKGNEVETMLVNKAYKFRIYPNKEQEIIIAKTTGCSRFVFNSFLALWNDTYKKTGKGLTYNSCSAELTKLKKELVWLTEVDSIALQSSLRNLADSYTRFFKEQNKAPRFKSKKNPIQSYTTKHTNGNIEVIDNKIKLPKLGLVRFAKSREVHGRILNATVRLNPSGKYFVSILTETEVQPLERTDSSIGIDLGITDFAILSDGHKIDNNKFTSKMEKKLKREQRKLSRRALHAKNNGIDLFDTKNYQKQKRKVARLYEKVMNQRDDFLNKLSTEIIKNHDIVCIEDLNTKGMLRNHKLAKSISDVSWSAFVTKIEYKAKWYGKTIVKISRWFPSSQICSNCGHQDGKKSLEIRDWTCSVCNEHHDRDINASKNILAKGLKTLDLA

SEQ ID NO: 21547 - protein, 541 aa, Streptomyces sp.
VREVAAPFVVPGPTGTAIRARLRVSDTDTAVLAEVGVFLGGLAAGDFVVRSRQGLEHGGQTWAVRKRELTGVSSARWAGSITKATHDQWALARRGQTAEVAWLRKQIASIQERLARPLGAKADKREGLPRGYDSRAEWHAKSRRVHALRGRLAGVEADWAAGRVRVVRGGKRLARLRHHLDQAGLSERAWREQWRAARMFLAADGESGKGLGNETIRITATGRLSIKLPAALARLANAPHGRYVLDATVVFRHRREEWLDRITNNRAVAYRIHHDVLRGRWYVTASWQRTPAFVLPLEAALARGVVAVDMNDDHLAAWRLDRHGNPVGEPRRFFYDLAGSAQHRDAQIRHALTRLLHHTRATGAGAIAVEDLDFTDGRCREKYGRNKRFRRLISRFPTAKLKARLVAMAAEQDIAIVAVDPAYTSRWGAQHWQQPLSTSKRKVSRHDAASIAIGRRALGHPIRRRTAPPPHDRSDRAGHRTVQARPDARRREGPRPRIPGPRTRSVPPGSGAKAGDQHAQHRSGHAAERGFWHQDSPPLSL

SEQ ID NO: 21548 - protein, 397 aa, Bacillus sp.
MTIGWAIAEKLVIWYDKNVSSVKWGDDMAKRNKAYTFRLYPTEKQALLIRKTFGCVRFVYNKMLAERKEMYALLKEDKDALKKVKLPTPAKYKKEYEWLKEVDSLALANAQLNLDKAYKAFFKGKAKFPKFKSKRHKQSYTTNVVNGNIQLLGGHIKLPKLKRVKIRQHREIPSEHKIKSCTISMTSSGKYYISILTEYEKEIKNKEIQNVVGLDFAMDGLFVDSEGKKANYPKFYRQMLDRLAKEQRKLSRKKKGSSNWNKQRIRVANIHEKVANQRKNFLHHQSKELAANFDAVVIEDLDMKGMSQALKFGRSVADNGWGMFTSFLQYKLNEQGKQLIKIDKWFPSTKTCSQCGSIQEMALSARTYQCTCGLTLDRDYNSALNIKKEGIRLLTTA

SEQ ID NO: 21549 - protein, 375 aa, unknown
  TnpB Polypeptide
MYKVYKFRLYPNKKQKEIIHKTFGCARFVYNHFLNKCKENGYTKAYNMCKELKELEKEYGWLKEVDSCSLRNSIFNLEDSYKNFFDKRAGYPKFKSKYNKQSYRSTCIRSSYKGKDYSNIELKLKERKIKLPKLGLVEIRGYRNLNEITGRIINATIEKETTGKYYVSVITEEREEISEKVTPGNIVGIDLGIKDLVVTSDGEKYNNPKEIDKREKQLKRYQRKLSRQIKGSNNYYKTKERIARIHSKIKNSRKYNLIEIVNKIVKEHDIIVSETLKVREMSKNHNLAKYILDASFNKICTLLKWKTRIQGKYYYQIDSYYPSSKKCNCCNKKTDKIKNLNIRKWKCENCRNENDRDINASINIMIEGIKLHYQN

SEQ ID NO: 21550 - protein, 385 aa, unknown
  TnpB Polypeptide
MIVQKAFKFRVYPNKTQQAELANQFGAARFVYNHYRAVREGYYLDTGTGLSYRDCADDLSDRLKVAYPWLKEADSQTLQQVLKDLERAYQNFFAGRADYPNFKSKHDKQSIRYPQRFKLNNKRIYLPKVGWVKGVFHRPIEGQMKNCAVSKTKSGRYFVSIQCEMEIDDPTPNPEAIAIDLGLTTFATLSNEDKREKPKHLYRSQRRLTIRQRRLSRKRKGSKHRQHARLPVAILHERVANQRSDFQHKLSRELVNQYGSISFESLNVAGMVKNHHLAKSISDAAWSQFVGYCEYKAKWANGQILRVDRFFPSSKLCSDCGHKNKSLTLNVRQWVCLNCGSIHDRDVNAAKNILNQSTAGAAESYATGDMISACKLISPSEANVL

SEQ ID NO: 21551 - protein, 469 aa, unknown
  TnpB Polypeptide
VSRNKKKIIAIKDDEMIIQKAYKFRSYPTQVQKDFFHQSMGNERFTYNYFSSLNLERQENGLTFFSNDEMDKLLTSLKGEKDFLRKSNSQSLQKVTKDVKRAIDTFFRRIKKKDSPNIKPFNFKKKSNSKESFSFPCNKNNIHFKHDYKIDENSKNKGQFVYLTIPKMKTPLKILKHRNWEGTIKNVTISKDIDDYYVSIQVESVILKKEIKKDLNSYIGIDKGVVKLATLNNGQWFDPINTYKTHQIQLAKLQNKLSKKQDFNKLQKKNFNDLKKENEYFQPSNNYLNLQKKIAKLHRKIKRIRHEYLHHISNYLTQNYSYIMMEDLNTKNMTKSEIGTIDSPNPNRSQKKWLNRSILDQGWGILKEYTQYKSQWNNKILTLVNPRNTSKACSRCQHIADDNRESQSIFVCKSCGHQMHADVNAALNVLVNGLVKLNFSLDEIKSIINPWTKGVLELDKPIVLSKQLV

SEQ ID NO: 21552 - protein, 288 aa, unknown
  TnpB Polypeptide
LTTDTNSYIVRQQTNAVFKKKAVLLSVKTKLNLNSQQRVLMAKHAGISRFTYNWGLATWSELYKSGFKPNHLMLKKFFNNEVKPALPWIKEKGICQKITEFAFEHLGTAFKNFFEGKSKYPRFKRKNGKASFTINAGGKPIPVGGKRVKLPTIGWVRTHEGMVHTETKSITISECAGDWYISYSYSQPTVVTSKSVSVVGADVGIKFLVTLSTGVVFANPKARDKARAFLRSQQRQLSKKVPGSNRYKKQRLRVAKIHRRVANIRLDATHKATTYISKNHAVVIPYGS

SEQ ID NO: 21553 - protein, 662 aa, Streptomyces sp.
VTETGIQRAFTSRVLRWLRVLRDDLWTARADPLPVSVWLRWLPHGLVCLAAFGITLGGVAQLNDNGKLSVGPAFLIGLAQGGAVVLALGRPVPAWWLSTVAMVVGAVAVRAQLMAGWNMAEDETAHGFTWPWTAAGIIAQLLVLLLLALRVRTRVSVEALALTALVTYALQGLWGAKDYTPTGVVAIALSAVVVTLGIALRGRREARAELGRQTTLTAEERARRTLLEERSRIARELHDVVAHHMSVISIQAQVAPHLVANPPEELKENLAGIRQNAIEALAELRRVLGVLRSEHPDAPDALDEPGTGTAPHTPQPTLDRIASWLGEVSAVVLQQSLRDAETAYRNFFASLKGTRKGPRTGPPRFKSRKDARQSIRFTANARWNITGSGRLSLPKIGAVKVKWSRTLPTTPTSVTVIKDAAGRYVASFVIDTDPAADATRMPETERTIGIDLGLTHFAVLSDGTKIDSPRFLRRAEKKLKKAQKELSRKQKGSKNRAKARLKVARAHAKVTDARREFHHQLSTKLISENQGIAVEDLSVKALARTRLAKSVHDAGWSSFIGMLEYKAQRYGRTLVTIGRFTPTSQTCSTCGVKDGPKPLNVREWTCTACGTVHDRDTNAAINVKTAAGLAVTACGAPVRPGAIPAQREETGSHGFLTEPRAA

SEQ ID NO: 21554 - protein, 400 aa, Nonomuraea sp.
MVMSRYRLQPSPAQEQALLVHCGHARFVWNLAVEQHAHWKPGRKSAPGFAEQCRQLTEARAEFEWLRAGSIIVQQQALKDFAQAMANFFGKTHKRPTWRKRGQGEGFRIVAVTMGDVRRLSRHVGEVRVPKVGWVRFRWSRAVPESVKSYRVTRDRAGRWHVAFAAIPEPVPAPGTGEVVGVDRGVAVSAALSTGELLSAPGLRDAENARLLRLQRKLARAKRGSNRRGKVKAAIARLKARETDRRKDWVEKTSTDLARRFDVIAVEDLKIRNMTRSAKGTISAPGKNVRQKAGLNRGILAAGWGRLVTRLEHKAPGRIQKINPRHTSQTCNACKHTAGESRERQALFLCVACGHRDNADVNAAKNVRDTAAGHAVAARGGPPLGGLANREPQRGLLLVG

SEQ ID NO: 21555 - protein, 503 aa, unknown
  TnpB Polypeptide
MRHTTFRFALDPTPAQAAMLARHAGASRFAYNQCLRLVTDALAARRVDPPVTVPWSGFDLINAFNAWKRSEAAGRVFVVAPDGTVTLQVNGLSWRHEVSAQVFEEAAVDCGRALAAWRDARTGVRKGQRIGFPKWKRKGRHRDSFRLRNKTSRDGRCLIRVGENHPRSVTLPTIGTIRVHDDTRRLRRLLRPVEQVVLPAGERVIAPRAKVLFATVSRHGDRWYVSLNVQAPDFHAERRHPPRPANNAGGFVGVDRGLAAFAVAATADGTEVGRFAPSRPLARRLGRLRRCSRVLSRAKPGSRKRVKAARRLAREHARIANLRRNFLHEVSSQLAKTHSRLAIEDLAVANLARNPHLARAIGDAAWAELARQFRYKAQWLGGEVVICSRWLASTRRCSTCGRVKERMGLAERVFRCDGCGLVIDRDTNAAANLAAWAERARAPDRQAGGRVTNAPGGEGTGRHSGDGETGLSEGGTNAQASTWAEDTREGWRPSISSGLLDAL

SEQ ID NO: 21556 - protein, 535 aa, Mycobacterium sp.
VATTPDDDQVLDVIAAHVGRLRRADLARVVRPVGVDPSLDGDAKRQVRRDRLNARKKGLTGSSSARWANAVIAANDDQYRLARDAQYRHIVGLRAAIATIEQRLGAPTVDLLTVTERKARRKANAPKGYASQAERFAKQRRVQHLRAVLAGALKDRAANRVHVVEGGARLAKTRHHLDAAGLTANQWRDCWDAARYRITANGSPDEPFGNLTITVTAAGVVSVRLPKPLEYLANAKRGRYILSGVAAFTHRGDEWAARICTGNSVSYTITRRPGRAGRYPTAAWAIPALPYWVSPGNDATPQGDLFATGPVVGVDLNDGHLAVRRLDAHGNPVGGAHRIDIDLRGSSARRDAQVRHAITRLIRYTQRHHINAIAVEDLDFADARATGRETMGRGGRGKRFRRTVAGIPTAVFRSRLAAQSHTAGIELFAVNPAYSSIWGDAHWRTPYKNVTRHQAAATVIGRRAQGLKARRRKGVTRQRPEDRGVRATNQAAPQNQQANTDSRHRPGTRGAKSRAPHRIRTRLPDRATATPGNGQ

SEQ ID NO: 21557 - protein, 400 aa, unknown
  TnpB Polypeptide
LDRRIFCLQCRKCFRRDVEKIYRKSRVERWRQWVLKAYKYRIYPNSEQRIQIAKTFGCCRFVYNQTLAYRKEIYEKEKKSVSKTDCNNYCNRELKKDYEWLKEIDKFALTNAIYNMDAAYQKFFKEHAGYPKFKSKHDNHKSYTTNFTNGNIAVDFETGKIKLPKLKAVKARLHREYSGQIKSATVSQVSSGKYYVSILVETEHKELAHTNHNIGIDLGIKDLCITSDGKVYENLKIIKKYEKQLVKLQRQLSHKGKRSKNYYKTKKKIALCHEKIRNIRKDYLHKVSHEIISENQVIVSENLQIKNMVKNHHLAKAISDVSWYELTRQLEYKAKWNGRKYIKIDTFYASSQLCSVCGYQNPDTKDLSVRTWICPKCGAGHDRDINAAKNILAEGLRQIA

SEQ ID NO: 21558 - protein, 418 aa, unknown
  TnpB Polypeptide
LQPCLRRVCKKRLIVLWNKNTNDCRKSMSKQAYKFRLYPTRSQEQALTFTLNRCREVYNAALQERRDAYRMVGKSITYYDQANQLPEIKSIREEYQDIHSQVLQDVLRRVKKAFDNFFRRVKNGEEPGYPRFQGCNHYDSFTFPQSGFSLTHDNRVCLSKIGSIKVRLHRPVEGEIKTCTIKREGNCWYVVFSCQVEAELLPVSGEAIGIDLGLLHFATLSDGSAIENPRYFRKGEKKLATLQQALARKKRGSHRRKKTVQRVGKAHRKVRNQRADFLHKQSRKLVNTYGLIVFEELQPANMSKRAKPKQDENGKYLPNGGSAKSGLNKSIVDAGWSQFVQFCTYKAEDAGREVVQVNPRYTSQVCSGCGTVKKKELSERWHRCECGTELDRDHNAALNILRLGRSQQSAMAVEAPGF

SEQ ID NO: 21559 - protein, 241 aa, Campylobacterales sp.
MLAHKIELKPNNKQITYFKKACGISRLAWNWGLFNWEKQYKDGLKLSRMALKKEFNALKTKELPFTYEVTKYASQQPFIQLQEAYNRFFKKLGGKPKCKKKGKSRDSFYIGGDQIKVIGKKVKIPNLGLVRLKENIRFEGKISNATVSRIADKWFISFAIKPAMSYHETCKNQASVGIDLGINHLAVLSNGGFINLHNQLGKVLPEVTPVETTALNQEARLVDLTSIVESGNKHHTLSNCA

SEQ ID NO: 21560 - protein, 163 aa, unknown
  TnpB Polypeptide
LHRYIADSRRDFLHKTSTKIAKNHSIVYVEDLKVSNMSASASGTKESPGKNVKQKSRLNRSILDQGWYGFFQMLSYKLERKGGKLIKVDSRNTSRTCPQCGYVSAENRKTQASFACIHCGYHANADLVGAINVLRAGRARLACGKSGAVRPLSAGTQRDLLQH

SEQ ID NO: 21561 - protein, 312 aa, unknown
  TnpB Polypeptide
MRKLLKSFKTEINPTVEQKIKINKTIGTCRYVYNFYLDHNKALYDKGEKFMTGKSFSVWLNNEYIPDNPEKVWIKEAYSKAVKKSIEDGCTAFTRFFKHQSAFPNFKKKGKSDVKMYFVKNNPKDCRCERHRINIPSLGWVRVKEKGYIPVTKDGYVIKSGSVSMKAGRFYVSVLAEIPDSKITTNDYSEGIGIDLGLKDFAILSNGKTYKNINKSARLKKLEKRLIREQRCLSRKYKNLKKGESTQKANIQKQKLKVQKLHHRIDNIRTDHINKAIAEIVKTKPSYITIEDLNVSGMMKNRHLSKAVASQK

SEQ ID NO: 21562 - protein, 232 aa, Firmicutes sp.
MVIKSGTVSMKAGRYYSSVVVEIPDSPSVKNNENEGIGIDLGLKDLAIVSDGKAYKNINKSAKIKKLEKRLRREQRSLSRKLENTKKGESTQKNIQKQKLKVQKLHQRMDNIRTDYINKTVSEIVKTKPSYITVEDLNVTRMMKNKHLSKAVASQKFYEFRVKLEAKCKERGIELRIADRWYPSSKMCHCCGSIKKDLKLSDRVFRCQCGYVENRDLNASLNLRDATTYSIA

SEQ ID NO: 21563 - protein, 411 aa, Sphaerospermopsis sp.
MLVYEFKLKGKHQQLNLIDEAIRTALFVRNSCIRYWMDNQKLGKYDLSAYCKELAANFEWAGKLNSMARQASADTAWVAISRFYSNCKKKVSGKTCTEPVLSIAEGRSRSKGFPNFKKRGHSVEYKTTGWKLSADRKYLTLTDGFGIGKLKLVGTYDLHFYQITDIKRVRLVKRADGYYAQFCIAVDREIKLTPSKKVIALDVGLNHFYADSNRDKIENPRFFKKSERGLKRLQKRVSKKFRKGKSQSNNYKKAKNKLARKHLKVSRQRKDFVVKLAKCVIQSNDVVVYEDLQVQNMVKNHKLAKSISDASWYQFRCWLEYFGKVYSKITIAVPPHWTSQNCSSCGKTVVKTLSTRTHECCHCGTVLDRDENAALNILAKGLSTVGHTGTNAWGENDLCLDLATSSGKLTQ

SEQ ID NO: 21564 - protein, 361 aa, Gammaproteobacteria sp.
MILLSHKIQIKNPTYKQEQYFRQACGTSRFAYNWGLEEWKKQYSAGNKPTAFKIKKAFNATKPIEFPWVFNVTKCAAEQAFTNLGSAFKRFFNGQSKYPKFKKKGQHDSFYLSNDQFKVAGNRFRIPKLGWIILTETLLFSGKILSATVSRTADKWFVSISVQMETTPIKVSKKQADAVGVDLGVSRLATLSNGKTVEGRKPLKKLSRRLARLQRHLAKCTKGSKRYNRQKMKIARLPTRISCIRHDGLHKLTHHLCQGFKVVCLEDLNVNGMLKNHKLAKAIGFYEFKRQIEYKATLFGNWISIVSKWFPSSKTCSNCGHKKEELKLSERIYRCDSCYFEIDRDLNAAINIEREGICLLA

SEQ ID NO: 21565 - protein, 396 aa, Frankia sp.
MSRYRLVPAPEQVAGLEEHCGHARFVWNLCVEQQSWWTRYRGKAPSHLERCRQLTDARAAFDWLRAGSQTVQQQALRDYDQALRNFFGGSHQRPTFRKRGQSEGFQIVGKNARVEKLNRRWSRCWIPKVGWVKFRLSRPVPDFKSYRITRDRAGRWHVAFTVVPESIPAPGTGEAVGVDRGVTVSAALSTGELLSCPGLRPAEAARLARLQRRLAKAKRGSNRRRRLKARIARLKARETDRRKNWAEETSTDLARRFDLIRVEDLRIGNMTRSARGSVDQPGRNVRQKAGLNRGILANGWGLLVQRLEQKAPGRVERVPAAYTSQRCSACGHVAAESRESQARFRCVACGHTANADVNAAVNIAAGRAVAARGGTPLGVPVNREPQQLAPPSLVGV

SEQ ID NO: 21566 - protein, 195 aa, unknown
  TnpB Polypeptide
MYRTLGRIRRFQREHGSAQSRGRWAYTKRLNIELGRKIAGAIVKNAEENHADVIVFEYLEMQGKISGKKKQKLHLWRKRDIQKRCEHQAHRKGMRVSRVCAWNTSRLAYDGSGSVSRDPKNHSLCVFQTGKRYNCDLSASYNIGARYFIRELLKPLPVTERSLLEAKVPSVKRRTSCVYADLKELHLQMEILKAA

SEQ ID NO: 21567 - protein, 233 aa, Streptomyces sp.
VKKNFALRKLTYDAVKSRWGLGAQAAQHVIKKTCDAYATLRANVKAGNYGGPGSKRCRRVSEKPVVFRSEGAQPYDDRMLSWRIRERTVSIWTVEGRVKSLAFTADPEQLARLALYRQGESDLLCRDGMWFLIATCEVPEAALTTEPVDFLGVDLGIVNIAATSDGEIMAGRELNRARVRDRDLRRKLQKKNTPSARRRLKKRRRKEARRAKDVNHKIAKRLVVEAGGTSHAL

SEQ ID NO: 21568 - protein, 386 aa, Serratia sp.
MKRATKVRIYPDDEQAAFLNAQFGAVRFAYNKALHISRHMYQRHGISVSIKRDLKPLLAVGKKSRRYSWLKEYDSLALQQAVINLDTAFGNFFKKRARFPSFKRKHGKQSSYHPNGKVLTGAIQIPKMKPVRANIHREIVGKVSSITISRTATGKYYASILCDDGQEAPEKPTLITGVTGLDMGLSHYAIKSSGDKITNPRHLINASHNLRRKQKALSRKQKGSANRRKARLLLAGVHERVANARADFQHKLSRTLVDENQAVIVETLKAANMMKNHFLARAIGDAAWAGFVTKLEYKAAAAGIHLVKLDQWFASSKTCHCCGHKIEEMPLNKRIWQCPMCGVEHDRDVNAAINIQRKGITELQAAGLVVSAHGGQRKSVISTVAA

SEQ ID NO: 21569 - protein, 295 aa, unknown
  TnpB Polypeptide
MEYAKGFKFRIYPNAQQQKIINQTLGCARFVYNHFLAIRRDNWQEKHESVTYVKSSRLLTELKCNPDFVWLKSVDSMALQEALRNLDRAFQNFFKKQSGYPKFKSKHSHNQSYRTRNQSGGIRIIDGNIKLPRIGIVKTKLSREFEGRILNATVSRTPAGKYFVSLCVEMDIELLLGRNNGRQIGIDVGIKDFYSNDQGNTVANPRILKGMEKKLKRLQRSLSRKAKGSNNRNKARIKVARLQERIANIRKDFLHKESTKLVRENQLIAVENRKWTSAQGTKNPLPLGMGSVKGN

SEQ ID NO: 21570 - protein, 386 aa, Thermoplasmatales sp.
MREAIRYGVMKSYLQWKNSGYVPSPIDLRREMKPWFDSRYSYAKHHINPVCRSSVAILKSFIKNHQQKRYPEVRRLSIRLDSKLVKIAGDKIRITIRPGEYDYITINARNKKWREYSKYRIGEVLITDKIIAISFIFPNNDLSDEKVGIDINFGSIVGTVVNKGEVKETFTEYIPNIARIQNDFSRRRRQLQKHIKNKKKRYKKLKESRGRQRNRIRDSLHKLSSKIVSRHLKSTFILEDLRTIKRNSNNKSKKLRTYLNRWPYSEFQKMLEYKSQFRTVYVNPEGTSSKCPVCGGRLEHPVWKMSRCKNCGRDYDRDRLASLAITLRGLYLCGDPFPVSAIASLPSVRNEYLYINHRPDVAEAGGTEMANASNILVQESIRSQEW

SEQ ID NO: 21571 - protein, 394 aa, unknown
  TnpB Polypeptide
MASGGEGLLTLSIGMRVSPEPGAIELLKRYNVALNYAMNRILSLDLRSIESVHNALYRELREWFDLPSRVAIDCYRDALTNANAWRNNPKKGRKPRVRKLSMWLYPGQSYWIRDGYVEIAGGIRLKIIGWDRRYDGYENGEARLVYRDNKMILWISKKVPKLKPYQPRDAIAVDINEKKIVYGDDKINKKRDTEIDEAHRWKKLAEDLQKKYSSTKYLAWRRRRGILNRIRSYHRKARNILEDWARKTSLRIVGLALRLQYAVAREDLTGLINSLRKIKNKDHRTKLIIMGYKRLGKWIDWNAKKQGVPLAIVNPNGTSSKCPRCDSKGLKEVDYRRLRCSRCGFEEDRDVIGKLNIRKRALKKLRIKVIPGGSLTTPSAPQMTDVNPNRWGEQ

SEQ ID NO: 21572 - protein, 261 aa, Okeania sp.
MKSIRTKLKLNNKQKTLMAQHAGYSRWVYNWGLSLWNAAYRDGYQPNARKLREVFTNHTKPLYPWMKSLSSKVYQYALINLGEAFKRFFQGLGKYPRFKKKGKHDSFTIDNFGKPIELNGWSHKLPFIGMVKTYEPIEATTQKITISRQADDWYLSLAFEFTPTSTEKITDVVGVDLGVKTLATLSTGEVFNSVKPYRKAQNKLAKLQRQVSRKVKHSRNWYKAVIKLAKQHRRVANIRKDALHKLTTYLAKVRLVPVRSL

SEQ ID NO: 21573 - protein, 254 aa, Okeania sp.
VVYTTQAISKRQLKQGIINPSKTGIYIKTLVPTSQIKQVRLIPRLNHYVIEVIYEKCEKQYELEKNRCASIDIGLNNLATLTFNQAGIKPLLINGRPLKSINQYYNKVKSFLQSQLQENQSSLRLKKLMLKREFKINDYLHKSSRLIINTLINHKIGTLIIGHNEEWKQKISLGKRNISYFVCVPYNKLIEMLSYKAKMVGIDVIITEESYTSKASFIDNDLIPVYKEGEKNKVTFSGKRIKRGMQSYRQQKIN

SEQ ID NO: 21574 - protein, 137 aa, Okeania sp.
MVKNHNPPPSPPGRGARGVGSDANWGELVRQLEYKADWYGRELIKIDRYFPSSKRCSSCGHILEKLPLNIREWDCPECAAHHDRDINAAINILRMGTRVGVRRKGTPTKKAAGLAVSAPVAHGGNPQDRAGLSVERL

SEQ ID NO: 21575 - protein, 153 aa, Okeania sp.
LTIPISAPTQLIRENQTIVVENLAVKNMVKNHKLARAISDANWGELVRQLEYKADWYGRELIKIDRYFPSSKRCSNCGHVVEKLPLNIREWDCPECGCHHDRDINAAINILAAGLAVSVCGATVRPEESKSRQAGAMKQKAPTRDARESRAVS

SEQ ID NO: 21576 - protein, 213 aa, unknown
  TnpB Polypeptide
MLKAYKYRLKPTKEQKIFFEKSFGCVRFIYNWALAKRIEAYQNEGKRINAVELCKMLTDLKKAEGMEWLKEVSNECLQQSIRNLDSAFTRFFREKKGFPKFKSKHKSRAVYKAINSVAVDLDNNRIKLPKIGWVKLSENRKFEGDVRSVTVSKTKTDKYYVSVLVEDGKELPSKEPITYEGTIGIDVGIKDFAVCSNGDVFQTLNILKKLLTD

SEQ ID NO: 21577 - protein, 563 aa, unknown
  TnpB Polypeptide
MEITRTINSGLRYYLDEDTIVNHESIIDTITRFNDMKIALYNALYDMRFLQTGPLCSQTYSSWLKETYGTNDYYNCAVYAYANGALASQKELKKLYLKGMERDLAARDAKIKAVQEQLDKKIAVKASLKTYITEHRWLIPYRHCQISVSGKNVRLPGNKVIPIDIYERRVEADIRKRKTQLALLKEARKRAASKKDAMKDHDPRRIIFGSKKRYRQKDSGEIDMTRWKQDFFNARHSSMSLPGRHTSKDCNFLAAMRGTDLIVKCMDGKETIFKDFHLPRYQDVFEDMLSASPAERRPVCYNFQIRCDKDGRKYLVISVTLILENRYCNESLEDGCIAIDLNYDHVAVSDIDKDGKRVGGTMLYFDPEAKTNGQISEDIGRMMAKVGRYCTDHKKPLVMEDLDTTISKNGLRYGLAKRNRHASIFAYRKMTACIENQSYKQSFDIIKIDPAYTSQMGKFLFMRKFGLSVHVAASYAIGLKGMELVDLLKPDQRLIDLLPKATKDKTTNATEIKDIIPAWKKLTDAFRGIRPHSFFRQLPYQILDHKKRPSLASLATEMKPCNY

SEQ ID NO: 21578 - protein, 557 aa, unknown
  TnpB Polypeptide
MLVTIGDRPYSVSRFAGVCVRGFVGVLCFDYFMPRKRDRDVPRAVYRTARCGLRVTRRQRERVFGLQRSAGDVWCCVLELNAWRRRRQDPPLAGYQELCRELAASGPGTFGELDTTGARSVLRRYSDAWFAAARRRKDGEVTARYPRRRRGLVPVRWYHGTFTLDGRKLRIPVARGCPPLTVRLDREIPYPAGQVRSVTLGFDGGRLYADVTAEVPVARYPAGEAPDPARAAGVDLGIIHPYAAAGPEGQGLLVSGRAIRAECRQHLRDRKGRTRAAAARAPRPGQRGSRRWRRHRRSERKAEARHARRVRQAQHEAAKDVITWAVANRIGTLAVGDPRGVLHLTAGRRHNQRTRDWRIGQLIRALSDKAETAGIGVDLVDERGTSSTCPSCARRVPRPAGRVFRCPHCGQEGHRDLVAAASIAARTPGGGTIPAIPQGTGITHRRAGRHLPGVSTARRDPRRRPSSRPARRGHLAGTGPPRATGQRRAGSRSRLPRGTHEPETTRQGLISWCTRVQGWRGLSLSRPRPARTTRNAATRPSPWRRPRWPAACRCRSG

SEQ ID NO: 21579 - protein, 464 aa, unknown
  TnpB Polypeptide
MPYKTMQIKLLNPSKSKKALLEDAIWRYSTAFEILLREIKEFLPDTPPSKTELLKLMDKNFFKCVSNLGVEPFKDALKLDIARLLAVYFSKKSSYPVTRTFDEDIEVLLKSEEKISKLKLNTVFEKYEKKRPLLFCRFDEKRDYSIFKSEKGTYFAKLYLFNRNNAQNSKRYAVFPLHAAEWNKKFLSDMESGICTPKSAELVRKEDDFYLNVRFWYPAPQKQPFSSYIGISRGINSDLCYAISSKNGEITSRGCINISNIYGLNKLHSISNEIIKLAKENNACIIMENLSTSNDGLKMKGIKLPLSIGDYNKTAFFVSYKAELAGLEVAFVSANSIFYRCTRCGNFKRANRFLKDKFICTMCGHSDNLEEIGSSNLAKTLITYKNNKIPVYYKTEENSIIFRLDILDYEVACAKSLSAANEFCERLQKHIALNMGNFSKHQQFTAKKLLGENAFSKINFIEIK

SEQ ID NO: 21580 - protein, 377 aa, unknown
  TnpB Polypeptide
VEVYLGVPFGYEPNAELKKLLEDFRDMVNFCIDYAYKRRITSYAKLRGGVYEEWKRRWDYSTHYCHSACKIALAMLKKHRKNKKEGKPEARKLFMQLDPQLYRFYGDKIRISVRPRQFLFIYLRFGEYQRKFIDAWREGKLKTGEITVNEDKIIIPFKREVDLQNPSDWIAIDINESNVTAVSSNPHVLRIEHELRTVHTTYFIIRRRIQKLARYKPKTAERLLRKYSDREKNKTKDICHKISKLIVEFSKEYGFGILMEDLKGIRKRIKRGRRMNRRLHSWNFRRLQFYIEYKAKLNGLPVEYVNPRGTSSLCPVCGGRLAPNGHRLLKCPRCGYENDRDLIAGINMLRMRGAPLPLKAINEDSNRAIRDGTGSKC

SEQ ID NO: 21581 - protein, 354 aa, unknown
  TnpB Polypeptide
LGFKGELKWCGKQGRLEIVYNEARRSWYAHIPVEVEDEAKVEGSLRASVDLGIVNLATVYVEDGTWYIFKGGGVLSQYECYSKKMSGIQKVLARHGQRTSRRLKLLYDKRRRFLKHALNSMIRKIMGELKEKGVSEVVVGYPKDIAKNHGNKLTVNFWNYGYVIKRFKEIGEELGIRVIDVAEPNTSKSCSLCGEAHENGRVKRGLYKCPRMGKIINADLNGAINILHIPESQGAKSEGQLLARDRGNGLKTQPVVYHWTSGAGWVRTAPTSCEVMKMKAVNHEPVSRPEGTLRPSGRGGGQPVGSPGVLPYVLLTIIDPPGGIPPLNPPRYRPEVTDDPRVYRSIIAPALRAL

SEQ ID NO: 21582 - protein, 412 aa, unknown
  TnpB Polypeptide
MKRAILLQTLSTDSKNERLEKFMNKAIHEYNHLLSERWDSESCDFCNSFIDFHHKTLSTSKANTSFNVQIRCSLIRDAWNSKANKINALTVKFNVPRNCKTFSTKANFFIRFGLYPRKRIAIPIKQNRNYQRFANLLTNGWICKTFGLTKDLQIVAFLSKEKEIGHRKNVLGIDVNAKPYAISILSPNGKVLYQTYFGKHIWVRRRKIMQRRAMLQSNADKGSFKAKRSIKKIRKYERNFVRTNLGQIVSEIIRLANRYNADIAIEKLKRFNPKGKRFNRTVMRIPFLRFKSILEQRCFDNDIHLDIVDSWHTSKWCSHCGAVGKGHSANYSMFKCKKCGQTVNSDRKASLAIAVKSLLERNKHGSNQTCSFQFSSRRVPVIGLLHPDAVVDSCFVSHNHQPMESPRTLNVD

SEQ ID NO: 21583 - protein, 308 aa, unknown
  TnpB Polypeptide
MNKTIRKAFKFRLKITAENQQKLINYAGGCRFVWNKALALNLDRLNQKQPILRYDALDFWSKLWKQSDEYSFLKDLPSQVLQQKLMDLDKAFKDAFDKNQPIKRIPVFKRKGQSSDSIRFPQGFKIEQETNRICLPKIGWVRYRNSRKIVGTPKNVTVSRKGKHWYASIQVEYEANILEHKSTSAIGIDMGVKRFATLSDGSFIEPLNSFKKSAEKLATLQRKLKHKKKFSKNWQKQKAKITKYHEKIAAARRDFLHKKSTAICENQAVICIEDLKIKNMSKTAKLKNVKQKSGLNKSILDQGLGDVF

SEQ ID NO: 21584 - protein, 206 aa, unknown
  TnpB Polypeptide
MKDTAAKTKQQIRITVMLKYLGLIMRCRGWLCFQKRLRWKKQDSSEKMKKRLAREQRKLSRCVKGSRNYVRQQKKVARCHEKIRSQRRDYLHKLSRRITDQYDIVAVEDIDMKAMSQCLHFGKSIQDNGYGMFRNMLDYKLAWKGKELVKVDRFFPSSKKCSKCGKIKKELKLSERVYRCTCGNEMDRDRNAAINIREEARRMLAA

SEQ ID NO: 21585 - protein, 367 aa, unknown
  TnpB Polypeptide
LEKAYKFRFYPTKSQIKKLNDTFGCARYVYNYFLDLKQKLYSTEKKSISCNGCIKELTFLKKEKEWLKNVDKFSLQNSLKDLDKAYKNFFSGNGYPKFKSKKDNRKSYRTNYTNNNIEFLDKWIKVPKLGKLKIRDKMKPQGRILNATVTQAPGGKYYISLCCTDIEAEKLERTDKNVGIDLGIKNFAITSDGTVIENPKYLQKSLNKLAILQKRLSRKPSGSSNRNKARIKVARLFEKISNQRKDFLQKLSTMLIKEYDIICLEDLQVKNMIKNHKLARNISDVSWSEFGRMLEYKAEWYGKTIIRVDKFFASSQLCSCCGYRNKEAKDLSVREWKCPACGTEHDRDINAAENLLKEGLRILKENT

SEQ ID NO: 21586 - protein, 694 aa, unknown
  TnpB Polypeptide
METPKEKPPEFFKSTKTSLKSILKHPEINTTKINDVVIKAHKIVIHTLQFLKLYTLHHYETNNHILPEIDKILILNVMKVVCGEKHTNTGKPPKKETIELKDKLTAFYTKHYKPYTQPEQLNYEYMSNVLSYLCEDIMTMYENNIQLHYVDYVERFVNVVWRKKMLVEKIRKIFPTKKEKEARIRHLEKELRKIKNDLLNVDNSVAFTAQPHYHKWITQQKKHIIPNKDKFQKQSIYYDLKCKPMDYFPCMIAMMKHVENELETISNVFPLRSSIAPGYIRLDTITLVYLLLRKEQGKKSDYSNQGNTKKHEDKIWMFFFRTENKVFRKTDFSFHHMISTDGVGVSILFIRDDLVGKRLPSAKKGVSRELYIDELYDYSGLQDKKIVGVDPGKEDLIYCVDDASKDANIFRYSQNQRRKETKMKKYNNIILGMKTNKIQGKSVIEYETELSNYNRKTLQIDNFKTYVNEKNRINNLLFRFYAKHLFRKLKFGKHINIKRNEQQMISNFRKMYGNPENVVICIGDWEQRQQMKYKEPTLGIGMRSLLRKNKYKVFLVDEFRTSCKCSNCNGGVCEKYMVRKNPRPKPKKNKKNPKKERKYDEMRLVHGLLRCKSGCGEWNRDRNGSSNIYKIAYQAIHNLERPSYLCRETNCDIKSQSLGVSVSQQSRETKHKIKSNQAVLPNCYKQNILQVSKD

SEQ ID NO: 21587 - protein, 531 aa, unknown
  TnpB Polypeptide
MESIRRAVAVEIESPPPELYAVKEPYRRIVEEVATYVAERGRLEREKYNELYRRFRKQSPLPAQLIQQAMNQGVEIGKSFLKLKKDGRVHKPRPEVRRVSMRFAKDSWSYRKTATSAAPVKIAVSLPGGRREVWIKPHRRLWLYWWKVLRREAELASTLVLKRRRGRWYAIFIFDVALERKPPAEVVAFDVNENSVAVARLSLLATVDRVASWNRQYINPAVYSIRTDFGRLAKRYEAVRDRKLEELKQKYPIAGRNEEERRQNVADTREFRKFVRRLRERRRKEGRVGKVAREVTKSPAVIITEELGKNPQEKMIGLEEKRVEKRELRHRIKQTPFKKLLKSIEDKAAEGGSVVFYVSSFRNSKVCPIHFAMLEDGSDWHILHCPHGHVVDRDAAAVLNMLWKITPEGVVKGVWWDVKETRKRLNKGVVPREAVGKVNPIVPRPIIHAVRASLRVLKASSQWPAVLARAAPMTPAQGADEDGARAPVNRPLGRGGGRHVKDPNNQVCGFRQARNCGGTVYCDRCPGRPTE

SEQ ID NO: 21588 - protein, 411 aa, unknown
  TnpB Polypeptide
MRASLIIVCSKKYNKKSRTENIQVKQIQTRKVVRRIKETYKGYKFRIYPTKQQKELIERTFGCCRWYWNQALHDNIEYYQEHKKGKINTPATYKQENEWLREIDSMALCYTQIELQSAFSKFFKEASVGYPKYKSKHKESYPSYSTCKAIDIKNGFIKVPKLKWIRCKTHRDINGVLEKITISRTPTGKYYASVMVKNVVNEYQDNNQVVGIDLGIKEFAIIHNGEIAKHIENPKWLRKKARKLAVEQRKLSRMERGSNHYNNQKKKIAKIHEKITNQRKDFLHNLSSKLIKENQIISIEDLQVKNMMSNHKLARSIGEVSFSEFRRMLEYKAEWYSRTVIAVDKFFASSQICSECGYKNKDVKNLGLREWTCPECGADHDRDENAAKNIRNQGLKMLGMQQPVSHLCLTQ

SEQ ID NO: 21589 - protein, 416 aa, unknown
  TnpB Polypeptide
MYLTIKQQVKQLTKEDYKNLKLLSHIAKNLANEAIYNIRQYYFTEGEYLNYQKNYALLKNSLNYKMLNSNMAQQILKEVDDSFKAFFGLLKLAKKGKYNFKDIKLPKYLPKDGFTTLIIGFVRINRNKLIIPYSNSFKKEHKSIEINIPPKLVDKKIKEIRVIPKSNARFFEIQYAYEVEEVQSNVDKNKALAIDFGINNLATCVTSTGKSFIIDGRRLKSINQWHNKENARLQSIKDKQGYKNKYTNKQLANTKKRNNKVNDYMNKTARIIINYCLKNSIGNIVCGYNETFQRNSNLGKKNNQTFVNILFGTLREKIEYLCKLYGINFVKQEESYTSKASFFNRDKIPTYNDDNPQKYEFSGKRVKRGLYQTKDGRLLNADVNGALNILSKSKVVDLEVLYNRGELDTPVRIRVA

SEQ ID NO: 21590 - protein, 556 aa, unknown
  TnpB Polypeptide
MGKRAKTPSYVAEFEVETTSKDRSVLLSRLEAARQLYNAVLGESLRRLARMREDAAFAEAKAMPSKIDEKANPAKHAAFKALREEYGFRDYDLHKLSSLSCNCWLRGHLDVQTEQKIATRAFKAAERYSFGKSGRPRFKRYGELGSVEGKANAAGIRYRSGSILWNGEFAKLELPLIVKVNDQVQAYALKEADQGKVKYARLLTRSIRGEERVYAQLVLEGKPWIKVDKQGEVKHSIGAGVVGMDLGPSHVAFVVEGKASSTEFCRGLDRKAKALRRYQRRMDRQRRANNPENYNSNGTAKKGLLPWKSSTRQRRTQHQVKEHHRTLAAQRKSLQGELAHQVLSLGNQVITEKVSKSAWARRYGRSVGHKAPGFFEARVATLALASGGSFEPVSTYSTFLSSRCLCGQRKKKTLRERKHFCGCEFVPEGTFVDRDEFSAFLAMFSQGSLLGIERARSAWKLWGADCLLRPVPSHEVANGEALPSLRARDARQSDSTGNESGHRREVAPFGGGERRRLKNLRKTRTGEKAEKPSPLGTPALAMGGSQNRKNWDKGVK

SEQ ID NO: 21591 - protein, 556 aa, unknown; identical to SEQ ID NO: 21590
  TnpB Polypeptide

SEQ ID NO: 21592 - protein, 392 aa, unknown
  TnpB Polypeptide
MLKGFKTEIRVTEKHITKIHQSIGICRFLYNAYLAKNKELYELYKEGKIDKKQAFMNANDFDKYINNEVKILDEFKWINNCGSKARKKAIVNAEMAYKRFFKGQSKFPKFKKKKNQDVKIYFPKNNETDWTVERHIIKIPSLGFVELKEKGYIPTNAKVVSGTVSMKAGRYYVSVLCDIVDRNDYSDNKNEGIGVDLGIKDLAIVSNIDRPFKNINKTVTVRKLKRKLKRLQKQVSRKYEMNKDGKKFIKTKNIIKLESKIKVIYQKISNIRLNYVHNITNTLVKSKPEYITIEDLNIKGMMKNKHLSKAIQEQCFHEFKRQLIYKCLWNNIELRIVDRFYPSSKICSECGGIDKNLKLSDRVYICKECGIVIDRDKNASINLKNVKTYKVA

SEQ ID NO: 21593 - protein, 564 aa, unknown
  TnpB Polypeptide
LYWVQKFRNEVVAFCEERRKARGVWLYQHPLLVSGWKALDMDVNNGGVTLLPENISGNDVNAASKWLTNRLEQARLKVTSALGWNIKAPKQQLRAHVYKVWVNLSNEERKENPDAWMLTLPRTILDQCLQDMSKTYSKALKDRSAKKNGKKFGKTNKMAGFPQFQKHSYPYSIRFQIATKQNKAYVESWNTAYANKRKEIYIPSLGVVNFRDKQNLPAIPPELITIARNSSGQFHLTFANKDPTSKTNAKLRNVNDHTLPCEEIYDPNLKAMMMVPVTRGGDVGLKTLVTYSQKLAKQQTDAAKKEVERIRFFKQQEKRLRWANKSLARKKHGSKRWLKQKIKHGRIHTQTTNQRHDYLKKEAHDLVEHTSIVCLEDIFVGFMLKNKHLSKAAADASLGAFKQYIQWEAKKAGHLVLECGRFDATSKTCHACQYYYKDLTLKERTWTCPGCKIVLDRDENAAINIRQMALLRVVNGLETGTLVLSSPQKSKPKKGLSASGNGAKMLSPYPLHKDLTAFIERGGLTSLLTRNSVNESQVGANQRLLSGEAFILPKQPSHSCKERV

SEQ ID NO: 21594 - protein, 389 aa, unknown
  TnpB Polypeptide
MRRTYKYRLYPNKEVTSKLSWTFTRCRELYNAALSERRDAYRYAGISITYYDQQNDLPEIRHEIREEYADIASHVLQDVLRRLDKAMQAFFRRVLVGEKPGYPRFQGRERYDSFTYPDSAGWKREGSQLHLSKIGTVKGVLHREIEGTIKTVTIKKEVDQWYVCFSCEGVTAEKLAVSSEDVGIDLGVSHLATLSNGIMIEHPRYSRRAKKKVEQAHQAVSRGKKGSHRRNKAKKQLGKAYRKVRNQRRDFLHKESRKLVHQYQVLVFEDIKASNLTRKPKPKKDETGKYLPNGAAAKGGLNTSILDAGWGMFVAMCSCKAEEAGRTLLKGDPKFTSQICSGCGTVRKKDLSERWHSCDCGAELDRDVNAAINILARGHTTLAGTQPTP

SEQ ID NO: 21595 - protein, 394 aa, unknown
  TnpB Polypeptide
MEEGTADKGHVTIVYPAYPNSSQERELLRTLGVVRGLYNHFLAESIADVMEGDRFPTPREMNKAITVMSGQDAVLRSVSVFTLRDAPLRVHAAMTRFARLSARSGELRLPRFKSESRYRSLAFDPRSVRFDGRRIVFGKWIKLRCGNLDRGRSLHIPEGGRIVAARIVRKGSGRWYVHITFEVDRRYRSEIDLSDPAEPEAYDLGLCDIITDSKGEKIEAPDLYARHENEIARLQRQIASMEDEPGRREKQRRLSVLHERIRRRRDGYLDQVANHMVSGHSAVILEDLRLRRMIERDDSPAPRRKLFTEAALGTLVRKVEAKAERACIPLVKVDPAYTTRRCSCCGHVGDKMPLSLRVFSCPRCGLEMDRDHNAALNILGSGMGTLRESAEPSG

SEQ ID NO: 21596 - protein, 390 aa, unknown
  TnpB Polypeptide
MEEGFRFRSVTYRLYPNSSQEAALKRSLDLCHELYNRLLGWSLDHYRTTGEKLPRFDLNRVMTRISASEPGMKSDVYSTCRQNVTGRVHRAMAGCRPGRTGVLIHVPRFKSSNRYHSFCYESPNGFGFKGDRLHLSKIGDIRYRNSHRPKGAEARTCTVKRDARGHWHAVIVFRVPDIKRNEEDLEHPRTPAAYDLGLKDLITDTDGNKVAVPDFYGSEKENIAKLQRRMGSSEKGSPMYERARRRLAILHGDIHRRRRGFLHRTAAGMVDGHTVVVMEDLEVRKMKERPDQGPATRDKYTEASWRSLIDMVGSKAEEAGIPLVLVDPGYTSRTCCRCGAVKDSLPLSERTFRCGCCGSSMDRDRNAAINILDRGLVMQTFRESENGRPC

SEQ ID NO: 21597 - protein, 336 aa, Streptomyces sp.
MRLRYSFRLYPNGPQCSALARAFGCARVVYNDALRARETARVEGAPFPKTGDLSKLLITDAKKTTERAWLGQVSAVVLQQSLRDLDTAYRNFFDGLKGKRPRMGVPRFKSRKDNRQTVRFTANARWKITTGGDLYLPKIGEVRVKWSRTLPSAPSTVTVVKDAAGRYFASFVVQTGPEEMLPEVAGQVGIDLGLSHFAILSDGTKIESPRFLRRAEKKLKKEQRRLARKAKGSNNRAKARLKVARAHTRVADARREFHHQLSTRIIRENQAVAVEDLAVKGLARTRLAKSVHAEIERLCSRHPYFLDHHSAGGWSVVMSQSTPNSEGPHSFKITRP

SEQ ID NO: 21598 - protein, 373 aa, Clostridium sp.
MILGKKVRIFPTKEQEQKLWQSVGTARFIYNWTLARQEENYKNGGKFISDGNLRKELTILKKTEEFKWLNKVSNNVAKQAVKDACDAYKKFFKGLADKPRFKSRRKSKPSFYNDNLKLKVKDNAVLIEKVGWVTVKKNSIPLNWKYTNPRVSFDGKYWFLAVGIEKEQAIEGLTNESIGIDVGVKDLAICSNGMIFKNINKTRVIKQLEKKLRRLQRRVSSKYLKNKKGDKFVKTSNIIKLEKEIGLLHRKLKNIRNNYIHQTTATIVKTKPCRIVMETLNIKGMMKNKHLSKAIAKQCLYEFKRQIQYKCTFYGIEFVEADKWFPSSKLCSCCGNIKKDLKLSDRVYKCECGNVIDRDFQASINLSRYKLVG

SEQ ID NO: 21599 - protein, 389 aa, Clostridium sp.
MKKLKKAYKIEIKPTEEQITKIHQTIGVSRFIYNFYIAHNKEVYEKEKKFISGMDFSKWLNNEYIPNNENKLWIKDVSSKATKKAIMNGEKAFKRFFKGETAFPKFKKKKDQDVKAYFPKNNKTDWTIERYRVKVPTLGWIKLKEFGYIPVNSIVKSGTVSEKANRYFVSILVEEDIKVDKTTYSEGIGVDLGLKDFVICNNGLTKKNINKTKRVKKEEKKLKREQRKLSRKYESLKLRNKNEKGEAARQNIQKQIVKVQKLHQRLTNIRTDYINKTVNELIKQKPSFITIEDLNVKGMMKNKHLAKAVAQQKFYAFRTKLISKAKQNGIEIRIADRFYSSSKICSSCGAYKKDLKLADRVYKCSCGLSINRDLNASINLANAKKYKIA

SEQ ID NO: 21600 - protein, 435 aa, Moorea sp.
MIILEFKAYGKPIQYQAIYEAIRTVKFIRNSCLRYWIDNKGVDKFDLNKYSAVLAKKFPFANELNSTARQSSAERAWSSIIRFFDNCKRKLPGKKGFPKFQKHCRFGKADATRTVEYKQSGWKISPDKKSITFSDKKGIGKLKLKGTWDLWRFDKKQIKRVRIVKRADGYYVQFCVSVDVVEELKPSKSTIGLDVGLKEFYTDSDGNSEPNPRFYRTGEKRLKFYQRRVSRKKKGKAVGHASRTSNRKKAINRLGRQHLRISRQREEHAKRLARCVIWSNDLVAYEDLRVKNLVKNHCLAKSINDAGWYQFRKWLEHFGTKFGRVTVAVNPAYTSQNCSECGEVVKKSLSTRTHVCKCGCKLDSPKATLRERDHNAAINILKRALGTVGHTGTWVLDPNASGDLTSTVLGSGQEQPRRVIDRSRSVANGQESPRL

SEQ ID NO: 21601 - protein, 206 aa, Bacillus sp.
LTEYENYEKDIRPVKIQKVVGLDFAMDGLYVESEQGKKANYPRYYRQALDKLAKAQRILSRRKKGSARWNKQRLVVAKLHEKVANQRMNFLHHKSKELASNFDAVVIEDLNMKGMSQALHFGKSVHDNGWGMFTTFLAYKLKEQGKQLVKIDKWFPSTKKCSCCGKEKEMPLSERVYKCSCGFVLDRDHNSAINIKNEGLRLFALS

SEQ ID NO: 21602 - protein, 304 aa, Bacillus sp.
MDMAKQNKAFKFRLLPNKEQSALLAKTFGCVRFVYNKMLAERKETYEKFKGDKELLKKQKFPTPAKYKSEFPFLKEVDSLALANAQMNLQTAYKNFFEGNADFPKFKNRKAKQSYTTNLVNGNIELKDGHIKLPKLKLVKIKQHREIPADYKLKSCTISRTKSGKYYVSVLTEYEKDIQPKTIENVIGLDFAMAELYVSSENEKANYPRYYRVMSEKLAKAGRILSKRKKGSARWNKQRLVVAKLHEKVANQRMNFLHHKSKELASNFDAVVIEDLNMKGMSQALHFGKSVHDNGWGMFTTFLA

SEQ ID NO: 21603 - protein, 403 aa, Rhodococcus sp.
VLPNGRLRLPGVGDVPVRWSRDLPSAPSSVTVTMDAAGRYHASFVVDVPDQPLPLVPHEVGIDLGLTHFAVLSDGTKVDAPPPRPQGAGQAADRAEGTRPAAEGLGPPGACAPKGGALPRPGREHPPGLAPQALLHDRPREPSGVRGGPRRVRAGPDEARPLGARCRVVDVHGDARVQGTAARAHLRPGRPVVPLHAGVLGVRGHRGGQAPARPVVDLPVWRGPRPRCERRKEHPGRGTRGQPNARGAGVSRDPGPAPGREARTRREHRMSGADRNPRCSRRGGRQMVAGRTTNTAEARVPFSWSSAAARPDGSIAAYTPGIPTGSSHRPFASSAASAAVTSRHGNAVRIAASMSRLTVGSSSSWASVRACSSPNGPTRVRRSAVRCAPTPSADPRSRASARM

SEQ ID NO: 21604 - protein, 401 aa, unknown
  TnpB Polypeptide
MTAKRAILIELPKGRCDIEYIKRLMALTNLAYREYEVWIPGLPKTIQHQLYEFKNFKKRLVFGTTPKKWSAETWLPLKTLRIYANDSMKGDRVAPVVLDFKSNTIRLCQVCRNEPRYVVELPMPKWVIDRVKEGGDVRFAMIGLKDDKPYLALVAERVVEPYQPSNYMLVIDVNAWNNGIAWGLIKDGFIIKWKPERPNLREVDNLYNLSVRLSGEYGKLKRLGLDKTEDGKRLRKKIKKLRKRLYTKLRDYVQKLVYRLVRKALKHRALVIIDDMTGESRKELIEEKIPTGLRKLYLVYTRMFVRLLVTQLEWYGVPYEFRRLPSTVCPVCEHELTQEDDRVMVCTNCGFKAPRDKVPMYWAIRTINPSFTKISVAHIKGGQPPRPQGDPPTKGGKGPKV

SEQ ID NO: 21605 - protein, 334 aa, unknown
  TnpB Polypeptide
MLGCSPTPTRSRLCCILPPRTLGSYAGLPAVSRSGTVAAVGVSARRPSAAALKTARPHPDPDDRLGAAAQGPRDSSIWPGLRRGAHGRWYAVFECHREPTPLPSTGRAIGIDRGIRALIATSDGERITNPRHAEIRRRTVERHQRQLETLTVRDAAGRVCNARDPARVTAVLRLARAKEREANARRDGLHKLSRQIVDRYDLIAVEDLRLRSMTRSAKGTVEAPGRRVRAKAGLNRALLDAGLSMLVTLIREKAENAARTVVSVDPRYTSQTCAECGHVAAESRDGPLFHCVGCGHRADADVNAARSILLRAQSALMSGPDAGAEPARRARSAA

SEQ ID NO: 21606 - protein, 370 aa, unknown
  TnpB Polypeptide
VIGGVNVERSYKFRIYPNKQQQELITKTFGCSRFVHNYYLDKKIKLYQESKQSMGFYACSKDLTSLKTEKKWLKEVDKWALQNSLKDLDTAYKNFFVSHSSYPKFKSKKNNRKSYRTTFTNNNIEFKEKSIKLPKLGLVKFRDKQVPQGRILNATISQTPSGKYYCSLCCTDVVMKEFNKTGSVVGIDLGLKEFLITSNGDKVDNPKYLSKSLQKLAKLQRELSRKSSGSNRRNKARIKVAKQYEKIANQRRDFLNKLSTQLIRDYDVICMEDLQISNMIQNHKLAKSISDVSWYEFRRQLEYKANWYGRKVKFVDTFYPSSQTCSCCGYINKETKDLSVREWACPKCHTTHDRDINAAINILNEGLKIV

SEQ ID NO: 21607 - protein, 406 aa, Kitasatospora sp.
MTVSHVRRAFKYRFYPTDAQAAELSRTFGCVRKVYNMALQARSEAWTLRRERVDYNATSAMLTAWKRTEELAYLCEVSSVPLQQALRHLQGAFVNFWHKRAKYPTFKSRKKSRRSAEYTRSAFRFRDGSLTLAKMTEPLAVVWSRPLPAGARPSTVTVSQDAAGRWFVSLLCQDRPTMPEPVNAAVGIDAGITSLVTLSTGEKIANPRHERRDRERLAKAQRILARKAKGSNNRAKARLKVARAYAKVADRRRDFLHKLTTRLVRETQTIVAEDLAVRNMLRNRTLARAVSDASWSEMRSMLEYKAGWYGRELVVVDRWFPSSKLCSACGVVQSEMPLNVRVWTCGCGATHDRDVNAAVNILAAGLAVAACGDGVRPQRSTPGGQSSVKQEVVPPQRTRAAARPRG

SEQ ID NO: 21608 - protein, 451 aa, unknown
  TnpB Polypeptide
MSQKVRIDGVKHAGASVFLGVDHCGNLRWTRNPERIMVWLCDGWRTRFNQRREQRPHNVPVKDEAGEIIDWIKEPLGGPDVAELLSDKEARLRCSWMAAVPSSILATSNRLEGTEWSAGIKRKKTIGGRVPGFKSRRRGLGFVCWYRPSNHSYNAVFQKTGRKSGVVVITGMNPSRWVKPGEKAHWRIVIHVRVTQEIRPYTSVHVDWTHRTLVFVNMPLPLPRTGGGVIGLDRGCVHTLASSDGTFMDMPKPSKAELKRLKYLQRRMARQDRVNEARGGKPAKFASKRRQKTLSQFNVLQSRIIRRKNDWIEKTTTRLAQENILVAMEDLDVRAMTKRPKPKPDPAKPSQYLHNGAKVKAGLNRSILSNNWSRLMKRLQDKMNANGGRLVIVLAAYTSQTCHKCGYVTKENRDSQAVFRCVECGYEANADVNAAENILDRALSKTGGGTA

SEQ ID NO: 21609 - protein, 535 aa, unknown
  TnpB Polypeptide
VKGIPWLRPWGGCQPEYLKAVILDSRGAGTTGFPPDCSAADSMRHGGGASLPRWTTSAASACPTQPSCAVNSWNRSVSPCLPSATWDKTRPVLQGGGWSRSGPSGRMEWIMETVRRYNYRAYPTRGQRMALSRLFGACRYAWNWYVRQRLTDWNFNRTRSSYAELSAKFNRTKTEKALEWLTKVSAVPLAQSLRQCEMAYSAFFRYVEKHGCHVDHKGRPLGYPRFKSRHCGEQSAVFTTSARFHVRHDHNARWMFLDLPKIDGEIRLRWSRDLPSAPSSVTVMRHADGTYGASFVVKAEPKNPPKPRHNACGIDMGLESLASIVYSDGTREKVAPLRALRKAERKLRKLDKELGRRKRGSNNYSKTRQAKARLYARIGAQRRDLAYQLASRVAGENQAVALETLCVKGLMRTRMGKSMADAAWSMFTDRVDALCAQWGRRAIHIDRWCPSSQVCSQCGRRDGPKPLNVREWECPQCGAFLDRDYNAALNILDAAGLAESLNARGGDVRRRLASAGRDAIAREAGTHRTMMSPLG

SEQ ID NO: 21610 - protein, 486 aa, unknown
  TnpB Polypeptide
VSQKVHINNVGHSGASVFLGVDHCGNPRWTRNPERVMVWLCNGWRTRFNQRREQRPRNIPVKDEAGEIVDWIKEPLGGPDVAELLSDKETRLQCLWMAGIPKSVLSSTDRLENTEWFAGLKRKKLIGGRTPGFKSRHRGLGFVCWRNASKRGNALFHQTGRKSGVVVITGMNPPRWRKPGEKLHWRVIVHVRVSQPIRPYTSVHVDWTHRSLVFVNMPLPLPRIGDGVIGIDRGCVHTLASSDGTFMDMPKPSKAELKRLKYLQRKMARQDRANEARGGRTAKFASKRRQKTLSQFNALQGRIVRRRNDWIEKTTTRLAQKNILIAMEDLDVKAMTRRPKPKPDPARPGHYLPNGAKAKAGLDRSILNNCWSRVYKRLNDKMAANGGRLVLVPPAYTSQACHKCGHVAKGNRESQAVFHCVKCGYEANADVNAAKNILGRALVKTGGGTALDVEDPHWRPDEASTPSFPQAGSSFGVRSVKGIPRL

SEQ ID NO: 21611 - protein, 487 aa, unknown
  TnpB Polypeptide
MSQKVRIDGVRHAGASVFLGVDHCNNPCWSRNPERVMVWLCDGWRTRFNQRREQRPHNVPVKDEAGEIVGWLREPLGGSDVPELISDREARLQCLWMAAVPSSILATTDRIEGNEWFAGLKRKKTAGGRVPGFKSHHRGLGFVCWYHPSGNSYNAVFHKTGRRSGVVVITGMNPTRWVKPGEKARWRIAIHVRVSQPIRPYTSVHVDWTHKSFVFTNMPLPLPRVSNGMLGLGRGCAHTLASSDGAFMDMPKPTKKEMARLRYLQRRLSRQDRTNEARGGKTAKFASKRRQRTLVEFNALQGRIVRRRNDWIEKTTTKLAKENILVAMEDLDVQAMTKRPKPRPNPDNPGHWLHNGAKAKAGLDRSILSNCWGRVMTRLRDKMAANGGRLAVVSAAYTSQTCHKCGHVAKENRESQAVFKCVECGHRANADVNAAENILSRALAKTGGDTALDVEDPHWRPDEASTPSFPQAGSSFGVRSVKGIPRL

SEQ ID NO: 21612 - protein, 475 aa, unknown
  TnpB Polypeptide
MHVVALAVHLDELRLEVSAHLGKQFTQAVDSLLVEYFAAILRHKDQMNVHIKNTMPSAPNVVVFFHRPNILCDMQRLQAYRFELKPNGEQQRLMRRFAGSCRFVYNKALAMQQERHKAGEKKLGYASLCKSLTEWKAQAETLGLSETPSQPLQQSLKNLERAYKNFCEKRANLPVFKKKGQSDRFRYPQGIKIDQGNSRVYLPKLGWIRYRNSWDVLGKVKNATVSQSCGKWLVSIQTEREVEPPLPHGEAVGIDMGVARFVTLSDSTSIEPLNRFKKHQQRLARYQRRMSRKVKFSNNWKKAKARVQRMHSRIANARKDFLHKASCQISQNHAMIAIEDLQIRNMSKSAKGNSEQHGKQVQQKSGLNRAILDQGWGEFRRQLEYKAAWNGGFVVAVPPQYTSQTCPCCGHVSKDNRQTQAQFECVDCGFEENADVVGAINILARGHRVLACGEPVLSDRSMKQEPAEATRALAA

SEQ ID NO: 21613 - protein, 414 aa, unknown
  TnpB Polypeptide
MRLVERHVITRADPRFAALDHAAFASKHLYNQALYVTRQAFIHQQRVIRYPELAREMQTTEPYRALPRKVSQGVLKQVALAWQSYCAACAAWKADPARFLGHPRLPRYLDKQRGRNLLVYTTQALSQPGLRAGRIEPSGLGIQVPTQQTPHTIAQVRIVPRRGFYVVEVVYAREPVPAAGLNPALHAGVDIGLNNLATLTSDKPGFVPRVVNGRPVKSINQFYNQQRAEWQRALGAAGAGGAATYTSRRLERLTTRRTRRIDHYLPTASRRLIELLVAEGIGTLCIGQNPLWKQAVHMGRRNNQNFVAVPHARFVAMLTYKAALVGIQVVITEESYTSKASFLDGDPLPVYDAQRPEAPAFSGRRVKRGLYRAADGTPINADVNGAYNIIRKVAPEAFAQGSRGCVVHPVRLAA

SEQ ID NO: 21614 - protein, 409 aa, Actinobacteria sp.
LRSHAGAARFAWNWALAACLERYRAERRWYSGAELHKRWNARKKADPGLAWWEQNSKCAYQEAFRDLDRALRDFVRSSKGERKGRRLGFPRFKKKGYCRDSFRLTGTLRCGRGTVTLPRLGVIRTHEPTRKLARRLEDGTARILSATVSRRAQRWFVSFTVEVDRAEPARHARPGTAAGVDLGVKALLTAVDDTGAVITIPGPRPLKAGLRRLRRAARAHARKKPGSAGRRKAAARLARQHARIANLRADALHKATTILAARYETIVAEDLNVAGMTRNRRLARALSDQGFGTARRMLAYKTAWRGGRLVLADRWYPSTKTCSACGTVKAKLALAERIYRCDACGLVLDRDVNAARNLLSLAASGAERRNAGGGTVRPRAARHDPPNPEPGNPHGGKTGTAARQQAAAA

SEQ ID NO: 21615 - protein, 403 aa, Actinobacteria sp.
MRTAYKCRAYPNPEQASVLNRTFGCVRIVWNRTLAWRQARYHDGQLSTTYAQASGYLTALKATEELGWLNGVSSVPLQQAIRHQQAAFAGFFAGRARCPRHKSRTGRQCAEYTRSGFRYRGGQLFLAKMPAPLAFAWSWPHLDPASLDPSTVTVSRDPCGRWYVSFAVEVPDPAPLPPAGAVAGLDLGIKDFAVTSDGQKIANPRSLVRRERGLARYQRRLARCQQGSANRAKARAKVARAHRKVRASRADFLHRTSARLVRDHDVIVIEDLAVKNMVRNRSLAKAISDCGWGEFRRQLQYKAARAGRRLIVIDRWYPSSKTCSACGHLLAQLSLSARAWDCPGCGTRHDRDINAAKNILAAGLAVTACGADVRHPGSSGVRSAVKQEPRPARAGIPVPQDGE

SEQ ID NO: 21616 - protein, 335 aa, Actinobacteria sp.
LRALPAGRRASIFCDGQAAFASFFAGRARYPRYKSHAGRQCAEYTRSGFRYRGGQLFLAKMPAPLAFAWSWPHLDPASLDPSTVTVSRDPCGRWYVSFAVEVPDPAPLPPAGAVAGLDLGIKDFAVTSDGQKIANPRSLVRRERGLARYQRRLARCQQGSANRAKARAKVARAHRKVRASRADFLHRTSARLVRDHDVLVIEDLNVSGMLRNRTLAKAISDCGWGTFRRMLEYKAARDGRRLIVIDRFFPSSKTCSACGCLLAELSLGTRTWQCPSCGTRHDRDVNAAKNILAAGLAVTACGADVRHPGSSRVRSAMKQEPRPVRAAIHVPQDGE

SEQ ID NO: 21617 - protein, 456 aa, Actinobacteria sp.
MSLRLDIMFSLTSALGKEAGAGKEKVAVVIVQAYRFALDPSPGQQRALRSRAGAARFAWNWAQAACLERYRAERRRYSGAELHKRWNAQKKADPALAWWEQNSKCAYQEAFRDLDRALREFTRSNKGERPGRRLGFPRFKKRGRCRDSFGLTGTLRCGRGTVTLPRLGVIRTHESTRKLARRLEDGTARILSATVSRTAQRWFVSFTVEVDRAVPDRHPRPGSAIGIDLGVKALLTGADDTGTVITVPGPRPLRAGLRRLRRAARAHARKKPGSAGRREAAARLARLHARVANLRADALHKATTMLAARYETIVAEDLNVAGMTRNRRLARALSDQGFGTARRMLAYKTAWQGGTLVLADRWFPSSKKCSACGTVKAKLALAERIYRCDACGLVLDRDVNAARNLLSLAASGAERRNAGGGTIRPRPARHDPPNPEPGTPRRDKPGTAARQQAAAA

SEQ ID NO: 21618 - protein, 548 aa, Mycolicibacterium sp.
MAPTPASGPVRKPRARKRAKDAPTHVRSWPLRPLPTQCREIGTRFFTGMRVYNAALGEFIDRSRAVMADLAWVAARELPHRTARERSARSAAFRTVEVAHGFTADAAQSFASSLRKSWVREYLPAQETQNLGARAFDAVRQWHVGTKGKPRFKSVKRGLHSLAAKDGNGALRPKTDEAGRLVGLQWGAGLVVPIAPAAMSGRRGREQQAELAEIEALIAAGKVLSTRIVRTVINGRDTYRMQLVMDGRPTQRHPVGEGRVSFDLGPSQIAVTVQISNGWWSGWVEPLADAIRLDTLRLRRTQRHLDRQHRAGSPDCFNRDGLHTTGRCVWRRSASAQRTMIRVGELHRRLAEHRKTLHGALGNRLLGHGTDIACEHLDYVSWQKNYPRSVRDRAPGLLVAMVRRKAESAGGTPLYEYNPRTTALSQTCLCGNRKKKPLSQRVHRCACGISEDRDLFSAYLGLHVRTQADEIDRLDLPSAQQGWGRRQDVDESPKSSRSASARKRRGRRHPPSRRSVARIKARRAARAKMRQSCSARTSTTDQPTAIAA

SEQ ID NO: 21619 - protein, 485 aa, Streptomyces sp.
VKKFRPQPGFQVQAFRFALDPNASQETALRSHCGAPRAAYNWAVGWVTASWWQRKAEETYGIAEAGLTEWRPWSLPSLRKAFNEAKHTDSRFAGWWEENSKEAYSTGLANAAAAFDNYAKSKQGKRRGRRMGSPRFKSKRKARLACRFTTGTIRVDTGGRHVTLPRLGMIRTHEPTVKLLGRVQAGTARILSATVRHERGRWFVSFQAEVRRDLVRVARPDVAVGIDLGVKTLAVMADSTGEIRTVTNPKHYDAALKRLRRASRTMSRRRGPDRRTGQKPSRRWEKANAQRNNVHHRVANLREDALHKLTTAVTAEYGTVVVEDLNVAGMLRNRRLARRIADAGFGEIRRRLAYKTRQRHATRLVAADRWYPSSKTCSGCGAVKAKLPLHIRTYECDACNLVIDRDDNAALNLAALAVACTTGTGVAGDQDTAPAASNPRGADRKTRATRPRRKAEAGRAGGATLPHQQQTETRDRTQAEALTLW

SEQ ID NO: 21620 - protein, 132 aa, Escherichia sp.
MDNLHKLSRKLINENQVVCVESLKVKNMIRNPKLSKAIADTGWSELVRQLQYKGEWGGRSIVAIDQYFPSSKRCSSCGFTMQKMPLNIRKWHCPECGAEHDRDINAARNIKAAGLAVLALGESVIPKPLHVV

SEQ ID NO: 21621 - protein, 431 aa, Acinetobacter sp.
MKISQHCKFRLLPNQEQEILLNQAIGSARFVWNQILAKSFEMFAKDEFIRYETIEKNLVPLKKIPEFSFLGDTYSACLQQKIRDLATAWKKFYNAKEQAKLKQKPFKPKKPRFFKLADGSEVQLRPLMPRFKKKSDGEQSFRLPFQDCDVVGDRVSLPKKTGWIKFKKSQEIVGKITSVTIKKICGLWYISFCTNREVEQPIHPSKSAIGIDLGVKKLITTSSGQVFDPINSFKANQVKLARLQRKLRKKTKFSQNWKKLNLKINKLHHHIANIRHDYLHKVTTTLSKNHAMIVVEDLKVANMSKSAKGSIEKKGKNVKAKSGLNKSILDQGLSMLVDMLEYKQLWRGGLLVKIDLRYTSQTCSSCGHVAKENRQTQAKFECVECGFSENADINASCNILAAGHAVLSVEGGCGKGRPVKQKASEIREEVT

SEQ ID NO: 21622 - protein, 436 aa, unknown
  TnpB Polypeptide
MKLAGDFKALEDSLAIYRQALTFLIPIINDAWEELSQYEFANQKYNQIEKWVHSTQNNQARFDFDQEFPKLPTYLRRSAISKALGIVTSYHSSIANWEVNPAGQAPKLQLIHYEYPAYYKKNLFKNFDPLHQTIELKVFKNGDWVFEQYGLKQSDCTYYKRYLADKKQNVPILQKKGRRFYATFSYEENVQLVPEESIRKICAVDLGLNTDATCTIMDKDGTVYARKFISFSKEHDRLHTQLGRIKRNQKRGSRHNKTLWRSVAGISQDIADKTVKAILDFGNEHGVDVFVLEHLDFKGKNIVKRTHFWRYKRIYKVLSQRAHQYGLRIARVNARYTSRLAFDGTGWSKRGSEITPETPYTLMEFPNGKTYNADLNASYNIGARFFIRHLLKTVTVTQRLALEAKVPRVAKRSTCTLSDLINLRSALAVLTAEKQA

SEQ ID NO: 21623 - protein, 393 aa, unknown
  TnpB Polypeptide
MRSYKTEIHPTRAQIGLIHKTFGCTRYIYNQFVFENLENLASGKDYISAFSYSKRVNNDPNTPSWLKEVPSKAIKQALIYADRAFKDYFSKRRGKPNYKKKGSSESFYLTGTIKVERHRIFVPVLKWIRLKEFGYIPKNISSVTVSMRNGRYYISCLCKDKIDERIPLSDYNMGIDFGLKDQFITEDRVIPSINKSLCVRKLEQRLQREQRKLSRKYEANMTDKIYYKTGTKKGKLKSYKWLKPLSECKNIQKQKLKVARIYERLTRIRTEYNRKALRSLVLERKPSSISIEDLAVRNMMKNRHLSKTISKAQWFQSRLYLENLCKKLGIELRLVDRFYPSSKLCSDCGFKYKELKLNERIWICSNCGSKHNRDTNAAINLGQCKNYTVLTAV

SEQ ID NO: 21624 - protein, 433 aa, Nostoc sp.
MLRVVKVRLYPDVQQQQSLAQAFGSCRWLWNYCLNLMNQTYKETGKGLSGYEVKKIIPQLKKEYDWLSLTYSQCLQQVCLNLGVAFNNFFEKRAKYPRFKSKHGKQSIQYPQNVKVADNCVTLPKIGDVTAIIHRPIEGKVKTVTISKNCSNQYFAAILFDDGKEKPELNTEGKAIGIDLGLTHFAITSDGSKFDNPRILSKHEKNLKLKQQQLSRKQKGSQNRIKARKKVARVHRKITNCREDFLHKLSRRIVNENQVIVVENLNVKGMMQNHCLAKSIHQVGWGMFCTMLKYKAEMDGKIYLEVDRFFPSSKTCHVCLNQVGSLPLDVRFWTCEHCNTKHDRDINASINLRDEGLRILTCQLPQVGKPAHGTGSSGTGDKAMKCGLGGFPYEQLHQEACRPDVSRSKGGRKKSTTAFSVGQEAYTLSARSV

SEQ ID NO: 21625 - protein, 315 aa, unknown
  TnpB Polypeptide
MAEMKKTEAYAFLREVDSVALQQSLRHLDTAFQNFFKQPKTGFPRFKSKKRNKNSYSTVCINGNITLSNGYLRLPKIGQIRLKQHRIIPEEYRLKSVTVSQTPSGKYYASILFEYEDQVQEKELQKFLGLDFSMHELYRDSNGNEPAYPKYYRNAEEKLAREQRRLSKMQKGSNNRNKQRLKVAKLHEKVSNQRKDFLHKQSRQITNAYDCVCIEDLDMKAMSQMLNFGKSVSDNGWGMFTGFLKYKLEEQGKKLVKVDKFFASSQICSVCGYRNAETKNLAVREWDCPQCGTHHDRDVNAAVNIRNEGMRLVVA

SEQ ID NO: 21626 - protein, 394 aa, Thermus sp.
VARRAFKYRLYPTKPQQKDLERTLELCRQLYNAALQERREAYKKAKKSLSLHEQKRWLPEIRADLPEYQRVHSQVLQDVLQRVDRAFQGFFRRVRAKGGKAGYPRFKGKGRYDSFTFPQAYATGVKLQEGGKRVLIHGVGSVKVKLHRPLEGQLKTATVKREGNEWYVVFVCEVEPKPLSPSGEAVGIDLGTNPHFLITSEGEKIEAPRYYQKAQNKLARKQRELSRKKRGSNRYDKAKEELARLHRKVARQRLDFHHKVARGLVNRYGTIVHEDLNILGLSRSHVAKGVHDAGWAQFLRILAYKAEEAGRRVITVDPKYTSQDCPVCGHRERRPLWVREFTCPACGTSLHRDVAMWPLRGTSWRRPGRGLRGGMPSRSELRSPALKSGESSLG

SEQ ID NO: 21627 - protein, 311 aa, Thermus sp.
VKLHRPLEGQLKTATVKREGDAWYLILICEVEPKPLSPSGEAVGIDLGTNPHFLITSEGEKIEAPRYYQKAQNKLARKQRELSRKKRGSNRYDKAKEELARLHRKVARQRLDFHHKVARGLVNRYGTIVHEDLNILGLSRSHVAKGVHDAGWAQFLRILAYKAEEAGRRVITVDPKYTSQDCPVCGHRERRPLWVREFTCPACGTSLHRDVAMWPLRGTSWRRPGRGLRGGMPSRSELRSPALKSGESSHPYGDPGPGFKEVDGVYKAHHPGSVAHDDGVGPGPPAEEAHPLQDVPVRDARGGEDDLLARG

SEQ ID NO: 21628 - protein, 366 aa, Enterococcus sp.
MFLRKAATTEGIISEGRQVPIKTLKAYRFALYPDEAQKHFFIQTFGCVRFTYNMLLTLRQQESGKTVEERTSARLQKQKMTPAKLKKDYPFLKATDSLALANAQRNLEKAFQNYYRGRASYPKLKSKKSAWQSYTTNNQGHTIYLAEDGLKLPKLKSKVLVHQHRSVAGKIRSATISAKNRQEFYVSLLCEEDIPALPKTGSEIEIAYDPTGLVVTNKPIVGIPTFCQTQVLEKLKKAQRRLSCRAKSAQRRNAKLEQAKNYQKQKSQVQQLYIHKLKQKEDFTEQLSIALLRQFDCIIITKPPELRENKESKAAKTVKKSKHTTVFPSFEDNFTLSDWNRLLLKLKYKAEWYEKELVFICPTNGK

SEQ ID NO: 21629 - protein, 430 aa, Kibdelosporangium sp.
LRVSYKQGVRYELAPDDKQAVLMGRHAGLSRVVENFCLDTVRKKWSQRRAEESYGIIGDDLTTVPWTGPALEREWRAAHQALFPWFTEERMSSRVPKEACRVRAAGLANYLKSKKGERKGPRIGFPKWRKRKDGSRFRYDADRAKPMDARNVRLPAIGDVATWEDMSWLTDRMATGHARVLGATIRERAGRWWVSFQIEIDRDEINKRHRVDESTPQCGIDLGLKTFAVIRDSDGGREEIHAPKPLKAAQRVLKRANRKLARAAEDSANRVKARKRVAGLHLRVADRRRDFLHKTTIRLARTKSAIAVETLNVRGMIRNRRLARAISDAGFGEFVRQLDYKADWYGSRVWKADRWFPSSKMCGNSTCGRVNRALALADRVWTCGGCGTVHDRDDNAAGNLLAAMLADTACDMRTLAGKFPGEEKRLAETA

SEQ ID NO: 21630 - protein, 539 aa, Kibdelosporangium sp.
VAEQLKKLRTVDVPFVALGPSGVAIRDRLKHVTAEDEDVLRVAGEHLGMLASGDLKARCVGGLEHSADGWAVRKRELTAVSSSRWAGSITKATHELWALARRCQGAHIQSLEAGVRTLEHRLSLSIGAPGTKRLPGGYRSRGEWFHKSRRLHTLTARLQQQRADHKAGVVHVVRGGKKMARTRHNLDQAQLTEHEWRQRWEAARWFLQADGESGKRHGNETLRVTPDGEVSIRLPAPLGYLANAAHGRYVLAGRVRFAHRGSEWRDRIEANEAVAYRIHHDANRGRWYLTASWQRPTIPTIPLETARARGMVGVDFNADHLACYRLDVHGNPVGDPHRFFYDLSGSADHRDAQTRHAITQLLHWATRCGVAAIGIEDLDFSAEKTREKHGRRKRFRQVISGMPTGKLKARLVSMAADAGLAIVAVDPAYTTQWGAQHWRKPLCTPHRILSRHDAASIAIGRRALGHPIRRRTTPPRTHQSDGYGHRIVQADRGVRGRDGTRPPATDHAHRSVPPNGTRTREPSTPNTVRGAPVQLMFTD

SEQ ID NO: 21631 - protein, 443 aa, unknown
  TnpB Polypeptide
MKQERRRGKKTVKPQTITKAVTHIRLIEGNPGKLAALDDLAAVYLALCQQYVILFCTEEAPDPFHLPVFATRLSERWQRVAIQQAAGIAQSWRTNRAEAYQGYADELAEYHDQQTNSTLNPEANEPVWQEWDVPTLRQTCIQANANVVKLEPSEDSSFDYWLQISTLAFRKLLFVPVKLADYHRQVLKGNTINTSVQLNKRDGTWWLTLSYDEVVPILTEADAPVVGIDVGIANFVTTSDGKHYGTFQGKLRERQKRDREKRRRKAKLRKCLEKKGAKPLPSTSSRSGQRLIRHVRQEINRAVNQCFAEHPDAQFAYEQLSVATMKHKARAMNASMRASNLAHIPEQIAWNAAKRGVQATRVKSAYSSQECQICHHTDRANRPDQQTFCCVVCGFQSHADLNAAVNIERRAGDIALQLCKDRKAVKSLLMQRHEAWRKQHGWP

SEQ ID NO: 21632 - protein, 381 aa, unknown
  TnpB Polypeptide
MILRAIKIRLYPNKTQEQTLNKVLGSYRFVYNQMLALKQNNYKADKTNLKVTDLSKWFHRTLLKDEQYAWLKEQNTKVMKQAIRQMDGAYQKFFKQHNGFPKFKTKKDKQSALFPYEAISKHNTFETRHISLTTPLKNIKFRCSDLYFSRLQKYNKNIRSATLSKTKSGNFFLSILIEMDDTELKRFEHTNEQVGIDLGIKDFVITSDGEVFENKHFFKKEEKQIKKLQMQLSKKVNGSNNRKKVQICIAKLFERIMNKKNAYIHYVTNELLTYFDTIFMEDLNVSGMVRNHHLAKAIQEVGFYKFKETLINKALVNDKQVIFVDRFYPSSKTCSVCGYKKQDLILSDREWICPVCGTQHDRDINAATNILLEGQRMLVAE

SEQ ID NO: 21633 - protein, 256 aa, unknown
  TnpB Polypeptide
MVLIQDGCGSFDLVVRLSGLSKGNRITIPTRKTQIFNKWISRSGARLIQGCTLGNDHLVLWVDVPERPTKKSGKRLGIDIGIHKLLTDSDGKHYGTEFKTIRDKIRRRKPGSRNRWQACQERKNYINQIVNRLPWTRLSILGVEHLTGLKTGKQKGRGKAFRKAVAPWTYRQVLNRIECKAQENRVRLVAIDPANTSRTCPICGTVRRDNRRGEGFACLGCGYTADADSVAARNILARTLATLGSVESPKPKKAMA

SEQ ID NO: 21634 - protein, 384 aa, unknown
  TnpB Polypeptide
MRAYKFRIYPSKKQEELLNHHLWLAKNLWNELLDECKQMYKDFGYFPTKNTLQLMVKDYGLYSQTQQEIAHRIYNSIIRVFRFRKQGKKAGFPRFKSFDRMKSLHYPQYETGFWLDKKLTVTPFGEIAVKKHREVKGEIKTLTLKREASGKWFAIFTAEDEKPMPKENHGEAIGIDLGLITFATLSNGKMIKNPRYLMKHEDRLTFIQRKFSKRKKRSSNRKKVKVRVAKLYEKISDCRRDFLHKITTRLVNDYSFIASEKLASREMAEENYGKQINDAGWNMFADMLAYKAEGAGCRVVFVNPEDTSKMCSKCGNTRDDLTLWDREYTCPNCGLTIDRDLNAARNILMRATPGQGGSNACNSLHKERDVAVATSMKQEAHTHS

SEQ ID NO: 21635 - protein, 457 aa, Deinococcus sp.
MMTVKIVRSAKLKLRCSPEQHSRLLAVTTAYRDAQNHASQWAFTHGKTSSGIAIHKGCYADIRARYGLASQLACSVRDSVSAAYKTLWTMTKQSVARLKAAQGQVGRKGRLPRLYRGLDHAPVFKALTLDYHYGRDYSFKTGRQVSVMTLEGRMTLGYAGWSTHLEDLQRPDTEIGAAKLWYDRPKKQWYLLVAYTVEKPVVVGELKQVVGVDVGQRYHAVTKVIDPVGHGKITMFEGSSHRKKADHVQHLRTKLQAKGTRSAKRRLVSISARERRFTAQRNHVLARQIVDANPLALIGMEELTHIRERTERRSRPKASMKQKKVNRVRSTWSYAALRAMVTYKAPLVGSLVTAVDARYTSQTCPRCAHVSRENRPQGRERFACVNCGWSGHADVVGATNVGMKAWQWKLEQEFSGCLSAIPSREAEDVTLYDAEGGAHPAVEAEGSHKPATSVAGR

SEQ ID NO: 21636 - protein, 320 aa, unknown
  TnpB Polypeptide
MLVEYETRPDVSVEHVQQVRAVYNRERGRWELHIVCKDEIETPEAPGYETAGIDLGICNFAAVAYSTEKAELYLGNRLKQDGYYYPKEIAKCDDAGAERGTRLHAKWSERRTHFSHSLAKHIVERCVEKEVGRIKIGDLEGVREDEDGEAKNWGRHGNLDLHGWAFDRFTSILEYKAKVEGIEIEKVDEQSTSKTCCVCGKTDQNQRVERGLYVCEEHDDAFNADVTRAENIRLEINESNSKSSASLDEDRCTGWLAQPPVYLYDLSCGFQPNESGWTVDLNIPTLGIPPRSRGEECQLNYSMCQRLKQCSPIHWVRTTL

SEQ ID NO: 21637 - protein, 392 aa, unknown
  TnpB Polypeptide
MIKTLKVRLNPNNKQLTKLFQYAECARFAYNWAIVRERENYNQGNKFISGNDLRKEFTQLKKLPEYEWLTNISNDVTKQAIKDACTAYQRFFKKQCRYPKLKSEKHSKKTFYQDNVKIQFTDTHVKVGGFSMSHKRNKQKLNWIRLCEKGRIPTNCKYLNPRFTYDGLYWYVSVGIEVEDVKETPTGDGVGIDLGVKDLAVCSDGNTYENINKTAKVKKPEKRKRRLQRSLSRRYEKNREGKRYYKTCNIIKREKGLLKVNKRLTNIRHNHTHQVTSEIVKRNPSFICIEDLNVRGMMKNKHLSKQIQQQGFYEFKRQVNYKSNWNNIPLILADRFYPSSKTCNCCGCVKEDLKLSDRIFICPDCGNRIDRDYNASLNLKNYGRNVLNQSVV

SEQ ID NO: 21638 - protein, 380 aa, unknown
  TnpB Polypeptide
MTVHKGIRVRLYPTEEQEILINKTIGCCRFVYNQTLESCKQSYEQTQHFPSKKERYTNLVPLKEINQFLKEVDYHALQQSIRDFDSALDKFFKNRNHFGFPQFKSKHNLKQSYRTTCDSGRADVLDSRHIKLPKLGKVRTKRFDMPKVYRMFNITVEKTSTNKYYASICIETEVQSLPKTGKQAGFDLGLIDLLIGSDGTRYERPKFAYVFKEKLAKEQRKLSKMRTKLERAKLNLDECKNYQKQKHKVAKLHEHITNCAKDFNHKLSRKLVEEYDLLAFENLNIEGMRKNHKLAYSISDVRWSQLLNFIKYKCLWYGKEFRQMDRFYASSKICSCCGTYHKDIVNSLSVREWVCPNCGAHHDRDVNAAKNILNQALSVA

SEQ ID NO: 21639 - protein, 437 aa, unknown
  TnpB Polypeptide
MSEEKNLKIKDTLRATKERRSQMDCRVFSVKVQENRLSRAKEERLNRCFLEAKWLRNAVVAAENLFLEDTSSVQVKVNDLFETREIKNLSSQIKQSVVDRVKTDVCNLSKAKKAGLKIGKLQFKKECNEINLKQFGNTYKIKSHNKISVQNIGVLVVNGLEQIDLDEVEFANAKLIKKPSGFYIHLTVYTKKQLQQETSKEILGLDMGIKNQLTFSNGVKVNFYLEESEQLKGLMGKLSRQVKGSNQYKQTLARIKRIYEHLNNKKNDVVNKLNSVLKQNYIICFQDELLNSWKRKKSKQKFSFGKQVQHGILGRVKSSLKKNDSNVMLESSVPTTQTCPECGWLTNHSLDKRIYHCSHCGYENQDRDIHSAKNMILLSGYGTYRSLNTDTVSTEKMVSLLDNLSNLGGVVTTNSMEAHYLKVVGSSLFLKKNIVSN

SEQ ID NO: 21640 - protein, 375 aa, unknown
  TnpB Polypeptide
MDEQAVRKSFKYKLKPTPEQERALAFVVRRCRELYNAALQERRDAWHKCGVSVTAAGQSAQLPAVKAVRPEYHDIHSQVLQDVLTRLDRAFQAFLRRIKNGETPGYPRFQGASRYHSITYKQFGNGATLDDGFLVLSKIGRMALRWSRPLEGTPKTVTVSREADGYYVCFSCAEVPTQLLPTTGRETGIDVGLKVFLVTAQGVAFENPRHFRKAERRLKTAQRRVSRRKKGSHRRRKAVTLLAKAHQDVQRQRRDFHHKTALALVTHNDTIYLEDLRVANLVRNHRLAKSISDASWAQFRAILEAKAAYAGRRVVAVPPAYTSQDCSGCGEHVQKSLSVRTHICPNPDCGLVLDRDENAARNIERAGQALRGAVA

SEQ ID NO: 21641 - protein, 351 aa, Thermus sp.
LPPALQRRPAGTQGCLPQGGQGGGLLRAEAPSSRDPQGPAGVQRHPLPGSPGGDPAGRQGLPGVLPAGKTRTEAGLSPLQGEESLRQLYLPPGREYWGQGAGGREAGVHSRHRLGEGETSPPAGRQAQDRHGQAGRGTLVHRLCLRGGPQTPSPQRPGRGDRPWHQPPLSRYLRGRDGGGAQALPEGPGEACPEAKGALQEKERQFPLEEGEEGTGQASPQDRQPAQGLPPQGGQGLVNRYGIIVHEDLNVLGLARSHTAKGVLDAGWAQFLSILAYKAEEAGRRVVGVNPKYTSQDCPVCGHREKRPLWVREYTCSACGTPLHRDVAAAQNILARAWTGPSGMDTARAVP

SEQ ID NO: 21642 - protein, 406 aa, unknown
  TnpB Polypeptide
MQRLQAFKYELMPNGQQERQMRRFAGSCRFVYNKALALQKARYEQGEKKLGYAGLCKLLTEWRNSADTQWLADAPVHPLQQTLKDLERAYNNFFAKRADFPRFKKKGQSDSFRYPDPKQIKLDQANSRLFLPKLGWVRYRNSREVLGVVKNITVSQSCGKWYVSIQTEREVEQSIPQGGAVGIDMGIARFATLSDGTFYAPLNSFKRHETRLRKAQQALSRKVKFSNNWKKAKARVQRIHSRIGNARRDFLHKTSTAISQNHAMVCIEDLRVRNMSKSAAGTTEQPGKNVRAKAGLNKSILDQGWFEFRRQLDYKLAWRGGWLVVVPPQNTSRTCTCCGHVSADNRQTQARFACVECGFEDNADVVGAINVLRAGHARFACEVSGEVMPPAAGTHRSDSGAAQCRA

SEQ ID NO: 21643 - protein, 418 aa, unknown
  TnpB Polypeptide
VPTQTLTLKLPFLNLNRVKAAEWARLQEVNTALANRILAMPRTERRALTTASFKDVELGSAWVNQTIRNVNKSAARWRGGVKVFKRLPLETNNQNWTLHKVGDTYSIAFGLVRGVKKRVPLAVHEANHRAVLEGILAGTHKQGSLKLVQSKKGVWYACISVSWEAPEPAVTTRFIGVDRGQNHLAVAVTPEGRSLFLSFGWIRHIRRHYASKRRRLQKAGKHKTLKRLEHKEQRTIRHINHIIAKKLVAFAKEHGCGIRMEDLSSIRSTKQRRATKSQADLNRDFWPYYDLETKTAYKALAAGVAFEKVPARYTSKTCCRCGAIGVRNRHSFRCERCGYRGHEGVAVGDTGCAGNLADHNAGRNLANWSGLSCPVVLQAPQGGVHGTPQGSRPAGSPNGNLPLSSVRPEQPASRVAEG

SEQ ID NO: 21644 - protein, 417 aa, Deinococcus sp.
MPETINIEHELYPDAAQRSQLEQQRQMACAVWRSLAEQHARAAPGHHNEPALSRARVRTLARRAGWTRDLCSATLDDLVAVFNRVARVGPVPAELPEDQALRISARPVCDFAAELGGLETPVAAPLFLLPSAAHRAVADWRGDFFGRLDLQQNTLKQAAVAGNSTADAQLLTHLARWISLDGLARAAPVPVCPLIKLTLQESTRLRWAPGPAGPQPRLIWTFRVDDIAAPRLTGLVAADPGLRRLWTTRSRRGLTHFDNPMLGQWRPPLPAAPPGTLRRSWQPGLAKLQRQALLVGHHLRPVQAEAFQYLMAHPELAVEGLDLAGFSRTGPDYLAWLDWSGALIQHRYIIALAGLSRRLAVIPAQAGATRTCSVCQVPRAMHFEGRQGRCRACGAGNLDRDDNAAENLYRLGQAALR

SEQ ID NO: 21645 - protein, 493 aa, unknown
  TnpB Polypeptide
MGDAVVPGMEQLRWHDSNILSAISLGSIPWNGQTMHNSRSETRRLPSNWSRRKRIGYISCCNPSSCSKTTQRARAPCMQLVEQHVISRSDPRFAAIDAAAFQSKNLYNAALYEIWQAFIHHGTYLNYSEMDKRMQSHEAYRALPTKVSQQVLRLLDKNWTSFFEALEAYKEDSSKFTGRPRLPKYKHKTEGRNILVYTLQALRGGQSKKGIRGRIRPSGLPIEVKTRQKDINQVRIVPRHGYYVVEVVYSKEPVQAQVDPSFCIAIDLGVTNLAAITSNREGFVPRLVNGRMLKARNQWYNKRMKELQLCLPKAERERVTKQMQRITNKRNRQVDHYLHAASKAIIDLMVKEGAGTLIIGKNPLWKQEVENGRRNNQNFVNIPHARLIDMLTYKAALVGIQVEVQEESYTSKASFLDLDPIPTYHPNDETEYTFSGKRIGRRNRLYRAKGGRKICADVNGSYNILRKRKPDAFSKAKGVAAYVVQPLRLAITV

SEQ ID NO: 21646 - protein, 558 aa, unknown
  TnpB Polypeptide
MEAEVIPANRSRKRPKGTPTHVGRIRLDPSVSQSALMVKRGLAEDRVYNACLCEAKKRLALLRTDSDFERAKAMPSGPKRTALFRKLDKSYEFTERSLMSYGSSLRKSWIRPLVGAQEAQVEARNAFRTVERWSFGNGGKPKFRSYRKRKVLSAECKDLNGDIKPVLVDGRLWGISWTSKFLIPLAKPQSHSEALEQERIASLVLSGKLRYCRVVSRLINNRWCHEAQLVLDGPAPLRYLAGQQSMVCIDSGPSMFHVVYDTGSAHIPLAPSIDNIEKRLRVLQRHLDRQHRSGSPKCFDEKDRHIKGACYWKNRSKQAQKTQAQIAEIHRILAARRDSDHGRMANTLIEISSNIRTEDHGMKSWQQGFYSRQMQHRAPGSALDRIKRAAERAGGSYNEVDSRLALSQVCICGKRHKKSLSQRRHTCEEYGLDLDRDLFSAFLMRHVEIDGSVQTLDLDAARAELMSSSDGINNVGAGGHPCDSTTKRQDIGARPDETRSESEKRKSSNRRPPGKRSLVRIRKRRMAKASGASDSTARPEDGVSALAENQPLPTARVA

SEQ ID NO: 21647 - protein, 221 aa, Unicellular sp.
MVCEVNPKILPETDNSCGIDLGIIDFATFDNGEKVKAPKPLKSKLKRLRRLQKHLSRKQKGSKRREVTRNKLAKLHAKITDIRTDFLHKLSTKVIKENQLIALEDLNVSGMVRNRKLSRTISDLGWRSFRTMLIAKGEMYGRDVRIINRWEATTQTCSCCGEKGGKKELSVREWTCLFCKTKHDRDVNASKQILKVAGGQLDTQNGLQRECKTTIKACPFG

SEQ ID NO: 21648 - protein, 368 aa, unknown
  TnpB Polypeptide
MRRTFRYRIFPNKAQTTKLNQTLDACRWLYNHFLEQRKETWEFEKKNISRYDQSNTIKKLKQEYPFLANAFSQSLQDVSTRIDLAFRAFFRRVKSGDKPGYPRFRGKFRYDSFTYPQSGFKLLKTVVQLSKIGGVKIKLHRPTEGTIKTCTVRRTPTGKWFVSFACNIDHKAIEQPIKPAIGIDMGLESFVTLSNGDRVENPRFFRQEERKLIKAQRKLSKQEKATIARHKARKVVARVHERISNKRDNFTHQESHKLINRFNTIAVEDLSINDMQKDNFRSINKSIDDAAWRMFLNLLDYKAAYAGKKVIKINPAYTSQTCSRCGNRHKLKLSDRIFHCPVCGLSLNRDHNAAINILALGTHGLASA

SEQ ID NO: 21649 - protein, 399 aa, unknown
  TnpB Polypeptide
MLKATKVRIYPTVEQAAFLNRQFGSVRFAYNAGLHIMSHRYKRHGESLSAKHDIKKLLPVAKKSRKYGWLKQADSMALQQACINLDQAFQRFFDPKQKAGYPRFKSKRGKQSSYHCVGIKTGDTWIKVPKLNAIKAKVHRPVEGKLKSITLSRTVTGKHYASLLYETEQAAPAALMDVEAANVIGLDMGLSHLAIDSTGRKVANPRFMKLAQKNLKRKQQSLSRKTKGSAKRAKARLLVAKAHERMANARNDFQHKLSRQIVDDNQAVIVETLKVKNMMKNARLAKHIGDASWHALIAKLEYKAKEQGKHLVKIDPWFASSKTCHACQHKMKSMSLDVRSWDCPACNTHHDRDINAGLNIKHQGILKLKAEGLSVSAHRGSRNSGMWPVAAVEVGSLAR

SEQ ID NO: 21650 - protein, 478 aa, Filamentous sp.
MPNNMLRYYQSKPSLKTIVQTTYQYKLYPNTNQKLRLNEWLRICRYWYNRQLGDRFDWWSMNRSSVNACPLISSIASVREKPNYYAQKKQLPIIKKDLVKVFHSGELLDFSEVESTILQDVSKRVDKAFERFIVGDGSGGKSGRPRFKSEASFRTMTFATASNNWIKLTRKNWLYLRLPKLGSVKVRMHRPIPDGFIVKQVSVTKKADGWFIQFVLEDVNVPTQSQDMITPTWDNSLGLDAVLHEDVYLATSEGGKLPSLKPLGKNQAKLDRISTKRNKRKRGSKSRRKLAKREARQHQRIARCRKDFQYKIAHKLVRTDKKVFFHEDLNLKGLTKRNKIKQAEDGTFLPNGQAAKSGLNKSWSDAAFGNFFTTLNYIALKAGAVVISKNPAYTSTVLSYRDEIIFTDCSIRDYWDEQESLTVDRDINAAINLKRLGLGIFPSIKRRSGKLSVVGTMDKSTAKEILQTLHRAAKKPTS

SEQ ID NO: 21651 - protein, 361 aa, unknown
  TnpB Polypeptide
VNLTAQLKLEPTADQAFALRRTLVASNAACDYISGVAWELKTFRQFDLHRLCYREVRKRFDLSAQAAVRCISKVADAYKLDRKAKRSFRPMGSAAYDQRILAYDPLAATVSIRALDGRLKMSFVCGEHQRKMLANRKGETDLAFVRGKWYLMANCSTPDVKAAAPRGFLGVDLGVAQIAADSDGKLYSGSEIKSVRHRQRRLRAKLQSKQTRSAKRRLQKLSGKEFRFAKHVNHVISKQIVAAAERTGRGIAVEELTGIRDRIRATRRQRGVLHSWAFAQLRAFLEYKAKLAGICLVAVDPRNSSRECSACGHTEKRNRPNQSTFRCTACGFAMHADTNAARVISGRAAVSGPNVASCAAV

SEQ ID NO: 21652 - protein, 398 aa, unknown
  TnpB Polypeptide
MITHKFRLYPNKKIESLLLEKLNICRTAYNFFLGELNKQKVIDKSLIQGVIPDMKICDDKYKQVHSKSLQYEVYKLFSNLSGLSASKKKGRKVGSLRFKGKGVFKTFTYNQTGYKIDWCDKRNQLLWLSKIGTIPIRCHRKVIGIIKQITIKRFQSGKWYAFVIEDGYKQTKPVNDKVIGIDLGCDNIIFDSDNNSIKNPRILKKKEKKLKHFQRLMSKKQKGSNNRNRFRVNLSRVYESLTNSRNDFTHKISRYYANNYGVVAFEDMNISNLNKGNRLAKSLYDAVIGKIRQYTTYKVESTGGQVVLVDSRGTTQRCSQCGTIVKKELRDREHNCTFCGFVATRDYNSALEIKRLCLQKIGQGLSESIKHLEMGALLSNEQLLSMKNEATSSTSGVS

SEQ ID NO: 21653 - protein, 333 aa, unknown
  TnpB Polypeptide
MWNKINDGMGKIKIFKNNDWVWQEIKYFAKDLLSGKVYRFSNYKELNPTLVQKGKKYYLNIPYQKEIKLNESSLNQRVVISVDLGLTNSAVCSCLNYDGTVLDRLFINQSKEKDLLKKAINKLSLAKRLSGILNLKPNYWRRINNLQNFIVQNTVDKIVEFASKHNATHIVFEHLGKMKLPRGLFGSKRLRAKLQYWAKCKIQDKTILKARSLGIRYSKVLANGTSMYAFDGSGKLQRNGKKDLSTFTNNKTYHSDLNASYNIGARYFIREILKPLPEKLRFDYEAKVPHLQDRASHTLSSLIKLHEVISNAKTTLVSCIHDKEASPITAFAV

SEQ ID NO: 21654 - protein, 334 aa, Symploca sp.
MYGKHLKCSRLQKHIAKLRKRNPFWQQVGSQAVQDICQRIEKAYQLFFKHPQKGFRPPTFKKVRKYKSFTLKQAGYKFLGGNRIKIANRVYKFCNSRPIEGTIKTLTIKRTPLGEIFMIVVVNNESEPFAKLVTGKIAGFDFGLKTFLTCSEGFKIESPEFFSQSINEVKKANRNHSRKQKGSNSREKARLNLARRYEDITHRREDWFWKLAHDLCKRFDVLCFETLNIKAMQKLWGRKIGDLGFAKFLNILEWVAHKRGKQIIYIDQWYPSSKTCSCCGHVLENLDLDVRRWRCPSCQSKNDRDGNAAINIRKVGASTLGLGDVRQVQPAISA

SEQ ID NO: 21655 - protein, 282 aa, unknown
  TnpB Polypeptide
VRVTYKYKLYNSKKNKHLHQTITLAGRAYNHGIALHRRYYRLYDKHLNQYALMKHFTKLKKRPHYAWLNDIPSQALQEIAQRIDRGYRLFFRNLKAGIKTAPPLFKKTRKYKSYTLKQAGWKLLGDSRAQIGKRVYKMCRDRTLVGDVKTVTIKRDALYDLYLCFSVEVDDPKVRPTSGKMAGFDFGLKSFLTVHDGFESYEIASPELFKQSLKSVKALSRCLSRKAEGSNNRRKARARLARAHRAIANKRLDWFFKLSHDLTERYDYLFFETLNLKGMQRL

SEQ ID NO: 21656 - protein, 414 aa, Lactobacillus sp.
  misc_feature (198)..(201): Xaa can be any naturally occurring amino acid
MSELEYHYGIKVRIYPSYKQKELIKLNSNISRAIYNKLVGIDRKVYHLSKIGLPIKIVQTRIAELKRRKKIRELANHYQYMEDKRIDSLAKANAVQNYLKAWQMFREVHKAGVPRFHKKGYFEKYQTNCQYPKKSKMNIYSGSVRFLDNKHIQIPKLGKLRIKGQHKRIFDHKTDIRIGTVTVSKDACNRYFVSLQLXXXXDTPFVSEKIKTGTSIGIDLNTENFLTTSNNIVFSNPRFYRRIKKKLAKEQRILSRRGTRAKAEKRKLRTSKNYQKQRLLVSQLRTKIKNQRHNFLNKLSTTLINNHDLVVAEELRSSNLLKNHALAMSISDVGWRTFLSMLTYKADLYGKTFITINPKNTTQTCSTCGHVMSGDNKLILSDRQWDCPVCKTHHSRDHNAAINILNKGLLTITQ

SEQ ID NO: 21657 - protein, 493 aa, Prevotella sp.
MFRVGNEIKNHLIAYEKAQYRCLTERKDWKFIQAALSEAYKAEDAAAKKLLLEKRNTMLAAAGFSLYRFEKQSNKYRKHYKGVGGKGYWVNGHISQKIAASVWKAFESLLYGKGNEVKFSKWTDFTALSAKSNSTGIVYRNGKVFVNKMDLPVMLDAKDTHGYQREALSRDIRYCGICRRWYSSGWKYFVQLTLDGKPPLKVHPGTGELLHPLGTGRVGHDIGTQTIASVGKDNVLLTELADKVKGIDAELRRINRAMDRSRRACNPLMFREDGTIVPKSQLPPECLDRRGRRRWVCSKRYLRLDGLRRELFRRQRELRIQQHNELANRLMGYGDQHFIEEMRFRGLAKRAKETKKNDKGKFMRKKRFGKSISNKAPAAFVNILERKVVSAGGTFQKVSTFTVKASQFNHLTETYTKKNLSKRWNTMPDGTKVQRDLYSAFLIMNVDESLGKVDIPLCNETYEQFLKLHSEEVKRIESTTGAPPSSMGIKHTA

SEQ ID NO: 21658 - protein, 369 aa, unknown
  TnpB Polypeptide
MRKSFKYRIYLSNGQRRILAQQFEVSRWVYNETLAERKRAYEERGESLRVYDTQAMLPIWKRTKPELKLIHSQVLQNISVRVDLAFQAFFRRVKAGAETVGFPRFKGFGRYDSLTYPQYGNGVRLEGTRLILSKVGAVHVVLHRPVEGTPKTVTLTRSRTGTWFAVFSCEVDVAPLPPTDAVVGVDVGLASFATLSTGEEIANPRFYRRDEADLKRVQQRKDAAKNAQDWPENAKQKGILAKIHARIANRRADFAHKRSRALVNAYQVIVFEDLAPQEMGRSRGMRKSIMDVAWTQFIQMTIAKAEEAGRQVILVNPRDTTKMCSSCGKLVQKALRDRIHTCPHCGLVLGRDHNAARNILYRGLPSLRL

SEQ ID NO: 21659 - protein, 308 aa, unknown
  TnpB Polypeptide
MIRCYRYRLYPNKEQRIYFAKTFGCVRFIYNKILEDKIAHYKETKEMLNIYPAAYKEAYPWLADVDAKALSYAERHLNTAFQNFFKRPETGFPKYKSKKNHRKSYTTSGAIRIENGHLRLPKIGFVKINLHRECKGTIKNATIVQEPSGKYYVSLTTESDEPRKYCRTSKEVDISLDTQNFKILVDGNPLDNPMFLQESERKLKTLQKKLSRCEEGSKNWEKRRRRLARKHEQIANRRAHYINTQTKRLVQKNQTITVEDMGVKQMMQGNSDNAKLLAELSWFEFTRQLEYKTEWYGREYVKNQELIL

SEQ ID NO: 21660 - protein, 379 aa, Sharpea sp.
MEQMTITAKVQIVAADAEKVLLDKTMSVYRDACNYVSSYVFQSHDLKQFSLNKALYSVLRKKFGLKSQMAQSVFKTVIARYKTILENQKEWIKPSFKKPQYDLVWNRDYSLTQNCFSVNTLDGRVKLQYFAEGMSKYFDHTIYRFGTARLVNKHGKYYLHIPVIFDVEESNISDICNVVGIDRGINFVVATYDSNHKSGFVSGKAIKQKRANYSKLRKELQMRQTPSSRRRIKAIGQRENRWMQDINHQVSKALVENSPKHTLFVLEDLSGIRNATERVRTKDRYVSVSWSFYDLEQKLIYKAKQNQSSVIKVDPRYTSQCCPICGHTEKSNRNKKIHLFTCKNCGYKSNDDRIGAMNLYRMGINYLADSQVPNTVVTE

SEQ ID NO: 21661 - protein, 353 aa, unknown
  TnpB Polypeptide
MKQIKTLKVRVKDKHATELNRMARGVNFVWNYLNELSSRAIREKGLFLSAYDMDRYTKGAGKDLGLHSQTLQEVSREYATRRKQFRKTRLAWRKSRGVRRSLGWVPFKSGAVKWKNGQIFFNGQHFKVWDSYGLSKYKFRAGSFNEDSRGRWYFNVAVEVDVQPTLGQGAVGIDLGLKDVATCSDGVKLENSRFYRRMEDKLAIAQRARNKRRVKAIHAKIKNRRKDAQHKFSRKLVNKYGEIVVGDVSSTKLAKTKMAKSVYDAGWSQLKTMLEYKCAHAGIVFKVVNEAYTTRTCSSCGSLSGPQGVNGLRVREWRCVECGVLHDRDVNAARNILHLGAGRCPPAVGITSL

SEQ ID NO: 21662 - protein, 407 aa, Caldilineaceae sp.
MDAQQSITRYRAYKYRIYPTAAQAKALDFHFGAVRYVYNRYRAAREGYYQDTGETLSEFDCCLDLTDHKREAGNEWLQRAYNQSLQQAIRDLDRAYRNFFAGRARYPRFKSKRSRQSIRYLFVGNSKLRITNGRIRIPKVGDVKITQHRHIEGTPKYMTVSKTKSGKFFVSIQCQKDVTPPPAVGPVVGIDLGLKAFVTLSDGRTIDPPKHLRKAERRLKRLQRRLSRKRKGSANRRRAKVLLARQHEKVANRRADFLHKLSRQLVDTHGHIGIENLHVKGMLRNHSVAKSIVDAGWGEFVRQLEYKGDWYGCKLVKVDRWFASSKTCGACNTHNAALDLSDRRWVCQQCGALHDRDLNAARNILKQSTARTAGIDARGNMSRCSKTTQPGNLTASGPPVQLRFPFA

SEQ ID NO: 21663 - protein, 468 aa, unknown
  TnpB Polypeptide
MKKAVPMILSEDNFKQIFAFAEQYSKLAKALYNAALFRIRQVFTGWDKGDNRTPLEQSVFDEIECAKEAYGKFSCRRVLSYPSLDKILRANRNPDFFAGLPMQTAQSIVRQAVTDFKAWLEALKAYKKDPSSFTGKPKMPGYCKADKKTFKVTNQDAALYPTKDGNGCLLKLPKMDHNRIPLSYLKDTSNLREIVFKPYYGKYIMTFIIEDMAPPFYPDLPNMAGMDLGTDNIAAIACTDGSSVVYKGGAILSANQFFAKQRASAVSTLTKGKKHRHASSAFLSNLSLKHDCFLKDQMHKLSTAIVRYCIAHRIGILVVGTNRLWKQHASMSKKNNQKFVSIPHERLRWMISYKALIAGIEVVWQEESYTSKADCTAGDLIPVYGKEKTHPVFSGRRIERGLYLCREGYCINADCNGAANILRKAFPHAWDACKDFQFLSTPASVGFESLNPSSIPNRQKQRAANKKK

SEQ ID NO: 21664 - protein, 374 aa, unknown
  TnpB Polypeptide
METYTLGYKFRIYPNATQARLIHRTLGCARFVYNHFLAVRRDQWNANRKSIGYTESSRLLTDLKKREETAWLSEVDSMALQEALRNLDRAFQNFFDKRAGYPRFKSKHSHAQSYRTRNQSNGVRIVGKRIKLPKIGLVRIRQSREFSGRILSAAVSRTASGKYFVSLCVEQDKAKLLRPNAGGQIGIDVGIREFYTDSNGNTVENPKPLKKLLRKLKREQRRLSRKLPRSQNRGKARVRLARVHERIANIRKDFLHKCTTRLARENQTAAVEHLNVKGMLKNHRLAQAISDVSWSEFFRQLAYKMELRGGELLKVETFYPSSQTCSVCGYQNTEVKNLGVREWTCPQCGAHHDRDHNAAKNILRRALENKAKAA

SEQ ID NO: 21665 - protein, 312 aa, Mycobacterium sp.
MRVEPDRRHLTLPVIGTVRTQENTRRLERLIRAGRARVLAISVRRNGTRVDASVRVLVGRPQRPNVAQPGSRVGVDVGVRRLATVATAEGTVIETVPNPRPLESALRELRHVSRARSRCVTGSRRYRERTTELSRVYRRVNDVRTHHLHVLTTRLAKTHGRIVVEGLDAAGMLRQKGLPGARARRRGLSDAALGTPRRHLSYKTGWYGSALVVADRWFPSSKTCHACGHVQDIGWAQQWQCDACSAAHQRDDNAAINLARYEEPVSVVGPVGAAVKRGADRKTGPRPAGGHEARKGPSQPDGEQPRDGVRVA

SEQ ID NO: 21666 - protein, 341 aa, Robbsia sp.
MERLQAFKFELMPTGEQARKMRQFAGACRFVYNKALAFQKENHASGQKFVSKFSMSKHLTEWRNNPDTPWLADAPRHALMMATQACDRAFQNFFAGRTSFPQFKRKGVSDSFLFPDKNQIEVDSGNGRIKVPKLGWLRYRKSRDVLGEARSATVSLRAGKWYVSILTKCEVQQPVPQGPALGIDVGVVRFATMSDGTYIAPLASFRKHEQRLARYQRRMARKMKGSANWKKAKSRIQRIHARIAHARADFLHKASSAISKNHAMIAVEDLKISTMSKSAKGTANAPGRNVRAKSGLNKSILDQGWGEFRRQLEYKTAWRGGFFIAVDPKNTSRTCPCCGHV

SEQ ID NO: 21667 - protein, 357 aa, unknown
  TnpB Polypeptide
MRRACKITTKFLTSKKKQALSALLQAYRAGVNFYVQSLWSCPGNLNKDTLARLHNTRLSERYKSNALKQALETVIATKKSAKELRKQASCPVFTGSAILDSKFVSVEPGKKSFDLIVRISSLKKGHRITVPTRKTKPLNKWLSRGKFIQGCCLSETGLVLWVECEDQEPKTSGRSLGIDQGVNKLLSDSDGKFYGKDFRVIRDKIKRRIPGSKGKLRAIRERENFINKNLNLLPWTEIGTLGMENLKGLKRGKRKDRDKNFRKAMAPWTYRQVLNRAQAKAEENRVRLLLVPPANTSRACPHCRVVSKKSRIGEYFRCVACGHARDSDWVGALNVLARTERLTRSVESLVPREVECG

SEQ ID NO: 21668 - protein, 384 aa, unknown
  TnpB Polypeptide
  misc_feature (377)..(383): Xaa can be any naturally occurring amino acid
MFVSLQFKLELKREDKEKLIKLMRMQSSAIRVAYNMLKELKKEGVKDPRSQIYHKLRQLFPDLPTQYLYSAIYKAKQYPTDRSVVFGGKRLFEKLCKNHLTGKARERLKKQWRELRQGTLISIGSKGDKGNRLTRFEDKEGQLYLRITTGNREFIYAKVLREPSNSKDKWLTFMTMLLESWQTQSYFPYTVELKLRNEEVYGSVSFEIPTPEVKYTRENGVIAIDTNASPIHLAIAEVSTTGELLSYQTISLHHLLGLSQNGKDHQEWILAHKIVDLAIQRNKAIAIENLKKLRKGKRGDGKAELRKRLHQWNAKKFLQKLKRVAMLKGVEVVEVNPAYTSVIGMLKYAPQLSIDKDIAGAYVIGRRALGFKEDMPXXXXXXXK

SEQ ID NO: 21669 - protein, 378 aa, Ruminococcus sp.
  misc_feature (310)..(364): Xaa can be any naturally occurring amino acid
MKQNKAYKFRIYPNEEQKIIFAKTFGCTRFIYNKMLSDKIDYYQQTKQKLNNTPAQYKTEFEWLKEVDSLALANAQMNLQKAFTNFFNNPKSGFPKFKSKHKNRKSYTTNNQRNTITLKNGYLKLPKLVDLVRVKQHRQIPKDHKIKSVTISQTTSGKYYASILCEYESQIQTVEPKTFLGLDFSMKELYVASDNTSAEYPRYFRKSQEKLAREQRKLSKCVTGSQKRNKQRLKVAKLHEKVANQRKDFLHKLSRQIANAYDCVCIEDLDMKAMSQALNFGKSVADNSWGVFTTFLKYKLEDLGKQLIKXXXXXXXXXXXXXXXXXXXXXXXXXXXXXXXXXXXXXXXXXXXXXXXXXXXXXXXEHKKSRYEVSNILE

SEQ ID NO: 21670 - protein, 415 aa, Clostridium sp.
MYLCVKQQLKKLSKEDYENLRELSHIAKNLYNYGLYNVRQYYFDQKEYLNYEKNYAICKSNETYKLLNSNMAQQILKEVDGVFKSFFGLIKLAKKGTYDFRAIKLPKYLKKDGFATLVIGFVRVKGNELIIPYSNNYKKTHKPIKIKIPPILLDKKVKEIRIIPKDNARFFEIQYTYEVVEAQRDLDKTKALAIDIGLNNLATCVTNQGKTFIIDGRKLKSINQWFNKENSRLQSIKDLQGAKGTTKTQSILKNNRNNKVNDYINKTCRYIINYCLENNIGNLVIGYNQTLQRDSNLGKINNQNFVNIPVGNIKEKLEYLCKLYGINFVKQEESYTSRASFFDNDTIPKYNADNPADIIFSGKRIKRGLYKTKNGYYLNADVNGALNILKKSSVVGLQVLYSSGEVDTPIRIKIA

SEQ ID NO: 21671 - protein, 312 aa, Halobacteriales sp.
MVVVTVTAKFHNPSRSRRKEWQRATRLYRDTKQFCIDGWENGDFGKSVTTASIDNDLYSAIQNQAIREAKADHTKDGEVRYRESQPFAVNNQNWELDTTENGTVVIGFPCVSQWWYTPIEVYDDIADPVDRLVEGDADKTRLQVYRRGDDWFCTFNIEYDTETSGETPIGVDIGERHILAVTAHGEDESMLVSGGEAKYVRRRYRSLRDSLSQAGALRARNRVGDKEHRRIKDLNHNLSRRLIQFITYKAERAGIRVEKVDAYHTSQRCSACGSMGTRDGDHFLCSECNRGRHADLNASENIAQREGEPCTA

SEQ ID NO: 21672 - protein, 363 aa, Actinophytocola sp.
VWNLAVEQHAHWRPGRASAPGYVEQARQLTEARAEFAWLRAGSVTVQQQGLRNFLARTHRTPSWRKAGVHEGFRQVAVRPEHIQKLNRRFGRVWVPKVRWVRFRWSRTLPEGVKSYRITQDRAGRWHIAFAAIPDPIPAPGNGRVVGVDRGVAVSAALSTGELLTAPSLTAGERKRLARLQRQLARCQRGSNRRKKVKTAIAKLETRETDRRKDWMEKTSTGLARRFDVIRVEDLNIRGMTRSGQGTADKPGTNVKQKAGLNRGILANAWGQLVVRLEHKACGRVAKINAAYTSQTCSTGGHCAPDNRESQAVFRCTACGFRCHADVNAARNIAAGRAVTARGALQPLGGAMNREPQPATSTA

SEQ ID NO: 21673 - protein, 371 aa, Clostridiales sp.
MRGEYTMNRAMRFRIEPNKEQRDLFAKTFGCCRFLYNRMLSDRLLSDLTGESMEIRPAAYKKKYPWLREVDSLALCNVQLDLERAFRDYRKIKDRGRPRYKSKHHSRMSYTTNVVKRNIRIEGKKIRLPKVGMVRIRIHREIPEGWILKNVTVVKEPSGKYYASLLYEIPECESQAEGAQREKKCLGIDYAMDGLAVMSDGTRAEYPKYFRQAEEKLAREQRKLSHCEKGSRNYAKQKRKVAVIHEKVRNQRKDFLHKMSRKLADGYDVIGVEDIDMRAMSRTLHFGKSVSDNGFGLLRTMLAYKLKERGKELVKVDRFYPSSKRCSRCGRIKETLALSDRIYHCECGCELDRDVNAAINIRMEVMRLKAS

SEQ ID NO: 21674 - protein, 417 aa, unknown
  TnpB Polypeptide
MSLLRFQLSNAETYIPNFCYNKFMAVIHKTYQMRAYTSASGYDRIASVLLKCAQLYNAGLEEWRSAYRQSGVSRTYHDQSKQLTLVRKDDPEGWGSISVQIGRGVLRRLDRARQSFFRRVKDGQKAGYPRFKSWRRYHTIEISEPSPAMVKQRGSHYVVVVKGLPAVRLRKGLDLPSSEKLKSLSITKRGRRLWVQLTYEVEMAQLARSAEVVGLDMGVSDRIALSTGERIGRRKKPIERLKRAQQRLSRCRKGSKRWRERRAILSNAQHRERVSNRNECHRLTTEIVHRFGLIAIEGLVIGSMTASAKGTVDNPGKNVSQKSGLNRSISEQTWGMIRQQLTYKAAWAGRELVVVDPRYTSQTCSRCEYVSSASRDGKGFKCSRCGYVTDADINAAVNILHRGLAGGNLPAAALDAA

SEQ ID NO: 21675 - protein, 639 aa, unknown
  TnpB Polypeptide
MVKKKLKDEFKEFRNTDKSAYKTFKIPLKSILQNRNLVQPVINNLVFEMNDLVIHVYQFIRLYVITCYSNKTDLPVIDNTFILYCLKVLGTRDVRGRHMANVGLLESLETFYTAEYQPLLNHDKTNLKNKPHLLPYLATQIHTSLSNNSQERFIQHFLRFVNKTTNNITDDKSTLFKFKHQVLSLNDETDELFNAWKTTHLHNILPSNIIKSVHYDVKVNPMNYLKGMLYMNEVLETGEHKLFQPLPLRNNIVPKHIILDTACLVSLFCPESSKKGELLKNITANQTVVWNNFLNLNHKIFKNAHYQFHHQIQTDGVSCSLLFIRKDLKDKKWGTRVPTIAEQDFYNIEDLSKEQLDGLSDRNVVGCDPGKKSLVYMMDENGKKLQYTAQQRKIESYGKRNQRILLQMKKKYKITEKETRLSLENSKTVDIAKFKRYLVEKTKLNKEVGEFYKQEVWRKMKFRQYSYGKKSIDTFLNKIQETFGSNILIGYGNWSRDTQMKHFMPTMNKGLRKQIHKRFDTITINEFNTSKLCCDCSQELKHYKDKKNTDVYRLFCCVSCQNKETVFRTRDANSAVNIRKLTRSWMETQTRPSEFCYKQGLSPVLEKSGKSKTIVVKTTFVEAQLIDFTPILNAVKIGV

SEQ ID NO: 21676 - protein, 410 aa, unknown
  TnpB Polypeptide
MPIVGFRFRAYTDGQTLRALKAQLEAACEVYNTLRWADTYFYHEDEKGLTLTELRQLALDLRKQDEEYQQLYSQVVQQIADRYYEARKRFFDGLARFPKEKKTHKYYSLIYSQSGWRILAREGKGKNKKRLVLRLSSLGVFKLIVHRDFPLEKVKRVAVKLTRSEMVFISFIVEDYGFPKLPNTGEAVGIDVGVEKLLVTSDGEYLPNLRPYEKALKKVKRLHKELSRKKFLSKNWFKAKMELARAYEHLANLRKDLYMKLGRYFAEHYDVVVMEDISVKQLVGKSNRGLRMRLHDVAIHELRSIVKYQMGKYGKKVVLVDPRNSSKTCAKCGYVKMDLALSDRVFECPRCGWRANRDYNSALNHLKNAGWVPPVVPVELRPLPITMGKAGRGSGKPLKDGVAHQDEVDQ

SEQ ID NO: 21677 - protein, 387 aa, unknown
  TnpB Polypeptide
MVKAIKVMLIPNNVQKTKMFQYAGASRFAYNWALAREKENYEKGGRFISDSELRKEFTKLRHSDEYAWLLNISNNVTKQAIKDACIAYKNFFKGLQKFPRFKSRKKSMPKFYQDNVKIQFSNTHVKLEGFSSSRKTNKQKLNWVRLAEHGRIPTDAKYMNPRISFDGLNWWISVCVEFPDCKEILNDDGVGIDLGIKDLAVCSDAVKYKNINKSQKVKKLEKQKRRLQRSISRSYEKNKKGESYCKTNNVIKKEKLLLKRNHRLTNIRKNYLNQTISEIVNRKPRFICIEDLNVSGMMKNRHLSKAVQEQGFFRFRKQLEYKCNDKGIQLIVADRFYPSSKLCSCCGNIKKDLKLSDRVYRCECGNMIDRDFQASINLKAYGERFAS

SEQ ID NO: 21678 - protein, 506 aa, unknown
  TnpB Polypeptide
MAYRVVKFKIKLNQSKDAESIKRFDELLSLSTKFWNHLIDISHCQYNKINKTFHYENHKFVKHEDYLELEIPTKGQAEKLGKEFFKDDKIHSHLVQETALRFANAVKKAYKDHKRSPKSGLRFPKFKETGDDYKSLKFKQYNSGYKIDYNNNEISFNLERNQIKFNFIGDDYHKNIIKNNKEKYCLIKKVDKDNYFLCVYIEGDFEVIIKQNTLNVPPPLTIKQKSDFIKKRYKKLDKKEKEYVDKIRKINGRNKEKPLVKEQNAKQFVHPEKQVGIDPGCGYNNTLTLSNGIVYNFSNSFYAKIARLERNKEKLKGKVVDSKSWIRLNNTIKEQEESIANSRHDWLHKVSKHLMLNYDVISMEDFNSQSFTEDNGIKFLNKQVMNGAFGTLKTFFAYKSAMFKDKKFILINPEYTSQICSNCHRVIKKELSQRVHKCECGLCIDRDINSAINILLLATDSKFRNQFNSVVDSTKESRNGLGDGGLTTPIDKNELSKVAPLDAHGL

SEQ ID NO: 21679 - protein, 358 aa, unknown
  TnpB Polypeptide
VSAYPLDTGKDLALDRPTMKTYKYKFSDQSNCIRIGNLLDEMWQVHAYFHKWQQQRYKDGLPYANYFAMSGHLTELKRTTHPHWKALPSQAIQEELKRIDAAHQRFFKKLGGRPKIKRQHKFKSLTYPSAAGWYLENNRLTLSFRRWHTKTGKGSFEKVPYTFYKHRVWYGTLRQVTIKRDNCGDYWLYITTTHTETEPLPTTGESVGADFGLKEAYLTLSTGEKLQSPQFLKRSLNKLRSLHKVLSRKAKGSQGWWRCVRQVARLYRRISHQRRDWHWKLATDLCRRFDVIVTETLNLAGMKRLWGRKVSDLAFHQFVEILKYKCSKHHRVFRQLSQWTPTSKPCSACGYHKADLSL

SEQ ID NO: 21680 - protein, 402 aa, Escherichia sp.
VKRLQAFKFQLRPGGQQECEMRRFAGACRFVFNRALARQNENHEAGNKYIPYGKMASWLVEWKNATETQWLKDSPSQPLQQSLKDLERAYKNFFRKRAAFPRFKKRGQNDAFRYPQGVKLDQENSRIFLPTLGWMRYRNSRQVTGVVKNVTVSQSCGKWYISIQTESEVSTPVHPSASMVGLDAGVAKLATLSDGTVFEPVNSFQKNQKKLARLQRQLSRKVKFSNNWQKQKRKIQRLHSCIANIRRDYLHKVTTAVSKNHAMIVIEDLKVSNMSKSAAGTVSQPGRNVRAKSGLNRTILDQGWYEMRRQLEYKQLWRGGQVLAVPPAYTSQRCAYCGHTAKENRLSQSKFRCQVCGYTANADVNGARNILAAGHAVLACGEMVQSGRSLKQEPTEMIQATA

SEQ ID NO: 21681 - protein, 552 aa, unknown
  TnpB Polypeptide
MKFNKTKGIVFRMYKTKGPDLLLPLYNILQGELNRILSTPTYVEALSKIEFKYRDENGEEQSKLNGMLWSEIHEIIGDSLKGKVPDAWYIRILYHNIISLLKSRQEQIKIYEILKSNQYKIDNTLRDKLSQEKLYPTNAYLETLANAKDMPVLPKRKTFILDFSVSDKQMFRIGKNSNLYEIKICSRKEIKDNNLETGWLSFEMYLPMYIRESFTGKTAKPQFYWDHNKEEFVCAIPCEIKKLPNEYENVMGVDLGKIKVYSATVVRKDGSISDEYVPTEELQNLVDKLNRMNKHISSVYEKKKRSYKYGNFTKRQDRRELDYKRSRNKRTKLQFAIAKLVAVEVVNVAIKEQCKEIHLENLSWIKSSGGKWNFAQVQACIEEVAELFSIKVVKVSAYNSSKTNPVTFEIGTISNRDVTFKNGQKVDRDQLAGLNLALREPKKLKQRKIKTLNIRDSVVIQRQSRRFNNYLMKKSVMPEIKSKRKIHKEFLRAKQVSSNPDLIKKENKKIVMFSHDKAKSDFAIVSVYKSSTLKLKFYFANNLQLKHIYTNL

SEQ ID NO: 21682 - protein, 362 aa, Trichodesmium sp.
MVEKAYKFRFYPTPQQESLVRKTLGCVRLVYNKALAVRTQAWYEYQERVGYKQTSPMLINWKKQEDLDFLTEVSIVPLQQGLRHLQTAFNNFFSGRTKYPKLKKKCHGGSTELTKAAFKCKDGQVYINLGINSLVTTSDGAKVAYPKNLQKLHKKLRRDQKSLSRKRGKKSNNYQKARLQIAKIHALIKDSRLDYTHKLTTKLIRENQTIVVDDLAAGNMVKNHKLARAINDANWVELLRQLEYKAEWYGGTLIKIKRYFLSSKRCSNCGHVVEKLPLNIRAWDCPECASHHDRDINASINILAAGQAVSVWVATVRPEESKSQRASAMKQKALNTDAKESLAVSSTAAPGGCQLRIEFRKH

SEQ ID NO: 21683 - protein, 374 aa, Desulfosporosinus sp.
MNKAFRYRLYPSSEQAILINKTFGCVRFIYNQMLANRKTIYEQYKDDKEALKQQKYSLPAAYKNQFEWLKEVDSLALANAQLNLNTAYKNFFRNKSVGFPNFKRKHRDRLSYTTNNQKGSIRLIDSKTIRLPKLKDVRIKLHRQLPPNSTIKSATLSQTPTGKYYIAILVEFEAKLEPVTATVESTLGLDYSSKSLVIDSEARSADYPRFYRNAEAKLKKEQRKLSKRLKGSKNRNKQRRKVAELHEKVANQRKDFLHKLSRQIVNAYTAVAIEDLNMRSMAQGLNLAKSTNDNGFGILKTFLAYKLVEQGKQLVKIDKWFPSSKQCHVCKNLYVELTLADRSWSCKHCGAELDRDINAAINIKNEGCRILGIA

SEQ ID NO: 21684 - protein, 237 aa, Runella sp.
VGVKVEADTITYNGHTFKFWLSRPITSKVRFGSFCQDSKGHWFVNLVVEYFEIVRPKTGNAVGVDLGLKTLATLSDGVEFNRENLTKKFENQLAMAQRVRKKKRVTAIHAKIKNKRKDWNHKATTAIVSEYDKVVVGNVSSSKLIKTRMAKSVSDAGWSDFKQMLAYKAIKLGVEMKEVNESFSTVTCSCCGNRTGPKGEAGLRVREWICSSCGTVHYRDVNAAMNILRFSLLGITG

SEQ ID NO: 21685 - protein, 233 aa, unknown
  TnpB Polypeptide
MNCKYTNPRISFDGKHWFISVGIEREKPMVELTSESIGIDVGIKDLAICSNGMTFKNINKTRAVKQLEKRLRRLQRRVSRKYLKNKEGSKFVKTSNIIKIEKQIKLLHRGLANIRSNYNHQATNKIVKTKPSRVVMETLNIKGMMKNKHLSKAIAKQCLYEFKKQMQYKCEFNGIEFIEADKWYPSSKTCSECGHVKPKLSLSERTYICEECGCVINRDYNASINLSRYELVG

SEQ ID NO: 21686 - protein, 401 aa, unknown
  TnpB Polypeptide
MSTTIARRVYRFRLEPTTSQEGSFKRFAGARRWVWNWALHQKQDHYAATGKSLPEKELSARLTALKDRPETVWLREVDSQLLQQALADLKRAFGNFFEQRARFPRFKSRKRDRARFRIPQRVALTDGYLSVPKIGRVKMRQSQEVDGTTKSATFKRDARGHWFVSIVAETEMPAMPLPAPVLARTVGVDLGLKDTVVTSDEERVAAPRFYRVAQRQLRRAQRSVSRKVKGSANRAKARQKVACVHQKIAAKRKDFCHKLTTTLVVNHDAVCIEDLNVGGLARNKRLAKSMMDASLGTIRHQLEYKGAWYQTHVIAVGRFYPSSKLCHGCGHKHDGLTLSDRIWACPSCGVILDRDLNAARNIKREGLRILAAGHAESQNACGADVRLPMAATGDEARIPRL

SEQ ID NO: 21687 - protein, 377 aa, unknown
  TnpB Polypeptide
MWRSSRVLSQKFRLYPSKTVERRLEENLELCRWLYNRLLEELNKVKAEERWFTRKDTQALIVRLKREKPELNVVYSKVLQMVNYQLWSNIRALAGAKRNGRKVGKLRFKGGWFKTLNYNQSGFKLEGKKLSLSKIGTVNVKLHRFLIGKVKGVIVKRSLSGKWYAVFQVENSGVNHLPETGKAVGLDMGVKHFLSDSNGRQIENPKFYEKSLATLRVAHRVLSRKEKGSKNRAKARVRLARVYERLENQRDDFLHKLSRFYVNNYGVIAVEDLNITGMVKNRNFAGRILDASWNKFFAMLSYKAENAGRTLVKVNPRGTSQEYKYGELDRDYNASLNILERALAGLGRPFVPVEVKPLLVEIPASVIVEAGSPHPSG

SEQ ID NO: 21688 - protein, 379 aa, unknown
  TnpB Polypeptide
MLISYKTEINPTSSQMDKINKTLGICRFLYNTYISENIKAYKNNKSFVTAYDFDKYVNNTLIPNDLWIKDAYSKARKKAIMNAETAFKRFFKGETKFPKFKKKNKCHTSFYFVKNNKTDCIVQRHRIKIPFLGFVKLKEKGYIPVDKVIKSGYISKKANKYFVSVIVDIDISKTISTYNDGLGIDLGLKEFAILSTGKVYKNINKLKVIRNIEKRLKREQKRLSKKYENKKKGVATLNKNIHKKISKIQKLYYKLYCIRTDYINKIVNEVVKTKPQFITIENLNITSMMKNRHLSKAISKQKFYEFRTKLINKAKRLNIEIRLADTFYPSSKLCSCCGNIKHDLKLTDRIYRCHYCNLEIDRDYNASLNLMKCQNYNLV

SEQ ID NO: 21689 - protein, 401 aa, Microcoleus sp.
MLVFEAKLEGEKQQYERLDEAIRTARFIRNYCIKYWMDNQKIGRYELSAYCAVLAKDFPWASKLNSMARQASAERAWSAIARFYDNCKKAKPGKKGFPRFKKHQTHGSVEYKTCGWKLSFDRRTITFTDGFKAGSFKLWGTRDLHFYQLKQIKRVRVVRRGDGYYVQFCLDGERVQKREPTGKIIGLDVGLTHFYTDSDGQTIENPRHLRKSDKALKRLNRRLSRTQKCSKNRAKARNRLSKKHLKVSRQRKDFAVKLARCVIRSNDLVAYEDLMVRNMVRNRKLAKSISDAAWSTFRQWLEYFGKVFGVTTVAVPPHYTSANCSNCGEEVKKSLSTRTHKCHHCGFVLDRDWNAAINILELALRTVGHTGTLYASGDIDLCLGEETPPSKSSRRKRKPKE

SEQ ID NO: 21690 - protein, 422 aa, Lachnospiraceae sp.
MKYHFAAKLRIYPSSEQKHMIAVNDGASRFVYNRMTANDRDLHAMKKAAGMCPAYRERIAYLEQVRSSKKELVNTIPFLNDKNVDSLAVDNAIKNHNLAWKRFREVPGTGVPGFHKRSYEQSYQTNAHYRKDAASWEDGNVHFVKRSAGEQVPHLITLPMLGTIRFRCSEKVLFMLISHKEDTRIGTITIRRDNCGDYYAVLQISSDTPFTESLRKTGTCVGIDMNLTDLYTDSDGRVIDNPKYGRGMKKKLAKAQRRLSRMKEAAIKDSRPLSGSSNYQKQRLRTAVLQRKVSRSREDYLQVQSKRLVESQDMIVSEDLKVKSLLRNHRLAYGISDVSWGRFMELLGQKAALYGKEYLKVPARYTTQTCSVCGFVCKGEDKIPLGVSEWVCPGCGSHHDRNHNAAVVVLQRGLAIKAMQAG

SEQ ID NO: 21691 - protein, 493 aa, Streptosporangiales sp.
VARFEIPEGWTAQAYRFALDLTPAQARAFRSHAGAARVAYNTMLALVKAVIGQRAAERTYGIAEEDLTPAVSWSLAGLRRNWNGRKDTVAPWWADNSKEAYNTGLDALARGLEAWSKSRKGERAGAATGFPRFKSARSRRSVRFTTGTIRVEPDRHHVALPRLGTLKTHESTRKLARRIEAGTARILSATLAEDSSGRCHVSFQVLVKRSGTAPARAGAGEPVVGVDVGVKEDCLMVAGTPDGREIRRVRAPKSLTAAQGRLRALQRKAARQQGPWNPGTRSRQRPSKRWEKTNRRVGRTHARAAAVRRDVLHKETTALARRHQVITVETLSASGMRSAGGAYKKGLNLALSDAALAEIRRMLSYKCAWYGSDLVEAGRYFPSSKLCSACGRRKPSLTLADRIYQCDYCGLVIDRDLNAAVNLARLGETPRTGATGTGTGSSPAASHRAGKGRGATQETAATQVVNAAGRETSTRHDDSVDKTGTAPSQGEAA

SEQ ID NO: 21692 - protein, 387 aa, Nocardiopsis sp.
VFSIMKIVVQIKLLPDAAQETALWETLKLCNQAANHACRRAHESGVMAKAPLQRLVYGELKAMGLSAQPAIHCVRKTAGAYATLKANLKAGNHGRQGSKRRRRVESTPVRFRKDAAQPFDDRSLSWQLDARTVSIWTLQGRMKGVPFTGSPDQLKLLAEYRLGESDLIRRGKSWYLYATCEVPEAEEFTPEGFLGVDLGIANIATTSDGTVYSGKHLNHVRHRHRHLRRRLQRKGTKSAKRVLRRLSGREARFAANTNHRISQRIVTEAQRTCRGIALEDLGGIRGRVRLRKPQRVTLHSWSFGQLGAYIAYKAKRAGVPVVYVDPAYTSQGCSECDHIDKKNRPDQATFVCTSCGFAEHADVNAACNISSRGVAGWAVSHAADDAA

SEQ ID NO: 21693 - protein, 417 aa, unknown
  TnpB Polypeptide
MSEYKYHSGIRLRIYPSYRQKKIIKKNAETARFIYNEMIACSKEIAGFGKLAIYIQGITERIQVLRERIKSVTSLKSHFLWMDDVDLDANMIANAKKNYAHAWKCYRCGEVKNPPAFHRRTYALSYQTNPHYNRQRVLEAGLTNGSAGFRDTSHVFVPKLGLIRYKGSRKILARIFSMRSVRIGTMTVTRDACGDYFLSMQLASDESFAASIPKAVSVVGIDLNIKNLYVDSNGCRVDRPGFLQKVKKRLTHAQRILSRRARGCKQRRIPFCNGVRYQRQRRIVAKLKRQIKRQREDFLHVQSMGLIKNHEIIVAEQLDIRKLVRLCRCAREIYEMGWRTFLDLLEYKAKRHGRVFLKVNPAYTTQRCSACGYTLPIGQRLHLSDRQWQCPSCHVIHDRDRNAACNILHRGLAVLAK

SEQ ID NO: 21694 - protein, 415 aa, unknown
  TnpB Polypeptide
MITIKKKHNINDIFFIELLEKYNNVIRYSYNRRIKDKITKLSDLEKNVKQFMNNIDCLDASLIKCAVKKSTELQIDKKLYFGGKSNFFKRKFNKINNLNKLTPLEVRGSSSDPNGNRKACLNGSIFTFKPNRKIKYDIELKLSKNESRLLSIIEEESKQGLNYFNFEINEKYVWISFNEPVLEKHESKKDRYLGIDLNPNWLAISILDSGSKEIFKELIDLRLLNKSKRNKKLFEIIQINKHIINLCKHYQVQYVCIEDLIINSKNHKLGKYFNKLINNDWNRNYLVNNLTKWLNISSIKYKMVNPFYTSFIGQVKNIDDYDSIAASKEVAYRAYLMSKGIKVSDYVNNFLSDLVSTHWKEMIPNINTYKEMYDYFKSSKKSKNKYRFLFNDVEKYQKSYFRLNSFKSLTDLIMV

SEQ ID NO: 21695 - protein, 542 aa, Streptomyces sp.
MGGLRKVAAAFVVPGPSGVAIRTRLRHLADEDETVLRLVGGHLGALAGRDLRTRCAAGLEHDTYAWAARKRVLTTESSSRWAGSVTKTTHDQWALARRSQAAHIQRLEAGVHMIRQRLSLRVGEPGTGRTPGGYRSRREWHAKSRRLRVLEDRLERERADRQAGRVHVARGSKKLLNTRHHLEEAGLSEDMWRRRWEASRRFLQADGESGKRYGNETIRVTTDGEVSIKLPAPLAHLANAPHGRYVLMSQVVFHHRGQEWADRITVNRAVAYSIHEDVERGRWYLTASWQIPPVRTVPMAQARAGGLTAVDMNADHLAAWRLDVHGNPIGDPRRFDFELTGTNQDRDAQIRHALIRLLHFAERHGLTIAIEDLDFQQEKTREKNGGRKRFRKLISSMPVARLRARLLAMAAELGITVVAVDPAYTSKWGAKHWQQPLTSKNRKPTRHDAAAVAIGRRALGHPIRRRTAPPRTHQSDGCGHRTVQARPGTPGREETRPRIPGPRTRSVRAGHGEKAGAQRAQHRSGHTAEHASWQQDSLPLSL

SEQ ID NO: 21696 - protein, 170 aa, Kingella sp.
LAKLQKQFKHKTKFSKNWQKLKAKIAKLHHKISNIRKNYLHQISSQISQNHAIVYVEDLQVANMSKSAKGDAEQHGKNIKQKSGLNRAILDQSWYEFRRQLAYKLAWNGGFLFAVPPQNTSRCCPSCGYTTKDNRQTQANFECVECGYQNHADVVGAINVLKRGQAIQAA

SEQ ID NO: 21697 - protein, 395 aa, unknown
  TnpB Polypeptide
MHRTFEAVLSPTVGQQAKLGRLFRLQCELYNAALEERRGVWAQNGVSVSKFEQFKGLSGFEHPVMGYGVVPARGTLTRLDRAFQSFFRRVKQGERAGFPRFKPSARWSSVEYPDTKCWKTDGGDRKHDGVGKLYLKGVGQIRFRGSRRGIRGVPRTLIVRRVAGKYRMFVTYVLEPTLGPRAPRTPKNVGVDLGVTEIVALSDGTLFPNPRELKRASARLAEAQQDLARKQKGSNRRKQAAVRVACHHRKIVMQRRNRNHQISRVIVDRADGGLIVFEDLKIGNMMSRCAPKPDGEGGFLPNGQTAKSGLNREIRAAGWAQLRGFTGYKAEEAGTPIGLVNPAFTSQTCNMCGHVAAENRHGTRFRCVKCGHTGHADVNAAQNILGRADPTLSTA

SEQ ID NO: 21698 - protein, 291 aa, Eubacterium sp.
MLKAYKYRIYPDNVQKVQIAKTFGCCRFVYNQTLAYRKERYEKEKRYVSKTDCNNYCNRELKKEYEWLRDVDKFALTNAIYNMDSAYQKFFKEHRGYPKFKSKHDNHKSYTTNFTNGNIAVDFEKGKVKLPKLKEVKAKLHRDFSGQIKSVTVSQVPSGKYYVSILVETEHGELPHTKKEIGLDLGIKNLCITSDGRKYENPKIIKKYEKKLAKLQRQLAHKEKGSSNYYKTKKKIALCHEKITNIRKDHLHRITHEIISENQVIVSENLRIKNMVKNHHLAKSIIDVSWL

SEQ ID NO: 21699 - protein, 358 aa, unknown
  TnpB Polypeptide
MFAKTFGCCRKVYNLMLADNIESYKRTGKFCSVTPAKYKKDFPFLKEVDSLALANKQLDLQRGFRNRFDKKRKKKCGFPKFKSAKHSKKTYTTNNQNGTVSIVDGTIRLPKIGFVKAVIHRQPADDWSVKSATISQESDGSYYASILFSFEKRVSVIAPSDNAIGLDYASDGLYVDDQGYKGTNHKFYRESHRKLAKAQRRLSRMKGSRKGEKKSHNYLKQLQRVNRIHRHIANQRSDNLHKISTEIANQYDVVCAENLNMRSMSNKGFGNGKATLDNGYGLFINMLEYKLAERGKHLVRVDKWFPSSQLCSCCGNRHPEMKDLAIRIMKCDCGLTMGRDQNAAINIRREGLRSLMGA

SEQ ID NO: 21700 - protein, 352 aa, unknown
  TnpB Polypeptide
VRRATAGPDVLHAGQGVHAAPPGDALAAGHAVCSGALHPETPGRRLAAVRFFRGEAGRPRFKRRGRDSVTIPQDVRIRGDRLYFPKLGWLRLRRRGGNPYPDAEPVQATLKRVNGKWMAVVCYAIAAADRPDDGTVTGVDMNVGQVAVSDGRHARILHAPDPRRLEAKIRRQQRRLARQRRGSRRRERTRQRLARTQRRLAMRRRNWHHHVSRGLARGTVAVEALQTRAMTASAKGTVDAPGQNVRQKAGLNRVILATGWSGLRAMFEYKAPRLIVVDPRHTSQTCAACGQTHAASRRSPASFECVACGHADHADLNAARNIRRRGLAQLHGKGRSHSATPTTREMDRRPAA

SEQ ID NO: 21701 - protein, 372 aa, unknown
  TnpB Polypeptide
VKCEAYPWLNAAAMEVNQVWNWANATSADAADRNKRAHAKFLSGFDLCNLSAGATEYFERIGADTIQRINCEYAIKRRAAKRSRLRWRVSRGARRSLGWVPFKAASIKRKGSGLRFCGKSFRVFDADRLTDTKWCDGCFAQDACGDWWLCLPVAYAAQFLPASDRAVGVDLGCKDAAVTSDGDRLTSGHYRSLEPQIAQAQRRGHKRQAKRLHRKAANRRQDAQHQFSRMLVNQYQKIVVGDVSSLKLAKTRMAKSVLDAGWGALKNQLAYKSEHAGRQFQVVNENYTTRACGNCGALSGPKGVGQLVVRRWECVDCGAVHDRDVNAARNILTAGLRCRASVRGNESSPPSARRAGPHRPRATGISAKAGAA

SEQ ID NO: 21702 - protein, 397 aa, unknown
  TnpB Polypeptide
MCYAALKLWNICNYERLHYKELELEQYPDWYYQKKFYKDNLWFKSLPSQTAQEICKLLDKSWKSFYALRKSGGVENSNPPRFKHESIPITYMQNAIVHENGSDTIRLSLPKQLKGYMSECFDIHENYLYLKNRLFQNINIIKQIKIYPPVNNECKIIIVYEVSDVELLPNNDRYLSIDFGVHNLMTCLNSVTGESFIIGRKYLSLCHYYNKEIARIQSQWSNTQYSHGIKHPKSSKHIRRLYIRKNNVINDYLHKITRYIASYCKANNIHTVIIGDITGIRKDNNHGVVNNQNLHALPYKKILIMFKYKLAMEGISLIMQKEAYSSQCSPLSPEVSKRYTKKSQRIKRGLYVDGDYSWNADCVGAYNILRLYLKTIKQPVFLSPYEIKTSVVIKVAA

SEQ ID NO: 21703 - protein, 252 aa, Crocosphaera sp.
VLNLNYAYRIYPDVSQEKELLDWLEICRGVYNYALRERKEWINSRKCKVNACSLHCEYIIPADQPFPDYYKQKKALTQAKKEYPSLKRVQSQVLQEVMGRLDKAFNFFWKRSFGFPRFKKYGQYRSINFPQFKENPVTGHQLKLPKIGSVLINLHRPIPDGFVVKKVQIVKKASGWYAVICIQSDVKIPSPKPQGKSLGIDLGLEKFIATSQQELIARPKFFVELQSKLRWLQRRLSKNKKGLKTGIKPVKK

SEQ ID NO: 21704 - protein, 526 aa, Streptomyces sp.
LAAAFVVPGPSGVAIRAGLKGLTGQDETVLRQVGALLGSLASRDLKVRCAAGSAHVSEQWAWRKRALTGQSSSRWAGSITKATHDQWALARRSQLAHIHSLRAGVETITHRLAQPVGAKGAKGVPGGYRFEREWFAKSRRLHVLEDRLERVRADWEAGRVRVVRGAKKLLRSRHHLRAAGLTEAQWRSRWEAERWFLQADGESGKRFGNETIRVTPGGEVSIKLPAPLAHLANAPHGRYVPACRVRFRHRGEQWADRVAANRAVAYRIHYDVDRGRWYVTASWQNPPVTTVPLSAARAGGLVGVDMNADHLAAWRLDTHGNPLGAARRFDYQLTGSAQHRDAQVRHALIRLLHWAARHGLALAIEDLDFAAEKTREKHGRRKRFRRLISGMPTARLRARLVSMAAGLGVAVVAVDPAYTSRWGAQHWQKPLTSKNRKPTRHDAAAVAIGRRALGCAIRRRTAPPPHDRSDRVGHRTVQAASDAPGREGPRPRIPGPRTRSVPPGRGAKAGDQCAHNRSGHTAEHEP

SEQ ID NO: 21705 - protein, 394 aa, Filamentous sp.
MCYSGNMIVREVKLKNGTKEQYSALDEAILTAQFIRNKAVRLWMDSKGTGKADLYKLCKDLAKEFPFAKKLNSSARQASVERAWNSIASFYARCKKGEKKKGYPTFKKHCRSVEYKVSGWKVSPDAMTINFTDGFEAGTFSLFCNNETREDILTLKINRVRVVRKADGYHAQFCFDADRKEEGEYTGNVVGLDLGLKYFTKDQNDIAVVYPQFLRKAERQLKKAQRRLSKKFVKGAKPQSQNYHKARKGLAKIHLKIQRQRKDWAIKQARCVVASNDVVVYEDLKIANMVKNHHLAKSISDAAWYQYTQWLDYYGKIWDKVVVAVSPNYTSQDCSGCGQRAKKALSTRTHSCPCCGLEICRDTNAALNILRKGMNILGVEYQNGTFGQKESAHD

SEQ ID NO: 21706 - protein, 483 aa, unknown
  TnpB Polypeptide
VGIIFNHKIELFFSKEDSNALDGQSKICNWLYNQLVQATRDDYQNGSPLKLLEGRNLRDYATKIKEDHPFLRTVHSSPLKNTALRLKDAYDRFFNKQNAYPKFRSWKEKWFSLYFDEPKKGFKLLDSKTVRISFGKDENGKQLQIEGMLKEAFSLTSNEEIKTFRVCKQQGNRFYGIFTIKRFSQGEKELREMDKTIQKLKKEFVNLYSIAKKKPKPKKREKSEYPVLPKGTKWISLDPNHKNFFVSVDYKGVSYEMSKLFQTKYWDKKIDELKSKRDVCFRKSIQCTSTHGNSYWQPSLRWERYNRALNKAYHTRREQIKVALYSIAHWLFDQYDVVLIGDYTPTDKSASYDNMKRSMLNQEHIGDFRKVLQWVAAKRGKQCVVVDEKNTTKDCCVCGHQEKKGPDVRSFTCPSCDHIIIRDLNSAINIAKKVSLLSGSDWVRDWKLDRITYAVRYHLFSTNDKKPIVHIRNNGAKKLNPAA

SEQ ID NO: 21707 - protein, 165 aa, unknown
  TnpB Polypeptide
VIEGAKSYRKYEKKLARMQWLNRHKVIRSNNWKKAQVKIARLHRKIANIRKDTLHKLTTFLAKNHSKIVIENLNVSGMLANRKLAKAIADMGFYEFRRQLDYKCKLYGSELIIADRWFASSKTCSSCGQVKEAMPLSVRIFECVCGLNIDRDLNAALNLAALAAS

SEQ ID NO: 21708 - protein, 377 aa, Sharpea sp.
MQLSETVKLYMTGEQKSLIVATMTEYINTVNSLVSDAANGISISKYTTADVKANLPSALTNQCIRDAKSIVKKYNKACRDADRKNNKLAKQGKNITVTATLPVLKKTCCYVNNQNFKINGDYIEFPVMVNGKSKRLSVKTKMSDKQKSVFANSKLGTMRIVYKGSKIVAQVVYETIEPTYTTEGNVMGVDLGVKCPAVSYISDGSVKFYGNGRKNKYMRRHYRCLRKKLQKAKHIDAVKRINDKEQRIMKDIDHKLSHDVVETAVAHNVKTIKLERLANIRSTTRTSRKNNHSLHNWSFYRLAQFIEYKAKLAGIAVEHVNPAYTSQTCPVCGHVHHANDRNYTCKCGFHIHRDILGAMNICNSTEYVGDSNIRHTA

SEQ ID NO: 21709 - protein, 431 aa, Burkholderia sp.
MLIAHRIELRPTSEQEEYFFRACGTARFVWNWALDEWNRQYQAGLRPNALALRKQFNAIKYADRPWLKDIHRDAHAQPFVNLGKAWSRFFADLKSGKVAHRPVFKKKGKSRDSFYVANDRLTVGEKRVRLPVIGKVKMKESPRFGGKILGATVSREGTRWYLSLQQEVEVCWIELANRRKATGVDLNVSEIVCSDGKRYETPRPLLKAQKRMTRLRRSVSRKLVAQKQRMGLSRTDPIPKGMRLVASKNREKASRRLGDQYRKIRCIRNDFTNKITTSLSRENQALGIEDLSVTGMTASAKGTTGKRGKNARQKAGLNRAILDVAFGEFRRQIRYKSAWYGTTLVEADRFFPSSKRCSCCGEVYHALRLKDRTWTCPQCGTTHDRDFNASVNLEQVAGLPEAIGKVTSVRYDPSQSGGSGQKPVHSCAQLG

SEQ ID NO: 21710 - protein, 392 aa, unknown
  TnpB Polypeptide
MRRAKKIRLKPTPEQETLFWKSAKTARWAYNYFLSENERVYKEYLENGQNGMKYRSGTEIRKYINNTLKKTTHLWLSEVGSNVMKQSVKTAEKAYQDWLSGKRGKPHYKSKHKSKISFYVNYESLTRKNGGFHGEKIGFVKTAEPLPKLPKGENYANPYLSYDGKYWYLSVGYSIEPVETPLSGNSLGIDLGIKDLAVCSNGKVYPNIHKSVRMRKLSKRLQRQERNLSRKIEHKISGYHKNRKPIYKKPLKECANIQKQIAKIRLIYKQIRDVRQNYLHQTTNEIVKTKPSRIVMETLNIKGMRKNRHLSKAISEQCFYEFKRQIQYKSEYYGIEFVKVPPFYPSSKTCSHCGGIKNDLKLSDRIYKCRKCGLVIDRDFNASLNLATYPSA

SEQ ID NO: 21711 - protein, 495 aa, Rhodococcus sp.
VVTAQVMATLRTLAYRDTAITALSARFDPSTGTLAPPTEPGDWVPLGFARGVRRQLVARARRTDGAQPKRLRITDVQGPPQTSAMARLSAADRQLAQLTAADRELVLTVKLPISPTPAGRAQWRGVRLTATIPAHLHGRAITDWHLPTLVLDRKGLLWRCAATELVPAGDLGSATVAVGVDWSPSTLGAAAITTENSDGLLSDYLGWTYDDRGLGTKLARLQTEGQILHRKAARLEKLAATAPPKVRAQLEEKIAILNEHRTAVGVKRGKINRELGFHFARQVTDYTATAGAQVIAVEDLTTLETRGHGRVNNNRAAQSARRKAVAALTHTAAGVGVAVVTVPARGSSAQCPGCDEPLARPGGYHTAWCPGCRVGGNRDHIAGVNLAKRALLGKNKVARRRGQLPAIRVAEHAPVRKSRDKTSPTPPRPRHRRVRHSIPTTTPRVGVTPKQHDPAPQASVWDTVKPTPPQSDAGSRDTRPSPTPATPVTDNTRST

SEQ ID NO: 21712 - protein, 391 aa, Marinospirillum sp.
MIKATKVRIYPTPEQAEFLNRQFGAVRFAYNKALHIISSQYKRHGTKLNAKRDMKPLLAVAKKSRKYHWLKGFDSIALQQAVINLDKAFNNFFDPKLPVRYPKFKRKHGKQSSYHCMSVSCGDDWIKIPKMGPIKARIHRKVEGRLKSITLSRTVTGEYYASLLHEDGAEAPAPIQSLDESAVLALDMGLTHLVIDSGGKKTPNPRFLKKASANLRRKQKALSRCKKGSKGRAKARLLVAKAHQRLTNTRADFQHQLSRAIVDENQAVIVETLKVKNMLKNRKLSKHIADASWTGLIQKLEYKAKEQGKHLIKIDQWFASSKTCSCCGHKLDDLPLTIRQWQCPACSAQNDRDINAALNIKAQGILKLKAEGLSVSANGGKRQSGHAPVAA

SEQ ID NO: 21713 - protein, 411 aa, unknown
  TnpB Polypeptide
VSDPEHPDPVQVRRAYKFRAYPTRPQEGRAVRLLADHCDLYNAALMERREAWRMRRVSVSYGAQSAQLKEIRRADPDGQGCHSFTAQQQTLRRLNTVFAAFFDRVRAADKVGRKQPGYPRFKPYQRFGQVLFVAGDGAKWQPSGSGRWARAAFQAVGSVKVRQHREVRGTVKALRLKREYRRWYVIVITETEPVPLPAAGRSVGVDVGVARFLTSSDGEIVANPRFLAASAQVIADLERRKARARPGSGNRKRLRRAVAREWRAVRNRHRDFHHKTARALVDQCDAIALEKLNIESMTRKPAAKPDPDRPGSFLPNGAAAKAGLSKSILDAAWYQFTCILVSKAEEAGRRVVFVNPAGTSINCHQCGRRCERLQQKTVTCPVHGAMDADVNGAINIASRAGLGSGQATTAA

SEQ ID NO: 21714 - protein, 501 aa, unknown
  TnpB Polypeptide
VQRLQAFKYELLPNSQQERQMRRFAGSCRFVYNKALALQKERHEQGQKKLGYAGLCQLLTAWRHSADTAWPADAPVHPLQQALQDLERAHSHFFAQRAGFPKFKKKGQSDSFRYPEPKQIQLDQANSRIFLPKLGWVRYRNSRDVVGKVKSVTVSKHAGKWFVSIQTEREVEQPKPKGGVVGIDVGIARLATLSDGTFYAPLNSFKRHEARLRKAQQALSRKVQFSNNWKKAKARLQRIHSQMANARRDFLHKVSTAICKNHAMVCIEDLQVRNMSKLAAGTADAPGKNVRAKSALNKAILDQGWYEFRCMLEDKLAWKGGRLIVVPPQNPSRTCPCCGHVSSDNRQTQAWFECVACGYENNADRGSGPEAFRGSGPEAFRGSGPEAFRGPEPSTSLLAGYSCCETKGRTRPTLRSGCGWVNHPCQPGWPVDRTARAVGSRNPPRRLRKELSVRSVVGISGLQAGEDVNCRERVPLLNRVEICQLFYTNLLNPFFQQPCSR

SEQ ID NO: 21715 - protein, 367 aa, unknown
  TnpB Polypeptide
MQRAYRTKLRPTATQAAYFYACAGVARFVYNWALADRKSRREQGLSTNKFEQKKRFNALKHEQFPWLAEYPYVIVPYAFDDLDAAYANFFRRVKEGKEKAGFPKFKSRHTSRKSFCLGVNGVRIEKDRVKVPKIGWLNLAELGYLPTEGAKLNRVTLSEQAGHWYISAQMEVADPDPVPLSGAVGVDMGVKALAVVSDGRTFDNPKTLGKYERRLARLQRELHRRQKGSNNRAKTKGKIAKLFQRISNTRSHTLHNISAHVVYTMTPERIVVEDLNVKGMVKNHHLAKAVSDAGMGELRRQIEYKAGWTGAEVLAADRWYPSSKTCSGCGNIKPTLSLSERVYVCDRCGVSLDRDYNAALNLAAYAR

SEQ ID NO: 21716 - protein, 239 aa, unknown
  TnpB Polypeptide
MVRPAAERRHGESSRLPQTRRRTTAQYGHVQRRRVQTRPRQQPRPTLERFQSQGYWSDFLLCEYQTRPDVDLSEVNSVQNVRAVWNGDEWELHFVCKVKLKTNDSTGNEVAGIDLGITNIATVAFPDEYVLYPGNSIKQDKHYFKRSEYDTEGKNGPSNKSTWARRKLADRETHFFHVLSDTIITECVERGVGTLAVSWPEDVRDSDWGRPATRNSTRGRSIASTSTSNTRAKNVESKY

SEQ ID NO: 21717 - protein, 376 aa, Chloroflexaceae sp.
MNTIQRAHKIRLNPTPEQEQYFRQAAGNARFAWNWAVALMRAASAQQMTLPLVGDLKAEFNRIKREQFPFMLDTTKCAPEQAFADLRQALANYFNDIRKRKNGKRRKDGKRVGFPRFNSRKRGYGSFYVFNDKFTVQGHWMKVPKLGWGNMTEPLRFQGKIMSARISERAGYWFVSIQVQLPEPEQTAPERVIGVDLGVKALAVDSDGEVFENQKHLAAALRKLRRVNRWLARKQKGSKNWYKAKRKLARLHVRIANLRADATHKLTTRLAAKASTIALETLNVTGMLKNRKLARAIADASFSEIVRQLGYKAVQVVRIDPFYPSSKTCNECGHINYALTLADRVWTCPGCGTMLDRDGNAARNIRDEGRRLVGAA

SEQ ID NO: 21718 - protein, 550 aa, Chloroflexi sp.
MRDSRTHQPLTYDVRLPDEAQADALRLLDASRSVINVALTLLWPHLDDFKADRVGPAWKQVGKYMGSPQYHGDRQWRCESEVVGRILRAQAERKQAFTLVFPILTEGFIIPKTDKHPASKKRPAIKEAITALQKSLEEEETSFVVLQNVVEQCCNYFFAHDRFPTTYEELQPVPLLKVGMLTYAGDDGGAKGQAYRLALDVDAGVARFRFRYPDEAGVWHWRKVDTIIPLPDRVKERLSCGEVKAPTLREEQRADGSRIVVLDFIIEVEKVDLPTWESVERVLGADWGVHSLLTATAVDEQNEQVGRPFYLNTGGFDGRQARTRRQIDALKKKVAKYEEQRDALPSDHPKRAWFNQKLILFRREIDRCWRKYEQRNRALAHLASNVLVLLARVYGCSLLSMESLKMIGLRFHTEQPRGTSHTCPHCGLAAKTYRSPSDRKQAVKWGRWMSCESCHYNGDRDYCASVNIARLGVAYVVQMKHTGRARSCSISDPRVKPVSYTGAGSALLLPPTGSHARPIVSGKICYYPGWLGSAFLQSSQKKSVFLRLCG

SEQ ID NO: 21719 - protein, 393 aa, unknown
  TnpB Polypeptide
MAVKARRTVRIPLDPSDADARCLHATHLPYLHCQHRAVEYCWPTTPKRPSDLITDKGEVEEALYDELREETDGLHSNLVQKAIKDAVSAVSSCQTHWENGDRISKPSFDVENGTYARTYDKRAATYHRHEVSLATVDGRVGTRYVLPRDLEGTPYARYVIDRRWSFSTSKLVWDGERFWLHAVMKRTYTDPDVDAASSDTHSGDFTRVLGVDLNVDGSTAVTSVGGFHGNADHLNHCRREYEALRAELQQTDTHSAHLRMRERRGVEWRHYDQYCHDVANRIVADAVRVNATHVVFEKLTRIRRRISNLPKFQQWMFDRIQRYVGYKVEKYSIKCERVKPRNTSKACSRTDCDCINGDSRDGKRFCCVECGYEVNADYNAVARNQRFLAARQT

SEQ ID NO: 21720 - protein, 473 aa, unknown
  TnpB Polypeptide
MSSVTRTIPLRPYACFDKKTNTGLDLHDVLEELCNDATLCATEALKHITHENLEKVSEYDSLKPAVAGRRMGIRFSVPGRGTGRSRFEWMVREYAVSQLRSWRERRKAHTGQADKYVSIGFKRTANPNKPDFLKPRLALSATDKQYHAVRISDSTIELEMVVAGRRVTFTFKTPGRFSEPRVRVIAPTINIDDSNRVMFNWHVDIPTELTEFSSKYVVGVDVGITNHRDEIEPHRKALSNRRKELAILIGQEVADLSWRYDNALVAVEDLSHIKNTMKHGRWIRGLIVQRITEMVESNGGRVMTVPAAYTSKKCHRCGESLDMNTYHTPICVSCRVAWDRDENAAANIAARLKDKDRHKKACQTRKKSASKNRRRNSKNTARPLKHPLKKTSPTPKAPQNRPKPKNSHRVHHKHTVIKKREGGVFPVLCAAGQSPLCGVTVPAVASSNGCSDNKPHDYSNYREPLTDCIYIKE

SEQ ID NO: 21721 - protein, 448 aa, Streptococcus sp.
MYKTKGPDLLLPLYNILQGELNRILSTSTYVEALSKIEFKYKDENGVEHSKLNGMLWAEIDDIIGNSLRGKGLYVWYIRILYYNIISLLKSRQEQIKIYEILKSNQYKIDNTLRDKLAQEKLYPTNAYLENLANAKDLPVLPKRKTFILDFSVSDKQMFRVGKNSNAYEIKIYNKKEIKENNLKTGWISFDMYLPTYIREGFTGKTAKPQFYWDCNKNEFVCAIPCEIKKLPHEYENIMGVDLGQIKAYSATVLREDGSISDEYVPTEELQNLVNKLKRMNQHIKSVYEKRKRSSKYGNFTNRQARRKLDYKRSRNKRTKLQFAIARLVAVEVVNIAIKEQCKEIHLENLSWIKNSSGKWNFAQVQACIEEVAELFSIKVVKVSAYNSSKTNPVTLEIGKISNRDVIFKNGQKVDRDQLAGLNLALREPKKVKQRKIKTLNVRNSVVI

SEQ ID NO: 21722 - protein, 192 aa, Moorea sp.
SSISRFFENCKKKVPGKKGFPRFQKHCRFGVADAARTVEYKQSGWKLSPDKKSITFSDKKGIGRLKLKGTWDLWRFDKKQIKRVRIVKRADGYYVQFCVSVNIKEELEPSRTTIGLDVGLKDFYTDSDGHSEPNPRFYRKGEKRLKFYQRRVSRKKKGSSNRKKAVNRLGRHHLKVSRQRKEHAKRLGTKLP

SEQ ID NO: 21723 - protein, 439 aa, Moorea sp.
MMIILEFKAYGKPHQYQAIDEAIRTVKFIRNSCIRLWMDNKGTGKYDLSKYSKVLAKEFPFANELNSTARQAAAERAWSSISRFFENCKKKVPGKKGFPRFQKHCRSVEYKQSGWKLPPDKKSITFSDKKGIGNLKLKGTWDLWRFDKKLIKRVRIVKRADGYYVQFCISVTNEEQLDPVDATVGLDVGLKEFYTDSRGNTEPNPRFYRTGEKRLKFYQRRVSRKNKGSSNRKKAVNRLGRHHLKISRQREEYAKRLVRSYRKIVEPYYKRFNPFMQSRTPIKAPLSKVSSPARCVIRSNDLVAYEDLRVKSLVKNHCLAKSINDAGWYQFRKWLEHFSKKFGRVTVAVNPAYTSQNCSKCGETVKKSLSTRTHVCECGCELDRDHNAAINILKKALGTVGHTGTWILDPNSSGDLTSTVLGSGQVQQVGSLNEESPRL

SEQ ID NO: 21724 - protein, 497 aa, unknown
  TnpB Polypeptide
MRAKTSSYVVSVKLKLPESIENRLEKSFHIATSAYNEALSFGLRRFEALKKNQMYRELLEQRRVDEKRRKKYDQALFELRKSYDLTEFGLSTHLGQRRKKSGSSYKQLNSGELQVIAGQAYKALEKVLFYQVKPKRLQFRSKYDLNVSYRNRINNTGTRLVNSNRKGIAYRLYLHKVSTFVDIPIKAFNTYQQMSLLRSEKIKYVQIIRKTIRGKKVYILQIVCQGSPLTKATRGEDVLGIDPGISTVAYASQKDVALFDLVPKDVNRKEKQLRYLDRQIEQSRRVNNPNCYNADGTIKKGARFKQPSNRQMRLRNRRLKTYRSLSEERKKLQGQLVNHLVSQASVIKMEYLNVKGLQKRSQDIRINPKTNRPFSKKRFGKAIFRAAPSAFRQALKTRAQQLGINFEIISPRDVKPSQYNHITQTFEKKTLSIRIFDLSEDYPNIQRDLYSAFLIGHIENGIYQQEQLNQDFPDFYRQMKEFLQEPRETSRLNWYLQ

SEQ ID NO: 21725 - protein, 492 aa, unknown
  TnpB Polypeptide
VDGPGVGGHARPRPPVCAYRAGRLPSACRPPMQGLHLTGVAGRVPAAALAAADAVVEVISGRLGRACVGGGDPRVYRRADHPAGEGQAVKRAYKLRAYPTRPQEGRMARLLRDHCDLYNAALQERREAWRMQRVSVSYGQQSAQLREIRAADPGGQGRHSFTAQQQTLRRLNTVFAAYFQRVRDAEHDRQRARSNGEKPKERRVGYPRFKPHQRFDQVLFVAGDGARWEPADDGRWAHASFQAVGRVKVRQHRAVVGRVKTLQLKREHRRWYVIVVTDAEAVPLPPTGRSVGVDVGVARFLTTSDGHIVANPRFLDAAHEAIADLQRRKQRTRRGSGNRRRIRRRLARQWRKVRNKRRDFHHKTARALVDTCDTLALEALRVDAMTASASGTLDQPGTNVAQKAGLNRSILDVGWAQFTSILTAKAESAGRRVVRVNPSHTSVTCHTCGTRCTRPRQDTVVCPTHGMLDADLNGARNIATRAGLGSGQAPAA

SEQ ID NO: 21726 - protein, 418 aa, unknown
  TnpB Polypeptide
MLLCKKIKIEVSNQEAQTLEFMQSKCRGLYNWQVMKLRDGEMWNLFEAKKSLQESKIHDAELVQVYGKLLHEVYFRLDKAMKAFYRRVKAGETPGFPRVRPRHSFFTLCYPACYLKIKGRTLTLPTGGGGKHGAKVYPNIQAQLTEAPPEQFQEVAISRDARGDYYASFSTEKQEEEQIEGGVIAFDLGIKTLATGVNEHGRFYHIGGFKGAQWYNKQLDMIRSKRAKCKKKSRRYIFLSKVYRHVSQKKRNKQRDCLHKASHLIARKTVERTIVVGDLSQRQMVMKQHQERNKELNRMVFNDWGVYLFIQMLTYKCQVYGKQLHREDERNTSKMCSGCGHLQKMPLWKRTYCCVECGLVMDRDENAAANILTRFLARRGPHTSVKTCGVLQEDSSSVEVVEASYPTILQQLNMFEHI

SEQ ID NO: 21727 - protein, 391 aa, Thaumarchaeota sp.
METFRHMVNYCIRIGLQHDVSTLKKLSIYCYHGLEKYDVISYYKLHAISKAAGILANRKQSIKRGYPTKTSHLKKGILVSCYGFKIVNGILKVPLGKRQYFDIPLNKHTKSILSDAAVTVRSFTLTANNTVSICYSKEVAQIECIAMAGVDRNLRNLTVGTNENVVQYDLFKAVDIAENTRYIVRSFKRNDVRIRKKIASKYGRRRYTRINQLLHHVSKQVVARAKDEKTAIAFEKLTYIRRMYQKGNYQGKNYRSKLNGWSFAEIKRLITYKAQWEGVPVIQLTSGQTRGTSQLCPRCGKRIQEAGYRDVIHRRLLWCDYCKRWMDRDVVAAMNIARKGAAVFQRSQGLAGEAMKGNPTTPVILRVDASKLAFKARADIVNRTYENQIYP

SEQ ID NO: 21728 - protein, 157 aa, Okeania sp.
DSFTLDGSISVGFNQIKLPRIGWIKTYEILPDNITPKSVTISRKADRWFVSFKVERECQTTEKLVDVVGVDLGVKTLATLSTGEVFDGAKSKKKLESKLSRLQYLNRHKTKFSNNWKKAQLKVARLHSKIANIRKDTLHKLTTYASLEPRHHSNRRP

SEQ ID NO: 21729 - protein, 370 aa, unknown
  TnpB Polypeptide
MICGVTRSHQIRLYPNKEQAIMLAKTAGTVRYCYNWGLAKWDEMRKNGEECSKYTLSKLWTVERPEWAKEIARGAQTQALMNLGAAFSAFFKKRAKHPTFHKKGRKDSFYVQNDKGWLKDGRRIHLPNIGDVRMAEELRFKGDILRFVVSKQADGWYVAITVELEGEIVPTDRETAVGIDVGIKHWAVASDGTVLDKPKAIPRLEKSLKHAQRELSRRQKGSKNRNKSRRRVARLHQRIRNAKMDAVHKFTSAIAKNHGVVCCESLCVEGMKRSMKSIRRGAQQSCMAELRMFLSYKCRNYVEIDRWFPSSKRCSKCGHVKEHLGLDERTYRCSECGSVLDRDLNASMNIRDEGLRIFTEGHSESACGGC

SEQ ID NO: 21730 - protein, 374 aa, Escherichia sp.
VKRLQAFKFQLRPGGQQEREMRRFAGACRFVFNRALARQNENHEVGNKYIPYGKMASWLVEWKNATETQWLKDAPSQPLQQSLKDLERAYKNFFQKRAAFPRFKKRGQNDVFRYPQGVKLDQENSRIFLPKLGWMRYRNSRQVTGVVKNVTVSQSCGKWYISIQTESEVSTPVHPSASMVGLDAGVAKLATLSDGTVFEPVNSFQKNQKKLARLQRQLSRKVKFSNNWQKQKRKIQRLHSCIANIRRDYLHKVTTTVSKNHAMIVIEDLKVSNMSKSAAGTVSQPGRNVRAKSGLNRSILDQGWYEMRRQLEYKQLWRGGQVLAVPPAYTSQRCACCGHTAKENRLSQSKFRCQVCGYTEPPRKSWRLNSLRKR

SEQ ID NO: 21731 - protein, 394 aa, Mycobacterium sp.
MSRYRLLPAAEQVVALAEHCRHARFVWNLAAEQQGFWRPGRKAPGYNEQAAQLTEARADFAWLAAGSQTVQQQALRDFAQAMRNFFAGTHRRPTWRKAGVHEGFRQVGVKPCHVQRLSRRFGQVKVPKVGWVRFRLSRPVPEGVKSYRITRDRAGRWHIAFAHVPDPIAGPQNGSVVGIDRGVAVSAALSTGELLRAPGLTGGEAKRLKVLQRRLARAQRGSNRRAKTKLAIARLRARETDRRKDWVEKTSTDIARRFETIRIEALDVRAMTRSAKGTIDRPGSNVAQKRGLNRSISRSGWGLLAARLQHKALGRVEQVPAAYTSQRCSACGHTAPENRKSQAVFACVACTAGPCNADVNAARNIAAGRAVTARGDLGNSRSVNREPQLESPAA

SEQ ID NO: 21732 - protein, 285 aa, unknown
  TnpB Polypeptide
LIFTNQACKIKNGYLYFQKRCDLNLIKTKVDNLCQVRIIPNSNCYVIEIIYRKEVKENDLKEKNYLSIDLGINNLATLVTNQGQQPLLVNGKIVKSINQYYNKKQALYQSYIGDKGISNRIKKLNFKRNNKINDYFHKTSRFIINYCIEHNIKNIVIGYNSGWKQEINIGKVNNQKFVFIPYLKLINQIQYKAEENNITVVIQEESYTSKCDSLALESIEKHESYLGKRIHRGLFQSSVGKFINADINGAINILRKVIGDGFVRTLISTGFADKPVRVTPNKYSF

SEQ ID NO: 21733 - protein, 614 aa, Ruminococcus sp.
MSKFVIECPKCGRYTEAKSGFFAKKKVDCVCGHVIDVKTEKMSSRLCPHCGNMVIFDQSKGSDAKCPVCHEKINTYNNMAALVQFHCPSCSCELSADKNADTYTCPLCDTEIDVQKAVAKEAEKNKGLASVIKYEGDNQTFVWKHPIEDFNLGSQLIVHESQEAVFFRDGQALDLFGAGRYTLATQNLPILENLYKLPTNADTIFHSEVYFINKTTQMGIKWGTDSKVRFFDTATGLPIEIGASGQFNLRVEDSRKLLIKLVGTASEFTQADVIDGVYGMKPTIAKFRAMIMTKVKSHLARIIKENNINILEVDEHLETISNQLCITINENLADYGLFMPEFFVTTIVTPDDDPNFKRLKQQHADLFLKVREEQIRKAEAEASAERQTVEAQTAAKMKVIGAQGEAEAYKLKAEAEAAEMRMKGYTYQQETAREVGLAAMEGIGKSGGAGGGFGDIAGLGVTLGAMGSVMGMTKEALNPVAQNAQGMGTAIGETISATGDTWNCECGQKNITSKFCPDCGKPKPAPLSADRWDCPNCGTKGITSKFCPDCGSPKPEKPTGWICPNCGTKDITSKFCPNCGNPKPAEPSTWDCPNCGHKGISSGFCPDCGTKRGE

SEQ ID NO: 21734 - protein, 425 aa, unknown
  TnpB Polypeptide
MKDETKTLLSCIIQVTPFDSIYEELDHELFLSKNLYNTCVYIIRQLIFKKRDCTDPVLKSSMKGYMTGFELSKMLQDEDNVDYRALPAAAAQQVCKQVDEAFKAYFAACKEGLTPELPKYLDKVKGRNKLSFAKNGISASKLEKGIIKLAKSDITFKLPEYIDCESVQQIDIIKTDNRTIKVIIIYAVPKVEMKKNNNRILGIDVGVNNLMAVVSNTNDFKPIIYDGRPIKEINQFCNKYVAKYKSLSKNVITERICSIYRNRENKIDDCFHKIVNDLINQAVSNDFSVIVIGKNKGWKQEVKLGDQNNQNFVCIPHNLLIKMIKYKAALYGITVIETEESYTSICSFFDNEFPCYHENYKGERVKRGLFKSSLGFINADLNAALNIIRKVFPEFSCETANLSINHFKNVLKVSPKMLCNSNHRV

SEQ ID NO: 21735 - protein, 383 aa, unknown
  TnpB Polypeptide
MSYVVTMMAQATIRLKVPHSNQLVKTTQEFAKATQFAYDYARANRISSWKTLHEKTYRKIRSFSMLPSQLCCKAIKFALETKRGCRNRKADFSRELSIQYDHRSYSFDFSGRCSLATVSGRLRLDLHVPEYYAKMYGDWEVRSAVLCRSGKDLFLNVVVAEDLPAAAIGPGSRTIGIDLGINNLAATSDGRFFKGVNNHIARLQGLRSRLQSKGTTSAKRHLKNISGRQKRFMRSINHEVSRRIVSRINSGDMIVMENLHGIRSRRRGKVLNRLLSSWSFFQLRQLIEYKALRKGAIFVTVPAHYSSRECSRCHESHTERPGNAGFFRCLNCGYSCNADLNASFNLRDRTDAVRNALGLFVNQPIVGDCVYYSDKPTASAVGS

SEQ ID NO: 21736 - protein, 405 aa, unknown
  TnpB Polypeptide
MKILRAYKTELDLNNIQKTACARHAGAGRWAYNWGLARKMEAYRNGEKVPSAIDLHRELNVLKQGELSWMYEVSKCAPQEALRNLDQAYAHFFRRVKEKKAGRKIQAGFPKFKSKKNGLGGFRLTGAIHIFDNAIQLPRLGRLRLKERGYLPADGVHLLNATVRERAGRWFVSVQVEKEIPNPKASYQPVVGVDLGILALATISDGTRIENPHALKRDLRKIKRLQRVVSRRQKGSANREKAVRQLARAHLRVANVRKDALHQVTSWLARTKSAVVLEDLNVSGMVKNHHLAQAILDVGFSEFRRQMVYKGQWYGCQVMLADRFYPSSKRCSQCGHIQATLDLSERVYICDHCGLVIDRDLNAAINLEQLTTGSSPERYACGESVSPGYQAVLVEAGTEQQSTYV

SEQ ID NO: 21737 - protein, 405 aa, unknown; identical to SEQ ID NO: 21736
  TnpB Polypeptide

SEQ ID NO: 21738 - protein, 414 aa, unknown
  TnpB Polypeptide
MLALNYTYRIYPNATQQSIMMDWLETCRQAYNYALRELKDWIASRHSMSDRCSLEKEYIIPASQPFPSYQRQQDALPKAKKQFPRLAEIHSQVLQTAVRRLHDAWENFQSRGFGFPRFKKYGQFKSFVFPQFKSNPIESNRINLPKIGSVVMNLHRPVPSGFVVKQVRVLSKARGTQWYVVVTLQLNVSVPEIPVHGRAIGIDLGLERFLTTSDNFSVERPKFLKSKQSQLKLLQRRAARKQKRSKNWEKSQVKVAVVHHNIANARKEFHFKTAHQLCDQASTIFAEDLNTVGLNRGMLRKDCVDAAFGQFLDLTKWVCWKRGVYFMRVNPNGTSQTCPKCLVTVQKDLSVRVHICPECKYETHRDHAAAEMVLIRGYETVVLRDSEESKAPVGSRSAGGESLGKRRRSRNAQS

SEQ ID NO: 21739 - protein, 425 aa, Streptomyces sp.
VKLRYSFRVYPSAGQCTALARAFGCARVVFNDALRTREAARAAGLPFPKTGDLSKRLITEAKNTPERAWLGEVSAVVLQQSLRDLDTAYKNFFDGLKGKRPCMGAPRYKSRKDTRQAVRFTANARWSITPGGKLRLPKVGDLKVKWSRALPSTPSTVTVVKDSAGRYFASFVVETGPDEVLPETTPEVGIDLGLTHFAVLSDGRKIDSPRFLRRAEKRLKKAQRALTRKQKGSSNRDKARVKAARAHARVADARREFHHRLSTQLIRENQTVAVEDLAVKGLARTRLAKSVHDAGWSAFVNMLEYKAARYGRTLIRIGRFEPTSQVCSQCGVKDGPKPLHVRIWTCSACGAVLDRDVNAAVNVAKAAGLAVSACRARVRPGLVPAQRSEAGTHPQRPTQPVWEQTGIPRLQAGEEVNSCPSRRSP

SEQ ID NO: 21740 - protein, 509 aa, unknown
  TnpB Polypeptide
VKYYDTVTRYRFTTDGGVDVEQVSRDLAQMVAWMAKAEQEVLASSEFHDLALKALRGDRPTGSLNSWGRKRLSRYDFSFQKHNMNEMLASNVVGTLELYAMSVGLFHVMSTHPKETGPEKILSCYKNTYPDAPQPTSGMVRAHLIRYHKKGERKASLPGVSAKLNLAVCDTHFAPKTFRDEKDPLNVLVQVKTPNHGLTRLYFRLPNNESRFGEGKVCRPTIRLNNKGQVVFDVAIEHEVNTRQAKKIVGVDLGKVEPFVATLIDPKDKYRSAPYHANYKRRLGSLVKKEQQRRDLSRHLYERADLCEKYNRDQHAQVLRTEAKRVRAKATRIKHEISQCIASQIVSISDHNDAHVSLENLSWLDAKGGRWPHAEIQRHIENTAKRYGLKVIKVSARNTSRTCSRCGGKVSNNSKTRVGTCTTCGFELNRDVSASREIALRAVSNARNRDRMRSLLRQRQEMRSSAVTRQSKPVTVLGGNQGHTGTSNNRLEATLIMVRENLDSRGSPT

SEQ ID NO: 21741 - protein, 509 aa, unknown
  TnpB Polypeptide
VSRSSVSRTYPRTPYAAFIKSGDPLDLGEVLDGIRTDAELVAHYAMREMTEQNLALVTYFDKYKPAEAGRQMNLKLPAKAKRQFKSGASRLEKMFQEQAVTALRSWATRAGVVSGDYAGYVSAGWRRTVNGSKPKSLQPRLALSSTDKGYHKKMDITPERIILEMVVQGRWVTLHFPTPPQLLEQGCEPGVPDIWIDKNNRVVFGFHGKTDPGRPEFSSRYVIGVDVGVKNPAAYVVWDTKEKEVVERSLLGQRARSLNNKIKRAQVQVSSLQRKNRSEEVAPHRVHLSNRKRELSILVAQEIADAAWRHDNALVVFEDLSHIGNTMKFGRWFRGEVHRRTRDMVEADGGRVMKVNAAYTSRKCHVCESDLDISDYSHPRCTTCGITHHRDLNAAANIAQRANHKKAFQTRKRHTTKTKRVRRSKCHSRPLKHPGTKNRPTPKAPQNQPKTHAHSSLPSREVSKGMCPAESRVSAVDHRGDSGFQTISGTTVPKKNLSINTVDWVYPKE

SEQ ID NO: 21742 - protein, 382 aa, Oscillatoriales sp.
MIRTAQFIRNKALRYWIDNQGVKLIDLYKQCAIMAHEFEWAGKLNSMARQASAERAIFAIQRFLANCKAKKPGKKGYPQFKKHTRSVEYKTSGWKLSTDKRCLTFTDGFAVGTFRLLGSRDLHFYAPKEIKRVRVISRADGYYAQLCINVERVEEVVPTGKAVGIDVGLNHFLTDSNGETVANPRHLRKSEKALKRLQKRVSRKKKGSGNRKGAINKLGRKHLKVSRQRKDFAIKTAPGVVKSSDFVAYENLQVRNMVKNHKLAKSISDAAWSQFAVGLQYLGKVYGKTVVAVTPQYTSQDCSSCGNRVQKSLSVRTHICSCGTVLDRDHNAALNILAKGLRQAGINLNTAGQASRLVEPRIPAHLCRGVSNLYGYYDHYNE

SEQ ID NO: 21743 - protein, 390 aa, unknown
  TnpB Polypeptide
MKRTNIFKLNPSEEEEAILLEWADNCSRMFNEINYKRRQSFFEGKIDWNTDELYHEYTKLIGSATAQQLINKNNEAWRSFFALLKMWKEGKIDKRPRPPGYWKDRNTGKRILRILVRTDSYKLDNKHLKLPFKLKVKWKGKNKWEGKQGRLEIAQDTLSGQWICYMPVEAEPLHEPKGSKVAYVDLGVKCPIVVEIEGKTWGYKANSMLADWWYLTKQIAECQEELAKINKKSSKRMRQLYRKRRRRFRDRINKIVADFVRRCWEEGVAEILCGDLREIRKDAKFGRKSNTMIHNFWSVGYQYQRIREKAEEYGIRTRREDERGSSSECPICGSKRIVKRGRLFKCMDCKIEAHRDAVGSVNIGLAQGEVLAAGVINRAVARPSLISIEA

SEQ ID NO: 21744 - protein, 362 aa, unknown
  TnpB Polypeptide
MITNNTHTKTLKVRVRDKHVKTLSAWAYSVNQVWNYCNEIGYRSIKERQKWLSGYDLQNYTKGASKELGLNSATVQMIGHEYATRRKQSKKTRLNWRKSGGVKRSLGWIPVRKDCISFKNGQVYHNKKHFRIWDSYGLSQYKFKSGSFNEDSRGRWYFNVVVDIDNDQSPGTQAVGIDLGCKAAATDSNGTVIVGREYRKLEAKLGVAQRAKNKNRVKNIHAKIKNRRADTLHKYSRKLVNESAVIFVGNVSSKGLVKTKMAKSVLDAGWSTLKTMLEYKCAHAGIVFEVVNEAYTTQACSCCGSISASSPKGRAGLGIREWKCSDCGTAHDRDINAAINIKNHGLDILAVGYDRLAAGIPH

SEQ ID NO: 21745 - protein, 394 aa, unknown
  TnpB Polypeptide
MIYSVNVVIWGDLTVAKRAYKYRFHPTTDQVELLAQTFGCVRFVYNSILRWRTDEFYQNQNKITHAQADKHLTLIKKEFEFLNDVSATPLQQSLRHQQSAFKNFFEGRAKYPTFKSKRHKQSACFTKSAFKYKDGQIFMAKSKVPLDVRWSRPLPCEPSTITISKDSAGRYFVSCLCEFEPVSLPITASTVGIDVGLKDLFVTDTGFKTGNPRHTAKYAKRLALLQRRLSKKQKGSKNRAKARAKVARIHAKIADCRMDNLHKLSRKLINENQVVCVESLKVTNMIRNPKLSKAIADAGWGELVRQLKYKSEWAGRTVVAIDQFFPSSKRCSDCGYTMSKMALNVRSWVCPECGANHDRDVNAAKNIKAVGLTALACGESVNPKAALCGLGSTL

SEQ ID NO: 21746 - protein, 558 aa, unknown
  TnpB Polypeptide
MRAIVAPFVVAPPSGARIRTRLRVAGGDQWVLRTVGACLGRLANQDLAVRCRLGPGPDQRADRKRALTSASSSRWAGTLTRTSNDQWQRGRRNLLDTREGLRRACRSIRSRLEVPVGGRQGRVRGYGSQAERFQKQARLRHLEARLAGVEARLGAGRVSVCRGGRTLAKLRHATDRDDAALTTQQWRARWQAARLLLTADGEAGKAWGNETIRVHPDRCWLELRLPAPLAHLANRPHGRYRLSCPVTFSYRADEWAAQAASGAVAYTIWLDAARGRWYLDASWQLPARPIPSLAELRQHPALAIDLNADHLAGWVLDPAGNPLGAPRTVPLALDGQPASTRDGRLRAAVAEVVRLATQHHCRAIVVEDLDFADVRQVGRETLGRGRRGKQFRRVVAGIPTRRFRDLLVGMAANAGLWVVAVDPAWTSVWGGRYWQVPLDQSTKTSVAVSRHHAAALVIGRRGLGYRARRREGCARVRPEDRARRAADSAGQAMTPGTALAAPGVVPGPTAQGPDGPGGQRAGPAAHKTRLPEQDAVGDQVAQDRWVPPEAADYHPLPP

SEQ ID NO: 21747 - protein, 535 aa, unknown
  TnpB Polypeptide
VILELRTKAEAARVAASTGGRQLRSPTDPTKFSRRVEIDDLESHRQAVESVSVLFRCFERRGAELVEVPSGWRLSGARFEVEWPEDPARASLIRSHFGARRFAYNWALSRVKADLDEKSADPGHESTAWTSAALRKVWNAEKDTAAPWWAANSKESYASGITDLARALHNWRASKAGRRKGRPVGFPRFCSRHNDHGRVRFTTGTLRLEADRRHLTLPVVGALRSKEHTGRLQRRVAKRDARVLNMTLSERWGRLFVSVNYAERVRAPQPSAKAARCGVDLGLRTLATVAGSDGALHEFENPAPFRATLSERRRVGREMSRRIAGSRGHRRANAKLARLDRRAVHLRREQWHQLTHRLVREYHEVVVEDLDLMAMKKSMGRRAFRRSVSDAALGMFRPLLGYKLEREGGRLVVADRFFASSQLHHGCGCRLVGTTKLAEQLVCQVSGELVERDVNAALNLRDWPGHASPGSVGAGVPVVSSSGGSTRDAGSDPEATRGRERPCQTGAPVVSAVAGETRTDPDPPGRVRNPERGAA

SEQ ID NO: 21748 - protein, 379 aa, Escherichia sp.
  misc_feature (180)..(193): Xaa can be any naturally occurring amino acid
VKRLQAFKFQLRPGGQQECEMRRFAGACRFVFNRALARQNENHEAGNKYIPYGKMASWLVEWKNATETQWLKDSPSQPLQQSLKDLERAYKNFFRKRAAFPRFKKRGQNDAFRYPQGVKLDQENSRIFLPKLGWMRYRNSRQVTGVVKNVTVSQSCGKWYISIQTESEVSTPAHPSASMXXXXXXXXXXXXXXQLSRKVKFSNNWQKQKRKIQRLHSCIANIRRDYLHKVTTAVSKNHAMIVIEDLKVSNMSKSAAGTVSQPGRNVRAKSGLNRSILDQGWYEMRRQLEYKQLWRGGQVLAVPPAYTSQRCAYCGHTAKENRLSQSKFRCQVCGYTANADVNGARNILAAGHAVLACGEMVQSGRPLKQEPTEMIQATA

SEQ ID NO: 21749 - protein, 374 aa, Synechococcales sp.
MKSLKFKLYSHKRNQYLKRCINAAGVIYNHCIALHKRYYRIWGKHLSCAKLQAHIAKLRKRKAFWQLVGSQAVQDVCQRIEKAYQLFFKHHKKGVRPPGFKKVKKYKSFTLKQAGYKFLGGNRIKMGNKVYQYWNSREVEGTVKTVTIKRTPLGELFIVVVVDSVDEPQIKVETSRIAGFDFGLKTFLTCSDGSKIESLQCFKQGLNAIRKACKQLSRKQKGSKRREQARKHLVRQYEKIANQRRDWFWKLAHELTDRFDVLCFETLNLKGMQRLWGRKISDLAFGEFLQILEWIASKKGKLVVFIDQWYPSSKTCSNCTHVLDSLDLSVREWRCPSCQSVNGRDENAAQNIKTVGASTVGLGSVSQAQPATAV

SEQ ID NO: 21750 - protein, 427 aa, Synechococcales sp.
MLKATRYRIYPTKEQQEHLAKSLGCCRYAWNYGLALTNQTYKDTGKGLSRFAIQKAITELKKEHEWLAEPYSQCLQVVALNLSRAFINFFERRGLFPRFKSKHGKQSISYPQNVKVLESSLKFPKMGEVKARIHRPVEGLVRTVTVSINSRGHYFASVLVEDGIDQPESNSDADSVSGRYSVRPPVLGKIIGLDVGLTDLVVTSNGSKFSNPRWFRKHQKNLKQKQQSLSRKKKGTNNRNKARKKVARVHDKISRCRSDFLHKLSRRVVDENQVIVTENLALKNMVRNHCLAKPISDAGWGMFTTMLKYKAEWEGKVYLEVDRFFPSSKTCNVCLNQVGNLPRQCAGGGLPRPLAALEIRSWTCSSCSTHHDRDINAAINIKNEGLRILSLGTRDTACGDSVSRGGGRKSSTLQESMKQEAHALAVG

SEQ ID NO: 21751 - protein, 437 aa, unknown
  TnpB Polypeptide
MAAGRRGTRRRKPWRPSNLKVKRSYRYELDPNAQQRVLLAKHAGAARFAYNWGLARRIELYQQTGKTTNAIEQHRELNRLKKTEYPWLYEVSKCAPQEALRDLDRAFQNFFRGLKKGRKVGFPKFRKKGRDDRFRLTGAIRVRGRAVQLPRLGLIRLKEEPCVQGRILSATVSREADRWYVSLTVVVDLPDPELVQGPAVGIDVGVAHFATLVQEDGTVEKIPAPRPLLRHLRLLRRRQWRHSKKQKCSRNRKKSALRLARLHRRICHIRQDFLHKLTTHLAKTKRVIVVEDLSVSGLLKNPKLARHIADVGWGEFRRMLAYKCGWYGSRLVEANRYFPSSKMCSCCGQVLELLPLDVREWDCPGCGTHHDRDVNAAKNLLALCPDLNGQLAVQVTTASSAGSDACGHCGWMKQEATRTFVHELQNGETRWGGRYAP

SEQ ID NO: 21752 - protein, 582 aa, unknown
  TnpB Polypeptide
MVVGMKRTVRLATVPLNVDKRAELCSVIASYAEVKRSFVEALRPSSRWHHLDDKRSFRDWAKAQGLYPVGVNVHLVDQAAFDAVDTCVRHIESCLAIADIKARIWRRFTDGDERHYAYACLARYSALGEIMAGGAPRLGAGHLAPDLQAKVARYLHRVLRKAVNGTWPAVKLARSMALEETMYSVFFVERPGSSPDLRQYVSVVGAKSHHRIVLPMAGVSRVSGNVRVVLDDDLDRACVHVAYDLASLGEATGPEKSIDWGITEVCTDNDGKKYGKGYGSALTSMTEQRNRTGSARHKLRAISKKDAGGKRAKHIARSNLGTKKQEARLRRHRAQLRTISGCAVKEVIYGEGNRTRKRGKVAQSPEQRPRVLVVEDLAHLRGKAKSKKISRACSSWARAENEGRMTVHAYVGGSDVQTANAAYTSQTCPEPTCGYVHKDNRHGDTFHCRNPYWECNWQGDADHVAAMNLMTRIDDREISRFTPYTEVKKILEARFLRRRESRTGGQRVSSGKQHGPGETTGKTGVRALSDEQTATAHGRTPSEPQPDIVVVGGSDVAARMSPVPVVGTGETRRLGSDKKRSA

SEQ ID NO: 21753 - protein, 379 aa, unknown
  TnpB Polypeptide
MIVNKAYKFRLYPNKKQEELIQKTFGCTRFVYNYFLAKRNELYKENKTSMTYNQMSTDLTKLKQEKEWLQEPDKWALQNALKNLDVSYKNFFRRVKQGEKPGYPKFKSKKDNNKSYQTTRFYRKERNTYNININNNKMQLPKLGWVKIAKSQDIEGKILNVTISQVPSGKYFIFVCCEVEIDQLPKVKNKIGIDLGIKEFIITSNGNVINNPKYYRKLENKLIKEQKKLSRKQKGSNNRNKQRIKVTKIHEKMVNLRNNFLHQISSRLINENQIICLEDLGVKNMVKNHNLAKSISDASWSEFRRMLEYKANWYGRNIVFIDRYYPSSKLCNICGYKMEDMNLSIREWICPQCNTVHDRDINAAINILNEGLRMLKLAS

SEQ ID NO: 21754 - protein, 360 aa, Oscillatoriales sp.
LLSKKIRVYPEAKLAAKWRTWIAASRWCYNQAIAILKDEKIGKYDLRKKIMDSAPDWVCEQPYNPRQMAVFQAFEAHKAAKKAKGTAKFRSRLDTSQTIRFQTSNWKFGAFYPLATKGLTFKASEPIVEVMQHEPTLSLIDRQWFICYVIDEPKIKPIDSDLAVALDPGVRTFVTGFDGSDFIEIGKNDIGRIYRLARHLDKLMSRIGLSKGRQFKRLRYCLRKSAAKIRIKIKNLVNELHKKAAKYFAAKYKLIFLPTFETQQMVKKGRRRLATKTARAMVTLSHYRFKQMLKHQATKHGGVVVDVTEEYTSKTCSKCGHIHAKLGGAKIFKCPECGHTLDRDKNGAFNILLKALRDTS

SEQ ID NO: 21755 - protein, 372 aa, Halobellus sp.
MEVRRTVPVTLDVDRNDAALLEDTVDTFLWSAQYVVDHAFHGESVTTSKTQLDDETYDDVREKTGGFNDGLVQAARNKAAEACKSVVTRWKNNKKASKPRMTSPHVVYDHRTATFYDDYVSLATTDGRIEADYVLPDEDSDTPHAEYLFSDEYETTGAELHRKHGEWKLHIHCKREVESDTSEQATTSHGTVLGVDLGVNNLAVASTGTFWTGDEFDHWRREYEKRRGDLQTRGTRWAHENIQSVGRKEEGRFKLTLHRIANELVAEARDHECSVIAFENLTDIRERTGASWGHKWAFNRLYEYVSYKAAEYGITVEQVDPENTSRRCSTCGFTHPDNREDEAFDCQKCGYENHADYNAVARNLRFLAARQT

SEQ ID NO: 21756 - protein, 484 aa, unknown
  TnpB Polypeptide
MPKITISSTRVYYHELSNDTALAIQNDISLYQSMLHKSYRELYHNNSINSRYLKDIYHTNDYFPLSAISEAKGILKSQKTWHHKFISMKKKKLKKIERKMNQEEKFLKRYKMTKSTLVALSKAITHGERLPPVYRCRDMKWYSRDPLHCYYRNQYMLLYIFEVQHLNKLMKATRHRIRMLKYRKTRMEHKIEKLEKRMKQIRFHKNRYMKITGRSQGKYCNNLFKYDHEKKTMTYIDTYQRRHAFSLDFPYRREELIRVLNLKHATKGKAVCYTLKDKGDYFIISAAIELDVKYEGCLFEITGGTVGIDINNDRISLSEIDRQGNLIYCRDFLFDLSSKTSSQRKWIIENTVKQVIGYCREVGKPLIIEELNFEKKKKDFELYNQNKQYQRMLSEFSYRKIIEKLYSRSYKERIGINEVNPAYTSIIGKLKYARQKGISIDKAASYVIARRGMGYSERLPLKQYQQINKPQLTRWRNYSQLAAE

SEQ ID NO: 21757 - protein, 416 aa, unknown
  TnpB Polypeptide
MMTKVLRVECIEIKYNSRISTLCHQVKNLYNLANFYIKHSLKAQEKFLFYTELDSLLKIEKCYKILPAQTAQHTLKLLCRNWKSYFSSKKEWKKNPEKFYDIPKPPNYKSKNGEVVAIFTNQQARILNGWLVLPKKVGFHYKTRLTSRTILKEVRIVPRRVSYTLEIIYEKILPKRKKRTIRKGAIDLGSINLVTFVDNLGSQPIVIKDHGNGIKSIIQYHLKMQTQLRKQYVQQQKKQLKQKNKLKYGSAYYFLREKGRKKIKNAVHQLTSYLVGLWEERDLDEVIIGYNEKWKHKIHFWKKVTQIFVALPFMKIIKQLQYKAAERGIKVELIPEEYTSKCSFLDNEFPEKRKKYSGKRVKRGLFQSANGYLINADVNAAYNILIKSDPKALPPRSVNGVGGYVMYPQRVNVDPL

SEQ ID NO: 21758 - protein, 567 aa, Bacillus sp.
MVKTYFSNRVYKNTLPKKYIESFSHALLCFGRSKHFALQTQVLEKRSNESRRKKSLHLTIKERFQLNDHYANSAIQEANAMIKSQNELQKMYIENKEVQMTSVKKKIKSTKSHLTTLSKIKQSFMKGQPILNKTSREKQFGHFFVVQFNEKTDIYYHAYQFEHDYLDVQIAFLKSKLGRLEFKLDRFQKQIKSLKNNTKSIVFGTKKLFKAQSTIENYQNDHQQWRKDWEQARYNQMTISERKDAKVGNFVFHYLTDEQELHFKTPNGVAIKIENLVFPYGLEQVNQAIETQMNCKNKKKNGKPIAWSVEDHGDYYIFKCIIDVPEKPNINYCRAEGVLGLDLNVDHIAWSNINSKGQLIKSGLFSFDLDGKTSGQNTKIIENKAVVIVDLAMKLHKPIALEKLDTTKSKVSHTYGSKKANKAMSQFAYNKMISTIKNRASKMGVAVFEINPAYTSQIGKIKYMKRFGISIHQSASYVIARRAMRFKETLPPVLHSLLPEKIAGLHHWAQWKWVSSCLSEVRKHAFYRIELFACNKIGSMNQFFPPGALSDLEEKGLLKVKGRKSIA

SEQ ID NO: 21759 - protein, 451 aa, unknown
  TnpB Polypeptide
LNYLESTGYNRSSKKFFGIVRGVKKMTKAEKIKQTWQQTKERRKNQIPVVCQLKINLNSASKETKEKLFRLFLEAKWLYNYIVADIGNRLDSNAEKLKEVEIKVGENFERRRIENLSSQMKQALVERIKQNLYSLHIQKENGHKTGKLQFKHYVNSIPLKQFGNTFKFVNQQKTRVKIQGIKKPLRVLGGHQIPEDSEIAKAELVKRPSGIYLFVTCYINKGRYTEAWERRKNRKGVVKPRVWQTFDVAAGIDFKPAGMVLSNRLKLEWQIKETKRLKKLQKQLARQQKGSKRWYKTKEKIAREYEKLTNIKYDVINKTCSFLYRYKTVCFQKDNIKGWKDGYFSKSVHYSAVGTIKRRLSDSLRVPAVAIKSSVPTTKTCSSCGSQYDVKLSERIFRCPVCGLEIDRDLNAAINMLKLVGLDRSEVKPVEWETAARIFRGNPYILVSHTT

SEQ ID NO: 21760 - protein, 407 aa, unknown
  TnpB Polypeptide
MIRAHKYHLYPTKTQEAQLLEWMEICRRLWNYSLLDREQSWESCKLELDENPDGDIPAIKKKWSISFYDQCAQLTKSRKQYPELRAVPTAFARGTLKNLELAFQAFFRRCKNGEEPGYPKPKRYPPNLINRDASGTAWWRDGKVIIPKIGAINARAKVPLNLDVKMVSIRYVAGKWYVSLAGENGIPAPEIVEPIRCVGIDVGCTSLITTSDGEKVKPPQYYRKAQSKRVKLGRRYARTRKGSANRRKARKQLARAEHNVANARETFLHTLSRRIVEEYDFIAVEDRIAADLLQKEAGGGGREKGLHKSIADAGWSMLVWMLEYKCEELGKQLVRVPARGTTQACSQCGTIVPKGLWDRVHDCPECGLVIDRDINAAHNILQRGLQQIGQCLPESKACGGPRKLEVC

SEQ ID NO: 21761 - protein, 407 aa, unknown
  TnpB Polypeptide
MQLTYRYRLYPSQVQEEKLLAMLDQCRWLYNYFLEQLNRKKNGKTPRRYELQETLPKLKREHSKLKHVHSKVLQMVLHQLYSNLRALAELKRNGRKVGRSRFKGRGWFKSFTYNQSGFKLINGHSKRKELWLSKIRPIPIVSHRKIDGRVKQVHIKREHSGRWFACFSVEVEDAPKIERATKAVGIDLGITHYIADTNGNFVEHPHNITKSEWKLKRAQHRLSKKQKDSKNRVKQCIKLVRIHEQIKNQRLDFLHKLSRHYVDSYDFIAVENLRVKELIEMAHNGKNRADAAWATFLRMLTYKAERAGRWVVRVEPRGTTDRCSVCGEVVEKPLWVRIHRCPECGLELDRDLNAARNILQDGLEQVGWEPSEFTPVEIGPLPMRASPVVEAGNPVPCGVVHKRLQLA

SEQ ID NO: 21762 - protein, 434 aa, unknown
  TnpB Polypeptide
VEYRRAAVIKLDTPEGADKHLRETIEQFKYCSNTASEWCWHGDDGYHITSKAKAEDALYDQLREDTELTANLVQKGIHQAVESIKSGVERLKNDQDTFRPKFTADTAVYDKRSATFHRDHVSLSTPDGRIECDYILPENPKTPPTKYVANEDYEFRRATLHRRDGDWYLHASMLKEDDDTEPTTGHRTVLGVDLGVNQLAVASTGRFWSADEFTHWKQEYEQRRGDLQQCGTRAAHDAIAGVERKEDGRFEIFLHRVANEIVAEAVEHDCSHIVFEDLTDIRENVPQASWHHLWAFRRLYEYVEYKAREQGVETVQVDPRNTSKRCSTCGFTHDDNRNGEDFECLDCGYQNHADYNAVVRSHLTGSKREAFATAKNIGLQYLRRPQKSSISGVRTRRSASRQRRQNADDGGAPVDVRLNSEGSEIPRTMRTAKP

SEQ ID NO: 21763 - protein, 422 aa, Halorhabdus sp.
VADEYVRRTAITRLEVTDEQRDLLEETISEWKRGCQIATDMAWGKCNTKSDVQPLAYDDVREHTDLGSQHAILATHQAAQAITGCIERRLNGKKVSKPSFTAPTVKFDARTMTLFDDDSVSLSTTESRVRCKLALPESDDGYQRQYLDSDIWTVTESTLTARDGDYFLHIGFRRHKTDTERNTAEDGTVLGVDLGIENLAVTSTASFFSGRELTHNLHEFEKVRAGLQQTGTRSAHRTLEQSSNRELRYVRDVLHRASNAIVDEALRHGCDIIAFEDLAHIRDRTGASWGHRWAFRTLYEQVEYKAEAEGIAVTQVDPAYTSKRCAECGFTADENRPTRSDFRCQKCDLEANADYNAAKNIGLRHVRQGQQSSRRTGDSQLALKSGTVTPNGGFTAYPDGFEAEFTDKPQCRPTACTSSDHV

SEQ ID NO: 21764 - protein, 372 aa, unknown
  TnpB Polypeptide
VKYTKGYKFRLYPNKTQATLLNKTLGCCRFVFNHFLNVRRESWEKDKKSISYNETSALMTQLKSDENHLWLKEADSVALQQSLRDLDVAYQNFFKHGKGYPKFKSKRNRQQSYRTQNDGKKIRVEGKRIKLPKVGLVRFEQSREFYGRILNATVTRTATGKYFVSLCVEEEIANNLRQNGGGQIGLDVGLKEFCTDNHGNTFANPKPLRRLSKKLTKAQRKLSRRKLDSHNRNRQRIILARVHEKITNIRRDFLHKLTTKLCRENQTIAVESLNVQGMMKNHKLARAIADVSWGEFFRQLQYKSILYGCDVIKVPTFYPSSQTCCTCGYKNSLTKDLSVRRWTCPVCGTAHNRDQNAAINILRKALEMKNSA

SEQ ID NO: 21765 - protein, 661 aa, unknown
  TnpB Polypeptide
MRSKDENKIFSDNIEMDIKKEPPDDFFKCVKVSLKHVLKHYEINQSKINETVIMANKIVIHTLQFMKLYLLDFYNNHNTLPKIDKEFINCSMKILCNEKATGRPPKKEIKELKEKLKLFYNTYYKPLCQNEELEYTHMNTILDYLTIDILTMYENNIKQHYIDYVERYVNVVWKQKFMTNQIRKVKKTKNDRETGIKNLNTQLRKIKNDLLNIETTEYKSKSYYHQWIQENHKLVVPNKEKFKKDNLYYDLQCNPQDYLSCMIYIMKYVEEQGITTINPFPLRNDIIPKHIRLDTTTLVHLLMTKKQGNKTDYLFNGNLKRFEDKIWSFFFRTERQCFKKNWYSFHHMIETDGVSCSILLLRKDKVGKMLIVNKIPKREQYIDELKDYSKLQDKNIVAIDPGKCDLLFCVDDDSKVANEFRYSQDRRRKETKSKKYGKILLEQKKTKIGNKTIIEWETELSKYNRKTLKMEDFKNYCKKKNEMNYQLFKFYQKELYRKLKLNGFWNRLKSEQKLINQFKKIFGKPEETIVIFGDFEQRKHMKYKEPIKGKGMRTLFKKNGYKTYLVDEFRTSCKCSKCGGGSCEKFMVRENPKPYKNNLRLVHGLISCKSCSNVWNRDCNGATNIYKIAYNSIHNMNRPSYLCRNSSGVLDDITKTKIYTA

SEQ ID NO: 21766 - protein, 407 aa, unknown
  TnpB Polypeptide
MDAQQSTTRYRAYKYRIYPTTAQAKALDFHFGAVRYVYNRYRAAREGYYQDTGETLSETDCCLDLTEHKREAGNEWLQQAYIQSLQQAIRDLDRAYRNFFAGRACYPRFKSKRSHQSIRYLFAGHGKLRIANGRIRIPKVGDVKITQHRHIEGTPKNMTVSKTKSGKFFVSIRCQKDMTPPPAVGSEVGIDLGLKAFVTLSDGRTIDPPRHLRKAERWLKRRQRRLSRKRKGSANRRKAIVLLARQHEKVANRRADFLHKLSRQLADTHGHIGVENLHVKGMLRNHSLAKSIIDAGWGEFVRQLEYKGDWYGCRITKVDRWFASSRICSDCGAVNPDLRLIDRRWTCIECGVTHDRDVNAARNILRQSTARTVGIDARGNMSRCSKTTQPGNLTASGPPVQLRFPFA

SEQ ID NO: 21767 - protein, 397 aa, unknown
  TnpB Polypeptide
VGNKLSSTQREALVRVFLEAKWLWNECIASGDPFSYKPRKNVLVKTKDDTMDEREYRVLGSQMKQSLVKTIRSNIKTLATLKKQGRKTGTVGFTSEVKSLGLPQPETTYRIRGQKARIQNIPGWVRVRGVGQLEGWEQAKAVLTSEADGWHLHVTCYMDKEEHRKRREAKRLAPVKNTIIGLDMGVKTAITCSDGTEYDVMVEETDRLKREQRKLNRKKKGSNNRQRNRMRIRRAYTKQQNRLNDAANKTAAELLRNETIFMQDEQVKAWHRRYGRKIQHSILGRVKNRLTRHAGQVVVLSKWEPTTQLCPVCGTKTRIPLERRIYKCADCGYTAPRDVKAAQTMVWLGQSKYSDKIPLERGEYKPVENTSESYVDNLRMFSMRSAKQETVTASASR

SEQ ID NO: 21768 - protein, 342 aa, unknown
  TnpB Polypeptide
VRAYSVPFEDERIKNLITWYKVMLQRAIDVIWENITWKYDFKKFRKRKHVKFRVPVLPKSKEFKKRLRDVLMRENPYAAHWVDAVIRTAYSIMNSWRKRYVKGKARKKKPIVGRRFARCKITLMKVDYERKVIRITLRPREHIEVCYGNTWFHKRVEGWRVGEVVLKDDRIIIPFKRERVHAIEHEIAWDCNELTIDGFSPTIGFVRVDLKPLITERIVYQTKRSRIQALMCKKTKRGRELWQKYHRKERNVCRQIERAIARSIVETFPNALHIFEELNKEKMIRKKKDGEESKPKFLRKRVARVSWANIRREVEQRAVVQKVDPYLTSKTCSRYMVGGISL

SEQ ID NO: 21769 - protein, 245 aa, Bacillus sp.
LPKLGLVRFAKSREVKGRIVNATVRRNPSGRYFVSLLVETEVQELPKTHSYIGMDVGLKDFAILSDGTTYKNPKFFRSLEEKLAKAQRVLSRRMKGSSRWNKQRVKVARIHEYMTNARKDYLDKISTEIIKNHDVIGIEDLQVSNMLKNHKLAKAISEVSWSQFRTMLEYKAKWYGKQIIVVSKTFASSQLCSCYGYQNKDVKNLNLRKWDCPSCCTHHDRDINASINLKNEAIRLLTARTAEIA

SEQ ID NO: 21770 - protein, 407 aa, Streptomyces sp.
MQLRYSFRLYPDTGQQTALAKAFGCARVVFNDAVRAREDARKAGQRFPTAGELSRRLITEAKRTGERAWLGEVSAVVLQQSLRDAEAAYRNFFTSLKGARKGPKLGAPRFKSRKDARQSVRFTANARWSITGSGRLNLPKIGAVKVKWSRTLPATPTSVTVVMDAAGRYVASFVIDTDSVADQARMPETDRTIGIDLGLTHFAVLSDGTKIDSPRFLRRAEKKLKKAQQELSRKQKGSNNRAKARLKVARAHAEVTDARREFHHQLSTKLISENQGIAVEDLSVKGLARTKLAKSVHDPGWASFISMLEYKAERYGRTLVKIGRFTPTSQTCSTCGTVDGPKPLHVREWTCTACGTVHDRDINAAINVKTAAGLAASACGAPVRPGTIPAQREETGSHGLPTEPRAA

SEQ ID NO: 21771 - protein, 205 aa, Salmonella sp.
TDGITVYQPVNSFKASQRKLATLQRQLSRKVKFSSNWQKQKRKVQRLHSHIANIRRDYLHKVTSEISKNHAMIVIEDLKVSNMSKSAKGTAEQHGRNVKAKSGLNRSILDQGWYEMRRQLEYKQLWRGGQVLAVPPAYTSQRCACCGHTAKENRLSQSKFVCQACGYTANADVNGARNILAAGHVVLACGGMVQSGRPSETGTRR

SEQ ID NO: 21772 - protein, 407 aa, unknown
  TnpB Polypeptide
VDRRRARKLTKDKRKNQTCKVFECKIDRSHLSEAVQGHLSQLFKEAKWFYNYCLELNAMDEIDTTLRTIPVKVEDHYEDRNLSVLQGQMRQSLRTRLWGSLNALHALKEKGFKVGKLKFKSQVNSIPLVQYNKTFFIRGNRVRIQGLKKWLRVEGLDQLPKDADIACATLVKKGIDYYINFTTYTAKVKRVVPETSVGIDFGCDTQLTFSNGIKVKFQVPPTKRLRRLDRKIARNKNKPRSKMKEQDYRKRQKEYERLTNRRKDIRHKIVSAVTNNYKYVCFQDESIHAWHAGKYGKKIQFSGIGGIISDLKHKSHTPLEVEKFFPSTQLCPKCGARKKLSLSERTYECECGFKMDRDVKSAVCIEAEGLRQIPVDDRDFKEQEISSSTFFDLLTHIGGIEVSKVQS

SEQ ID NO: 21773 - protein, 399 aa, Truepera sp.
MLLRKVYRFQMRPTKAQEELLCQMAGAKRFVFNWALARRRDFYEANKEGISAKQLSSELTDLKKQPETGWLKGVDSQLLQQALKDVDRSFKNFFEKRSRFPRFKSRKREMPSFRIPQRVKVEDGKVYVPKIGWVRIRQSQDIDCKTKSATFKRDATGKWYVTLTAEFEMPDVPLPPAKPENVVGIDLGLKDFAVLSSGEREAPPKHYRAAEKKLKRAQRALSRKQKGSKNRDRARQQLARIHQKVRNKRQDFLHKMTTSLVRGYEGICIEDLSLKGMARTKLAKSVSDAALGEFRRQLEYKTVWHRKHLAVIDRFFPSSKLHMECGAINDALTLADRVWTCACGAVIDRDLNAAHNIKVEGLKQLVAAGHAETLNACGAQVRPTLISRHSAVKQESHVL

SEQ ID NO: 21774 - protein, 371 aa, Truepera sp.
MLKAFKYRLYPTQAQAERMDWTLARCCELYNAALEERRTAYRKRGVTVSYHAQAVSLPEVKEGRPEYKDVHSQVLQDTLRRLDKAFAAFFRRVKRGEKPGYPRFKSARRFDSFCYPQYKGTIGGHVYLPKIGNVRVKLHRPLEGAVKTLTVKREVDEWYAVIVCEVETRPQGPTGSEVGIDLGLNHFLITSDGEFVDAPRYFRKAQKKLRRAQRSLARKKRGGNRGNRRAKQRERVAKLHRKVKRQRLDFHHKTARKLVRKHDSIAHEALNVKGLGRTRLAKSVYDAGWSTFLAILASKAEEAEKRVVAVDPKYTSQTCPDCGRVAKKLLSERWHSCECGCELQRDVAAARVILGRTFPSGANAAVNAYVA

SEQ ID NO: 21775 - protein, 377 aa, Clostridium sp.
MILAKKVRLYPTEVQEQKLWQSVGTARFIYNWTLARQEENYKNGSKFISDNDLRKEITQIKKTELTWLNEVSNNVAKQAVKDACNSYKRFFKGVSDKPRFKSRKKSKPSFYNDNYKLKVKDNAVNIEKVGWVNIKSYSIPLNTTYSNPRISFDGKYWYISVGIERELPKVKLTGENIGIDVGVKDLAICSNGMTFKNINKTKEIKRLKKVLKRKQRKVSRKYEMNKIESEVKNRCQFKKTNNIIKLEKQIRLLHRKLTNIRSNHIHQATNKIVKAKPSRVVMETLNIKNMIKNRHLSKAIVEQCLYDFKVKMKYKCEFYGIEFVEADKWYPSSKTCSKCGTIKKDLKLKDRIYQCSCGLKIDRDFNASINLSRYKLA

SEQ ID NO: 21776 - protein, 387 aa, Methanosarcina sp.
  misc_feature (379)..(385): Xaa can be any naturally occurring amino acid
MYPKLSITVKNILVRMMKAYRFRLYPTVEQSNQLDQHIGSCRFVYNWALDQKIKTYEQTKKSISHFDLDKRLPELKKEKPFLKDVNAQSLQGMTKHVDSAFTRFFREKKGFPKFKSKKNPVQAFPVPQHYSVNFETGTVKLPKIGEIKAVLHRNFVGELKKATVSKTCTGKYFISILVENNEELPVKQKFSEETIVGIDVGIKDFAILSTGEKIKNPKYLKNSLQRLKLLQKRVSRKQKGSKNRAKARQRLAILHEKITNQRNDFQNKLSFKLVSENQAIALETLNVKGMQRNHHLAQAIGDSAWSCFVTKLEYKAEWLGKTILRIGQFEPSSKLCSVCGYHNSGLTLKDRGWTCPDCKTKHDRDINAAINIKKFALIXXXXXXXMN

SEQ ID NO: 21777 - protein, 367 aa, unknown
  TnpB Polypeptide
LPPHIKKLSPPGYWKDRETGEKKIHILIRNDRYHVEPISEDEVYIVLEDFDLRIRYAGRIRWEGKQGRLEIIYVNGRWFALVPIEVCVDPPKSNPKGYVKPNYKDKKGRIVNPRSIKQRDPIGDKEAFIDMGLNNLFAAVISDGSALLIKGGSIKSEYYWWKGEIATYQSIRDVLRRLRVSTWIYYHEKYLDAMYKKNERLRHLYITAIRFLADELHRRGVRKLYIGYPIMLSQNNGNEYNTNIWWFRKIVLWIVDVFREYGIEVEIVPEDYTSKECSICGIRHKNGRIYRGLYICRKTGKKINADINAALNIARRLGYRIRVSRKIESYLVTHSGVKPLNPLQRANTRDPSIETPPFRARRVSYRL

SEQ ID NO: 21778 - protein, 618 aa, unknown
  TnpB Polypeptide
MRRKKEPDPNILLKTIKSKFSVDNFHSELLDEHLFQTKNVYNSYIFYANIYHKYKYLLIEQYDQKKEFYLYCDDFIKHYLFNLDDMKIINQDITDICKDILENNIVTTKNCLDFYNLILNNIYNYDTKDLITKEIVYRNISNVYYKNFYMLLKEKKMNGKKSNFQFSIANDDLIDDVNNKNHINIFTCSKEDNNVDTSDSTIIKRITREHLNTDTKALHCDTRTIAFDKATSSFGSYWTLKSKGINANKPNYLGKKDKFILSFNSDRNITVNNNILTLRLGLNSNDILTNKDYIIVKKGICINKIYILKNENKRKDKNLNYYFMYNNEQYYIKKDNKNIHNYEFLDIKIIKKLENKIIRQVEIKKNQLVKNNYVICYTYECHKQEINLEEIKPVSIDLGMKYLFSIYDYDKTPTLLDGKHINYINYHYNDLIDKYKSILKKTNNKNTSYHLKCLNKNRSNKLNSCMNNIVSWFMERYDDCNRLIVGYNKNWKTKVNMGKTNNRKFYEIPYRTLLNKLKSSWEKKGKVYVEINESYTSKCDSLSLENIGRNKEYLGNRNKRGLFKSNTGKELHADINAAINIMRKWYDKVGEMFELKNIKKVNNCFKQSIYKLSSLQLS

SEQ ID NO: 21779 - protein, 327 aa, unknown
  TnpB Polypeptide
MLPHRDWSCSKYYGDLVPCVVSKSLIAKYQQNSKCCRIRNIVIPVCGDKGKQIKLVEGGIRVPALFKKAVLPVNWPRSIVGHVRSIELFRREGEWFASICYHAAKDPPVACEGVIGVDRNSVGNIAVFADPQIGTVRKLGICPARTKFVFRRRRKNLQRAGKTRLLKKLHRKQRRRMSYENHRVTRAVVDYAATHRRAVVMEHLEGVTAKDSKIRGYSEKNQWAFAQFGSMLRYKCALRGIPLIEVDPAFTSQTCSRCGSIHRPDGKRFECLTCGHNDHRDANSGFAIAQRGLKILSDGSSSGLRVSELRPIGGPRAETIGASYARK

SEQ ID NO: 21780 - protein, 175 aa, Methanomicrobiales sp.
MEARERMIPHSGDDWIGVDLNTTGHVAVAAHPASGGVVMLGDLSGSTGDRERASQNQKIAKEIVKMARQLWCGIKLEDLTGAGFAGQKKRNAPLAFSRREGSFYHLQKLIEKRAEGAGVRLVYVDPASTSRCCSRCGRPGIRKGKRFSCPACGHAGDADANAAFNIASAPARRAS

SEQ ID NO: 21781 - protein, 418 aa, Azohydromonas sp.
MQCRKATYSLYPTPKQEAALLGLLRSHQQLYNAALEERIDCWRKTGKSLSYAAQCRSLTVLRRECPEWAEAANCSSQQMTLRRLDKAFAAFFRRVKSGQAPGFPRFKSLARFPGFSFKAHGDGWRFTPGIDWRHGTLKLSGIGQLRARGQARQGGEVRASDVLHRDGRWYLSLTLDIGMPQRERTGDAAMAFDWGVETFLTGVDHAGEVIHMDNPRWWQSEKDYITGLQQVVSRKRNKRSNRRRKAVQRLAAAHGKTARRRLDWAHKETAKLASLFALVATEELHIANMTRSAAGTVDEPGKNVAQKAGLNREILDTAPALFTSLFRQKVLETAGEWVEAPTRQLKPSQRCPACWALAKKSLSDRTHECSRCGHTEPRDMAAARVVLNWALGLHTGQELAETGINARETLSSAPHRLG

SEQ ID NO: 21782 - protein, 231 aa, Nostoc sp.
VCLLAKNLFNYANYLIRQKFINIGEYINYKTIQKICQPTSDGKPLKNINAYYNKKKAFFQSRLQGQQTTSTRIQRLTHKRNCKVIDYLHQASRIIVDYLAANRIGTLVIGKNDLWKQSINLGDKTNQNFVYIPHARFIEMLSYKCQLVGIDVITTSENYTSKCSFIDLEPIDKHTVYLGKRVKRGLFRAKNGFLINADCNASGNIIRKVVPNGFSEGIQGVVVPPSRITPG

SEQ ID NO: 21783 - protein, 392 aa, unknown
  TnpB Polypeptide
MAQCAGYARFVYNYGLNMVNGTSCLTKVNKRGKEVNFSYSQRINEAKKVFTNYVKSQPEYAWTNRYSSRIYQKAFQHLGEAFKRYKEGTSKYPKFKRKKGRQSFTVYDGNGKVAISAGKKIKIPTLGTFRLFEPVPYTTASQTFTISRTGEKWFVSFSIEAEKLPVHPLLDERSQEAFGIDVGVKQFGTIASSKENYTISLPDSIKKEQLKLAKFQWRNRNKQLGGKGKLPSKNAIKYYKKLAKHHTRIAKIRSDFLEKTTTDLANNIKHVCLEDLNVKGMMQNGKLAASIARQGFYEFRQRLTTKIVASGGSIVLADQWFPSSKTCHNCGRVHQELTLSDRTFNCPHCGITIDRDLNAAIVLSQYGEVNQKARVGCTRIYACELVGADSPG

SEQ ID NO: 21784 - protein, 486 aa, Catellatospora sp.
VREQPGVKRFEPRVGFVVQAYRFALDPNAGQQAALRSHCGAARAAYNWAVSWITACWWQRRAEQSYGVAEADLTPWRSWSLPALRKAFNEIKHTDPRFAGWWADNSKESYSTGLANAAAAFDNYTTSKQGVRKGRPVGMPRRKSKHRARLSCRFTTGTMRVEPDRRHVTLPRLGTIRTHENTRKLARRLDAGTARILSATVSFARGRWFVSLQVEVMRQMRSPARPDVVVGVDLGVRHLAVLADSTGQITYEPNPAHLDAALSRLRRLSRRVSRRQGPDRRTGRTPSRRWVKADAERNRVHHRVADLRTDGLHKLTTTIRAEHGTVVVEDLNVAGMLRNRRLARRIADAGFGQIRRQLTYKGEWAGGVTVDADRWFPSSKTCSDCGAVKAKLPLHVRVFTCDQCPLVMDRDANAARNLAALAAAVLTGTGVAGDQDAQASNPRGADRKTRTTTRPRTRLGGQAGGATPHQRTETRDLRQTEAVTLR

SEQ ID NO: 21785 - protein, 383 aa, unknown
  TnpB Polypeptide
LLKSFKTEINPTTEQKVKINKTIDTCRYVYNFYLGHNKALHDKGEKFMTGKNFSVWLNNEYIPNNPDKVWIKEVSSKAVKKSIENGCTAFTRFFKHQSAFPNFKKKGKSDVKMYFVKNNPKDCTCERHRLNIPTLGWVRIKEKDYIPTTKDGYKIKSGTVSINADRYYVSVLVEIPDAKIANSGNDGIGIDLGLKELAILSNGKSYKNINKSARLKKLEKQLCREQRCLSRKYENLQKGESTRKNIQKQKLKVQKLHHKIDNIRTDYINKTIAEIVKTKPSYITIEDLNVLGMMKNRHLSKAVASQKFCEFRTKLKAKCDENSIELRIVDRYYPSSKMCHCCGNIKKDLKLSDRIYRCLCGYIEDRDFNAALNLRDALTYEIA

SEQ ID NO: 21786 - protein, 386 aa, unknown
  TnpB Polypeptide
MADQIVTPQVRSFKFRLFTTGAQETALTDMLGAFCDLYNACLQQRIEAYQRRGINLRYGNQAAELKAIRVADERLAGYSFSAEQQVLRRLDRAFSAFFGRVKRGGKAGLPRFRAKSMFDSADFRVGDGLTIRKSKRLGMVGIPGEIKVRWHRDLPPGAKVGAAIISRSCGKWYVYFQITLADAEPIERPFTPVGIDLGLTSLVALSNGETVPTPQHTRAAAKRLRRLQRAVSRCKRGSKRLTKAKLRVARHSAKTANQRRDTSHKLSRSLVDRFSHLAMEDLNIKGLAAGMLAKSVHNAAWNSLVQKIAYKAENAGGVLKLVSPRGTSQTCPECGTIRRKTLADRRHTCDCGYHADRDVAAARIVLMRANFGPGTSLQAPSQRIAA

SEQ ID NO: 21787 - protein, 357 aa, unknown
  TnpB Polypeptide
MHLTMQLKLLPLPAQADAMLRTMERFNAACDALAEVAFANRCANKFELQKLAYHGIRRDFGLAAQMTVRAIAKVVEAYKRDKDIQPTFRPHGAIVYDQRILSWKGADRVSILTNDGRQIMPWVCGAYQTATLERARGQADLIYRDGMFFLYVTVDVGDVPMGDPAEYLGVDLGLRNIAADSDGETFCGAHNASLRRRHARLRRKLQRKGTKSARRLLKARRAKEAGFARNVNHRISKIIVRKAKDTGRGIAVEDLKGIRDRITVRKPQRRAHSSWSFAQLRSFLTYKAALAGVPLIAVDPRYTSQTCPACGCIDRKNRPTRDRFVCISCAHAGASDTTAAGNIARLGERNAAERRAA

SEQ ID NO: 21788 - protein, 395 aa, unknown
  TnpB Polypeptide
MLSATRIRLYPTDEQAHSLAVQFGCARWAWNNALALTGDLYRTTGKGLNYHSMAIRLPKLKQEFEWLGDADSQALQASLQNLSRAFENFFARRGRYPRFKSKHGRQSIQYPQRVKIEGASIYLPKVGWVKCVVHREIVGKFKTVTVSRNACGQFHAAILTDNGEPLPAVSTDGKAIGIDVGLTHLAITSDGSKFENPRHLRKAEKNLKRKQRTLSRKKKGSNRRNKARQLVARTHERVACARRDHLHKLSHRLVSENQVIVVEDLNVKGIMANHCLAKATADAGWGMLMGFIEYKAARAGKAFIKCSRWYPSSKACSECGSICDKMPLDVRTWTCAHCDAHHDRDINAAKNIRAEGLRILAAGTAVAASGGNVSPKPRRNPRSKAVPVEAGSSVL

SEQ ID NO: 21789 - protein, 314 aa, unknown
  TnpB Polypeptide
LNIRASCINLKRTVNTDPCYCLRGGRGMLLSHRTSVKIRPEYSNIIGHMCYAASKLWNICNYERHHYKELGLEKYPDWYYQKKTHKGNLWYKQLPSQTAQETCKQLDKAWKSFYVLKKTGGIKDPNPPRFKQGNIPVTYMQMGIRHEKGSDQLRLSLPKDLKSYMEETYGIHEKFLYLENKIFRNMDHIKQLRIYPPENGKCDLIVIYEIEEPEQISQNGHYLSIDLGLHNLMTCYDSENGRTFILGRQYLSLERYFHKEIARVQSVGASVTSGVAVASASSVTSGVSVASASSVTPGVSVTSAVSSVVSSAAV

SEQ ID NO: 21790 - protein, 458 aa, unknown
  TnpB Polypeptide
MERRIPMKLYSTYRCKIKHYNHILKETIVRYRSAVDFCIQVCLEHWEQIKQIKTPHQKQQYVERLIHSTQNNAAIYDFDVVFYKFPSYLRRTGITEAIGKVSSYYSNLENWKKTEHSARGNKPGLPKAGFIYPCMYRDNMYQKTDGCTARIKVWVNHTWDWIDVTLRKSDVDYINRYCRNRKSCAPTLMKRGKQWYLDFPFEEQVTLSDTKVQEQRILAVDLGLNNSCVCSVMQTDGTILGRKFLKLSREYDCLQHKIDHIKRAQCHGSRKVPALWRFAKYVNEDITAKTAAFILDIAVLYHVDVIVFEYLDLNGKKRGSKKQKLHLWKARKVQSMVTDKAHRHGMRISHICAWNTSRLAFDGSGKVLRGKESTKISDQNYSMCEFPSGKLYHCDLNASYNIGARYFIRELLKSVSVTEQQHILAKVPQCAKRSTCTLSTLISLNAVLSSLMDLSYGV

SEQ ID NO: 21791 - protein, 465 aa, unknown
  TnpB Polypeptide
MYKVSRIVVKKTEYPEYHSYFTTLGLLATNLYNASLFRMRQNFTVRGKEHPSDLELQVQKEIQQTAAACHLGYPKRCMTYRFLEKLMRVTKNPDFFSDLPKQLAQNTVKQAYRDFKNWIAASNDQKKHPEKYLGVPKIPHYKKKGAVSGLCFTNQDCVIYQKGQKQYLKFPYFPYAYFPLGCVSGALKEVRVKPYYGDFLIVCTFETADVEELPDSQKACGIDLGVDNIVALVSNTRDCVLYKGGALKAKNQWYNKQLAYYRSIRMAGHEPKDAKRLGLLDTKRIRQLHRDRNQFFHDALHKIASDVIHFCLTRNITTIVIGKTVNWKQKCNIGHRNNQTFVQMPLATLSYFIKYKAEANGLVVVEQEESYTSKASFVDGDMIPVYGEGTDTPVFSGKRVQRGLYRTMDGTLINADLNGAANILRKAIPSSFEGTADFSFLNHILVRKYHQLNKRIPEMDSSLRE

SEQ ID NO: 21792 - protein, 408 aa, unknown
  TnpB Polypeptide
MFVSLQFKLELKRKDKQKLIKLMRKQSSAIRMAYNMLKELEKEKAKNPHSQIYHRLRQLFPDLPTKYIDSAIYKAKQYPKDKIVVFGGKRLFEKLCKKHLTGKARERLKKQWRELRQGTLIAIGSKHKTAQGNLLLRLMELDGKLHLRITKGNREFIYARVLRESSNSKDKGNLKKLKKGTRGDGKAELRKRLHQWNAEKFLQKLKRVAMLKGVEVVEVNPAYTSVIGMLKYAPQLNIDKDVAGAYVIGRRALGFKEDMPKNYEKLLKDKAYLEFSLKRYEEREKELRELLEEETNQYKRNALESELKNVEDVKKLLVNLIQSLQSESSSCKGANGRNSKQGRVAKITLQSAWQVLKVALLFPILGKVLPRDLSPLKPVLVEGVWDRVRRSNGLVPLETGGTVPIRDF

SEQ ID NO: 21793 - protein, 247 aa, unknown
  TnpB Polypeptide
VKAVGVDLGITRLATLSDGRFLENPKPLERSLERIRLLQRTLSRKRFLSKNWIKTKIRLAKEHEHIKDFRRDLFFKLGALLAKEYDLLVLEDLNIKGLIQSGTRKRRLRLYDSLFSELRAVLEWQFAKLGKTVLAVSSYNSSRECFLCGGINKGLTLEDRVFHCPYCGFTLDRDLNAYLVLLKTSGWVPPTVACFAPPTTFSTLSWVEEAWWSDDSGSSAIYGGVAHFEYIMDEAFTPSGNLDDLKK

SEQ ID NO: 21794 - protein, 409 aa, unknown
  TnpB Polypeptide
VRVVEQHIIEKHDPRYAAIDAAAFAAKNLYNQATYHIRQAYIHEGQYLPYAELFHRLKHLECYQALPRKVSNSILIQIDKTWKAFRAGLKEWDEHPEKFRGKPKIPGYKHKEHGRYLLIYDMQALGKRAYKKTGMIVPSGLSIQIKTKVAWEAIDQVRIVPRRDFYVVEVVYQKAEQQAAVDPKLVAALDPGVNTLAALTSTKPGFIPRLVSGKPIKSRNQHYNKHRAHHQKHLAKQQRFTSRKLDQITTKRNRRINAYLHTASRRIIALLVSEGIGTLCIGKNPLWKQEVEMGKKNNQQFVQIPHARFIEMLQYKGALVGIQVITHEESYTSKASFLDLDDIPTYDPKRTEPPTFSGKRIARSWYRAGNGQVIHADVNGSYNIGRKVAPTAFGRGVAGAAVRPRRLAV

SEQ ID NO: 21795 - protein, 480 aa, Mycobacterium sp.
MKVTRIAYSRDLNNGKYKQLVQQAKLLGRVRSLVWQQYGSVSGVGVRDREIRDTWMADGTAASFGVLANSWKETLRDAVGDIRARRESSKVKVRSAVYKHCLDPGERRRYYTLLKADQWAEDTYLSRLMRQHYTRGRNHTHNQIVVRADQYRTFTRTDGGNVWLAVPGLVRRQMVRIPLDTTVAPTGTLRIILRNNRVEVHYQIDSGSMRSSLRPSGDRVIGVDKGYTEAFTDADGDHHGDGLGERLAAESDHRRIKNERRAKIRAIAEKAFAAGDLAKSARIVNNNLGLTKRTRRNERFEVTMRSLVFSAAHAVVNKAREVVAEDLTRPIPKQKKRGKTINRRLSAWIKGVEAEALANVSERRGSALTLVNAAYTSQVAPCCDVLAHRHGDRLHCTRCGVVWQADHAAAINIERRKSDPDIGLYTPHLRVKQILLERDRRRLSTAEPGLQPSQRRRANNHPFDGHQRTNSDQGIGSRIR

SEQ ID NO: 21796 - protein, 466 aa, unknown
  TnpB Polypeptide
MFGEVIPQASRNIIESYYRLKNGKYRELRNIYPNIPSHYIHGLCRDAVERVSPLRRNKARQYSREIFDELVKYLNLGKRDLRGRRLVRYLWRRSWEIARHQVDLEMKEGILAPRINSVSLWLVDDHVWKPIDATKININGVENILFTSIAINTHRGWVYLDLEPSKEFYKLLARGFKPTSHAKIKLDRRNRRVIFYLSLEKEIEIYKPEDIVKPVDVNENSVATLYGAFAVILETDLTKTTLGYSYRKESIQRRNGSDSRETRKAMKKLKEGKKKKDYRWKTANLIVRDALRTRGIIVVERISGDDIRVMIARYKNKQLRHRIYQSALKGELNAIIDKAREYGVPVLMVDPRNTSKICPIHNAPIEYGEARIGICSKGGEKWHREVVALINLYFKALKTLYKGYAQKGFGVLGIALDGGPVLLDSTATSEPIEIPRSLLGGGNPRCHRAKKPYGSRDKATQTNEHQ

SEQ ID NO: 21797 - protein, 593 aa, unknown
  TnpB Polypeptide
MRASRLVQPLTYAVRLPDEAQADALRLLDASRQVVNRALELLWPHLDEFGERMAGPAWKQVGKYMGSPDFHGDRQWRCESEVVGRLLRAQAERKKAFELVVPILSDGFIRPQTEKRPAGKNRSAIKAAITALQKRLEDDDTSFVMLQNVIEQSCNFFFQQDRWPASYEDMQPIPLLKVGMLTYAGDDGREKGQAYRMSLDVDAGVAGFRFRYPDEQGVWRWRKVETVIPLPECLQTRLRDGGELLAPTLREERRADGERFAVLDFIVEVKNVEMVAWQDVERVLGVDWGTHTLLTATAIDEQGNQMGRPFFVNTGGFDGKQARTRRQIDELKKKVAQNEQERDGLPTDHPKRAWYQERLALYRREIDRCWLKYERRNRALAHLASTVLLLLCAVHGCSLLSMESLKTLKSTGRGKGVRGRWRNYRNNSQIRGEIWKLVRYKCRLIGLRFHTECPRGTSHACPRCGAPALTYRSPQDRTEAVKWGRWLACPTCSYQADRDYAASVNIARLGVAYLLQMKATGKGRACSIFDPRIKPVAYTTSGAVLLLPPLGHNTHPTPSGKLCFYPGWRFSVFLQSSQPKAVFPQLCGVRRIA

SEQ ID NO: 21798 - protein, 425 aa, unknown
  TnpB Polypeptide
MNGQSLNSSALKKPWGNSLQREVQICVVGKVFRPNKSKILALNKTFSEYFKLVKWYLSYNYKSKKFLHEKCYEKAKELFNLNTALIQTARDKAVEILKSFEENRKESSILKLKRISIRFDKRCYSFSKTDNALTPYWLTLSLNRKERISLPIVFGGKQKQRIEEALKGEWQFATVEMVKRDGEWYAHFVLKKFVEVPDEPETVIAIDRGEHNLAVAVAISKKNPNKPMKGNFWKCAEIKRTRGKYAHIRRKMQRKKLMKDVKKLKNKERRIVEQQLHTIANEIIAYAKQFPKPVIVMENLNGIRDNFKKSKKLNKRFHSLPFRKLQTYIEYRALLEGIEVRYLPKKEVRNTSKTCHRCGHVARISVGRIYKCPTCGMEYDRDLNACINIARRLMRSAGWGSCESPEPADEVGGVKPQLNAGSSRL

SEQ ID NO: 21799 - protein, 413 aa, Shigella sp.
VKRLQAFKFQLRPGGQQEREMRRFAGACRFVFNRALARQNENHEAGNKYIPYGKMASWLVEWKNATETQWLKDAPSQPLQQSLKDLERAYKNFFQNRAAFPRFKKRGQNDVFRYPQGVKLDQENSRIFLPKLGWMRYRNSRQVTGVVKNVTVSQSCGKWYISIQTESEVSTPVHPSASMVGLDAGVAKLATLSDGTVFEPVNSFQKNQKKLARLQRQLSRKVKFSNNWQKQKRKIQRLHSCIANIRRDYLHKIANIRRDYLHKVTTTVSKNHAMIVIEDLKVSNMSKSAAGTVSQPGRNVRAKSGLNRSILDQGWYEMRRQLEYKQLWRGGQVLAVPPAYTSQRCACCGHTAKENRLSQSKFRCQVCGYTVNADVNGARNILAAGHAVLACGEMVQSGRPLKQEPTEMIQATA

SEQ ID NO: 21800 - protein, 406 aa, Ignisphaera sp.
MLVSYSVKGEEPVVIEALKVRALPEGSYDRLLEFLRLYRDVVQMVVDRVWSINDKLSKKKLHKLFYSNLVSMGFRAHHAKEVYVYAESLVESARGNGGRKPILRKLSARIDRYDYKLDLDNMVLTLKLHNSYEARLKLVSSKERVEKFRGWGNYEVVVKYDGSGFWVSIYFRRAVKAVKPRTVMSIDLNFDNVTLAVLTLNGRLLKLKRFRTPHRKVLSHRIWVERIQKRYPSSWRFIKGVRKAIDRHGERIRDIPWDYSHKIGDLVAELALKYHSVIILEDLDELRENSKKSREFNKKLGLWFYRRIQFCIEYEARERNLEVVKINPRGTSSKCPTCGGKLDEYEHRVLRCEKCGFVGDRDVIAVMNIYKKYVSKYSRCGVPGVALNAPKPDESPSGMRGTKMRL

SEQ ID NO: 21801 - protein, 408 aa, Ignisphaera sp.
MVLREIESAYREMLVEMVSYAVEHKASQSTLHKVFYKRFRERYPRLPTRVIKGAYRDAVRRAKSFRERMKRGKVYKDKPEVRRVTITYSDSQDWRLEDGVIKLRTHMGWVELRYRNHKQLCRYLYSGWRLANELRFKILGKKVVMYLSFTREFEVGYDLRNVVAVDVNENNATVALFKDGALADVYRVETSLGGIAIAYSERRKRITQGKSTKSREVKKRLKNLREKKRKLDVLRKVTKFIETLAIENRAVVVVGNINEKAKEKMERNASNKLRHRIHQWSVKKLIELLDEKPIHVVKVSERGTSSRDPFTGLRINEYKPLVIRSAVKGLKRVKVMKIVLRVAKIGGRALERDVVGAINIGLKYLNTDGSPVALGSTGAHGVWMKLVIPHRGPAPQTRLKLSTAIHKY

SEQ ID NO: 21802 - protein, 255 aa, unknown
  TnpB Polypeptide
LREVSLAYRDALNYVSQVAFENNRTSSANKLQKLAYYEIRDEFQLPAQMSCNVCRQVGATYRTLWTKIKQNSQHREQGKTQKRYKGLDRPPKFVSRTCNLNYGRDFSFVKEGVSVVTLRGRIKVPYSGYQKHLDLIKSGQAKAKGAKIYYTPSNKNYYLLVSLEIDKPNIQPTDIKRISGVDVGKRYLAVETDTQNRVSFYNGKSTVHQAERYQSRRKSLQRKGTRSAKRRFKELSGRERRFRESSQPPGFQQNC

SEQ ID NO: 21803 - protein, 399 aa, unknown
  TnpB Polypeptide
MRLTFKYPVYPTKTQEEILLLWFDHLCELQNSARGNRKHAHQTEGRFVTQFEQQALLTVARAKYDDFREVPQDFQVSILKRVDKAFDAFRRRCREGAEKKGYPRYKTRVRSLTWCLRKHKLKTGERVRQNPIIETGFRHNRLKVPKLGEVKIRMHRPLQGDPKEVTIVKKASGWYAHISCEIPDTPKVEPTDAVAVDVGTTHYLTTSEGEKEDNPRWYRQAEGLLRKHSKALSRKKKGSHRRKKQQHTLALHHERTTNKRKDFIGKLVYKLYHHQENNVLVAEDLSVSNIVKNKHLSKSISDASWATFFEWCASIAERDGLHFHQVDPKNTSQTCSTCGEKSPKKLSLAIRTFDCSFCGTSLDRDHNAAINVLLRAACAHRGERWVTDLCETRNLSVDR

SEQ ID NO: 21804 - protein, 394 aa, Nonomuraea sp.
MRRSFKFLLRPTARQVAALAACLEDHRQLYNAALEHRRTAYAKAGVSVRYGEQSAELKHIRGDDPDGQGRWSFSSQQATLRRLDKAFRAFFERVKTGRTPGYPRFKGRGRFDSVEWPKDGDGCRWDSQPDHPTATYVRLQGIGHVRVHQHRPVQGQVKTISVNREGSRWYVTLSCDEVPAAPLPATAAVAGIDLGVASLVTTSDGAQVANPRHLAATADRLGDAQRDLARKKRGSQRRRKQVARVAALHAKVRRQRLDGAHKAALALVRAYDVIAHEDLRITNMTRSASGTVEQPGRNVAQKSGLNRSILDAGWGVFLTILSHKAESAGRKLIAVNPAHTSRTCARCGHCAKDNRLTQAEFACTACGHAAHADVNAAINILRAGLALRQAAQAA

SEQ ID NO: 21805 - protein, 423 aa, Nonomuraea sp.
VKLRYNYRLYPDAPQQGALARLFGCVRAVWNDGLARRKAAWKSDRKRIGGTELQKLCITAAKRTPERDWLGQVSPVPLQQSLRDLDVAYTNFFASVSGKRKGPKVGLPVFKSRRDHRQSARFTRTAFRLRTGSPSGGMLYLAKIGEIEVRWSRELPTAPSSVTVVKDAAGRYFASFVVDVPDDGKILPRCDAETGVDLGLTHYAVTSNGEKIANPKWLRRRERTLKKLQRALARKKKGSANRTKARIKVARQHAKVSDARRDFLHQTSTKIVRENQAVAVEGLAVRGLARGRLAKSVNDASWGTFLRLLEGKAARYGRTFITIDRWYPSSQLCPCCGHRIGKPGLDVRAWDCLSCGEHHDRDIAAALNILAEGIRLNDLNDVRSVHDVAAGLADTRNDCEGQVRPGKAIPTLAPPETSTAHAA

SEQ ID NO: 21806 - protein, 690 aa, Nonomuraea sp.
MLMGEVVSTASCRAFRAVLEASGEMLGERTLAERVSWLAAVIRQVAAGVVAGRWNRADLDRLDAGVGLDGRALPAKGWMAVRRLGWGAATPEGVYISDRVRRCAEEEAARALRLALHRRAVLAAITATWPADPGRRTDADWSAVRAALNTAVGGGVSTALIRNRTRQFRTYLDEHGLSPAGQNGQASVVDVVEVEGPPVMAAQVLLAAADRQLITLERASGTGARLRVQLPLCARPATRRDWAWHILPVPLPPQVPADASLRSPTLRVVDGQVRVDLPFTMAVPYAPATGHTVAIGFDWGINTLLVGTVGRLHDGRVEGDGRPLIYDTTTISAKLHRLRGHREALAAKRDHYATLQAGLTPSDAARHPARDAARYREVAALHERADREHARVCARIRHLNNALSWSAARWAVDQATALGASVIYLEDLATLEARGHRRGNAALSGQVRGRVVHAIRHLAAKTGLAVVTVPARGTSKYCPRCGTGTSPLHHTPAPDRLTQRGWKWAHCPHCGLSCDRDQAAAERIVSRGLLAQHHTHTDRATGTRTIRTIVEGNLARARRPRKPTRAARRARHTRTDLHPRPQTRQDRTKTGPTPKRPTRQRPTPERPAELSTTKTVSQVPDRRLVPAPTLAVGQRPAGQAPQANGPTAVRTGLVRDSHQRTGFHHVKATPVLALAEYGSGRHQATPARNA

SEQ ID NO: 21807 - protein, 507 aa, unknown
  TnpB Polypeptide
MQSKTVVSRTYPRVPYAVFSKTGEPLDLGEVLADIRKDAELVAKYALLEMTEQNLALVTYFDGIKPAEAGRRMGLFLPAEVKKRLRSGSSRLERMFREKVVTNLRSWGARSEAVNQTYGDYVSAGWKRTVSNSKPSAMQLRLSLSAADKHYRRMSVTPERIILEMVAQGRWVVLHFPTPPQLLEPGCKPGVPDVWVDKSNRVMFGFHGKTVPGRPEFSSRYVIGVDVGVTNPAAYIVWDVEKKQVVEQSLLGQRARSLNNKIKRTQTQVAVLQRKNRSEEATSHREHLSNRRKELSILVAQEVADAAWRHGNALVVFEDLSYISNTMRFGRWFRGEVYRRTRDMVEADGGRVMKVNAAYTSRKCHVCQSDLDMSDYSQPRCTTCGITHHRDINAAANIAQRANHAKACQTRRRHATKTKRVRRSKCRIKPLKHPGTKNRPTPKAPQNQIRNHTATTPTREVSVRKCPADTRVSAVDHATWLQTTSGTTIPEEDLSTGNAVDVVYTKE

SEQ ID NO: 21808 - protein, 410 aa, unknown
  TnpB Polypeptide
MRTSYQYRLRPTKQRVIQFDRWLDMLRCQYNYLLADRFRWYEENRCSITSCSILVCHLPELRNNPNYNSQQDSLPQLKKDRPWYKELHSQVLQNAAKRVELAFDRFLSGDCNGRRSGRPRFKGANQYKTFTYPKVKSDCIDNGFITLPKFGKVRLVQHRAIPDGFKIKTCSITKKADGFYVTLSLEDETVPTVKPDFNPNSITGIDVGLKAFLTTSENEVVAIPQYYRQAQKRLRVIQKRVSRRKKGSNGKKASVIKLGRQHKKIADKRKDFHFKTANNLLKKYDVIAVEDLNVKGLARTRLAKSILDAGWSSFLSILTTKAENAGLLVIAVNPSGTSQDCSSCGVKVPKKLHERWHDCPNCGCSLDRDHNAALNILNRAVGHPVLKAKSLLSDSRIVLEALAVIGTPIQ

SEQ ID NO: 21809 - protein, 384 aa, unknown
  TnpB Polypeptide
MKQVIAVKLEPSQEQCQSLLKTMEAFNRGCQYAADVAYQKRLANKIALQPFVYGTLRNEHGLPAQLAIRAIAKAVEAYKRDKRVHIQVDPHGAVVYDPRIMSFKGLTQVSLMCLKPGGLSGRELVPMRFGAYQAARLDRAKGQADLILRGGTFYLYVTVDLPSAPPVDPQDVLGVDLGIAQLAVDSDGEAHTGEGVKQCRRKHSRLRAGLQKAGTKSAKRHLRKVRRRESRYQRDVNHCISKHLVQKALVGQKALAIEDLTGIRERTQATVRTQATVRTQATVRTNQRYERLSWAFHQLRQFIAYKCEVTGIPLIVIDPRNTSRTCLACGHCAKENRRSQSEFLCVECGFQANADHVGASNIRRKGLEARASVMSPMVSANACV

SEQ ID NO: 21810 - protein, 359 aa, Lampropedia sp.
LLIFGIMPTAVKTLKLRVKDRHASLLLQMARQVNFVWNFVNALSSRSIRERGQWLSAYDIHPYTKGAAKELGLHSQTLQCVAQEYVTRRRQCKRARLNWRKSTCSQRSLGWIPINTGAASWKNGRVYHNGHYFGMWDSYGLGQYKFKTASFNEDARGRWYFNVAVEIETKPTEATASVGIDLGLKDCATTSTGQKLHGRWYRELEPQLAVAQRARKKQRVRAIHAKIANRRKDEIHKFTTNLVKNNAAIFVGDVASAKLVKTGMAKSTLDAGWSSLKIALEYKCHQAGVVFEEVNEAYSTQTCSCCGAIPISSPKGIAGLGMREWTCSECGAVHDRDVNAARNILAAGHCRLAGGVPRF

SEQ ID NO: 21811 - protein, 377 aa, Lampropedia sp.
VDIKRAYRFRFYPSPEQASTLVRTFGCARFAYNYMLRLRTDAWMQRQEKVGYHESSAALTALKKQPEYEWLNEVSSVPVQQALRHLQTAFGNFFARRARYPQFRRKDGKQSAEYTTSAFKWDGSALKLAKMDDPLDICWSRPIPKAAKVTTVTVSKDTAGRYFVSLLCDDAVAAKPEADGKVGIDLGLTHFAILSTSEKVAAPNTYRKNEAKLAKLQSRLAKKTKGSNRRRKAKLKVARLHAKIADSRKDFLHKLSTRLINENQVIAVESLSVSNMQKNRHLSKSIADAGWSDFVRQLEYKAHWYGRELIGIDQWYPSSKRCSDCGYTMPKMPLNVRQWTCPECGEHHDRDINAARNVLAAGLAVSARGEAVSPVAL

SEQ ID NO: 21812 - protein, 367 aa, unknown
  TnpB Polypeptide
MKHNKAIKYRIYPNKEQVVLLSKTFGCVRFVYNKMLSDRKEAYDKDGSFFYSTPAMYKKYYPFLKEVDSLALANAQLNLDKAYKGFFSKKARFPKFKSKKKNNDSYTTNNQKGSIEILDGLIKLPKVKHVKAVIHRQLPKGAVIKTATISRTKSNKYYCSIMYEVEQSITKITPTKDKTIGLDYSSSHFYIDSNGNSVDYPKFYRQTEKKLQRAQRQLSKKQKGSNNRAKACLKVSKIHEKIKNQRLDYLHKLSKELADNYDLVCVEDINLQNISRCLKLGKSTMDNGFGLFRVLLEYKLNDRGKELIKVDKWYPSSKTCSVCGHKNTGLKLKDRVWACDKCNTIHNRDYNAALNIKQEGLRLVGLL

SEQ ID NO: 21813 - protein, 478 aa, unknown
  TnpB Polypeptide
MSRHTTFRFCLDPTVEQREVLARHAGASRFAFNQCLQLVKTALNQRKTDPGLDAPWTGFDLINAFNAWKKTENAGRIFTVDTEGLAQTVVTGLRWRSHVYQQVFEEAAVDCGRALGAWSDSRSSKRTGNRVGFPRFKKKTGAVPSFRLRNKHPKCRPAAMRVGDNDRPRSVTLPGIGQIGVHDDTRRLRRMLAKNRAKILFATISYRAGRWWVSLNIEAADLHSARQHRARTEGDHGGWVGVDRGLSAFLVAATADGSEVAHIRDTPKPLATGMRQQRHLAKNLSRTIKGSRNRQDAAAKLAKHHHHIANVRRHFLHQVSNELVKTHDRLVIENLHVAGMLRNHRLARAISDAGWAEFARILSYKLTWHGGELLTPDRWYPSSQLCSICGDRNTTLTLADRTYTCPNGHRIARDANAAANLAQWGQAQHQTPPDPRTPKQRGRATNARRRDGADQHPTCAGETSPKDAGTDVHTAPAA

SEQ ID NO: 21814 - protein, 478 aa, unknown; identical to SEQ ID NO: 21813
  TnpB Polypeptide

SEQ ID NO: 21815 - protein, 459 aa, Mycobacterium sp.
MARLKVPEGWCVQAFRFTLNPTQTQAASLARHFGARRKAFNWTVTALKADIKAWRADGTESAKPSLRVLRKRWNTVKDQVCVNAQTGQVWWPECSKEAYADGIAGAVDAYWNWQSCRAGKRAGKTVGVPRFKKKGRDADRVCFTTGAMRVEPDRRHLTLPVIGTIRTYENTRRVERLIAKGRARVLAITVRRNGTRLDASVRVLVQRPQQRRVALPDSRVGVDVGVRRLATVADAEGTVLEQVPNPRPLDAALRGLRRVSRARSRCTKGSRRYCERTTELSRLHRRVNDVRTHHLHVLTTRLAKTHGRIVVEGLDAAGMLRQKGLPGARARRRALSDAALATPRRHLSYKTGWYGSSLVVADRWFPSSKTCHACRHVQDIGWDEQWQCDRCSVVHQRDDCAAINLARYEETSSIVGPVGAAVKRGADRKTRPGRAGGREARKATGHPAGEQPRDGVQVK

SEQ ID NO: 21816 - protein, 384 aa, Mycobacterium sp.
ITERREYRRRGAWMNCRPQAHELVEAKTEQPWLKVVPGHCLQQTLMDLDRACREHGTFRVHWRSGRRWAPSFRFPEGNKMELQKLNRRHARVKLPKLGWVKFRASRSLEGEAIRSATLSREGKHWFVSFLVEDGMSTREEHGAPGTAVGVDRGVVVAVATSDGELIDQTFVTDGEHRRAVALQRRLSRAAKDSANRAKTRSKLATLRARERHRRQDFCVQTAARLAHTNAVVVVEDLKTRNMTRRAKPVEDPDNPGQYLPNGAAGKSGLNKAILGKGWHRFEQSLTSVARYSGTQVIKVPAAFTSLRCSTCGHVDPKNRESQAVFRCTNCPHGPVHADVNAAKNILAAGLAVTACRATTTPPGAVVTSTQEPAGNREELLLQPT

SEQ ID NO: 21817 - protein, 287 aa, Clostridium sp.
MLKAYKYRIYPNIEQQIYIAKTCGCSRFIYNQMLANRIEVYEANKDILTYKEMSKLYLTPAKFKKEYEWLKEVDSLALANAQLNLDTAYKNFFRDKSIGFPKFKKKTNRISYKTNNQKGTIYIENGYIKLPKLKSMVKIKQHRLFKGEIKSVTVSKNPMGQYFVSVLVDTENIKLPKVDKKIGVDVGLKEFAICSDGYRVPNPKHLRKSEKRLRKLQKDLSRKQKGSSNRNKIRLKVAKLHQKIADQRKDFLHKLSTKLIRENQSIAIEDLKVSNMMKNHKLAKVIS

SEQ ID NO: 21818 - protein, 215 aa, unknown
  TnpB Polypeptide
VLFELESQPSAYVADKTNAIGLDYASDGLYVDDNGNKGTNHKYYRESHRKLAKAQRRLSRMQGSKKKEEKSANYLKQLKKVNRIHRRIANQRLDNLHKISTEIANQYDVVCVESLNMKSMSNKKFGNGKSTMDNGYGMFLKMLEYKFADRKKYFVKVDKWFPSSQICNGCGKVHSEMKNLNNRIMKCDCGLIIGRDQNAAINIKKEGLRILKSVS

SEQ ID NO: 21819 - protein, 368 aa, Herbidospora sp.
VAQIVKRAYKYRFYPTLEQAEELARTFGCVRLVYNKALEERTRAYRLEGRSLSYAQSSAALTAWKRTEELSFLNEVSCVPLQQALRHQQAAFTNFFAKRAGYPVFKSRKKSRPSAEYTRSAFRWRDGSLTLAKMNDPLDIVWSRPLPADAAPSTVTVSRDAAGRWFVSILVEEQIAPLSPVDSMVGVDVGISALATLSTGERLANPRHEASRRRKLARAQRALARKSEGSRNWERAKLTVARVHARISDRRRDHLHKVTTRLVRENQVIAVEDLTVANMVKNRSLARAISDAGWRELRSMLTYKAAWYGRELLVVDRWFPSSKLCSACGVVATSMPLDVRDWSCSCGAAHDRDVNAAKNILAAGLAER

SEQ ID NO: 21820 - protein, 178 aa, Parageobacillus sp.
MLSECKETYEQFKNDKAALKKLKFPIPAKYNKKFPWLKKVDSLALANAPLHLKQAYQHFFSGRARFPKSKSRKARQSYTTNVVNGNIALLDGYIQLPKLKLVKMKQHREIPSRHVIKSCTIFQTKIGKYYISILTEYEHHPMPTEVQSVIGLDFSMNHLFVDSVGKKANYPRFYRQTV

SEQ ID NO: 21821 - protein, 382 aa, Micromonospora sp.
VKIVVQVRLFPDAAQQAALRATLDLCNAAADLASAEAFQRRVFAKQSLQRLTYGRLKNMGLSAQPAIHVARKVAGAYATLKANIRAGNLGKPGSKRRVKAESKPITFRRDAAQPFDDRCLSWQLTNHTVSIWAVGGRLNKVPFACSDAQLATLTVHRKGESDLVCRDGKWYLYATCDIPDVETKEPDGFLGVDLGIANIATTDDGTRFCGKGLNRVRHRNQRLRAKLQKIGTKSAKRLLKKRSRKEAGFAANTNHTIAKRIVTEAERTGRGIALEDLGGIRDRVRLRRPQRVTLHSWTFRQLGTFVAYKAARAGVATVYVDPAYTSQGCSHCDHIAKANRPHQSTFRCTSCGFAEHADVNAARNIAKRGVASWAAVSLPNAA

SEQ ID NO: 21822 - protein, 441 aa, unknown
  TnpB Polypeptide
MKKKKKIDFIKIEDDLRNNIIKHRDSVGIPGNFNFRQCESHSWIETKYKPINEVPLITRLTAPPIEDVIKCKKVIIKFNNDQKKIVFGWLDGEIKMYNYVVALFKDYIYKKIPLTGQIVSFWFIRDVTLKDVKSALCQQYGIPPHVLDKSIKRACTMLKSCKTNHARGNIRNYRLNYIKQTVETKIIVIEKQYFCINNNSFYSSYLGDYIESYGFKLNEVDADCTLHYDVGKKVFMLLVPIKFKSDADADIVINKKTLVIDAGVRTFITGISDDHILEMGNNLKKTLTPLFNEIDAINNSDMPARVKKKKTTILYNRIKNLVTDMHWKAINYLVKTYGIIVVGDWRTQSCCSNKNTKIDAMTKRIMNQLSFYKFLQKLKYKCEVHRVSLYIIPEHFTSQMCSNCGAKNNVGGSKTYDCENCMFKIDRDVNSCRNLYMSWKN

SEQ ID NO: 21823 - protein, 731 aa, unknown
  TnpB Polypeptide
MVLILYGLISCFKDTIPRYLVMKKDKRRRSRSCKTPKASEQKTMDDNYYGISSLNYLVESFSLNSSQREVVRKGKGRTPDPRYRRKNGSSSLVLAAIARQSGGKVDDIDLTALTSHFENYVKTVNLILSRIFKTDRRAEILGEALSNYRGRAYTLLRNERDLCYQHNDEYKGLVYERLHRNALEHAGRTLMADWSRRQLFNTAIAFLHGSKDDVLRLLRSKHIPSDLIRRVRDQCAAVRNTGSGYHYALGVLRQLRLAIDSHILDTLGVKINWRGRQRKKVASLLAKGSLDFQNVQRLVKRKIKSWAKDGYPFAIPQLRSYSLDFSASTENSTSQGYWFSLDPERENEVLLHLKLPPGIDGREQIDSPYKSKTLTFRFLDWLPRAATEDTVKANRAKKISHLNRVEQLRFRAAKFLDMHEQLMNTIQFQHVTHQLSRLKHKKNSDPKVIGRLADEARRLKGSRRSAPPRLLLRGHKVILQIPFLSPNGTVSSKVFRDKVYTTEAGADRGLRVPVALSVEKDTKFVDLLISVEPLIAKRMLLRKNASVLQSKVDKRKNNWELKRPEQAYPQFLSRKIRHFNATWEKIRRLDREIARIIAAKTVWFCEEHGVKKLFFEDLRGFQGHAGSKDLSWSLNANLWGKIIDTVRYMRESLGHSRYSVWTVNPRYTSQTCHQCGERGFRVNDESSKIKKQGGEFFYCIKCDAHHHADINAARNIIHVQSKSSVVPGQTT

SEQ ID NO: 21824 - protein, 391 aa, unknown
  TnpB Polypeptide
MPGKTKAGFSKNDGASQFTTLKIRLYPSPEQAELFEKTFGCCRYIWNRMLADQQRFYLETGTHFIPTPAKYKNGSPFLREVDNQALIQEHNKLQQAFRAFFKAPESFGHPRFKRKKDGRNSFTACNHAFASGPTIYTTRNSIRMTKAGIVRAKFHRRPQAWWTLKRVTVEKTRTGKYYASILYEYPAMELKPVFPTAKTTVGLKYSISHFYVSDDGSAVDPPHWLKQSQDQLGRIQQKLNRMRPASKNYQEAVQKFRLLHEHIAYQRRDFIHKESRRIANAWDAVCVRADDLTELNRKLIQTNLYGSGFGTFRKCLCYKLERQGKPLISVDRYYPSTRTCSACGAVRDAVQHKERFWHCPKCGAVQDRDTNAAKNIKAQGLAQYFKNRQSA

SEQ ID NO: 21825 - protein, 458 aa, unknown
  TnpB Polypeptide
MKQNLITLKIKYSCNTSILDVIRQYNSVLKFTYNRLVENSKLKTSEITQLQKNLNNCDLIGSHLRNSAIYDAKSLVEHSDKHIIFGGKCLFKQRCQHKIDKDEFLLKRLRPINSIGEANQKANRLFDIVNNQTIMFKLNRQQHFELKLQQVGTKRLKELNRLIELQNNKQVAITYKLDLDYVYLIFDYNSLKTYDYKVKFNRVMAIDLNPNSIGWSIVDWFAENKYTMIQSGTFSLKPLNDYRNSKSVASDSNFHKYITNKRNYEIIHIAKDLFTLCRHYHCEIFSIEDLNIKASDKKLGRDFNRLVNNNWNRNLLVNQIKKHINSSSTTLVEVQPQYNSYIGNLVFRQEHLPDECLASIEIGRRGFEFATQYIFSRRSHQKTVIYPKLELVKNQLTLSLEELGIDIPNLESWKNILSAVKESKVKYRFSTSEAQIYHSEGLFSKFYKYKYLKIYVYL

SEQ ID NO: 21826 - protein, 459 aa, unknown
  TnpB Polypeptide
MQIKIKGRRYTDLILVEKHSIKRKPKTKELYKTIDDFCYKSKNLYNSANYLITQCSRISYKLKQGEILESWEKSLIYRVNCGIKAFNDNKGKKLMNYIDENNGFVANHFFLLPFLKDTFDYKEMPYAVSAQQCVIKLCQNWKAYYEGMKAYKKGNKNMLGRPKPPKYYDKNTGRNALIITGQQTEVENDGTIHIKPKFLEKLNLHFKVRYATKINQVRVVTKPNAIDFEIAYEVPDVKPKQKKNRVMGIDLGVDNLATLTSNTEMQPVIINGGPLKSINHYYNKKKAYLQETAKTMNDTFNTMRLYRLTDKRNNKVADCLHKASAKIIALAEKYDIDTIVIGNNKGWKQNVDMGKKTNQTFVSIPFHNLIQKIQYKAERLGIAVTVVEESYTSGTSYLDNEQPIQSNYNPQRRVSRGQFQSNTGVLINADVNASYQIMKKAKVNSPVYLNEKVTQLNVA

SEQ ID NO: 21827 - protein, 367 aa, unknown
  TnpB Polypeptide
VRKTFKYRIYPSKRQKRLLKATLEECRWLYNELLAQRRDSWQNHQKSLTLYGQQSTYQQLKATRSSLRSVHSQVLQNVAVRIDLALKAFFRRVKTGEKPGYPRFRGKDRYDSFTFPQSGFKVISEKSLVRLSKIGSVKIILHRPVEGEIKTCTVRRTATDKWFVCFSCAWEPTALPENTDEIGLDLGIRKFATMSDGRQINNPRFFKTEERALARSQRKLAKQTKGTPERERARRVIARVYERLRWKRDNFVHQHSRRLVDRYGFIAIEDLEVNRMVHNKCFAKSILDVAWSQFSSLLSIKAEWASRKVVRVNPAYTSQTCSACGHRQTIPLSQTVFDCLCCGLKLDRDHNAAKNILALGRQCLAKA

SEQ ID NO: 21828 - protein, 456 aa, unknown
  TnpB Polypeptide
VEVQQAYRYELDPNVAQRRHLAQSVAAYRKVWNWALARWKHQFDSNPNAGKERFLKVGDEKKLIHQLAADPASEFHWTVPLGTYVRQAPIMNLHKCIQLYWKARKEGRKVGFPKFKSVRKHHSFKAYGALKTKGRQVRLPKIGWVRTKESTIKLKGSILGATISRHADRWFISFTVKREREVIPSRSKQVVGVDLGIKTFAVVSNVSGKSTTFEHPKPLQRAERRLIRRQRQLARKKKGSQNSRKVALKVGRLHRKVAAQRKNFLHEATTKLAKNKSVIVIEDLKVANMVKNRRLAKAISEQGWGEFRRQLGYKCAWYGSTLITAPQFYASSKTCSRCGTIKKTLTLADRIFRCDACGLEIDRDLNAAINLARYGTGQSYRQCGGKLYACGEDGSASFKSAEISVSVEEDDCNQLRRTRKGAKASGSRTLVGTPSSGASASDAPQSTLHVVGGVIT

SEQ ID NO: 21829 - protein, 432 aa, Bifidobacterium sp.
MLEAVKVALDPTPAQERLLFAHAGAARFAFNAGLAHVKAVIDAHGKPEWSLYALRRWWNANKNTLAVDGSGVPWWPENSKESYNSGLESLSGALMNWSKSRKGRRKGRRVGFPRFRAKDRTTPRFAYTTGSYGLIDGDANALRLPRIGRVHCMENVAKRVDGGRVLRMTVSRHAGRWYAALTVERTDNAPLVPPKGGAVGVDLGVRTLATLSDGTMISNPHSLKTGERRLRRAQKALSRKTKGSNRRRRARERVARLHARVADQRRDLLDKLTTRLASTYSDISIEDLNVHGMVGNHRLAKAIEDASFFEIRRQLEYKTMRTGARLHVIDRWYPSSKRCSNCGRVKAKLSLDERVYHCDGCGLIMDRDLNAAINIKVAGSAPETLNARGADVRPATLRDGGQSTVKREPSGRTRDVSLGADTRKSVLQAKTN

SEQ ID NO: 21830 - protein, 406 aa, Actinophytocola sp.
VGTGFKCRAYPDPEQAAVLNRTFGCVRLVWNKTLAERHRAYHTEGAKTSYKQTDTALTQWKKTDDLAFLSEVSSVPLQQTLRHQHAAYQNFFAKRAKYPRFKSRNHRQSAHYTRSAFRIRNGELFLAKTTTPLKFVWSFDNVDLATLNPTMIIVSRDPDGRYYITFAVDTDQPDPLPETGHAIGIDLGIKDFAITSDGDTVANPRHLKRKAANLARYQRRMTRCQRGSMNRRKAEAKVARAHRKVRNARNDFLHRTSTNLVRRADTIVIEDLAVNNMVRNRKLARVISDAGWGEFRRQLEYKAERAGRTLVVIDRWYPSSKTCSACGHLLARLDLGTRHWTCPGCRTRHDRDINAAKNILAAGRAVAGENPRDACGAGVSRQGSSLPQSATKQELQGMSPVRIPRL

SEQ ID NO: 21831 - protein, 300 aa, unknown
  TnpB Polypeptide
VKYRHTAVIKLDTPEGADASLRETVEQFKHCANTASEWCWHGDDQYHVTSKAKAERALYDRLRDETDFTANLVQKGIRRAVEAIARCTTSGARRSTATTFPLRPWMGASSATTSSPTTRRRHRSNTSPTRISSFGRRTCGTATVTGISTLRGEKSRQTSSPTGVENDCSHIVFEELTHIRENIPEATWHHVWAFRRLHEYVEYKAEEHGIEVVQVDPRNTSKRCSTCGFTHDDNRDGESFECQQCGYENHADYNASKNIGLQYLRRRQNAGDGGAPVDVRLNRGTLSVSGEYAPPVSAEV

SEQ ID NO: 21832 - protein, 237 aa, Microcystis sp.
LRDLETAYSNFFASCQGERKGKKVKPPKFKKRKSQQSARFTDNGFTVNQHHVTLAKIGDFKVVWSRPLPSKPSSVTLIKDAADRYFLSFVVEIRPETLPDNKQTIGIDLGIATFATLSTGEKFNAPKPLKKRLKRLKKAQRNLSRKQKGSNRREKARKRVAKIHPKIKDTRTDFLHKLSPRVVRENQTIILEDLNTSGMVKNRNLSRAISDLGWRSFRDMLSAKSDKYGRDFRIISR

SEQ ID NO: 21833 - protein, 404 aa, unknown
  TnpB Polypeptide
MKLTKTLKVKLGKLSNNKTNILDSLINKNTKAINFCLNKAKKGEIITHHSVYKDLRKLNLPATIVHEARAKSVEIIKSYKKKKGKKTFPIFKNSRPTYDNTIIKLRKTDNKLYKYFISLLYKAGVSGNSNSRVELPLIVNSEYQTNLIQQIGNELKLGSTELVKRGNNFFVHISYSKEIDIPVPDKSFSPIGIDIGINNLAVSVARSSVKFHSGKRVAYKNEFFRKQRAILQRNFAIKEVKRLRGRQTRYNDFQINNIAKQIVEQAKQEIKPVIVMEDLKNILKTAKADKKQRIRLHNWFFRKLQEATEYKANWEGIPVEYIDPYHTSQICSKCGELSKRDRHTYKCESCEYEANADYNAGRNIQQVFLAKCQEEKATINIASNPNYQKPQAMRDIGVRNIAMK

SEQ ID NO: 21834 - protein, 659 aa, Okeania sp.
LLWLKDVASTPLQQSLKDLDQAYKNFFDSCTGKRKGIQVKPPQFKSRKSRQAARFVGVNYKIGQDKIYLPKVGKIKIFWSRKLPSQPSSVTIIKDSSNRYFASFVVETGAENLPKSDHSIGIDLGISTFATLSNSEKFEAPKPLKKNLKKLAKFQRKLAKKTPGTNRREKARLRVAKLHRKIQDIRTDFLHKLSTDLVRKYDVIVLEDLNVSGMVSYGMLRKRNRKLAKAISDLGWRQFRTLTVIFFCLLLVLIPQHSTTQKFLLQIFGSLKSVLLSLIATYIAAILPKKIQSNAGAILWAKILESFRVRKNKVPVKQAVLKKLQNLISRLINRKSLIRIAKTIRGLYHLWWLYILGLLIASSILFFLPLGNSSHYIMFIVDNSGSMGLCDSDKPTGKCKLRTNNEDEYPINKLTKTLSRKFEDKDPAIDDLPHTTKIGAKIKRGLIEIGGESNEGQCRVRTLVDPKLNNKDELLGELKKIRANDSGATPLVKGLKDSEGAIGRDRQNPFNLSLSNNVIVFTDGDEDNCNRDVRFCEAIKGGKIFQEDFQINLYLVKKGSNCNNFPCLNRKQHSKEFGFISCQSVKDFSYNEVSSKVDEIQEKILYSNVKGIHKIADIVSNVIILFSSLFILFLLAIIGNFSCFIGHVENLIKRIEDRN

SEQ ID NO: 21835 - protein, 255 aa, Okeania sp.
DLTKQFITQAKKELLWLKDVASTPLQQSLKDLDQAYKNFFDSCTGKRKGIQVKPPQFKSRKSRQAARFVGVNYKIGQDKIYLPKVGKIKIFWSRKLPSQPSSVTIIKDSSNRYFASFVVETGAENLPKSDHSIGIDLGISTFATLSNSEKFEAPKPLKKNLKKLAKFQRKLAKKTPGTNRREKARLRVAKLHRKIQDIRTDFLHKLSTDLVRKYDVIVLEDLNVSGMVSYGMLRKRNRKLAKAISDLGWRQFRTL

SEQ ID NO: 21836 - protein, 418 aa, unknown
  TnpB Polypeptide
MYLTQKNHIRCDKKTYKILRILTHLSKNLYNFTLYTLKQYYFNNGKYLPYEQAYHLVKHNENYQLLPSQVAQQTMKVVDKNMRSFFHVLNERRKGNYNRPVSMPKYLPKDGYFVCIFQRDMFKVNGDKIRLSFGKNFTKEFGVRYLEFKLPPTVIGKKIKEVRILPRCKGLWFEIEYIYEVEPEKANLDCNKYLAIDLGLNNFATCVSSGTLFIIEGRGLKSFNRWWNKEKAKLQSIYDKQGIKMGKKMGWLLKKHKNVINNFMNQAVNYIIKYCLANRIGNIVIGELKEIKNGMNMGKINNQNFQYISYGLFKQKLRAKCEYYGINYIEVDEAYTSQTCSICGDISKNNRKHRGLYVCKKCGFVVNADVNGALNILKVAEESAVRRILSSGCVNQPVRIRVVSFRQTPHEAPCVSVG

SEQ ID NO: 21837 - protein, 387 aa, unknown
  TnpB Polypeptide
MKAHRAILIELPKDSCDVDHIKRLMALSNLAYRDYEVWMPDLLRTIQHQLYGFKNFMGSLVFGTEPKRWFAETWVPLKVLRIYSDGSMKGDRNAPVVLEFRSDVDFKSNVIRLRQVCKNEPRYVVELTMPKWVVERIKEGGDVKYAMIGLKNNEPYLALVAEREVVSYQPSGYILVIDINSWSHGIAWGLIRDGRIVSFKQEGLNPQRIVSLYNQAIKREKKLGALKKLGLGDETNVKSAKRMARRLRSRIYRLINEEAMFMAGKLVRKALRYKAMVVIDDVDWESLRDLLVRKYGKRVGKLLLSGLKRFVKSLVTQLEWYGAPYEFRRLYSRKCPRCEHELTQEEGRTMVCTNCGFKAPRDKVPIYWAIKVVHPGDRKSSIEQLTP

SEQ ID NO: 21838 - protein, 474 aa, unknown
  TnpB Polypeptide
MSQKTVIERVDVQGASVYVGDRADGSSEYSTNGKRIMDWLCDGWRYRFNALRSRRYIIDREGVHHPLSEQPDMRSVKTMRGECSWISAIPAMVIQSPERVENTQWFAAIARRKTNIAHHRRSGRLPSFISRRNSNRTFACWHNKGTNANYHQVNRNHGIVEIKGQNPKAHREHGTRFTVRIHIRISQPIRDYTAVRVNWTQRTLSFTNPPLPIEHEPTGRRIGIDVGVAHAATQSDGLILDLPKHKLNRINREIQRRQRAMNRKAQASGKSRKQYVKDGASKRYQHEREQVRRLYAKKKRIINDLYQKYTTHLVETCDMIAVEALRTANMVRRCKPKPDPQQAGRYLPNGQSAKRRLNRSMLEASISTLRSMLEYKTKLTRDCMLIEVNPAYTSQTCNQCKHTAAENRESQAVFHCHNCGHMENADINAARNILEAGLKHLRSTDGASHEPTIQDMPPAQCGRHAMVSCKPQHL

SEQ ID NO: 21839 - protein, 477 aa, unknown
  TnpB Polypeptide
MSQKTVIEQVKVSGASPYLGLSSDGEPMHSKNAGKVMDWLCDGWRTRFNQLRSTRKKYNKNHELVPLGGSVTDITSSQARKDCSWLAAIPSLVLESPTKIESTEWYANTKRRKTMLREHRPPGRMPRFKSRKRDDQYFVCWHNNGRNATFRQVNRKHGIVTITGQNPVGHRVDGVRWKIEIHIRVSQPIRDYTSVNVNWTRRTLVFANPPLPVSRAERTDKAIGVDVGCVHAVATSDGDLYDLPKAKLNRIEQEIRRRQKAQARKRKLAGYPNPRDYRKHGASKAYERATEQIRRLHAKASRIREDMMHKISTELVRHNQTVIVERLNVQSMMRRARPKPDPNKPGQHLPNGQAAKRGLNRSIAHAGMRRLRQMLAYKCKTTPDRVLVEVNPAYTSQTCNHCGNVAKENRESQAVFHCHNCGYETNADLNAAKNILERGITHIRSMDDAPLARTMSDTRTPTRGDDAMVASKPQHSI

SEQ ID NO: 21840 - protein, 418 aa, Kribbella sp.
MSRFRMYPTPTQHAALLEQCGHARYVWNLALEQWSMWSRDKGATPGYVEQSKQLTEARATFGWLRAGSHTVQQQALRDFAQATKNFYAGLSRRPTWRKAGRREGFRIVGSQASRIVRLSRRWAAVNVPKVGWVRIRLSRAVPDARSYRVTRDRVGRWHLAFAVVPPPIPGPGTGEVVGVDRGVTVSAALSTGELLICPGLSETEQARLKRLQRRLARCRGSKRRERVKAAIAKLSARAGDRRKDWLEKASTDLARRFDVIRVEDLHIAQMTRRPRPKPDPDQPGRYAPNRRRAKAGLNRGILANGWGGLVSRLEHKAPGRVEKVNPAYTSQTCGVCGHCAPENRKSQAAFRCVACGHEANADVNAAVNIAAGRAVSARRETSVRVSSKREPQFATSIAAGIPVLQGGEDVNLGMFWNK

SEQ ID NO: 21841 - protein, 420 aa, Metalysinibacillus sp.
MDKTFKTQVNRMKGLTKQEYRVLRELCSISKNLYNVSLYNIRQHYFTEKSFLTYESNYHVAKHNENYKLLQAGISQQILKVVDRSFKSFFNLMKKAKQGEYRFQDVKIPKYLAKDGLFPLILSTNAIRVKDGYFFIPLSNAYKKKSGLKEIKIKFPPQLVGKTLKEVRIIPKAKGKRFDIHYVYEQPFETVMLDKEKAMSIDIGLNNVATCVTSDGLSYLYDGKPLKSINHYYNKQKAKYQSIAIKQGMKYTNRLASMDIKRNNRVKDYMRKVARSIIELCKGQQIGTLVIGYNKDFKRGLNLGKKNNQQFTQIPFGLLREYLYNLCEHYGINYVEQEESYTSKASFFDNDALPVWTAEKQNMSFSGKRIKRGLYQTAKGILVNADINGALNILRKSNLIDTRILQAKGCLAHPQRVRIV

SEQ ID NO: 21842 - protein, 398 aa, Planktothrix sp.
MEKAYSYRFYPTPEQESLLRRTLGCVRLVYNQALHERTQAWYERQERVGYSQTSSMLTNWKKQEDLDFLNQVSCVPLQQGLRHLQTAFTNFFAGRAKYPNFKKKHQGGSAEFTKSAFKLKNGQIYLAKCLEPLAIRWSRQIPKDCEPSTVTVRLHPSGRWHISIRFDDPTIKPLPVTDKAIGIDLGISSLVITSDGQKIANPKHFKKHYQRLRQAQKSLSRKQKACPELCRRGSKNREKARIKVAKIHAQITDSRKDHLHKLTTQLVRENQTIVVENLAVKNLVKNPKLAQAIADVSWGEITRQLAYKCRWYGRNYIEIDRWFPSSKRCSSCGHIVEKMPLNIREWDCPNCGTHHDRDLNASKNILAAGLAVSDCGASVRPEQSKSVKATAKKQKPKL

SEQ ID NO: 21843 - protein, 349 aa, unknown
  TnpB Polypeptide
MIRKSTINLKFANPGKIEKVKEIAEEYQRAVNIFIDSLWEQQQFSGNFVKDTSAESWLSARLKQAAAKQALSIVKSQRKKKKKTKPTLNRIVLELDSRFVDIKQDVNHFDVWIKLSSIGNKIIINLPSQKHMHFNKFIEDGWSIKKSIRLRINKNGYFIDIFFEKDAPALRKIGKSKAIDIGYKKLIVSSDGEFVGDDSIYEKIARKKQGSKSFKRALVERDELVNTSCKALDLDNVKELYAEDLKDVKHKSKGKICKKFNNKLQRWIYSQCLRKLAMLCEEAGILFVKKAPAYSSQRCSSCGEIHKKSRNGELFKCVSCGFESDADYNASLNLLFMGQYGVHALQPNL

SEQ ID NO: 21844 - protein, 246 aa, Halolamina sp.
VRSSEPATTFVGVDVNEDNVALAAVTESGVQDSIVIEYPEIKQRRHEFFTIRKRMQSAGQTAFETTVQNHEKRFVHDRLHQVSRAVVEWVEQFDNPVFVFEDLKDIRDDIEYGTRMNRRLHSLPFAQLQNFVSYKAAWNGIPSMRVNPEYTSQACLSCGHTERGNRTKKRFKCVECGFQDHADRKAAVSISAKGLTELDRNVPALNSLPVVRVRRQCNGASEPPDHDPRSAVQGHHADGERGSVSS

SEQ ID NO: 21845 - protein, 439 aa, Halolamina sp.
VVEETFKYAATPEDAETATAAWHDIQTCREVYNHALTQEYRPRPDYDKPSYTEMQNKLTGTTGWKQRWPEWKNAYSKCLQMAIRRIKQSERVLESLQTRGYNVGQLKWKPPREYRSITYNQSGFDVDHNTDRTGHAIVNFSKIGDFHLNYHRPLPEDGDITQIILKKEKTGDWSVSIVVEYDPQYPEKPCVEEINPTDTVGIDLGITKFIHDSAGRSFGSLDEQRDRDRIERRHRNLSRKAYGSNSWEKARQKLAQAYDQLQNRREDYREKLADEYTTRYDAVFLEDLDVKAMTEDDGNSRNIASMSWRQTIQAFKRHGKKNGCYVIEVPPEGTTKRCSQCGCETEKPLWVREHSCPSCGFETDRDYNAALEIKRLGLEKLGVEATMQTVGQGMAESTPAETALPGDTEETSDEVSPKRVVETGSPCLKEPPKAASRQG

SEQ ID NO: 21846 - protein, 251 aa, Halolamina sp.
SVTTGDIDNPLYSALQNQAIRNAKSDYDDEPLEYTGEQPIEVNNQNWEIDTTENGSVVVGFPCISDWWYTPIHVHDSIEEPVQTPLDGDAEKTKLSVWREGSDWHCSFTVEYNEQQDGEETPIGVDVGHNYILAATPDNASAESFLVSGKEHKFVQRYYRSLRDSLQETGAHRARNRVGNKEYRRIQDMNHTLSKRLVEYASQFENPVIKLEDLENIRDGSEWNGVHSWPFTNSNSSSRTKPRRKGFALRK

SEQ ID NO: 21847 - protein, 431 aa, unknown
  TnpB Polypeptide
MNWQSLKYYRCDIFWDVPVQKDVPVCVIGKVFKPNRLKVLALNRTFNEYFRLVKWYLSFNSKSKSFLHESCYGKAKELFNLNTALIQTGRDKAVEILKSFEETRKENSILRPERVSIRFDKRCYRFSKTTNALTPYWLTLSLNRREKISLPIVFGEKQRQRIEEALRGEWRFTTVEMVKHDGEWYAHFILKKTVEVPDEPETIIAIDRGEHNLAVAVAISKSNPNKPLKGQFWRGEEIKRIRGLYGHIRRRLQEKKLLKKVKELKEKERRKVNQQLHIIANQIVAYAKQFPKPVIVMEDLSGIRDNFKRSKKLNKRFHSLPFRKLQIYIEYKALLEGIEVRYLTKKETRNTSKTCHRCGHVAQVKGRMFKCPKCGMEYDRDLNACINIARRLMRSAGWGSCEPPEPADEGTGAKPALNAGSSRLQSWSSSQ

SEQ ID NO: 21848 - protein, 412 aa, unknown
  TnpB Polypeptide
MRRTNVVKLVVDKETHEKLRKLGIVTVKCWNEVNWLRMQQFKKGERVDFLKTGKEVYEKYKRVLKVNAQQVARKNAEAWRSFFSLIGEKREGKLPKWFKPRPPSYWRDRSGKYRLIIIIRNDRYEVDEDGRTIYLKDFKLALGFKGKLKWCGKQGRLEIVYNEARRSWYAHIPVEVEDEAKVEGSLRASVDLGIVNLATVYVEDGTWYIFKGGGVLSQYECYSKKMSGIQKVLARHGQRTSRRLKLLYDKRRRFLKHALSSMIRKIMGELKEKGVSEVVVGYPKDIAKNHGNKLTVNFWNYGYAIKRFKEIGEELGIRVIDVAEPNTSKSCSLCGEAHENGRVKRGLYKCPRMGKIINADLNGAINILHIPESQGAKSEGQLLARDRGNGLKTQPVVYHWTSGVGANRTYQL

SEQ ID NO: 21849 - protein, 448 aa, Moorea sp.
LKTPTKVIRTDKWKLNPSSEQKALFAETVKVYRQACRYLVGIIYTDWSELGGLTADQLTPAVEKLMHETAKRPNIKYPQFNKAFYKFPSYYRRAAIAFAAGQVSSFVTRYREWQSGNRKKRDSKPPRLNGDAGCYPALYKGQCYKLHGFDQVEIKVFDGKNWVWTMVQITVLRERHQVTTNKMMSPSLIFNDRCCHLSVPFTCKPEKRKPEANVTAVDLGINTTATVAVVTHDGTVIHRDFIHLGRDIDRRDKRLKSVSVRASKTMGKGGKLHKGFCSKTYKKCQRINNQISHIVSKRIVEMAEKFNSEAIVFENLKGWKPKGGRKRSNLRQRFHGWLKAKIRDFTEMKWAELGGRVIEVVAAYTSKLAFDGSGTVKRNSQKYSLATFPSGKRFNADLNGAYNIGARGVFKLTRRNGEEGRSSKRSRRPPRSWACLCDLWTLRSSRLA

SEQ ID NO: 21850 - protein, 300 aa, unknown
  TnpB Polypeptide
VNVVKLNRKWARVFVPKVGWLRFRLSRPLPTKTGMARVTLDADQRWHVSFTATQPSIDRELSGRAVGIDRGVATTLALSDGQHYQIPNSRKADGEARKLAARMSRQKRGSIRREATKRAAGRLHARAADRRKNWVEKTTTSLIRSHDLIVLEDLRITNMVKRPKPDPDRTGVFLPNRAKAKGGLNRSIHRSCGGLFAQRLHDKATASGVTVVKVNPAYSSVECRACGHTDTVNRESQAEFRCVSCGHESHADTNAAQVVLARGLALAPTPGHEGQDPQPGSARGNPEQSVARTTQTKAAA

SEQ ID NO: 21851 - protein, 165 aa, Lactobacillus sp.
MAFDEHDKVLFPRTDLKQFPRYQQAVRTVAKLKKHIAERRRDNLHKLTTRLVKDYDTIVVENLSVKNMMKNHHLSASIANASWGTLISQLKYKCAWYGKRLIIIDPKNTSRICHECKQKNHEFDSLSQSEWLAAREWDCPNCHAHLDRDVNAAKNILAKGLETLS

SEQ ID NO: 21852 - protein, 325 aa, unknown
  TnpB Polypeptide
MKIISSYGVELRKQNIPIRQTLEIYRSAVRYLVEVYESVWEELAQIEESKKRFNAAEHLVHTTKRNPARFDFDFCFPKMPSYFRRAAVQHALGSVSSYRTRLEQWKAEGQKTGKPYLKSEQYAMPVFYHDVMYRENTEEKDAAFLKLYDGHDWKWFAARLKHTDMEYLRKHWSGKKASAPTLEKKHDKYFLRFTYAEEVSLNRTPVKEQTICSVDLGINTDAVCTIMRPDGTILGRKFINFSSDKDRMYRVLGRIRRFQREHGSRQAQEDGICKTSEYRAWQKNCKGNHFLCIRKEGRCDCFRISGNERKTFREEKAETADVEKT

SEQ ID NO: 21853 - protein, 178 aa, unknown
  TnpB Polypeptide
MQSVPSCVQTELSWGESLLTFPVTKTGCTVCWDGSEDFSGNMDRVRRRKMAYAKRLNTELGRKIAKEIIFYASEKKADVIVFEYLEMKGKLSGKKKQKLQMWRKRDIQKRCGQQAHRKEIRISRICAWNTSRLAFDGSGEIARDIRIIVCVRFRLEKDTTVICQHRIISERDILSVKF

SEQ ID NO: 21854 - protein, 447 aa, unknown
  TnpB Polypeptide
MAKRPKSKSKGRAFKKRSGCERIFGVRLYLNAAQDKRFREILWLCANVWNAALAERRGAYLEYCRFRDRPGYQPHWPTFQSQRDQMIALRDEYAWIDGDVYAETLTEILKRLDNAMMRFIKRKTSGESAGFPRFRPWHRFKTFTIDHAMRCVDFDHVKKRFNLKSMKKLGGIKWRAGKTRTQLPNVIANVKISLKQGKWYAFFQHEIDPNKRALELQERNAKVRNNRAKSKDMLGADVGVIEAIGLSDGRLIANPRFLKKYAADTANLQREMARLKPKPGQRSSIPYKQVCAAFGRLTSKIARCRDDWQHKISRKLVDTHSWFAFEDLRILNMTKSAKGTVEKPGKNVAQKAGLNRSILDVGWGDLRTKVRYKAVEAGGGIVLVNPSYTSQACSRCDHVDSKSRVERGWFVCTQCGLKIHADVNAGRNQRKRGLVVLKLSIQDAKAA

SEQ ID NO: 21855 - protein, 447 aa, unknown; identical to SEQ ID NO: 21854
  TnpB Polypeptide

SEQ ID NO: 21856 - protein, 412 aa, Acidihalobacter sp.
MQRLQAFKFELMPNGEQQRLMRRFAGSCRFVFNKALALQQERHKAEEKKLGYAALCKVLTKWKAQPQTLWLNETPSQALQQALKNLERAYKNFFEKRADFPRFKKKGVSDSFRYPQGIKLDQSNSRVFLPKLGWLRYRKSRDVLGEVKNATVSQSGGKWFVSIQTEREVSQPIPTGDDAVGIDMGVARFATFDQSLPEFDNKDHIAALNSFKRHETALRKAQQAMSRKTKFSNNWKKAKARVQRIHARIGNARRDFLHKATTTISQNHAMVCIEDLQVRNMSRSAAGTTEKPGRNVRAKSGLNKSILDQGWFEFRRQLDYKLAWNGGWLVAVPPQYTSRTCPCCGHVSADNRQTQAQFLCVECGFEENADVVGAINVLRAGHARFACEVSDAVRSPAAGTHRSDSGAAQCRA

SEQ ID NO: 21857 - protein, 294 aa, unknown
  TnpB Polypeptide
MKTYCFKLYRAKRNKKLHKQISAAGLIYNHCIALHKRYYSLYGKSLNKYQLQKHLTKLNKLYKFSYIKDIGSQAVQDITDRIDRAYKLFFRNLKHNIRTAPPSFKKIKKYKSYTLKQAGWKLRSGNIIEIAKQRYRYFKSREIEGTVKTVTIKRDTLGDIYIYFVCDINENEVLARTGKSVGYDFGLKTFLYTSDKKDIVSPLFFKANATSIAKANRNLSRKKKGSNNRRKARLELARLHKRVANQRSDFHWKMAQRIVGQYALVALENLNLRLCKSVSEEKSPTWVLQTLYKS

SEQ ID NO: 21858 - protein, 385 aa, unknown
  TnpB Polypeptide
MNKTLKYRLYPTKKQTRILQEQLNECRWLYNHFLEERKNSWEQDKKSLNYFGQCKSMVALKKERQSLTIVYSQVLQNVADRVDKAFQSFFRRVKTKNGKAGYPRFKGFDRYDSLTYKQAGFGWSIEDNRLKLSKIGTIKIKLHRPIIGTLKTCTIRKQANKWYACFSVEYENKPLRKSNKAIGIDVGLENFATFSNQKKIANPRFFKTDQEALAKAQKKLSKQEKKSPKRKKTKKVVARIHERITNRRHNFIHQEARKIVNKFGVICVEKLNIKGMQNGNFRSINRSIGDVAWGQFANVLSHKAEDAGRQFIAIDPRGTSQRCSQCGAIVKKGLSNRWHNCPICNVRLHRDYNASLNILRLGLQSLGIQSIEAPEFIRGSNHSKD

SEQ ID NO: 21859 - protein, 374 aa, unknown
  TnpB Polypeptide
LGERFNWYEQNRSCVNACPLICHLPELKDRPDFYSQKRDLVNSKKLFPKSKELPSHALQDVIARVEKTFERWLSGDSNGKRSGKPRFKCLGRFRSIGFPDPIKPEHVDGRFIQLPKIGKVKLILHRPLPEGFKIKTAAIVKKVDGYYITLSLQDSSVPVLTPDAPKVENTIGIDLGLKSFLVTDAGEEVMIPQHYRKSEKRLKRLQRSLSRQKKGSNRRKEASARVSKTHLKVSNQRKDFHYKTAQKLLEQQKHVAHEQLNIIGIARTRLAKSMHDAGWGQFLQILATKAEKAGLLAIAVNPNGTTQNCSRCGTKVPKTLSDRLHICLECGLTLDRDHNAAINIRNRAVGHPVLKAQETPDGIPGVTEKPVLYA

SEQ ID NO: 21860 - protein, 424 aa, unknown
  TnpB Polypeptide
MLNLAYEYKLKPTSEQAQEIERTLDICRKVWNYALRERKDWLNSRKCRIDACSIVSESIIAADTPYPNYANQCKSLTAAKEQYPELKTVNAQMLQQVLRRLETAFVDMQRKGMGFPRFKNWVRMRSIVFPQMLKNCIQGISIKLPQLGEVEFIKSRNIPDGFVVKQARIVRRASGYFVMLALECDVKVPDVAPAGYPIGIDLGLDKFLATSEGELVERPRFFVERQRELKLLQRRLKHKVKGSNNRRRHARKIARLHQRNNDTRKDFHFKLAHKLCDQAGMIFVEDIDFRTWAKGMLGKHTLDAGFGQFLTILQWVCWKRGVYFAKVNKDYTSQVCPSCDTHTGKKELSDRIHYCPGCGYTTHRDVASAQVIRNRGVLAVGRIVGDEIACGDGLTGTGNSLVKSRGSRKKGGEARATDLPRNIL

SEQ ID NO: 21861 - protein, 378 aa, unknown
  TnpB Polypeptide
MIRVFRYRVYLSKAQRRLFSEQSETCRLLYNHLLALNNESYKRDKTSLVHKFSGLLPNLKKVEPRLKQVGAQVSQDVCKRLDFAFKNFFCRIKNGEDPGFPRYKSGHRQVSLGFTNQSFRIVEKNKIFFFKIGIVKFKQHRDIPIRSKIMRSTLKQSSSGKFFVSIVCEVPDSKKLPKTNNTTAFDLGLINYLTTHEGVVIKNPRHLTQKLTELKKTQSKLNKEKKRSPKKDKLKKFQKLHEKIKNQRTDHLHKLSRKIVNENDVIILEDLNIKNMLEKENEKLNKKQNRGMHRNIGDASWSTFSSMLSYKAEEAGRVVVKVDPRNTSKMCSGCGVLVPKTLKDRVHRCPSCGLVLDRDLNAARNIYRLGTQSKALVT

SEQ ID NO: 21862 - protein, 433 aa, unknown
  TnpB Polypeptide
VSSYGCQQVLISPDSQLKAVLEFVCQESNKLANCAIYYCRQLYFKTGQIAHRYDLNKLLKTNPHFKALYSHVGQATLTSVAESFQSFKALRKLSFSGKLDQKPRLPNYRTKDGLNLVSFPSADVKLKSDGLRFPLGSKVKAWFGIDAFYLPMPSNLEFKSIREYRILPRNGCFYLELVYKVESAQVNVDPSRVLGIDHGINNWLTCINNVGSSFIVDGRHLKSLNQFYNKQVANIKEDKPQGFWSKKLAIITEKRNRQVRDAVNKAARLIINHCIDNQIGTIVFGWNKGQKDGANMGKKINQKFVQIPTGRLKDRIAQLAETYGIKFVETEESYTSKASFVDLDVLPTIGAKPDGWQQSGKRVKRGLYRTANNQYINADCNGAANIIRKVATTLGLCLRGVGSGALMTPLRVRLWTVHESPALANQSACGLEA

SEQ ID NO: 21863 - protein, 425 aa, Thermus sp.
MTRKAFKYRLYPTKPQHKDLERTLALCRQLYNAALQERRDAYKKAGRTVGFYEQKRYLPEIRAELPGYKRMHSQVLQNVIQRVDKAFQGFFRRVKGGQKAGYPRFKGQGRYDSFTFPQAGTTGVKLQEGGKRVLIRGIGSVKVKLHRPLEGRLKTATVKREGEHGYIVFVCEVDPKPLPLSQEAIGIDLGTNPYFLVTSEGEKVEAPRYYQKAQGKLARKQRELSGKRKGSTRWRKTKKELAKLHRKIANQRKDFHHKLARRLVNRYGTIVHEDLNILGLARSRTAKGVQDAGWAEFLQILAYKAEEAGRRVVGVDPKHTSQDCPVCGHRERRPLWAREFTCPACGATLHRDVAAAINVLARARVSPQGYLAGAFGDGYGVGRPVRTEKPRSEEAGSRHRSFSTKRVSISSRNWLGSTFWRSGCW

SEQ ID NO: 21864 - protein, 415 aa, Halophilic sp.
MDTALRCRTYPDADTASEAWRHIEIHRQIRNDAVRDYYSYEKGNRPAAYEQHKKLTRWKKQWPVYGDVSAHAAQQTVSQIHKDTETLKGRRKNGYKTGQLKWQGSGEFRSVAYQSEGFDVDHNTGQDGYVQLELSKIGSFPVREHQPIPETDDIKRVILKKETTGEWFVSFITEIPEEELPEKPSPESLDDAECVGVDLGILSYIHTSDNRTVDMLNLDGEYERYAREQRKLDRKKHGSNNWESQRRKVAKAKRAIKRKVEDFQHKLSTWLVKEYDLVAVEDLDVKSMMETLQSAKNKQDAAWSRFLTMLEYKGELYGTHVVKVDAAGTSKECSRCGVGTAKPVWVREHSCPACGHKEDRDLNAAKNILSRGCQKVGAGRSESTPVQTALPVFTPVAVDAKRVCRGNLDRLSDAV

SEQ ID NO: 21865 - protein, 367 aa, Ruminococcaceae sp.
MNKAYKFRIYPNAEQRVMFTKTFGCVRFIYNKMLGDKIAHYNETKEKLNTTPAQYKSEYEFLKEVDSLALANAQMNLQRAYANFFKQPAVGFPKYKSKHKNRKRYTTNNVNGNIELSDGCLRLPKVGAVKIKQHRQIPENYALKSATISQTPSGKYYVSILYEYEQIIEPAEVNSAVGLDFSMAELYVSSEGNEPNYPRYYRRKLDKLRRMSRALSKMLKHGSNWRRQKHRIAILHEKIASQRRDFLHKESRKIANSYDLVGVEDLDMRAMSQSLNFGKSVADNAWGMFRTLLRYKLEDAGKHMITIGKWFPSSKKCSTPGCGYINDDLDLSVREWICPDCGVLHDRDVNAAVNIRNEAVRMMTVMA

SEQ ID NO: 21866 - protein, 390 aa, Alistipes sp.
MLRAYKYRIYPTEEQKVLFAKTFGCCRFVYNWALSLKIEAYQERKATLGNVYLTNLLKSELKAQHEWLSEVNSQSLQSALRNLDTAYKNFFRNTKTVGFPRFKSRKSRQSFQCPQHCRVDFTSGTISIPKAKDIPAVLHRRFRGTVKTVSVSLSPSGRYFASVLVDTDMQEVPATSVSRSTALGIDLGIKSLAVCSDGRTFENPKNLKRSLDRLGMLQKRLSRKQPGSSNRNKARIRVARLQEHIANCRRDNLHKITHALTHDSQVRTICMEDLNVKGMTRNRRLAQAITDASFGMFLSMLEYKCRWYGVNLVRIDRFAPSSKTCGECGHVYRGLKLSERSWICPECGTHLDRDLNAARNIKEFGLKALPREPGKVKPVDCPTADDRPVS

SEQ ID NO: 21867 - protein, 388 aa, Acidibacillus sp.
MLRSHKIALDPNKQQATYFSKASGVARFAYNWGLAEWKRQYEAGEKPTHASLRRQLNAIKREQFPWMLEVTKNAPQMALIHLGDAFQRFFRGVAKYPTFKKKGIHDRFTLTNDQFSVRGKCIRVPNLGWVRMREALRFSGKIMSATVSRKADKWFVSITVDTDDAPSMCENQAMVGVDLGVNRLATMSDGTRIQGAKPHKALLNRLRRLSRSLSRKQKGSKTRAKVKLKLAKLHAKVANIRNDELHKLTTRLASQYGVIVIENLNVKGMMANHRLARAVGDMGFHEFRRQLVYKTKIRGGQLIVVDRWFASSKICSECGTKQESMPLSVREWTCSKCSSLHDRDLNASKNLIKWAVSSTVTACGEDVRPANIEAASVKQEFNVKPTYE

SEQ ID NO: 21868 - protein, 485 aa, Burkholderia sp.
VIVLTVELHQFRLEVGTDAGEDAVQVVQDVLGEHLAAVFSHEDQMDVHQKNAVPSVPNIVVVAHRPNYTFCMQRLQAFKYELMPTGDQQRDMRRFAGSCRFVFNKALAVQTARYEQGEQKLGYAGLCKLLTEWRNGPETPWLKDAPTHPLQQTLKDLERAYTNFFAKRAEFPRFKKKGQGDSFRYPDPKQIRLDQANSRIFLPKLGWLRYRNSRNVLGEVKQITVSASGGKWFASIQTEREVEQSVPNGGAVGIDMGIARFATLSDGTFYAPLNSFRRHEDRLRKAQQAMSRKSKFSSNWKKAKARVQRIHSRIGNARRDFLHKATTAISQNHAMVCIEDLQIRNMSKSAAGNTEKPGRNVRAKSGLNKSILDQGWFEFRRQLDYKLAWNGGYLITVPPQNTSRTCPCCGHVSADNRQTQERFACVECGFEENADLVGAINVLRAGHARCACEVSGAVMPTAAGTHRSDSSRLDAGLSAVGIPRL

SEQ ID NO: 21869 - protein, 605 aa, Rhodococcus sp.
MSTSGDRRTAVAARQFSVTTRAHVAVDDATGEPIGLDDVDTRVGWLLNLIASAGGELVSRLWQPATFDLLAAGLDRQDRRLPAQGHVAAARLGWTPIYPDGIYVPSRVTRVVTAQVMATLRTLAYRDAAITALSARFDPATGAVAPPTGPGDAVPSGFARGVRRQLAAHARRTDGAQSTRLRITDVQGPPRMAAMAQLSAADRQLAQITVAERELVLTVKLPTCPTPAGRAQWRSVRLTATIPEHLYGRAITDWHLPTLVLDHRGLLWRCAATELVPAADLDSATVAVGVDWSPTTLGAAAIVAEGSGGLSSNFRGWTYDDRGLGIKLARLQAEGQLLHAKAARLTRLSATAPPEVRAELEEKIAVLDAHRTAVGIKRGKINRELAFDFARQVTEYAAAAGAQVIAVEDLTTLETRGHGRVNNNRAAQSARRQAATALAHTAAGLGITVVSVPARGSSAQCPGCDEPLSRPGGYHDAWCPRCRVGGNRDHVAGVNLAKRALLGKNNVTRRRGQMPAVRAAKHALVRQCRDKHGPTPSRPRHRRVRRSLPDVTQRLGVNPKQHVPAPQASVWDTVKPTPPHGDTGSRDTRTSQASAILVADSVRST

SEQ ID NO: 21870 - protein, 387 aa, unknown
  TnpB Polypeptide
VATPLEEVKQIQTTTHLKTFRYRLRPTKAQEATLTEQLRLCRGLYNAALQERRDAYRKARKTVTGYDQMKYLTEIKAALPEYAGVYSQVLQDVLKRLDKAFKAFFRRVKSGEIPGYPRFQGRDRYDSICYPQSGFSVSEKTAFFSKIGNIRIRLHRPLEGKVKTATITRECGEWYVSYVCEVETQPLPETGSSVGVDVGTTFFCITSDGEFVENPRHFQSSMKKLRVAQRAVSRKRNKRSNRRRKAVQQVAKLHRKVSRQRLDFHHKTALKLVRENDLIAHEDLNVGGMGRGNLARSIHDVGWGQFFALLSQKAEWAARKVIRVDPRYTSQACNKCGHTCRENRVSQSRFVCIACGHQENADLNAARNILGRAAPSGVNVAFSASVA

SEQ ID NO: 21871 - protein, 409 aa, unknown
  TnpB Polypeptide
MQLVERHIRINDKAIEDICFKSARLYNFCNYHKRQAFFGNIQKFEEYELSKLLAEFNQEDYRALPAQTSQQIIKLLFKNWKSYFKALKEYKKCPSKFKGNPKQPKYKDKAGYSICIFTNQQVNLKGGLIHFPKQANIQPLKTKVDNISQVRIIPQATCFVIEVVYEKKEVKHEKIKEENVLSIDLGLNNLITAIDNVGNNPFIINGRGLKSINAYFNKKRAKLMSYVGNKGTSNRINKLTFDRNNKIENAMHQVGDFILKYCLKYNIGTVVIGKNEHWKKKINIGSRNNQNFVSIPHAKLIDKIKYKLELNSIKLVEQEESYTSKCDHLAFEPIQKQAIYLGKRIKRGLFLSSIGKTINADVNGAIGIMLKSKVIPECEKFISNIRNIGLGFNPYKVEFVKSFELKCNV

SEQ ID NO: 21872 - protein, 374 aa, Cyanobacteria sp.
MRKSFRYRIYPTPKQEAVLEEQLRLCRLVYNAALEQRIWFWKKRKLTLNYYSQANELPAAKREHPELTLVNSQVLQGVLQRLDQAYQRFFSGAGFPRFKSRDRFRSMTFTQTGYKLLERKLKLARVGEVRIKLSRPVEGEIKTLTLTRNSSGHWYASFSCDLGPNQVPMRPVEAEVGIDLGLLKFLTCSDGSMVPNPRHFRESLARLAERQRKLASKPKRKRTRNREKAKLLVAKAHEKVRNQRSDFHFKLSNYLVRGYDRIVHENLNIRNMSKSASGTLEAPGTQVAQKSGLNKSILDAGWRQFLEILRFKAESAGVEVIGVDPRNTSQICSSCGSLTRKGLREREHRCGCGLEIDRDWNAAKNILRLGQSLG

SEQ ID NO: 21873 - protein, 525 aa, Nocardiopsis sp.
VAVRTRLKHLTSQDEKVLRLVGAHLGSLAATDLKARCADGLDHDSHTWAERKRHLTPECSSRWAGSITKATHDQWALARRGQVAHLRSVEAGIATLRHRLSLPVGTKGTKKRPGGYRSKQEWHAKSRRLATLQERLATVRADFEAGVVRVVRGGKRLARNRHHLDATGLNQSQWRERWQAARWFLQADGESGKRFGNETIRITPQGEVSIKLPAPLAGWANAPHGRYRLSGTAVFAHRGQEWAERVEANRAVAYRVHHDVERGRWYITASWQIPTTPQIPLRALLAQGVIGVDTNADHLAAWRLDTHGNPIGDPRRFDYALSGTASHRDAQVRHALTRLLRWAQSCGVQAIAVEDLDFTDSKSRERHGRRKRFRQVISGMPTARLRARLTSMADATGIAIIAVDAAYTSRWGAQHWQKPTTSKKRQTSGHDAASIAIGRRAQGHPIRRRTAPPRTHRSDGCGPRTVQAEPGARGDEGIRHPGLERAHDARTPTLGERERGGPAHPTPFGVRAGPGAASDVTPAHC

SEQ ID NO: 21874 - protein, 453 aa, Bacteroidales sp.
MYVRQRIEIKPNNKQKTYFRRCFKVAVDAWNWGLDEWNRLYENGEHANGMMLRKKYCSIKETSFPDAMEVTTHASAFQFRHLQEAFNRFYKRVNNGDEVKGHPHHHRLNPMSGSFTFSFSGRNGRISNINEGLPKNLQLENPKHSYALIGERCGWVKMLERIRFNGSCSHVTIIQKAEKWYATFLVKITPSEFRRTHKRASDKERNVGIDLGIEKYATLSDGIAIENPRIEEKLHDRIRRISRQGNRKQFPRTKKQKMSGLLPSKNYFKHQRKLTKIKHHISLSRHDFIHKLTSIICRRYRHIVLEHLHTADMGEHEKGWRRATRRKRVKDAAMAIFQRQIQLKAPCYGAEVKIASQWYASTKICSHCGKKSNIELRLVDRIFVCEYCGAVIDRDLNAAYNLKNMIGVASSESITPADLGALVSALGKCQIPSFKVGNRRVWQKRKSQLAVHV

SEQ ID NO: 21875 - protein, 313 aa, Lactobacillus sp.
MLRVQKVRLYPNEIMKQVLDDLCDYRRYCWNQGLALWNDMYDASLILEDKKLRPSARKVRDELVTNKEDWQYQLSARCLQLAISDLGKAWQNFFKKSLPDWGKPKFKSKKTARQGFKTDRAQIINGKLRLDKPQGVKAWADISFKGANDLKGELKVVSIYRENGKYWASLPSEVKVTKKTKTGQKTAIDVNVGHFDYTEGQVKTLPNNLKALYKRIKHYQRLLARKRVANGKKATQANNYVKTRAKLQRDYRKVASIQHDIVQKFTTMLVNKYDRIVIEDLAVKQIQMSHVASKGLHWSMFVYFKQVLEYKCE

SEQ ID NO: 21876 - protein, 303 aa, unknown
  TnpB Polypeptide
MQNGIVHNKKSAQIRLSIPKNLKVHMAERFDVHENYLFLENKVFQDMENIKQIKLYPPVNGELLVILIYEIPEVGWLPDNSHYIAIDLGIKNLMTCYDSLGNSFIIGNRYLEVTHYFNKKIAHYQSISDSQQVSKGIKYPKSSKRVLQLYKKKHNSIKDVLHKSTKYIVDYCLEHHIYTVIIGDIKHIRDNNSLSSKTNQVFHAWPFHEIYMMLEYKLKQHGIRFIRIKESYSSQCSPLSKEVSKRYANKSNRIKRGLYKEAGHIWNADAVGAYNIMRLYFKQIGRGKQISYQNLGSPIKVTV

SEQ ID NO: 21877 - protein, 486 aa, unknown
  TnpB Polypeptide
MAQGGTTPRSLPTDGYPNPLQALREEIEERLKKNRRTVRLRLLPSESEHKDLMGIGLTCARLFNELNYEKRQAFFNRELSPEKHYEINSKYYHKYKEVLGVNAQAVIQKNDEAWNAFFKQLDLRKQGRLPPHIRKVSPPGYWKDRLTGEKEIHIFVRSDRYYLEPINEGEGYLVLVDFGLRIRYIGRIRWEGKQGRLEIIYDAGKWFALVPIEVGVDPPKSSPKGYVKPNYKDKKGRIVNPRSIKQRDPIGDREAFIDMGLNNLFAVVISNGSALLVKGGSIKSEYHWWKREISTYQAIRDLLRNAGFSKWVEYHEKYLKAMYKRDEKLRHLYITATRFLADELYRRGVRKLYIGYPIMLSQDNGNEYNTNIWWYRKIVLWIVDVFREYGIEVELVPEYYTSRECSICGNKHKNGRIYRGLYICRKTGKKINADINAALNIARRLGYRIEISRKIESYLVTHNGVRLLIPLQGANTRDPEVRNPAL

SEQ ID NO: 21878 - protein, 395 aa, unknown
  TnpB Polypeptide
MRLVERHIVKDNRFEDICLKSGLLYNYVLFNIRQGIFEGNYLKEYEFSTKLCKEDQVDFRNLPSVVSQQVVAQVFSSIRSWMKSKKGYEKNPSKFKSKPRLPKYKRGKKQNMVVFTTSACRLKSDGYIHFVKSIISPIKTNIGGNKLCQVRIIPQATCYVVEVIYEKKEQDLNLDKNNVLSIDLGLNNLCTCISNVGIKPFIVNGKIIKSFNQWYNKKKARLMSYIGDKGISKRLRRLNNYRNFWIDDKIHKVSRFIVNFCIDNNIGNLIVGLNKGWKQNINLGRKMNQGFVEIPFSKLIDKICYKCKMIGIDFQTHEESYTSKVDHLAFEPLKKHDIYLGKRKRRGLFQSSTGKLINADINGAIGIGRKVFGDSYVSRIIDSGFAFNPIRLNVL

SEQ ID NO: 21879 - protein, 235 aa, unknown
  TnpB Polypeptide
MRLVERHIIKDNRFEDICLKSGLLYNYVLFNVRQGIFSGDYINEYEFSTKLCKENQVDFRNLPSVVSQQVVAQVFSVTKSWMKSKKEYEKNPSKFLSRPKLPKYKKGKKQNMVVFTKNSCRLKEDGCIHFIKNIIRPIKTKIGDNKLCQVRIIPQATCYVVEVIYEKKEQDLNLDKNNVLSIDLGLNNLCTCISNVGIKPFIVNGKIIKSFNQWYNKKRARLMSYIGDKGTSKET

SEQ ID NO: 21880 - protein, 467 aa, Mycobacterium sp.
MVTAAKFEVEWPADPQRAGLVRSHFGARRKAFNWGLAQVKADLDAKAADPAHESVDWDLKSLRWAWNRAKDDVAPWWAENSKECYSSGLADLAQGLANWKAGKNGTRKGRRVGFPRFKSGRRDPGRVRFTTGTMRIEDDRRTITVPVIGPLRAKENTRRVQRHLVSGRAQILNMTLSQRWGRLFVAVCYALRTPTTRSPLTQPTVRAGMDLGVRTLATVATLDTATGEQTIIEYPNPAPLKATLVARRRAGRELSRRIPGSHGHRAVKAKLARLDRRCVHLRREAAHQLTTELAGTYGQVVIEDLDVAAMKRSMRRRAFRRSVSDAAMGLVAPQLAYKTAKCSGVLTVADRWFASSQIHHGCTSPDGTPCRLQGKGRIDKHLLCPVTGEVVDRDRNAALNLRDWPDNASRGPVGTTAPSAPGPTTTVGTGHGADTGSSGAGGASVRPRPRRAGRGEAKTQTPQGDAA

SEQ ID NO: 21881 - protein, 311 aa, unknown
  TnpB Polypeptide
VRKGKSKRTEIRGRLYLSKLGEVRAFLHRAIEGKIRCLSIKYEVGEWYACFIAEREEPRKPEIEGISDEKIRDADLGLERFVTLDSSESEEYPEFLRQSEQKIKLLQRRLSRKRKGSKRYRQLALQLAGLHLHTIRQREDWQNKVVSKIFKEADVSVLERLSIQNMLKNHNLAKSIADASFSRFASKCIHKTDALGKHVLFVDAWGTTQFCYNCLQWVPKDLSDREHICPNCGIKLSRDLNSAKLIRRFGILYVRSPPSDGGLSPAEPRPLPSLRGMVSRGEEAGSHPFKMGGGRHNGTRATRWANNFVQK

SEQ ID NO: 21882 - protein, 411 aa, unknown
  TnpB Polypeptide
MIFMTAFTKTLKLHIKPKKEDIAALQEVTACYRDGCNLVSKYIFENQFPLNYVQLHHTLYQELRTKCGLKSQMAISCIKTAVARYKGIRTQLSKNPYRYQDEQGKWQSIPKTLDWLWKPVLFARPQADLVRNRDYSFVSDGQVLSINTLRGRIHVAFDIPNCFEEYFKEPWTFGVGKIVSLKNKWYLHISITKEIKETDAFSREEVKHVVGIDRGLRFIEAIYDEKGKTTFKTGKDILKKRAKFQEVRSQLQAKGTKSAKRALKRISGRENRWMTDINHQLSKTLVSTYGTDTLFVLDDLTGVSFSEEILNSRKKKQRNQVRSWAFYQLGEFLTYKAEEVGSMVLEADPAYTSQRCPKCGRIHKENRDRDTHTYTCDCCGYQSNDDRIGAMNLQFLGMLYISGIEKPSFKH

SEQ ID NO: 21883 - protein, 416 aa, Halorubrum sp.
MAIKAIRTYVGSIQNHQQVCDGLDSLGDSASKIWNVARWTADRIWDATGEIPNGSVLKSYMKNQSCWKDLNAQSSQKVIEELSDAFQSWFDLRHNSSEANPPGYRKHGDSRPRSTVTFKEDGFKHDPENNRVRLSKGSNLKEHFSDFLLCEYQTRPDVDLSEVNRVQNVRAVRNGDEWKLHFVCKIELETAESTGDGVAGIDLGITNLATVAFPDEYVLYPGNSLKEDKHYFTRAEYDTEGENGPSAQSMWARRKLSERETHFYHTLTDAIITECVERGVGTLAVSWPEDVRESDWGKTGNKKLHSWAFDRIYQYLEYKGEMRGVAVLKENEWNTSKTCSRCGDDTKSNRVERGLYVCSSCELVANADCNGAENMRQKITPSPHGEDRSNGCVAQPSTHLFDRESGTFHTREQVVS

SEQ ID NO: 21884 - protein, 412 aa, Halorubrum sp.
VKHTLRFRAYLPDDVESEAWHHIDILRQIRNHAVRDYYNSDYNDRPSDYDQHNKLTAWADCWPTFAEPSRHAAQQAITQIHSDLETLQERRENGYNVGRLQWQGKGEFRSVSYNQPRRWNVDHNTGDDRFVRLRLEKIGWFNIRADRNVPSKDEIDEVILKKESTGEWYVSLVTTVEDTPEKPSLSEIKPEDCVGADLGITNYIHTSENLSVATLDLSDEYDRYAREQRKLARKEHGSNNWENQRQQVARAKRKIKRKVEDFQHKLTTWLVKKYDVVAVEDLDVKPMLETSQNAKSKQDAAWSQFIELLEYKGELHGTHVETVEPRGTTKECSVCGVETAKPIWVREHSCPACGHKEDRDLNAAKNILTRGLRQLGLGQSESTPVQTALPTFTPHREAVDAKRVVEAGSPGA

SEQ ID NO: 21885 - protein, 467 aa, Moorea sp.
MKSTLQYRAYLNTKQKLEANYWLRVCRYWYNRQLGDRFDWWDNNRTKVNACPLVCPLPELRDQPTRYGQQSQLPGLKTDLIKVFHSGELLDFTRLDSTVLQDVCKRADDAFKRYISGDSNGLRSGKPRFKNQSSYRTMVFAMVKPRWIHLVRKNWLYIKLPKLGMVKVRMHRPMPDGAVVKRVSLTKKADGWYINLTVADPTVPKLTPDQIVPTWDNSIGLDAVLEGDDYIATSENTKYKSAKPLRKSLPKLKAVSAKKSSKRKGSKARRQLALRESRIHQRIARQRQNHRYNLAHLLVKTGKKVFFLELLNIKGLTKRNKPNKAADGTYLPNGQSAKSGLNKSWLDAAFGEFITTLDYIASKAGAVVIKQKPAYSSMILSYRNEVIFTDCSIRKYYDPVEKVLVDRDVNAAINLKRLGLGVFPSIKRRSGKLVVSGDMDNSTTKQIVSILRDGTDTRSLLSLWPMA

SEQ ID NO: 21886 - protein, 386 aa, unknown
  TnpB Polypeptide
MKVRKLTIMKTYKFKLYSNHGNRELHKTIDGHAHVWNHCIALQRRYYAIYGKYISKFRLINHISKLKRLPKFAHWNQLPSQAIQDVAARIDKGYKVMFEARASGKRWGRPRFKPRRKYKSFTLLQAGWKLLPGNRIKIGKHIYSYFKSRDVFGNPKRCTIKRDAIGDVYICILTDHIEPDLNRLTTGKIAGFDFGLKRYLTGHNGHDIESPEFFKRSISAIKRASRAHSRTKKQSKNRERARLNLARTHRKIERQREDFHWKLAHELTDTYDEIRLEDLNLQGMKSLWGRKVSDLGFADFVKKLVYIASKKGVEINFIDKWYPSSKTCSVCDAVNETLNLRDREWQCSDCGTTHDRDRNAAINIYRVGASTHEGEDVRPSSDGCPC

SEQ ID NO: 21887 - protein, 364 aa, unknown
  TnpB Polypeptide
MTLRTQKIELNPNNKQSTCMSKHCGYRRVAFNFALSSFKVGLDNDEWRTEQDIRKEFNTVKSDKFDWCKELSQNASKNAIRDLGDAVTRWKKGQNKFPVYKNRSGKCSYQADNGEGTVEVYKKRINLSKIGWIRMREELQWTGEITKVVVSKHNNKWYASITVRRLESNNYKHQPLLFDDCKQPIGIDVGINTLATCSNGDTYDNPRPLKRYERKLARANRRLSRRRKGSQNWYKAKAMLSGVHARISNIREDAHHQATIRIVHKASAIGIETLKVTNMLKNRKLAKALSDSALGGFLTKLKYKADRRGIPVTEAPQFFASSKTCSHCGHKKVDLTFSERIYHCHECGFECDRDLNAAINLCPT

SEQ ID NO: 21888 - protein, 388 aa, unknown
  TnpB Polypeptide
MKKQKQHRRTYKEKIRNHPQNMRVGNMFDDLEDVHNHFLALEKRYYRIYGKYAGRYRLQPHLTKLLERTHHHWAWIPRDTLDAVIIRIHIGYKRFFDWLEKGRRGRRVGPPKFKRRGKLRSAKFQTGYKLTEGTVRLSFKRWCSVKEKFVFIRRNILYHHHRDWEGNVQYIQIGRDVAGEYWLYVVTDSTSKKVLPATGESVGVDFGIDTYLTLNTGEKIHHPQPLKQSLNQLRKLNKILSRKVRGSGNWWRAVHELARLHVKIANQRRDWHYKRATDLCRRFDTIATETLNLEAMKRLWGRKISDLAFYQFVEILKFKCIKHNREFLQVGRWTPTTKPCSDCGHHNSNLSLSDRQWTCPECDSHHDRDVNAAINILRAALGPSVEQT

SEQ ID NO: 21889 - protein, 383 aa, unknown
  TnpB Polypeptide
MRKRKKKKNRRTYKFQLREHPKNVRLGNMLDDLADVHNHFLALEKRYYRRYGKYAGRFRLQPHLTKLLERTKQHWAWIPRDTLDAVIIRIHVTYERFFDGLGGLPKFKRKDRYRSAKFPSAYLLEEGRVRLSFKAWDDRQHRLKFNKRWFSFHQHRDYEGKVCYIQILRDRVGTYWLYVITDASTTEPCSATGESVGIDFGMETYLTFSTGEKKHSPQFFKHALKELRTLNKSISRKVKGSHNWWRCVRELARLYRHITNQRKDWHYKVATDLCKRFDTIVTETLNLSGMKRLWGRKVSDLAFGQFVEILKYKCQKHGRHLLQVGQWTPSTKPCSDCGHTNENLSLSDRQWTCPECGSHHDRDINAAINILRETALGPSVEQT

SEQ ID NO: 21890 - protein, 369 aa, unknown
  TnpB Polypeptide
MKTYKYPFYDQSNCIRLGNLLDDMWQVHECFHKWQRQRYKDGLPYANYEAMCLHVTDLKRTTYPHWKALPSQAIQEELRRIDKAYIRFFKKLGGRPKIKKRHKFKSFTLKQAGWSLKDNRLTLNFRKWNNGKWRHDKVAYTFHKHREFEGNIRRITIKRDACGDYWLYILTDFVETKPLPTTGKSVGADFGMKDAYLTLSTGEKKQHPQPLKQSLNELRSLNKSLSRKIKGSNGWWRCVRQLARLYRKITNHRKDFHWQLASELCKKFDTIIIETLNLGGMKRLWGRKVSDLSFYQFVEILKYKCQKHKRQLIEIGQWTPTSKPCSDCGYHNENLTLNDRQWTCPECGSHHDRDINAAINILRVGIAVA

SEQ ID NO: 21891 - protein, 506 aa, unknown
  TnpB Polypeptide
MARYKGPNFILELRLYPQQWEFDFLEHLFRCSEKMYNNLVYFANGQLKKMRKDSDYIHFLDLYVNEKDEKKKKDYGKELSAIREKYHLSSNYFESYINKIHNKSYKKTIDCDTVQKLAQRVWKSTEACLFGNGKKVHFKKFKTLDSIEGKKNTSGIKFDKDHSVLKFRGMIISVKIRKTDYYAKEALENEISYCRIIRKPFKTGYKYFLQIVLRGVPPIKPNRIPGQIKGNVAIDIGPSTIAAIGEEDGLLEPLSPQSIKDCNKLIIKLSRKLERSRRLANPQNYNKDGTIKKEKHQWLKTKNYYKILFQLKNIYRLKTLYLREYQAVVQKRIMSFGNNFATEEINFISWQKRSKKQTEKSNQIIETKDKNGNIKKYQKNKKKKRFGKSLNNNSPGRFINELKQKLEYFEIELEEINTQKMKASQYNHDTNTCIKVPLSQRGKLVDGQWVQRDLYSAFIVQNRKDKETVDRAKCEKGFKKFLEIQNRIIENLKKRGDDLPKCMGIL

SEQ ID NO: 21892 - protein, 400 aa, unknown
  TnpB Polypeptide
MAGIPSAILASTNRIENTEWFAGLKRKKTSGGRTPGFKSRHRGLGFVCWRNASKTGNAIFRKTGRKSGVVVITGMNPTGWVKPGEKAHWRVVIHVRVSQPIRPYTSVHVDWTHRSLVFVNMPLPLPRIGDGVIGIDRGCVHTLALSDGTFMDVPKPSKAELKRLKHLQRKMARQDRVNEARGGKTAKFESKRRRKTLSEFNALNSRIIRRRNDWIEKTTTSLAKANVLVALEDLDVKAMTKRPKPKPDPDKPGQYLHNGARAKAGLNRSILSNNWSRLMKWLKDKMDANGGKLVIVPAAYTSQTCHQCGHVAKENRDSQAVFHCVECGYKANADVNAAMNILGRALNQTGGDTASDVEDPHWRPDEASTPSFPQTGSPLGVQSVKGIPPALAVGRMSRRI

SEQ ID NO: 21893 - protein, 393 aa, unknown
  TnpB Polypeptide
MTLVEQHIIKPNNPLYSELASACFLSKNLYNQALYRIRQYFFKTGSYFNKYKLINEMTSEQQVDYINLPRKVSQQVIIMVDQNFKSFFGSLKLKKVEHKVLIPRYLDKYGSYILIYTNQAVHRSLLKQGILKLSGIENTIKIIHTDVQQVRVIPKNNKFIVEVIYRKEPKKQVKGNKCVGIDLGLNNLATVGTNYGNPFIINGKPLKSINQYYNKNLSKLQARRDKLKNKSVNKHKIQVLTNKRNNKVKDYLHKASRLLVNQLVSNGVATVVIGHNKEWKQDINIGKSNNQKFVQIPHSMFINILKYKCELEGITVIIREESYTSKCSFFDNEEICKHTEYKGKRIKRGLFRTSSGRFVNADLNGALNILRKEIPNAFSYGIEVCSTPRVLSL

SEQ ID NO: 21894 - protein, 462 aa, unknown
  TnpB Polypeptide
MPRHRDPQCPAVVHRTARAGLRLTRGQRQRLAGLLVSAGDVWACVLEVNAWRRARQDVPLVSYPALCRELAAAGPGCFGELDSAGARSVLRRYSDAWFAAAARRRGGDSSARFPRRRRQMMPVRWYHGTFVLEGRRLRIPVARGCAPLWVRLDRDLPYLPAQVRSVTLLYDAGRLWVDVTAEVPVAGYPPGLEPDRGRVAGVDLGIIHPYTVAGPDGQALMVSGRAIRAEHRMHLADTKARQRAVARRAPKPGQRGSRRWRQFRRRQRAVEARHRRRVRQAQHEAARTVIGWAITRRTGTLAVGDPRGVLGIDAGRRHNRRIRDWRVGRLISALRDKAAQAGIHLILTDERGTSSTCPACRARVPRPRGRVFCCPRCGLAGHRDLIAAANIAARAGGGITPAIPADVTHRRAGNHLPGVSPARRDPRRRPHHGDARGSPGRHLPAPPDTTGRGVARPTARTS

SEQ ID NO: 21895 - protein, 213 aa, unknown
  TnpB Polypeptide
MTCYDSGNGRTFILGRKYLSLERYFHKEIARVQSVWYAQQSEKGIKYPRSSKHIQRLYRKKQNAVKDYLHKVTRWIAEYCRKEDIRCVVVGDIRNIRKEKDMGHKTNQKFHGLPYNRLYIMLEYKLKLYGIQLIKREESYTSQCSPLAPEVSKKYAEASNRKKRGIYITNGVRYNADAVGAFNILRKYLSVSGKQKELSVTGLKNPEIIKVAV

SEQ ID NO: 21896 - protein, 205 aa, Geobacillus sp.
MVNDNIKLENGYIKLPKIKKPIRVKQHREIPADYKIKSCTISKTKTGKYYISILTEYEKNISSVKIQKVVGLDFAMDGLYVDSERGEKANYPRYYRQALDKLAKAQRILSRRKKGSTRWEKQRLKVAKLYEKTANQRRNFLHHKSKELAANYDAVIIEDLDMKSMSQALNFGKSVHDNGWGMFTTFLEYKLKEQGKQLVKIGNCR

SEQ ID NO: 21897 - protein, 344 aa, Geobacillus sp.
MGGENMYFCIKQQLNGLTKEEYLTLRELCHIAKNMYNVGLYNVRQYYFEHKEFLNYEKNDHLAKTNENYKLLNSNMAQQILKKVNEAFKSFFGLISLAKQGKYDHKAISIPKYLKKDGFHSLIIGQIRIDGNKFTIPYSRLFKKTHKPITITIPPVLLDKKIKQIEIIPKHHARFFEIQYKYEMPEDQRELNDQKALAIDLGLNNFATCVTSDGRSFIIDGRRLKSINQWFNKENARLQSIKDKQKIKGTTRKQALLAMNRNNKVNDYINKTCRYIINYCIENQIGKLVIGYAETWQRNINLGKKTNQNFVNIPLGNIKEKLYKLKLCFTSSRAPTAFYQNDLL

SEQ ID NO: 21898 - protein, 394 aa, unknown
  TnpB Polypeptide
VSRYRLHPSPAQERILREHCAHARFVWNLAVEQHSWWHPGGKSAPGYLAQCRQLTEARAEFDWLRAGSQMIQQQALRDFSQAVAYHVSGTHGRPTWRKAGKDEGFRVVALKPTDIRRVNKNIAQVRIPKAGWVRFRLSRPVSQSAKSFRVTLDRVGRWHIAFAVIPPPIPAPANGLVVGVDRGIKVSVALSTGELQSIGKLSPGRERRLLRLERSLARCQRGSNRRTRVKRNVAKLRSRQASMRKDWCEKLTTHLAVSFDLIRVEALDVRAMTRSARGTATKPGRRVAQKAALNRGILENSWGMFVTRLDQKAPGRIERVHPAYTSQRCSACGKVDAKARQSQAVFACRSCGYTSNADVNAARNIAVGRTVTARGGVGIAQPVNREPQPVLLSI

SEQ ID NO: 21899 - protein, 490 aa, unknown
  TnpB Polypeptide
MARFEVPAGSVVQAYRFAMDPSPKQLRGLESHCGAARFAFNQMLNVVKANMGQRAAERSYGISEESLTPAQGWSLPTLRKTWNQIKGDVAPWWSANSKEAYNSGLDALARALHNWSASRVGERAGEAIGFPRFRSRRRSARSVRFTTGAIRVEPDRHTVVLPRIGRVRTHESTRKLARRIDAGTARILSATVSYRAGRWYCAFQVLVTGKMRPAHADRSPHPVVGVDVGVRDLLVVATPGGVEVDRVAAPKPLTAAQNRLRALQRQAVRQQGPYDPTAQARRDPSARWRRTQARIARTHARIADIHDHEIHVATTKLATRHQVVVVEELAAKNLSRRGGAPKRGLNRALSDAAVGRIRTQLGYKTTWYGSQLMTAPRFFPSTQLCSRCGAKNKLLLRDRTYRCRNGCPPLCRDLNAAINLARLSDTCTVNVSEMGPGTGSRPAASVSAGDGRGANRKTSPSTVAGTAGGDEASTPHTSKTGTATSKGEAA

SEQ ID NO: 21900 - protein, 427 aa, unknown
  TnpB Polypeptide
MILAYQYRLRPNKEQIATIEKWLELLRKQYNYRLFERFSWWEDNRNPINACPLNTPIPQLRDNPDYYSQKRDLVNTKQKFPEYKQIHSQVLQDCIKRVKLSFERWFKQDNSGKRLGKPRFKGKGRYRSFTFPQVKQDCIQGKWINLPKIGRVKLIQHRPIPDGFKIKTVTISRKADGYYVTLSLEDKSVPIFTADIKPSLENTLGIDMGLKDFLVTSEGDVVEIPQYYRKSQKRLKILQKRLSRCQKGSKRRAKAVKAVGRQHKKIADMWCRLPACKVYFTGWKPVATQDFHFKTANKLLLKSEVIAHEDLNIKGLAKSRLSKSINDAGWGQFLTILTVKAEKAGQLTIAVNPCGTSQDCSNCGKKVPKKLSERVHSCPDCNIILDRDENAAINIKNRAVGHSVRSARGVRRDTGTKKREARTIPSG

SEQ ID NO: 21901 - protein, 664 aa, unknown
  TnpB Polypeptide
VRGVDEGSGHVLSAAVVAGRADWLAALARGMTAALLEEHWSAGDVRALASGLDALGRPLPSRAWMACRRLGWNAAAVEGVRVNDRVCRMAQQQAGRLLRSAAARDALITAVIATWPAVPAKRAPGEWDALRAAVPGGADVPTSMLRARTRQTARFLERNGRLPADLFELEDPPTARGMLLLAACDRQMATLERDTADPSRALLRVKLPTRPDPRSHKDWSWVAIPLFLPLTVPAGAVLHLPTLRVAEGRLQAEMPFTLTVPAARRAGHAVALGIDWGLNTLLSAGVARLGPDGAISALGAGAQYRANGVLAKQTRLRRRGEALRAKINCYERLIGDDPGRPLAAKAEALREEERRVAARRSHLNDALAWSAARWALDQALAASATAVYLEDLTDLEARGMGKTMNTRLSQTVRGAIAEKIRHLAAEYGIAVVTVPPQGTSKNCPVCLAPLRHCKSPDRPGEPGWKWARCTACGWQGDRDIGAWMRIAARGLAHQAKTSTDRAGAITVRAIDPGLEPRTAIAPYTSPARDRSKCDPTPRRKKNPRPAPRRRGTPSPSGSQRPDGQRPEGRVSTAREPLPRAATRDQGASTTCDTPARTPHRARGAALGAGFHLHAHATPPRRESVPQAHPAPPTGWLRILEQVRDATRLRSAAVRLRAPVARALR

SEQ ID NO: 21902 - protein, 470 aa, Thermofilum sp.
MSERNGSKGSKNGERLVDAFRVWEIKANRKLRLRLRKLYSDITLAVEHASEDLEGKYGEEFTQEPERFGEELIEEASRLAGLPKGLLYYAVEWCRMDAEARRKSNKRTRFTPPPLPLLVKVVGNSERFHGNTNAAAVLDTYRGELRISSAGVVVRLKPSLIRAVLEDVERFGDVKLTLQLTARGRLRLIAHRKVRPARWDGNSKLATIAVDVNSSHGLYLATFTFDDEVRLVAQCVFKPPNTTLLRLLAAVMRSYSEVKSWGEAVERFKQRRDIRRLQREGWGSAVEGALRLAERLRAKVNLTPERAERIARQASRKVKKINNDWIRGALKELRALVRKFRDQGYFVVLVADVPRAESLRGTKLQRTLLRVAERVKNLALYEGAKWFQPENNVSGKRCPLCGKEGVEVQRRYYRCAGCGLVYGRDWAAAFNAAKLFLKACNAKKQLEALSQWLQSHPRALIHGSLSFPKR

SEQ ID NO: 21903 - protein, 468 aa, Thermofilum sp.
MSGEGKGSKNGEKLFDAYRVWEVKANRELRLRLRKLYYDIASAVERASEELERKHGDAFRREPGRFREELIEGASRIAGLPKGLFWYAAEWRRMVAEARGKSKRRSRFTPPAVPLLVKVVNGNERLHGGGNAVAVLDASSGMLRVPSASLTVRLRPSLIKAVLEDIQRFSDVKLTLQLTAKGRLRLVAQRKVRPPWWDGDGKLAIVAVDVNSSHGLYLMAFAFDGEVRLIAQRVFKPPNTTLLRLLAALLRSYSKVKCWSEAVERFRERRDVRGLQRTGRSHAVDEALRLAERLRAKINMTPERAEKVAGQASRKVRKLNDDWIRSVLREMRVLVRKLRDQGYLVVIVVDVPRAESLRGSQLQRTLLRVARRLENLALYEGAKWFEPDNNVSGKWCPLCGKEGVEVQKRYYRCTGCGLVYGRDWATTFNAAKLFLKACDTKKQLEALQSWLQSHPRALIHGSLSFPKR

SEQ ID NO: 21904 - protein, 378 aa, Moorea sp.
MKLTPNSVNKIRVFPCKELHKIWKTWLNAYRWIYNWSIATIKNGYVGSAYDLQKLARNSDRPEWVKTLPGHQLQEAVADAIDASKQAKANGGFAKFKSCRETSQVIKFKAGNFKKGSWYLRKVKGLSFRSPQGFPDQCIYGTQLVWIKGKWYGIFPEYIEPTPTTVDKVIALDPGIRTFLTGFDGFSYLEIGTGDIGRIQRLCQQLDRLMSRIDLSSAKRQRRAMRKASHRLRQKIQDLIKDCHNKSASFLVNNYKLIFIPTFETSQMVVKSARRLNKKTARNMLTWSHYKFRQHLIQMADRNDVRVVLVNESYTSKTCPECGQIHEKLGGNKKFQCPKCGFSLPRDWNGARNIMIRALSATTTRFSSGAIQVIPADE

SEQ ID NO: 21905 - protein, 194 aa, unknown
  TnpB Polypeptide
VTEDTTVGLDYKSDGLYTDSNGETCGMPHYYRDSAKRLAKAQRKLKHKTVGSNNYKKQQKHIARLHRHVADQRKDFLQKESTAIAKQYDHVCIEDLNMKAMSNKGFGNGKATLDNGYGMFLKMLDYKLKEKGGSLVKVSKWFPSSQTCSCCGALHPEMKDLSIRTMRCSCGCKIDRDYNAAINIKEEGLRLLSA

SEQ ID NO: 21906 - protein, 206 aa, unknown
  TnpB Polypeptide
MPDKQRRLAKSLSRTKKGSRNRCDAAAALARHHHHVANVRRHFLHQVSNTLVKTHDRLVIEDLNVSGMLANHRLARAISDAGWAEFARLLSYKHAWRGGQLAVADRWYPSSKRCGRCGALRSDLTLADRVFACGCGHTADRDRNAATNLAHWGQNHHNASPDPQTPKQRGRATNARRRDGADQHPTCAGETSPKDAGTDVHTAPAA

SEQ ID NO: 21907 - protein, 206 aa, unknown; identical to SEQ ID NO: 21906
  TnpB Polypeptide

SEQ ID NO: 21908 - protein, 357 aa, unknown
  TnpB Polypeptide
MIRTTKHILKYQTMYKSYWLRELFEIHKAELNCYVEALFLNELPIRKFLSSKYNTGVNIKHSQWKSVIYKQASEIIRGNGVNNEVKPNLRNFTIYLNEFLFDIEWKKGGEFDGFIRIRLPFTQKGIRHKSEGIPICLPFKHHAHSLKYKNWKLLKTVKLKVVNGNTYLYLLWEKDAKKLKKTGKTIGFDSGYNHLLSDSTGKFHGSELKEIYEKLARKERGSKNYKQTLSFRDSKINEVVNKIPIKTYKEIIVEDLKNVKRNSKLSRKLNNKMQYWSYSKGINKLERLCEEHGVQFTKVNPAYTSQSCPKCGFTARSNRNLEKFLCGECGYENHSDTVGAINILNRGICGLSTTEMN

SEQ ID NO: 21909 - protein, 357 aa, unknown; identical to SEQ ID NO: 21908
  TnpB Polypeptide

SEQ ID NO: 21910 - protein, 573 aa, Halobacteriales sp.
MSDHLSLPIRLPDEDADKFERLETLTRSVATHVLKDHWMPAHLDGIADSSHQAWKYFDEHEPFVELDLYLPSRFRRCILQKVGETIRSHADRRDAFQSIQNVLPDHKIRRIHRRRIKDQLWDGGNYLSSGYVDILIDQLNSYYDRHGTYPDTYFEMQDCPAYDSGVLPFSADDGPTSGQAVNYQYDSDTETLTVRIKTPDTRSPETRGDWSWIEYERDSYEAFHDLLTHGDLSAPEFQPSRRKNGDTYYELSFPVEVEHIEVTDGTDCVLALDAGMRKDMTAVVVTDNGEQLSTPHFIQFTDRDGMRRLHRERTQLNDRLSALRRNSHAHTDEFRHIHSEYERVNSKLQHKREQLAHDVANQVLALALRYDVDAIVHEDLRSLSPPRGEGTLSWELSSWARRDIIENIEYRAECAGLAVERVYPQGTSRSCPRCGATGHTCKSPDHHEELWWGGHFRCDNARCGFEGDRDYIGALNVARVFFSDGDSIDHGSPSSYTGDFETVLASRSAGTRLTFGTGIITYKPEQAEATAGGGSAVIAPAVALPESNADGSDGRGPAVQQCTRFLRCTTENY

SEQ ID NO: 21911 - protein, 384 aa, unknown
  TnpB Polypeptide
MTEVVRTIKIPLHPTDEQIKLFNDKCYVYHTLGNKAVEYIRNNRDHFIDEVELRHYLTDENTFSDASFIITMIAKEKILALKKTGKVNFKKYTPTYKTFPVRCDTNGGRLSRVYSDDCINIKIPSVKGQVLISNSWKKNMISAYGNEYLSEILNCKKQAARVKFDGMHWFLLINVNLSYPDKQVEDKSLGVDVGFYNLAYCSDGSKLRGINHNKHVEITKIERRIKILQRILARKYLRNTGKTNAILKIERKIFKLVHHLRNMRENEMHNISKVIAFSDYGIVSFEDLNIRGMIPRHSRSVQRTGLRKFITYCQYKCEEYGKRFIKVDRYFPSSKLCSRCGYKRKFLGENERVYHCFECGYKIDRDYNASINIMREGYRLAHLV

SEQ ID NO: 21912 - protein, 385 aa, unknown
  TnpB Polypeptide
MTKTKHKSYKFRLYPNQKQMLMFEKTFGCSRFIWNQMLADKIAYYKETGQTLKNTPAQYKKEFPWLKEVDSLALANVQLNLQKAYQSFFKNKNHFGFPNFKSKNKMTHQSYRTNNKQGVGTIRLSDNNNQIKLPKIGWIKVKAHRKLKGVIKSATISKTSTGKYFVSILCEIKIEVEENIKTFPKTNSNIGIDLGLEHFAILSTGEKIENPRFLISASKKLRREQKILSRRGLLAKQRGKSLNDCMNYQKQRLKVARLHEKISNQRRDFLHKLSTSIIKNHDRICMEDLASRNLMRNHHLARAIGDASWSEFRRMLEYKAEWYGKQIVKISRWFPSSQICSSCKTNSGKKPLHVREWTCENCGAHHDRDLNASLNILHEGLKILA

SEQ ID NO: 21913 - protein, 192 aa, Methylococcaceae sp.
VTRQAAGGQVGIDLGLKTTATCSNGDSLARQDCYRNLELKLGKAQRAKNKKRVKAIRAKIKNTRKDAIHKFTSKIVKENSLIIVGNVSSQKLAKTKMAKSVLDAGWFMLKTQLEYKSITTQGVFLEVNESYTTQTCSCCGCISLSSPKGRAGLRIREWTCAECGTTHDRDINAAKNILALGHKRLAVGISVL

SEQ ID NO: 21914 - protein, 400 aa, Actinocatenispora sp.
MTTDRVKRAFKYRFYPTDAQAAELSRTFGCVRKVYNMALAARTEAWTRQERVNYNQTSAMLTTWKKTEELSYLNGVSSVPLQQTLRHLQVAFTNFFTKRAKYPRFKSKRKSRKSAEYTTSGFRYRDGQLTLAKMSEPLDIRWSRPLPDGASPSTVTVSQDAAGRWFVSLLCEDPTVKSLPVVEAAVPIDVGLTHLLTLSTGEKISNPRHERRERERLVKAQRTLSHKANGSANRSKARRKVAKIYTRIADRRRDGLHKLTSKLVRENQTLVIEDLTVRNMVTNHSLARAISDAAWAEFRGMLEYKATWYGRKVVAVDRWFPSSKLRSKPGCGHLNEKMPLNVRTWTRPCCGATHDRDVNAANNLLAAGLAVSVCGAGVTPQRSSPGRQSATKQKVSRREP

SEQ ID NO: 21915 - protein, 526 aa, Mycobacterium sp.
  misc_feature (429)..(512): Xaa can be any naturally occurring amino acid
MPKFEVPDGWTVQAFRFTLDPTEDQAKALARHFGARRKAYNWTVATLKADIQAWHASGTVTAKPSLRVLRKRWNTVKDDVCVNTETGVAWWPECSKEAYADGIAGAVEAYWNWQTSRAGKRAGKRVGFPRFKRKGRDQDRVSFTTGAMRVEPDRRHLTLPVIGTVRTHENTRRIERLIKAGRARVLAISVRRNGTRLDASVRVLVQRPQQPKVVHPGSRVGVDVGVRRLATVATADGTAIEQVENPRPLGAALRELRHVCRARSRCTKGSRRYRERTTQISRLHRRVNDVRTHHLHVLTTRLAQTHGRIVVEGLDATEMLRQKGLPGARARRRGLSDAALGTPRRHLSYKTVWYGSALVVADRWFPSSKTCHACRHVQDIGWDEQWQCDRCSVVHQRDDCAAINLARYEETSSIVGPVGAAVKRGADRXXXXXXXXXXXXXXXXXXXXXXXXXXXXXXXXXXXXXXXXXXXXXXXXXXXXXXXXXXXXXXXXXXXXXXXXXXXXXXXXXXXXRWSHCGVDGHAGAR

SEQ ID NO: 21916 - protein, 379 aa, Halophilic sp.
MVREWKRGCQIAVNSAWGRCHTRNEVQQLAYDELRERTDLGSQHAVLATHRAAEAVKGAIDRGEAGDSGAKPEFTAPTVVYDTRTMTVFDDRTVSLTTTDERVRCDLVTADNGYQSRYLDDDRWEPAKSALHYRDGEFDLHLGFRASRPAVDPPGEDATVLGVDLGVENLAVTSTAEFFPGRELAHRHREFVDRRASLRATDTRSARRTLRRAGDRTDRHARDYLHRVAGGIVDEAERHRCEVVAFGELGDAHDRLQDAGKFHEWAFERLYEFVSYRAAERGITVVQVNPEYTGQRCTACGFTHPQNRDLDRNHFECLKCGNEANDDYNAAKNVAFRCVRRGPLSSPGVGAAYCALSSGRVTPDGDFVPNAELSEVPKT

SEQ ID NO: 21917 - protein, 155 aa, unknown
  TnpB Polypeptide
MDFGLKHFLNLDDGSVIDSPQWYKASLKDLRTAHRAVSRCQKGSNNRKRAIRNVERVYQRISNRRRDWLFKLANQLVGEHAIICIEDLNLDGMKRLWGRKVSDLAFAEFVSILDWVASNAGSSVVKIDRWAPSSKACHVWNGQRETHAEAALLGV

SEQ ID NO: 21918 - protein, 356 aa, unknown
  TnpB Polypeptide
MHRFRDACNFVSGYSLDRGVFNCLEIHKQLYGMIRSEYGLKSQMAENCFRHVSSKYFLKKTRKREQPIEFKQLFLPLNYPREYGFVNENTVSLITLNGRVKCTYLCGQHQRDILSLSEWTIKSSVLSYRKRDKVIFLNVAIEKEVPEVDIIGRDGKVGVDMGIYNITVTSDNRFFNGTRVRTVRHRYQQSRASCQSKDTRSAKRRLRQMSGRERRFVTDTNHCIAKQIVGETMEKYQKPIIVLEDLKGIRLNGNVRGKERRRELNNWAFFQLQQFITYKANERGIPVVWINPKYTSQTCPTCGHKDKASRHQSKHVFKCMKCGYQTNDDRIGALNIKARGTDYRYIRRSSGVCQAP

SEQ ID NO: 21919 - protein, 395 aa, unknown
  TnpB Polypeptide
MYLTKKIRLFPTAEQEKLFWKSAGVARWSYNFFLSYNREKYNEWLKDNTKEKFISESDVRKYINNVLKKTTHTWLKEVGSNVMKQSVKDANNSLQRYFNKISGYPKYKSKKRFKPSFYVNYETLRRMPNGFRGEKIGIVKTREPLPKIPKDQKYVNPRITYDGKFWYLSVGYKIEQKQVKLTDNKIGIDLGLKDLAIISNADNSCCKKYRNINKGYKVRLLEKRLKRAQRKLSRKILNNIKSYDENRVPTYIRPLKDCRNVQKQKHIVQNLYRKLTNIRNNYIHQITTEIVKTKPSKIVLEDLNIKGLMKNKHNAKSIADSKWYEFKRQILYKAELYNIEVILANRFYPSSKTCSCCGNYKKDLKLKDRTYICGECGLKIDRDINAAINLANYQI

SEQ ID NO: 21920 - protein, 280 aa, Geobacillus sp.
MANKAYQFRLYPTKEQEQRLAKTFGCVRFVYNKTLEERIQMYEKFKDDKEALKQQTFPTPAKYKKEFPWLKEVDSLALANAQLNLQKAFQHFFSGRAGFPKFKNRKAKQSYTTNMVNGNIKLSDGYIKLPKLKWIKFKQHREIPAHHIIKACTITKTKTGKYYISILTEYEHQPALKEVQTVVGLDFSMSTLYVDSEGKRANYPRFYRKALETLAKEQRILSRRKKGSNRWHKQRLKVAKLHEKIANQRKDFLHKESHKLAKRYDCVVNVPSPPFRSTRS

SEQ ID NO: 21921 - protein, 411 aa, unknown
  TnpB Polypeptide
MQYNYKYRLDPPEDIAETLLHHVNTCRQLYNHILYLVNEADDIPARYEVQGQLPDLKTWWDDLGDVHSKVLQMVVKRVYDNLSTLKAQKENGRAVGMLKWKPPREYRSVTYNQSGFELKNTSGRPVLWLSKIGEIPIHPHRDIPEKATVKQVTVKREPTGEWYATFGIDMDESTPDKPENPEQCIGIDVGILKYAHDTDGYAIESPDFSDERERLERAQRNLSRKEHGSNNWEKQRRVVAERHADLKRKRRDFLHKLSNHYACEYDLVAVEDLDAKGLIELPGNSRNRAGAAWGAFLRMLEYKCEREGAYFVAVNPRGTTKECASCGVSTEKPLWVREHSCPACGFEADRDANAAWNILSRGLEKLGVVHSESTPVETALPVDTSVSAKRVVETGSPTLKREGVSPSGRVG

SEQ ID NO: 21922 - protein, 359 aa, unknown
  TnpB Polypeptide
MKLTAQVKLLPSREQAKALRDTLEKANAACNHISEVAWRERIFGQFALHRLTYHCLRGQFGLSAQVIVRCIAKVADAYKLDRKSRRIFRPAGAISYDSRILRWRLSSSEVSIWTVAGRQTIPFVCGDRQRALLTTQQGESDLAVVEGKWYLFAVCNVEGPEPGDVGDFLGVDMGVANIAADSDGRVYSGAVVNGLRHRHRRLRSKLQKKGTKSAKRLLRKRHSKESRFARHENHCISKEIVAAAEGTKRGIALEELTGIRSRITARRPQRATLSSWSFAQLRSFIEYKARRAGVTVIAVDPRNTSRTCPACGYTDKANRPEQSIFSCVQCGFSGPADTIAAENIRRAAIRLPNAAGIYA

SEQ ID NO: 21923 - protein, 217 aa, unknown
  TnpB Polypeptide
MSIDLGVNNLASVVTNVSNKPVLIDGRKLKSINQYYNKKRSFLQSKLEKINGKKNSRRLASLTRKRNGKVRDYLHKASKKIIDICVEDNITTLIVGHNDGWKQKVNIGKRNNQNFVFIPFDDFISMLKYKSERQGLRFFVVNESHTSKCSSYDLEKVCHHNTYVGKRLKRGIFRTKDGVLLNADVNGSYNIMRKVKGDAVMPPYTGFGYNPVKKFIN

SEQ ID NO: 21924 - protein, 373 aa, Anaerobacillus sp.
VILAKKVRLRPTKAQEQKLWKSVGTARWAYNWTLNKQQENYKQGGKFISNGDLRKELTVLKQTEEFKWLYNVSNNITKQAVKDACDAYKKFFKAQTKFPKFKSRRNSKASFYNDTEKLKVKKNLVLIEKVGWIKTSEQLPTDVKYKNPRISFDKKYWYISVGIETEIEQVEFTNSMIGIDVGIKKLAVCSTGQNFKNINKTKEVKKTEKRLRRLQRSVSRKYEMNEEGNRFVKTSNIIKLEKKAQRLHRRLANIRTNHIHQTTNAIVKTKPSKVVMEDLNVNGMMKNRHLSKAVANQTFYEFIRQMKYKCQKYGIEFAQVDRFYPSSKTCSSCGEVKKDLNLSDRTYSCDCGLKIDRDLNAAINLSNFGKLAV

SEQ ID NO: 21925 - protein, 402 aa, Escherichia sp.
VKRLQAFKFQLRPGDQQECEMRRFAGACRFVFNRALALQNENHEAGNKYIPYGKMASWLVEWKNATETQWLKDSPSQPLQQSLKDLERAYKNFFRKRAAFPRFKKRGQNDAFRYPQGVKLDQENSRIFLPKLGWMRYRNSRQVTGVVKNVTVSQSCGKWYISIQTESEVSTPVHPSASMIGLDAGVAKLATLSDGTVFGPVNSFQKNQKTLARLQRQLSRKVKFSNNWQKQKRKIQRLHSRIANIRRDYLHKVTTTVSKNHAMIVIEDLKVSNMSKSAAGTVSQPGRNVRAKSGLNRSILDQGWYEMRRQLEYKQLWRGGQVLAVPPAYTSQRCACCGHTAKENRLSQSKFRCQVCGYTANADVNGARNILAAGHAVLACGEMVQSGRSLKQEPTEMIQATA

SEQ ID NO: 21926 - protein, 402 aa, Escherichia sp.
VKRLQAFKFQLRPGDQQECEMRRFAGACRFVFNRALALQNENHEAGNKYIPYGKMASWLVEWKNATETQWLKDSPSQPLQQSLKDLERAYKNFFRKRAAFPRFKKRGQNDAFRYPQGVKLDQENSRIFLPKLGWMRYRNSRQVTGVVKNVTVSQSCGKWYISIQTESEVSTPVHPSASMVGLDAGVAKLATLSDGTVFEPVNSFQKNQKTLARLQRQLSRKVKFSNNWQKQKRKIQRLHSRIANIRRDYLHKVTTTVSKNHAMIVIEDLKVSNMSKSAAGTVSQPGRNVRAKSGLNRSILDQGWYEMRRQLEYKQLWSGGQVLAVPPAYTSQRCACCGHTAKENRLSQSKFRCQVCGYTANADVNGARNILAAGHAVLACGGMVQSGRPLKQEPTEMIQATA

SEQ ID NO: 21927 - protein, 399 aa, unknown
  TnpB Polypeptide
MIKTIKHRFYPTKDQEILLRRTLGCVRFIYNKSLDLKSSTFTQTGKSLSSFDLMKELTNWKRQPEYSWLNEVSNVCLQQAIKNLGAAFDNFFAKRAKYPKFKKKSSGSSARFTTSGFRIKNNQVYIAKSKQPLKLSKDNWRIKSTDRLISLTIRLTPSQEWYFSITVDSNEDCKLPVSNKSVGLDLGLHNLITTSNAEVFKNSDTKEDFNKLRRLQRKASCKKLGSKNRTKANVKVAKCYQTISNKRIDNLHKITTKLIRENQTIVMEDLAVKNMLKNHKLAHAISNSSWSMLRNMLEYKCKWYGRELKIIDRFFPSSKTCNHCGYIKQNLKLSERSWTCPVCGSVLDRDINAAKNILAAGQVVFVCGGGVRLKDAKASNAVADETENLNREVRITQLL

SEQ ID NO: 21928 - protein, 408 aa, Cupriavidus sp.
MLIAHRIALDPNNVQATYFARAAGTARFAYNWALAEWQRQYEAWKADHALPKPSQMALRRKLNAIKREQFPWMLEVTKNAPQMAIIQLGQAFQNFFAGRARYPKFRRKGMHDRFSLTNDQFRLDGSRIRIPGLGWVRMRETLRFAGKIMSATISRVADRWFVSITVETPDSSHLPEAENQGVVGVDLGVSALATLSTGESIPGPKAHTALLSRLRKLSRSLSRKVKGSANRRKAKARLAELHARIAAIRLDALHQLTTDLTRRFHTIGIEDLNVRGMVTNRHLARSIADMSFFELRRQLEYKADMRGGKVVVAERFYASSKICSTCCHKLDSLLLSVRAWTCPACGTSHDRDVNAAVNLLHNAVSSTVSACGEEGAGLRRKTKTKPASAKQEVSGDQIRSTASKIAQV

SEQ ID NO: 21929 - protein, 411 aa, Cupriavidus sp.
MQRLQAFKFELMPTGEQQRNLRRFAGSCRFVYNKALALQKARYEQGEKKHGYAGLCKLLTEWRNSTDTAWLSDAPVHPLQQTLKDLERAYGNFFAKRASFPRFKKKGQSDSFRYPDPKQIKLEQGNSRIFLPKLGWLRYRSSRHVLGDLRNATVSVSAGKWFVAIQTQREVETPVPQATGAVGIDVGVARFATMSDGTFLAPLNSFKRHEAQLGRAQRSMSRKVKFSSNWKKAKARIQRIHIQIGNARRDYLHKATSAISNNHAMVCIEDLQVRNMSRSAAGNVEAPGKNVRAKSGLNRAILDQGWFEFRRQLDYKLTWSGGTLIAVPPHDTSRTCPVCGCVSAENRPSQAVFRCIECGHEDNADVVGAINILARGHRVAACGEDVSLGASQAASTKQEPTEATMHEVTHV

SEQ ID NO: 21930 - protein, 411 aa, Cupriavidus sp.
MQRLQAFKYELMPTGEQQRNMRRFAGACRFVYNKALAMQKENCEAGGKFIGYVAMAKQLTAWRNGAETPWLKDAPVHPLQHALKDLERAYKNFFAKRAAFPKFGKRGRRDSFRYPDPKQFRIDRANARIFLPKLGWMRLRLSREVLGTPRNATVSLSGGKWFVSIQTEREVEQPVPRATSAVGIDVGVARFATFSDGTSLAPLNSFKRHEARLRRAQRSMSRKVKFSNNWKKAKARIQRIHIQIGNTRRDYLHKATSAISKNHAMVCIEDLQVRNMSRSAAGDVETPGKNVRAKSVLNKSILDQGWFEFRRQLDYKLAWSGGLLIAVPPHNTSRTCPACGCVSAGNRPSQAVFRCIECGHEDNADVVGAINILARGHRVAACGEGVSLGASQAASAKQEPTEATMHGETHV

SEQ ID NO: 21931 - protein, 425 aa, unknown
  TnpB Polypeptide
MIVGVSGEVTVVQAYRFALTPTPTQEALLRSHCGGQRYAYNWGLARVKANVDQRAAEKSYDIPGDQLTPPLSWSAYGLRKDWNQAKDEVAPWWAENSKESYASGLANLATALKNWGDSRTGKRKGRNLGFPRFKGRRAGVTCRFTTGAFGLAEGDRRHVKLPRIGMVRTHESTRKLARHVERGTARIRSTTVTFRSGRWFCSFSVEITRHDPAPARPDTAVGVDLGVTSLAVLSTGEVIPNPRHLEIAQRDLRRLQRQAARRDGLHKLTTRLVRTFGAIVIEDLHVAGMLRNRHLARRIAGVGMGELRRQVEYKARWAGVHLRVANRWHPSSKTCSDCHVVKAKLRLSERTFHCDSCGFTLDRDLNAARNLAGLVETSSPSYGATLNEPAGNPRKTTVHGAAGTATGRPAPHGVGQRRRRKATAA

SEQ ID NO: 21932 - protein, 374 aa, Anabaena sp.
MKTLKFKLYQHKRNRFLKRMINASGVIYNHCIALHKRYYRMWGKHLSCAKLQAHIAKLRKRNPFWQTVGSQAVQDICQRIEKAYQLFFKHNKKGVRPPGFKKVKKYKSFTLKQAGYKFLGGNRVKIGNRVYQFWKSRQIEGTVKTLTIKRTPLGELFVVVVVDDGIKPEIEIKTGKIAGFDFGLKTFLTCSDGTKIDSPQFFKQSLNAITKASRQHSKKLKGSANRKRARLNLVRKYEDISNRRRDWFWKLAYELTDKFDVLCFETLNLKGMQRRWGRKISDLAFGEFLEILEWVAKKKNKLIVFIDQWYPSTKTCSHCGHVLESIDLSVRSWSCPSCQSVNERDENASKVICAVGASTVGLGDVRLATPAIAV

SEQ ID NO: 21933 - protein, 414 aa, unknown
  TnpB Polypeptide
MRRVEQHVIEKDHPQYQAIDEMAFAAKNLWNLANYHVRQSFIFQHTYLDNIATFRLLKETDAYKALPAKVANQVLIQLHQAWIAFFEAMQEWREDPSKFTGCPKLPKYKHKTRGRTLLVFELGAIWKAALNHQEIAVSELGFLVFTKQTRAVIEQVRIVPKADHYVVEVVYQAQKERAPTSPDLFAALDVGVNVLAALTSNKPGFIPLLVSGRPVKSANQLYNKLREHEQKKLAKGQEKRLTSRRLDRITTKRNRRVMHYLHTASRRIIDLLVHEGIGTLVIGKNPFWKQGVALGKKHNQEFVQLPHATFIEMLTYKAESVGMTVLITEESYTSQASFLDRDPLPKYGPSQGEKQEDNPRFSGRRDGRWYKVKGRAPIHSDVNGSYNISRKVFPTAFDGLGIEATAVRPRRLAV

SEQ ID NO: 21934 - protein, 382 aa, Microcystis sp.
  misc_feature (247)..(365): Xaa can be any naturally occurring amino acid
MEKAYSFRFYPTPEQESLLRRTLGCVRLVYNKALHVRTQAWYERQERVGYAQTSSMLTDWKKQEELEFLNEVSCVPLQQGLRHLQTAFTNFFSGRTKYPNFKKKHQGGSAEFTKSAFKFKDRQIYLAKCTEPLPIRWSRQIPEACDPSTVTVRLHPSGRWHISIRFDDPTIKPLPVTDKAIGIDLGISSLVITSDGDKVSNPKHFNKHDRRLRKAQKNLSRKQKGSKNREKARIKVARIHAQITDSXXXXXXXXXXXXXXXXXXXXXXXXXXXXXXXXXXXXXXXXXXXXXXXXXXXXXXXXXXXXXXXXXXXXXXXXXXXXXXXXXXXXXXXXXXXXXXXXXXXXXXXXXXXXXXXXXXXXXXXGEDVKLVEVKLPSGRNW

SEQ ID NO: 21935 - protein, 247 aa, Microcystis sp.
  misc_feature (247)..(247): Xaa can be any naturally occurring amino acid
MEKAYSFRFYPTPEQESLLRRTLGCVRLVYNKALHVRTQAWYERQERVGYAQTSSMLTDWKKQEELEFLNEVSCVPLQQGLRHLQTAFTNFFSGRTKYPNFKKKHQGGSAEFTKSAFKFKDRQIYLAKCTEPLPIRWSRQIPEACDPSTVTVRLHPSGRWHISIRFDDPTIKPLPVTDKAIGIDLGISSLVITSDGDKVSNPKHFNKHDRRLRKAQKNLSRKQKGSKNREKARIKVARIHAQITDSX

SEQ ID NO: 21936 - protein, 309 aa, Fischerella sp.
  misc_feature (200)..(295): Xaa can be any naturally occurring amino acid
VFTTKPACSDGTIIDDPKFLANTQQKIEQTSKKLRRKRAPNFKKKIKASKRWRKVRKQISKLQNKVASQRQDWQHKVAAQIVSGNSLVATEKLNIKGMTRKAKKGSKGKHQKTGLNRSLLDVGIGNLISLIRYKLDECGGVFVDVPFKIAPSQTCPQCGYKKKKELSQRVHNCDNCNLIADRDVAAAMVMLNYAKGLGTXXXXXXXXXXXXXXXXXXXXXXXXXXXXXXXXXXXXXXXXXXXXXXXXXXXXXXXXXXXXXXXXXXXXXXXXXXXXXXXXXXXXXXXXXXXXXXXXSLTNAVSFFSEEPG

SEQ ID NO: 21937 - protein, 392 aa, unknown
  TnpB Polypeptide
MLALECKLKGKQSQYSAIDEAIRTALFIRNKALRHWIDNKGIGKNDLQKLCAILAKEFDFAGQLNSMARQASADRAWSAIKRFYDNCKSKKLGKKGYPQFKKRGHSVEYKTSGWQLSSDRKSIVFTDGFKAGKFKLIGTRDLSFYSVKKIKRVRIVKRADGYYCQFCVDFERQEKHQHSGNPLGIDLGLEFFYTDSNGETVGNPRLLRKSEKSLKRKQRQASKCKKRSSNRRKAVHKLAKKHLKVSRQRKDFVVKTARALVQSSDLVVYEDLQVQNMVKNHKLAKSISDASWALFTDWVDYYAKVFDTWAVAVPPHYTSQDCATCGTRVKKSLSTRTHRCHHCGTVLHRDHNAAIVILNKGLKNTVGHTEINASGQNDLCLGGETPLSKLAD

SEQ ID NO: 21938 - protein, 563 aa, unknown
  TnpB Polypeptide
VKNNNNNRQRDKGITIEKKKKKKSLKRKRREGGDDEPEEEVGGDAQDEQNDEEEEPTAWGVRRIRLLPTREQATTLRQWVGAARWTYNQCVAAFREGSGAVAENTTAKALRAHCVNSDAPLVRENAAWLLNVPYDVRDEGMRDFRKALKTTFALKRTGHINRFNMRFRSKKRAVRESIVAHAKHWKPGNVWWKRYLHREAVRSTEPIPDTLPTDTRVVYNRKTNKWYLMLLVPKFPKRENLMRSERYDARRNGDEEGSVNHDDQSDRSGDGNSAGKNDDSAGDNQALSAHDTVTAPLAPLATGLTTPPPPPPPPPPVVSFATERTLSIDPGIRTFATCYDDTGYVYEWGCARDRSRVMRLGLAADKLQHRSDDSECRHRERYLLRRRMARIREKIRNLVDDLHRRLIKWIVTNFDRVVLPPFNGHNMNTRGQRKIRAKTVRQMMSWAHGRFRERLLAKTGADGEYPHCHVYVHEESYTSKTCGACGTLHTRLGGCKTFRCPSNECGAVLDRDANGARNILLKFLTEEATYVSSPARPGSGCERLTPVADDDCAFLPKKFKCAV

SEQ ID NO: 21939 - protein, 426 aa, unknown
  TnpB Polypeptide
MQAGQANTTRKYRLYPTQEQAERLTQWGHSCRAVWNIALEQRQFAWQERRHTLRAVEQCAHLTQARADLDWLADLPAQSAQQVLRHLDRAYDNWWNPDHPAGAPVHKKRRAALSVSFPGQAMEVRKLNRHLGEIRLPKLGWVRFRMSRPPGGTLRNATVKVDGAGVWHLILGVAANREPTIPNGKPGCGVDFGVACSAYVSDEDAPRLMAPTLAPGERQRLLGLERRKARQVTYAKKHNGCRYSRRLRETLAAIAGLRSRQARRRDDFTHKLTTGLAKNHGWVGIEDLRVSSMTASAKGALEAPGKNVRAKAGLNRGILDNAPGERRRQLEYKAPLFGSEVRVVPAPFTSQACSACGVADKASRPGCGREFACTACGHQEHADKNAALNIEGRARRAAGLNSTRRHLVPSPRETGRRSREPLAGAA

SEQ ID NO: 21940 - protein, 416 aa, Campylobacter sp.
MSKTKNIYNTIRSVKFVLKPNSKQKEMIESFFGLSRAIYNISLYNIKNLKFGIYEIQNGKNKGCIVPKIPTEFDLNNSIPKLKEEHSFLSLLPATYTQSVMKNLSSAFGNFYRTFNYPKFKAKKNSIQSFNCYAGAKTEGDYIILIKPRCSDYTKDNLKIRFKRHKIKYNFDKVNGFTISKENNKYYISFTFHCNIASKETSDAVGIDLGIKDFAICSDGVVYENKRFLEKSLRKLKIFQRSLSRKQKGSNNREKQRLKVSKLHKKVKNQRNDYQHKVSREIADKHRTIYLETLKVKNMVKNRRLSKAISDVGWSSFIEKISYKVAENQGCLIKIDTYYPSSKTCSNCGCIKESLKLSERTYHCEECGFTIDRDLNASINILNLGLKNIVATVTTAGTTLKNQSLWSSKTTLDNLK

SEQ ID NO: 21941 - protein, 389 aa, unknown
  TnpB Polypeptide
MISYKCRIYPNKEQRERLEFALEMCRQTYNNLLSDLQEQTKINRGEIQHRVVELKEANPELKDVYSKTLQYECYRLFSNLSALAHLKRNGKRVGRMRFKGRGWFKTFQYNQSGFSLKRINKRNGILELSKIGNIKIRLHREVEGRIKQIVIKKAVDKWFACIVTDAIIQREIGDKILGIDLGINHFIVDSEGNFVENPYNIKRFSERLKQAQQDLSRKKKGSHNRWKAKLKVAKIHEKIENCRNDFLHKTSTELIKKCKIIVVEDLKIKEMMMNFYNAKNMADASWGKFLQMLEQKVESTNAQVVRVNPKNTSKTCSECGNIQDMPVWKRVYNCKCGLELDRDTNSAINIRNKYNSQELAFVENKSYTDCRNNQQDLSMKQEALPFRVV

SEQ ID NO: 21942 - protein, 250 aa, Lactobacillus sp.
MKYKNKKSIPSIIKYVTIRKSSTSKYYAVLTVDEEPEQLPKTNKSIGIDMGVSDLVICSNGRKYKTIRFDKKLAKKKHHWEKRLARRRTQALRDIQYKKKFGLSDPKTLEQYSNYIKAKLMVAKYSEKIANQRKDYLHKITRELVENDDMIVIEDLKTKNLLKNHKLSRVIANQSWRELRLMLEYKCEWYGKKLLIVNPFKTSQICSNCGYDDGKHGLDIREWDCPNCSIHHDRDINASKNILNIGLEQA

SEQ ID NO: 21943 - protein, 340 aa, Granulicella sp.
MPDLNMLVQLVHEEDCFKNLHNTKTAKQTVRKVITDWWNFKKALKAFNRDPSGFEKKPRPPHYKERLAQVIFYNETIKKKPLKQGVITPTNGCFEIKSVRKFKQVVITPKTSGFVIEVQYEELLKKGKSKAKGVCCIDIGLNTLCAITSDQHAPVLVNGRIIKSINQWFNKHPSKRNGRKRYWRLENYFHHVSKMIVANCVFFGISKIIIGKNDGWKQAMKMRRETRQAFQYVPYYRLFEKIKYKAAMEGIEVIFTEEAYTSKASFLDHDPLPKYGEAVPQFSGKRVKRGMYKTFRPIHADVNGSLNIGRKVIGDKVYETFLDRSIAAMPVTINPLKLTA

SEQ ID NO: 21944 - protein, 460 aa, unknown
  TnpB Polypeptide
VNILVQTGIRLKAYPTAEQAKSLSQWIGCARVIWNAKCDEDHYLRTFARKYLPLGTFPEPNKQYSHFKSEETAWLKKCPSQLLRNSATIWHSTYMDFLKGRCGRPRNKSRERGNYIWITRELFNIVEIDGRWELHIGSKTNSLGVLKVRWHHKPKHPPNSIWIRVEHGRWSVSFSYENGQPQPVELQEHLDWLRGAPEHELDKWVVGIDRGVARPIQTPYRHFKPDDNAIARQEKRERYIKRLQRKLARQIKGSNRRGVTKRRIAGQHRATRNVRDDFLHKASRALVNDSKVVVLEDLKLKNMSRAARPKQCPETGRWLRNGASAKSGLNRSLLGVGLFKFEQFMRYKMEKANKPMFKVSAYNTSRECAVCGHTHEANRQSQATFHCQSCGHTDNADRNAACVIKKHAIRLIKDSGTELTSRGVLRPAGPLGRASNGSKTTKGAPEVARRARSKKMVVPA

SEQ ID NO: 21945 - protein, 438 aa, Campylobacter sp.
MSANSQIAPSKEDELLTISHKIELIPNNKAITHFKKAFGCSRLAYNWGLAKWQGYYKQGIKKSHLELKKEFNAIKKEQYPFVYEVSKYATQQPFVNLNLAFNKFFKDLKQGKLSYPKFKKKKENFGSYYIGGDQVVIKDNKYLKLPNYGLVKMREAIRFNGKINSVTISCKANKFYASFSLQITKDEYNDTHKINVNCNDDVVGIDLGIKEFISLSNGLQIKAPKPLDKFNRLLVKRSRQLSRKLHAKTKQEALQGIKKSNNYLKASQKLNKLHSKISNIRSDFLHKLSSLIVRNFTYVGLESLNTQGMMRNHKLAKSLADVSFYEFNRQLEYKASYQQGQIYRVGNFYPSSKTCGNCGSIKQDLTLKDRVYKCSNCGNIIDRDINASINLHKFVNKSVGLVQSEFTPMDLTALLDDLAINQIATSKVEVGIQQEFYL

SEQ ID NO: 21946 - protein, 375 aa, unknown
  TnpB Polypeptide
MIKRQVSRMEKAFRYRIYPSDEQKVLIRKFIGSSRFVYNYFLALRSSMYQETGKGMNYHGASARLTELKQEISWFKEADKFALQNTLRDLEDAYGRFFKKQNKYPRFKKKHGKKQSYRTNFTNGNIQVLTGKIKLPKLGWMDLKESRLFIGKVLGVTVRRLPSDKYYVSICLDVGEIEKLPESPNFVGVDLGLKCFAKLSNGRTIENPKFLKKAEKQIKKYQRRLSRKQKGSRNKEKARIKVAVAHEKVNNQRQDFLQKESTKIINENQVVILEDLAVKNMLKNRKLAKAISEVSWSEFGRMLKYKAKWYGRIYHEVNRFYPSSQLCSCCGYKNDDVKNLAVRFWSCPECKGLHNRDENASKNILQQGLKDLKFE

SEQ ID NO: 21947 - protein, 410 aa, unknown
  TnpB Polypeptide
MRVLATAKIEAVAPEGGEALLIQFLKLYRDAVQYIVDGIWFLNDVPSEKSLHKMFYSKLRRLGFRAHHVSEIYKRAKEVVEGAKKNRGSKPVLRRLTARIHPLDYRIDFSTKTLRIAVLNNQCVELKLKWYKYLDKYLDGSWRPGEILISYRNGKILVYITFHKDVKLIAFKTVMGVDINFNNITYTVIDLSGNLITIGVIPFKGLERALHLKKLAEELQKRFPRSWRFLKWVRRVRGRWLREARNILIDSAHKLSKKLVEIAREYRALIVFEDLEKLRENSKHCYKLSWRKSLWCYKRIQMFTEYKAIFHGIKTVYVDPAKTSRKSPNGKKFKFINYRFVELGGVVTSRDVVASWNIALRGLEKLKRMRGLGVMLSSDSSVDEGMRIRPNAGNPGARKIYPQISTAIHR

SEQ ID NO: 21948 - protein, 383 aa, Romboutsia sp.
MIKTHRVKLKLTQSQFELVREKQMECANCWNEVVRISKEYYFENKQWISNYDIQKLIKGRYNLHSATIQAISDKFSANRKTIAELRKKGNTKAKYPYKEKKFYIIPFKNSAINTNAMGNLKISMSKGRYLELDFAIDNIKTAEIVWRNGYYLYYSFDDGIVNPTPKGTNTVGVDMGEIHSIASITNEGNGLIISNREGRSIKQFRNKMYSYISKRLSRCKKGSRQSKKLWRLKNKIRTKTNNQLINLYHQTTRKFIDFCVEQKVCEIILGDIKGIEKNTKKKKRLNRVNRQKISQMEYSRIKDYIKYKAKEQGIEVKLVKENYTSQTCPKCSKKHKPSGRTYSCTCGYETHRDIVGAWNILNKKHKYGLVDFRINHKQPINIK

SEQ ID NO: 21949 - protein, 368 aa, Paraburkholderia sp.
MVSGMEAVKTLKLRIKDKHAKAMLAMARDVNTVWNFCNETQYRSLKRYCNRPKVWLSGFDLQKLTNGFVKCDGVVAGSPTVQQVCEEFATRLRQFKRQKMNWRVSDRKSPKYSLGWVPFKKRALTYKNGQLKFNGINIGLWDSYGLSRYELGAGSFNEDSRGRWYVNIAVKVQVDEKRVPDGVTTLGIDLGLKTMATYSDGSAFNMPKFYRDTEAALGIAQRANKKRRVKAVHIKIANRRKDAIHKETTALVKKHAAIFVGNVNAKAMAKTSMAKSVHDAAWTMFRTTLKYKAIRQCVVFEEVNEAFSTQTCSCCGSIPPSSPKSRAGLGIRQWTCSDCGAEHDRDTNAARNIVRLGLQALEVGILGV

SEQ ID NO: 21950 - protein, 398 aa, unknown
  TnpB Polypeptide
MARYRLYPTPQQEEQLREHCRAARYVWNLALEQQKFFRRSSRWWRPPTPAARMVQLTEVRREYPWMKAGSQMVQQQALNDFDQAMRNFFAGVSRFPRWRKQGRDEGFRVVALNRGDKLRVLNRKNGEVWIPKVGWVRFRLSRPIPHGVKSCRVTLDRSGRWHVAFAVTPPPIPGPGTGEIVGVDRGVAHAATLSNGEFFDYHRPDLDKKISRLNRQLARKQPGSKRREKARLRLAKVSAHKTAGRKDAIEKFTTDVARRFDIIRLEQLDVHAMTRSAKGTVEEPGVNVRSTAALNHAILDKSWGMMARRLEEKAPGRVYYVNPAYTSQRCHQCGHVAVKNRENQTDFNCKACSHTDNADVNAARNIAAGYAVTARGGSKVFEPVNREPQNLRVLESVT

SEQ ID NO: 21951 - protein, 437 aa, unknown
  TnpB Polypeptide
MKQMVIQKAARAKVVNLCPGTSSTIDFMLRDQRRLWNWFHNLNIEHYAQTGNFIFYNEAAALLTQQRHFGVFSDGSINAQQQCLRSYEKALKDSFPSAKVRRGFPKSKKRASDCSLRFPSAKVGTIRVENVITHIKLPKIGLIRVRNLDVPIGAKINSFCLKKEADGYWLSVQFGIIIDQPVNDNSSVIGIDAGLSVMASFSDGEQIQALKPLKQNLKKLRIQQRSFSRKKKGSVNRRRQSQKVGRVHAKIRHSRRNAQHQLSSRLVREHSTIAIETLSLSGLKRLKHQGFAWSDIGIGELYRQIRYKAKWAGVEVYEHQRFARSTGCCPDCKHVGERLDLRIRFWTCTQCGAKHNRDIASAQWLQLCAIENRTKVGAVCPEPVKTAKSQSPKRGNSGSALRTIAGMRSEPSGLPVHVGSPANILTNDMCLAHALEG

SEQ ID NO: 21952 - protein, 459 aa, unknown
  TnpB Polypeptide
MIVTRTLRANVPPELAPICKAMGFVRADLWRRMGGLGTVGKDVREVRGELLPLHANLPVDGTIRNTTTLDVIQSVYTFRAAAMVKVRQAIAKRTKEEAERKRLYGLLRGGNWTSDPFLHRQMRKHFRHGRSQVANQFMVRSDKFTIRVEAGKLVIRLTIAKKYGHDIDLVTTTNGKNVDLAGKNLRICVKDGFTEIHYAVEKGPGRAHGDQVIGVDKGYTEALTDSDGEHHGPAFGDVMTAYSDQASATGKARNKLHAIEKKHRAAGRIAKADRIVANNLGRVKLNARRERTQKRIRTVAFQAVHAVVDKAAVVASEDLTSQFASKHQWARFNRRMSGWAKGVLADALDSVCTQREASHVLVSAAYTSQIDSTTGLLEGTRVGERFYRVNGDVMQADHNAALNVLARIDDPEIERVTPFAKVKAILLARSPGATERQGLESVARPSSAEKSYAQVRAAI

SEQ ID NO: 21953 - protein, 377 aa, Rhodothermaceae sp.
MRKAFKYRLYPNRAQTEALSEILETHRRLYNAGLDERRAAWENERHSVRYTEQSARFKEERRSNEFYARLNFSSAQATLRRLNLAFEAFFRRVKAGENPGYPRFKGRSRFESICFPSYGDGCRMREDEQGRARLYLQNIGQIKVKLHRPWEGTIKTVTVKREVDKWYVILSCDLGEVTTPCHRGPAVGIDLGLKAFLVTSDGWKVDPPRFYLEAQTRLRRLQRRVARRKKGSGRWRKACRDVARLHGHIANQRRDFHHKTARTLVQQYGTIYVEDLNIKGIARTRLAKSTHDVGWGQFVNILSSKAEEAGAQVKRVDPAYTTQACSRCGAIPEVRLTLRDRMYSCDSCGFTADRDENAALNVLAVGLGCSLRSPSTA

SEQ ID NO: 21954 - protein, 392 aa, Rhodothermaceae sp.
MDAFRIISCPIEATPEQAARIEATLRSFARACNYVALRGKQEKVSAKRKLQKLCYYDVRERFGLSANLAIAAIQRVSMAVKASGTREVSFRPTSAAYDARTFSFRESDWSVSLTLVGGRERFPLRIGVWQKEQLRGTEPRSAVLCKKSNGRYYVDIRLRREQPPKQESTGTLGVDMGVKNIAVTSTGTIYSSEALNAYRLERHRVRKSLQSKAAKGTRSSSRRNCRKALARLSGKERRRCKEENHVISRRIVREAKAGGLTIVLEDLTGIRDRTNQRLRRSQRGLHNRWSFYQLRQFIEYKAADAGVPVMVIDPRYTSQTCARCYCIGKRRGDSFHCPNCGHNDHSDKNAAKVIAAVGGAMSRPERSAVYCVWHGAEGKVEISRLQTGKLKG

SEQ ID NO: 21955 - protein, 381 aa, unknown
  TnpB Polypeptide
MGDVAMAESKLVHKAYKVRLYPNGQQVELMRKTFDCCRYVYNHALAVKKDAYKSTGLSLSGNDCKKLLPQMKADDPWLKEVDSTALQASIEDMDAAFKRFFDGRKAGKKVGYPRFKSKRHCRDSFTCKMSLAVSDKAVKLPKLGWVRAVVSVPVVGKIGHITVSETKTGKFFACIAVETAVAELPKTGKSVGIDLGIKDLLVSSDGYKYNNQRYLKHLEKQLARAQRKLSRKPKGSNRREKQRIRVALIQERIANQRFDYIHKVTTKLVRNYDVICIEDLNVKGMLTNHHLAKSIADASFGEISRQLRYKADWYGKDVIQVGRFFPSSQLCHSCGYQNPTVKDLDIREWSCPNCGDWHDRDINAAINIKVEGLRKYIKPAS

SEQ ID NO: 21956 - protein, 368 aa, unknown
  TnpB Polypeptide
MRRSFKYRIYPSAAQKTILNKTLVECQILYNHLLSERTISWEQHKKSLSLYQQQKTFPLLKSQRPSLDIAYSQVLQNVSVRVDLAFKGFFRRCKNGEKPGYPRRKVNTYDSITYTQLNNGSFKLFQKKIHLSKIGDIGIKQHRNLEGVPKTCTVSRTATGKWYVSISCEVEPKPLPQNKIAVGIDLGLKSFAVLSDSTKINNPRFFKGEENNLAKAQRSFSKQKKRTIGYRKKKKVVARIYERIKNKRHNFCHQESNRIIKKYGIVCVENLNTKKMLEEKKFSKSISDVAWSLFLDCLSYKAESADRIFVKINPAYTTQTCSCCGHRQQMPLDERMFCCEKCGLKIGRDLNSSINIKRAGLCSLANTA

SEQ ID NO: 21957 - protein, 360 aa, Duganella sp.
MKLVYRYRVKSLTGLLNRQARSVNFVWNYCNDRQKDALRFGRRWHTGFDLIKLTTGCSKELGLHSGTINDVCQQYAKSRAQSHRPYLRYRGRKSLLWVPLKGRELKREGNAFRFAGNTFRVFYSRPLPEGKILDGTNFSRDRRGNWFLNICIEVEPAAARMPAHGVGIDLGLKDLAALSDGTTIAAPHFYRDAEAALALAQRAHKTRRIKAIHAKVANQRLHYLHTQTSAIVATYDYIVVGNVNASALAKTSMAKSVYDVGWSSFRTQLAYKAVKHGAWFEEVDERFTTQVCSRCGAMPDTRPRGIADLGIRDWTCSDCGSVHDRDRNAAMNILRRGRATLAVGSSALYDGEDVNAIRNC

SEQ ID NO: 21958 - protein, 390 aa, Oscillibacter sp.
MAAKRSKSETLRYTTLKVRLYPSAEQAALFEKTFGCCRYIWNQMLADQQRFYIETDKFFIPTPAKYKAGAPFLKEVDNQALIQEHNKLGQAFRVFFKSPENFGYPKFKRKKDDRDSFTVCNHVMGNSETVYTTRDGLRMTKAGIVRAKFPRRPQGWWKLKRVTVDRTRSGKYYGYILYECPEKKPEVVVPTPETTVGLKYSMARFYVADTGETADPPHWLKQSQEKLARIQQRLNRMRPGSKNYQETVQKYRLLHEHIANQRRDFIHKESRRIANAWDAVCVRGDDMEQISRITNRGNALEAGFGMFRECLRYKLARQGKELLVVDRYFPSTRTCSACGRVMPEEISMKRRTWTCPQCGAVLKREANAARNIKDQGLAQYFSTRERRESA

SEQ ID NO: 21959 - protein, 465 aa, unknown
  TnpB Polypeptide
MQTVSSYGVEIRKQNIPIRQTLEIYRQAVSYLTEIYEQVWAELKMIPEAKKRFNAAEHLIHTTKKNHAHFDFDIRFPKMPSYLRRAAIQHALGSVSSYESRMEQWEAAGELSGKPNFTCENHAMPVFYRDVMYREGTEGKDEAYLKLYDGHDWRWFRVCLSHTDMEYLRRNWYGKKASAPTLEKRHHKYFLRFSYIEEVTLTQTPVKEQIICSVDLGINTDAVCTIMRADGTVLGRKFIDFPSEKDRMYRTLGRIRRFQREHGSVQSRGRWAYTKRLNIELGRKIAGAIVKYAEENGIYSINCTEAVWSTDQIHAYYQDAEHKYGEIGFLKDTDFVIESNTTIYLVEYKNANIPGAANPEAFRPESVNILNKVAEKYYDTLHCLYLMGKNKPKKYIYVLEYPAGNSTSRLFIRNKLKEKLPFRLQAQLTDGTLKLIDEVKVVDIAEWNADPELGQFPIEMINGNA

SEQ ID NO: 21960 - protein, 401 aa, Mycobacterium sp.
MRTAYKCRAYPDTEQAAVFGRTFGCVRLVWNKTLAERHRAWHTDGERTSYKETDAALTAWKKTRDLAFLNEVSSVPLQQALRHQHAAFAGFFAGRARYPRFKTRTGRQAAHYTRSAFRMKGGQLWMAKTAAPLALVWSFEDVDLATLDPTMVMISRETDGRWYVTFAVDTHAPEPLPPTGHQIGIDLGVKDFAVTSDGERIANPRHLERKAANLARYQRRMARKQPGSVNRRKAKAKVARACRKVRDARQDFLHRASTNLVHRADVIVIEDLAVANMVRNRRLARAISDCGWGEFRRQLEYKAERAGRFLVVIDRWFPSSKTCSACGHLLEKLSLSTRHWTCPGCRTRHDRDHNAAKNILAAGRAVAGGSTSGDVCGADVRRQGPSLPQSAAKQKRPRREP

SEQ ID NO: 21961 - protein, 400 aa, unknown
  TnpB Polypeptide
MLVFEAKLKGEKQQYERLDEAIRTARFIRNSCIRYWMDNRGIGRYELSAYCKVLAQEFPWAGQLNSMARQASAERAWSAIARFYDNCKKKAAKKGFPRFKRAQTHGTVEYKTCGWKLSEDKRTITFTDGFKAGSFKLWGTRDLHFYQLEQIKRVRVVRRADGHYVQFCLDVERVEKRTPTQKNIGLDVGLTHFYTDSDGQIVENPRHLRKSEKALKRLGRRLSRTSIGSKNREAARNRLSRKHLKVSRQRKDFAVKLARCVVQSNDLVAYEDLQVRNMVKNRRLAKSISDAAWSAFRDWLEYFGKVFGVVTVAVPPHYTSQNCSNCKKVIKKSLSQRTHRCHHCGFVLDRDWNAAINILELALRTVGHTGTSNASGDIALCLGEATPPSKSSRGKRKSKK

SEQ ID NO: 21962 - protein, 414 aa, unknown
  TnpB Polypeptide
VINRGFRYKLIPTQEQNSLFLQFSGVCRLIYNLALEQRRDHWRAYQRIHEKKLNYFAQARELTALRAEFDWIAAVCQTCEQQALRDLDKAFKNFFSGRSGYPSPRKKGVNDTFRFLGREVEIKKMNGKWSAVWLPKIGWVKFRNTRSMRGKIKNVSVTLDSNGWHASFVCEIEHVAPANICPSVGIDRGVANTLTLSTGEMLSIPRSIYILERKRRRVQKIVARKKRGSQRRIKATRRVSQLSARITRIRRDWQHKVALNIAKRFGAVVLEDLNIKNMTASAKGTLTAPGRNVRQKAGLNRSIRNQGWGGFETILAYKLEERGGTLISIDPAYTSQTCSECGTVDSMSRESQALFSCRHCGFRAHADHNAAINILRRNTASMRTEEGRWLSDEVRTGRMAIHPENPLAGALGRC

SEQ ID NO: 21963 - protein, 371 aa, Microcoleus sp.
MILYRKMLYNSSMKTLKFKLYQHNRNRYLKLQINAAGVIYNHAIALHKRYYRMFKKHLNCAKLQAHIAKIRKRNQFWQSVGSQAVQDICQRIEKAYQLFFKHHKKGVRPPNFKKVRKYKSFTLKQAGYKFLGGNRIKIGSRVYQYWNSREIEGTVKTVTIKRTSLGELFMVVVVDSSELVIEVETSRIAGFDFGLKTFLTCSDGSKIESPQFLKQSINEITKASRKLSSKKKGSANREQARKHLVRKHEDVTNRRSDWFWKLAHKLIDKFDVLCFETLNLKGMQRLWGRKISDLAFREFLQILEWVAKKKGKQVVCIDRWYPSSKTCSCCGHVLESLELSVRVWRCPRVQFGKRPRLQCSLKYLCGGGIHR

SEQ ID NO: 21964 - protein, 137 aa, Paludifilum sp.
MSCTTAIPFRKYEKKLAHWQRILSRRQKGGSNWHKARVKVAKIHEKIANARRDFLHKLSTKLIHENQGICLEDLQVKSLVKNHKLAKSITDASWSEFAAMLEYKAKWFGRTLVKVGRTFPSSQLCSCCGNRNRDVKI

SEQ ID NO: 21965 - protein, 416 aa, Nocardia sp.
VKPPREKRAYKYRFYPTVGQAAELSRTFGCVRKVYNLALAARTEAWVLRAERINYNTTSAMLTAWKKTEDLAYLNEVSSVPLQQALRHLQAAFTAFWDMRARYPRFKSRKKSRASAEFTKSGFRWRDGCLTLAKMSEPLAIVWSRPLSQGAEPSTVTVSRDAAGRWFVSILVEERIARLPIADTAVGIDAGLEYLVTLSTGEKIANLRHERRDRVRLAKAQRNLARKVKGSANREKARRGVARVHARINDRRRDYLHKLTTRLVRENQTLVIEDLTVRNMVKNARLARAISDAAWATFRGMLEYKCAWYGRELVVVDRWFPSSKLCSSCGALQDGMPLELRTWTCGCGVIHDRDVNAAKNLLAAGRAVTVCGAGVRPQRSTPGGRSAMKQKDPTAKSGFSPTRRGRRQLVDDSRQA

SEQ ID NO: 21966 - protein, 423 aa, unknown
  TnpB Polypeptide
MVKQIFKKTYKYRLYPTKSQQELFEKHLSLCRWLYNHFLDERRTLYQNNKIKVSCYDQIKKIPQLKKEKSELKEIYSQALQDVVKRLDKAFQNFFRRVKESQNGKKQKPGYPRFKSYWRYDSFVYPQFGFELNEKERKLNHPSDSERSGRDLSLRLSKIGNIKLKLHRPIEGNVKTLTIRKTRTNKWYACFSVEIKKELPKKKVIQEAIGIDVGLDSFLTTSQGKKIDNPRYLTKLEEKLAKIQRWHSRKKLKSKNRRKSRLKIAKIHEKITDQRLDFFHKLSNRLTKSFQLVAFEKLNVKGMVKNRYLAKSISDASWSRFLQQLRYKAAEAGIWAVEINARKTSQTCSGCGAIVPKTLATRKHQCPFCGLTLDRDINAARNILQLAINTVGATGINACGVGRLLPTTKREATYFIIGGSSLS

SEQ ID NO: 21967 - protein, 395 aa, unknown
  TnpB Polypeptide
MSRYRLLPSPTQEAVLRDHCAHARYVWNLAVEQHAHWRSGRKGAPGYLEQCRQLTAARAEYEWLRAGSQTVQQQALRDFAQAMAAFFDPCNPAGRPSWRKAGRNEGFRIVGRGSQWDMRRLSRKVGCVWVPKAGWLRFRWSREVPPSVKSYRVTMDRAGRWHVAFATVPEPISAPDNGQVVGIDRGVTVSAALSTGELSHVPGLTARERKRLRRLERKLARARRGSLRRNEVKLTIGRLRARENDRRKDWAEKVSTDIARRFDVIKVEDLRIRNMTRSAKGTVEEPGRGVRQKAGLNRGILRSGWGLLLRRLEQKAPGRVEKVNAAFTSQRCSACGQVDPKSRESQAVFRCTACGYACHADVNAAINIAAGHAVTARGGFRDAGPANREPHLLAS

SEQ ID NO: 21968 - protein, 348 aa, unknown
  TnpB Polypeptide
MTTYGNLKPMDATKININGVENIFFTSVAIHTHRGWVHIDLEPSKEFYKLLARGFKPTSHAKIKLDRKSRRVLFHLSLEKEVEIYRPEDIKPVDVNENSVATLYEAFAVILETDLAKTTLGYSYRKESIQRRNGSDSRETRKAMEKLKEGKKKKDYRMKTANMIVRDAVRMRGVIVIERISGEDIRVMIARYRNKQLRHRIYQSALKGELNAIIDKAKEYGVPVLMIDPRNTSKICPIHKAVIEYGKDRIGVCSKGGEKWHREVVALINIYLKALEALYEGIAQKGSGVSILDGSTVPLGSTATGEPIEIPRSLWGRWRSLDDHRDIITSLWIKRQSNPKQMNISDNQ

SEQ ID NO: 21969 - protein, 367 aa, unknown
  TnpB Polypeptide
MAKVFRYRLKPTKAQIAKLNEQLELCRWVYNETLAMRKNAFEQEGKSVSYFESKRMLPIWKESKPELRSVHSQVLQDVVLRVNLAFKAFFRRVQSGEEDPGYPRFKGKNRYDGISYPQSGFSIDGDKLWLSKIGDIKFKLHRPIEGFVKRLTIRRSATKKWYVSFLVEESINHPLEPSKKVVGIDMGIKNFAALSNDEFIENPRFLLADEERLKIAQSKRDKLPKGSPQRRKASKAVSHLYERVANRRDDFAQQLSRQWINKYGIIVFEDLNITKMVHNHNLAKSILDAAWNKLVQYTSYKAVDAGRKVVLVNPANTSQICSSCGQIVEKDLSIRVHDCPYCGLSIDRDLNASKNILRLGLQSLASA

SEQ ID NO: 21970 - protein, 374 aa, unknown
  TnpB Polypeptide
VILTYRYRLLPLNSQHRTLERLCGEQRELYNAALEERIDCYRKTSKTRTYIDQCKELTQCRRELPSMGELPVNLQRWTLKRLDDAFQGFFRRLKVRSAKAGFPRFRGKARWEAFGFAEFSGIRFDGKRLHFAGMPGGLKLHLHRPLPDDADIRACVFRRDGRGWHVCLQIAVAAAEKRSVSSAVGVDLGLKVFAYCSDNVVIPIPRIAQRAEQELRRRQRALARCKRGSNRRHKMRARVAKVHRKNANTRNTWLHQQSAALVKRADLIAVEDLKVSNMVRHPTFARSISDAAWSRFVSMLDYKAEKAGSYLIRVDPRNTSQKCSGCGELVSKSLAVRTHACPSCGLLIDRDHNASLNILRAGIGAGALNVIGWR

SEQ ID NO: 21971 - protein, 183 aa, unknown
  TnpB Polypeptide
VRTKQWKKDRQRDFLGSILPCRECVYFLQEKEPGTLCFTEKQRKKLAREQRKLSHCEKESRNYQKQKKRVALCHEKIKNQRKDFQHKLSRELAERYDAVCVEDLNLKGMSGRLHLGKGVQDNGYGQFLFMLGYKLEECGKHLIKVDRYFASSKICSLCGHKKRNWHCRIECMFVNVETGWTGM

SEQ ID NO: 21972 - protein, 252 aa, Tolypothrix sp.
MDESVAMLLGFKTELKLNNRQRTMMLKHCGVARHAWNWGLGLTKQLLEHNKVNPDDKIPFPSAIELHKWLVALVKPENKWYYECSKSTPQMALRALRVAWKDGLEKRKGVPKFKKKGKQDSFTLEGTIKVKGVKRIQVPVIGILKTYEKVPSVPIKTCTISREADRWFISYKVEVKDLEPGCSLTWMHPDVGVDLGVKALATLSTGKVFEGVKADKQHNLHRYFGAVKQSGQSVETDPLVASWRNELVRLRG

SEQ ID NO: 21973 - protein, 471 aa, unknown
  TnpB Polypeptide
LLARWAGASRFAYNQSLRLVTDALAAKRVDPSVTVPWSGLDLINAFNAWKKSEAAGRIFVVALDGTVAKQVTGLTWRHEVYAQVFEEAAVDCGRALAAYMEAKTGNRQGRRVGFPRYKRKGRRHDSFRLRNKKAEGGSFSIRVGEEGFPRSVILPGIGTLRVHDDTRRLRRLLRPVEQLDPMTGEPVVSPRARILFATVRRHGSRWYVCLNMQAPDLHPRRRHQPRSDMDRSGFVGVDRGLAAFAVVATADGTEIGRFHAPKPLVRRLERLRRRSRTLSRAKRGSRNRTKAARRLAREHARIANVRGSFLHEVSTQLAKTHSRLAIEDLAVADLIRDRHRSRAIGDAAWTEFDRRLRYKTAWLGGELVVCDRWFPSTRTCSGCTRVTDRMGLAERTFRCGCGLIMDRDRNAAANLAAWAEHAQARTAKRAAGSPTPLEGKALAATEVSANHPLRRRNRRSALAGAEDIREG

SEQ ID NO: 21974 - protein, 392 aa, unknown
  TnpB Polypeptide
VSKKTKRAYKYRFYPTEEQKIILAQTFGCCRFIYNWGLSTRKTAYFQHGQSLYYNDLAAMLPALKQEYPWLREVSAVPLQQALRHLDAAYTNFFEGRAEYPTFKKKRNEQSATYASNAFTWDGQSLTLAKMTEPLDIRLHRTLPKGCKPSSVTITKDCANRYFVSILVEDDIKPLPVVNKMVGLDLGIKSMVALSTGEQVGNPKYFAKDERKLAKAQRRHARKKKGSKNRQKARLKVAKIHARIADRRRDYQHKLSTRIVHENQVMCVESLAVKNMVKNPKLAKAISDVGWGEFVRQLDYKARWYGRTLVKIDQWYPSSKTCHACKHVVDSLPLDIREWVCPACGTVHDRDINAALNILAEGLSVAACGGNVRREQVRASHAVPAEAGNAPS

SEQ ID NO: 21975 - protein, 332 aa, unknown
  TnpB Polypeptide
MENWRKRYLRGRARKIKPRIRRRFARCKTTLMKIDYQAKTIRITLKQGEYLTISWRSTWFEHRVRGWTVGEVIIFDDRVVIPFKSSKEIYVKRVIGWDSNELSLDSYEPSIGFIHVDLKPLQSMKITYERKKAMAQRKGRRELYEKYVRRERNREKDFINKLSAGLRLLFPNTIHVFEDLDKEDLVSRKKRGKNRRKRNARTPWKRIHRRISEVALTAYVDPSNTSRECPRCGYVVETQEEQIFECPRCGLKMNRHKVASINIRRRYLEGKRRARMRGFPHNNEPEETMKVELWVGVTPSWRSSVIWIPMKWDPEGFEAKGRGLDIKQYQAQ

SEQ ID NO: 21976 - protein, 416 aa, Anabaena sp.
MRLVERHIIKQNHIRFRKIDKMSFLSKNLFNCAVYLCRQAVFRGQPIPTFNQIYHSLKKSYDYKALPSKVAQLVFKQVDKCFKSYQEAKKEYKLNPGKFLGEPKLPKYKHKQKGRNVLTFNNQAVSKKALKKGLISPSGLSILIKTKLVQIEEVRIIPKNNVYIIEAVYEREETTLRVQQSPIDGNRQDGGCFTIESNNRIAAIDIGLNNLATVSSNCLDFQPFIVCGKAIKSCNQFYNKVKASLQSQLPKNQKTSRKIEALTLKRNNKVDYYLHTASRFIINQLVSQNITHLIIGKNENWKQNINLGSKTNQNFTNIPHARFIQQLEYKAKLVGIKVQITEESYTSKCSFLDFEPIKKHEQYLGKRVKRGLFKSRSGKPYSADLNGSLNILRKVAGESIFDRNSVERLVVSIGKV

SEQ ID NO: 21977 - protein, 369 aa, unknown
  TnpB Polypeptide
MLKAYKYRLYPNKQQEEQIQKTFGCCRFVYNQMLAYRKDLYENKKESMNKIACNNYVNQVLKKEYEWLKEADKFALTNSVYNMDSAYQKFFKEHSGYPKFKSKRDNKKSYSTNCTNNNIEVSFENNRIKLPKLKWVKAKVHREFIGKIKSATISQNSSGKYFVAILVETEHIPMEQTGCMVGIDLGIKDLLITSNGEKFDNIRTTKKYENKLVKEQRKLAHKVKGSKNWSKQRIKVTRIYEKIHDTRIDNLHKISHKLISENQVIVSEDLVVSNMVKNHNLAKAISDCGWYELTRQISYKSEWNNRQYIKIGRFYASSQTCNCCGYVNSNIKDLSVREWICPKCGVIHDRDINAAKNILNEGLRMLQVA

SEQ ID NO: 21978 - protein, 398 aa, unknown
  TnpB Polypeptide
MLFVQRTIRFPLLPTVEQQDVLLETMQQYTECFNTVVAYGWERCEKNGIELHKATYYPLREAYPYLPSQLVISARAKATEAVKSALTWKVKKEREFPKKVAKALARGKPAPTFKPVRCPHSDISSIRYDQRSYAFHGDHVSLATVAGRQVIGLHLYPYARRLLTQSIEYDSADLIFRKGRFWLHAVVTLPDMEFVPNGDVIGVDFGITRPAVASNNRFFGKRSWKATERRYFRLKRALQSKGSDSAKRHLKRLSHKVSRFRLNCDHVVSRQLVQSVAPGTLIVIENLKEIRSTTKQRSKKQKRAMHQWSFNRLRDLLVYKAEECGCVVVDVDPRHTSQRCSRCGHIHRSNRQSQSRFKCRSCGFELNADLNGSRNIAVKYLASVGRADAGGLLSTSLL

SEQ ID NO: 21979 - protein, 395 aa, unknown
  TnpB Polypeptide
VQRTIRFPLLPTTEQYDVLLETLQQYTECFNAVAAYGWKRCEKNGIELHKATYYPLRETYPQLPAQLVISARAKATEALKSAFTWKIKKEREFPKKVAKALARGKPAPTFKPVRCPQSDISSIRYDQRSYTFHGDHVSVATVAGRQIVGLHLYPYAKRLLAQSIEYDSADLIFRKGRFWLHLVVTLPDTEFISNGEVIGVDLGITRPAVASNNRFFGKRSWKNTERRYFRLKRALQSKGSDSAKRHLKKLSHKVSRFRLDCDHVVSRQLVQSVSPGTTIVIENLMEIRNTTKQNGKGQRRAMHQWTFNRLRDLLIYKAEACGCAVVGVDPRHTSQRCSRCGHIHRSNRQSQSRFKCRNCGFELNADLNGSRNIAVTYLASVGIADAGGLLSTSLS

SEQ ID NO: 21980 - protein, 385 aa, Proteobacteria sp.
MRKTFMYKIYRCKRTKRLHRQINVGGAIYNHCIALHKRYYRLYKKHLSLSALQAHLAKLKRLPQYAWWTQLGSQAIQEIARRIDKGYQAFFANGKARKAGTTTRRVGTPTFRKVRNAKSFTLTQAGWKLLDDHRLKIGSTVYKYAKSREIAGPIKTVTIKRDALGDLYVYFSCIVQEQPIDRVMTGKSAGFDFGLTTYLTGSDGTAHQAPQPFTHSLKAIAKASRQLSSKKKGSTNRQQAKQHLARVHKRVANQRKDFHWSLARQLCTQYDRIALETLNMQGMKALWGRKVSDLGFATFLDTLHHIASKTGTAVHHIDKWFPSTKLCSVCGSLNTRITLRDRVWTCPDCGATHRRDLNAAVNIFREGASSHGGDHVSQASACSGC

SEQ ID NO: 21981 - protein, 444 aa, unknown
  TnpB Polypeptide
MRKRKYTAVTQLQEQNNKELIEYVEVARHTYAKAVRETFYVIKNSEEFNKSSFNTYLQQTHGITKRTANSIISDAQGRINELKELKLYEKTQLERKIKHLETSVIPKLEQKRDDNSTMLRLGLSVSLVSQRNLRRKLVFKKQKLNRLKQKLENLTYQIETFSFKLCFGTKHLLQRDYNAFVERRDSQMSFVGSRDEPACNQQLQLNFNSKNNQFELKMRKDFGGFKELKGLERYVFGKVYFRYHKGKIIRILKDKNSPLSFKVIKKNNRYYLHCTFEVKLDSDDFLTRSTYGTIGLDFNKGFITLSETNQYGHLVQTQFLPYRFKSGAKTRTDLQQMVSKVVDLALAKGKDLCIENLEFNRTKVKTETKQDKKYNEMIHSLAYSQFVDLVESIAYRNRVFIRKVNPAWTSWIAKQKYCPQMKLNVHVGASFVIARRGQGYKDTV

SEQ ID NO: 21982 - protein, 549 aa, unknown
  TnpB Polypeptide
MPEIIRTFQCRIESHPALDDAAYLLGRLERQLYAEIAKGDADISALKRQFIALHGITARQFNALRIRVEGSISGVRELLKVEIEDTGKRIKGQDAKIKKLQAKTGKAKDAAARTKINGEIHQRKRRRAILVHRTEILRGRLARPEPGICFGSRKLFREQFALDANGYDNHEDWLADWQAARSGQIFCVGSKDETAGNQTCQGTVAADGSVSIKLRLPDALAGTHGKHAHITRLRFAYGHAQIIAALAACARKEGDAVTWRFVRDKKGWRAFVSVHEAATILCGDTANGALGVDVNADHLAIAVADHAGNPIAFRRISTPVVGASADQRKALYGDAAKVIVDMALARRVPIVLEALDFRKKKSELETSTSPRRARMLSSLAYTQIQAMIRSRAARLGVRVISINPAYTSLIGDAKFAGRYGASVHLSAALAIARRGMGLSERVPRRLSVMLGGGVRVTLVPPVRMGRRHVWASWAQIARGRKAALAGRSGSAQRRSSTARPQGPAVEGSLEQDRLFLDQLLNSGSAGAIPAAKTSPELLGRRTGRIATYG

SEQ ID NO: 21983 - protein, 549 aa, unknown; identical to SEQ ID NO: 21982
  TnpB Polypeptide

SEQ ID NO: 21984 - protein, 390 aa, Calothrix sp.
MKTLKFKLYNHKRNRYLKQTINAAGIIYNHCIALHRRYYRRWGKHLSCAKLQSHIAKLRNRKPFWQSVGSQAVQDICQRIEKAYQLFFQRHNKGVKPPGFKKVKKYKSFTLKQAGYKFLGDNRVKIANRVYQFWKSREIEGKVKTLTIKRTPLGELFLVVVVDDGSKQEIGSTTGKIAGFDFGLKTFLSCSDGTQVESPQFFKQSLNAITKASRQHSKKLKAQTCRGDALSGKVCKKGSSNRESARKNLVRRYEDVSNRRRDWFWKLAHQLTDKFDILCFETLNLKGMQRLWGRKISDLAFGEFLEILEWVAKKKKKLVVFIDQWYPSSKTCSNCGHVLENLDLSVREWRCPSCQIVNGRDENAAKNIEMVGASTIRLGDVRQAMPAIAV

SEQ ID NO: 21985 - protein, 505 aa, Calothrix sp.
LKKSKTPSFITEIQLKVSNQQERELIARFQAGRQLYNACLNESMARMELLKSSQAYQAAKKLPKGKHRDEAFKQARRAYRYSEYDLHYYVTLTATRSNWISQKVDSNTQQKLATRAFKASEKVLFGLAKSVRYKVPTRFRSMEGKSNKSGIRWKSNQIVWGKLAIDGIIPDNDCVIQHGLISTIKYVRILWRELNGKRRWYAQLICQGQPFSKPQNYVSSGTLGIDLNVSNVAFVADSHAGLLPFAEGVPTFEREIKAIQRKMERSRRTSNPDNYNPDLLCKKGNKTVKKKGTIKKGRRKWNQSKNYQKLARKKRELEHRKTSYAKSQNRRLANEILRHGKDIKTENVSVKGWQKRYGKAISAKSPSFFMSELTRKAESAKGSVIKFSTQKTALSQTHLDGSRMKKSLSQRIHQDATGVVMHRDLFSAFLARYVDRDMLSLHSAQVEWERLEPTLMEAWEQYKQYASRVGTSESRKSDPSSECISIDSDNRSQIAIKGRKATSIA

SEQ ID NO: 21986 - protein, 408 aa, Calothrix sp.
VLHKAVQVRLYPSKEQETLLAQAFGCSRWWWNYALNKSIETYKETGKGLGQSALNALLPKLKKAEDTKWLADCYSQVLQATTLNLTTAYKNFFDKRAGFPRFKSKHGKQSIQYPQNVKIVDGNVKLPGNIGVVKAKIHRLIEGKIKTVTLSKTPSGKYFASILTEVDGNAPAMAEGKIYGVDLGLKHFAVVTDGEKVSKYDNPRHIAKHECNLKRKQKKLARKHKGSNSRNRYRKVVAKVYERVSNSRQDFLHKLSYKLVSDSQAVIVENLHVKGMVRNRNLAKAISDCGWGTFTNFLAYKLERKCAKLVEIDRWFPSSKLCSNCFHQVREMSLDVREWTCPHCGTHHDRDGNAAINIRAEGIRMLKAEGSAVSAVGGEVRPKMGRKSHLRHSPVITEAYTVPSGQCG

SEQ ID NO: 21987 - protein, 233 aa, Oscillatoriales sp.
MGRMRFPLGTKVKAWFGLDAFYLPMPTNLNHKAIREYRILPRNGCFYLELIYKTEDVQADVDPSKVLMIDHGMNNWLTCVSNVGTSFIVDGLHLKSINQGYNKRVAFLMSGKANGYWSKRLEQLTENRNRTMRDAVNKAARKVINHCLANNLGTVIFGWNTGMKNAINLGSKTNQNFVQIPTGRLKNRIAQLCEKYGIKFVETEESYTSKASFVDLDVLPKFCEKLSWVATKR

SEQ ID NO: 21988 - protein, 508 aa, Chloroflexi sp.
MAKATTTIRQSLNYQSQHAEYFAANQALFNRVVAFYFDCIQAHEGVLDLTNKEALTALEMLTHATEKNPFPAMPLSAIAEQIPAYFRRGAINAALGSARSFYAQLAKWRTRREKAEAKPTRKGKKKFTERPPVPPRSWNKSVPFYAGQWKERTGSSIVLKVWTGSCWSWVKVRTLGRDVPEKFELGSPSLVCKGKQWWLHTPIEKTFSSPATIAEQITTNADTRICAIDLNLGEHLAVCTVQTVEGTILATHFIGGGREIAGFRKKHLGRIARNRSQTGIIAENELDNADLWRKIRNADEHIAHLVSARIVQFACEQGASILVFEHLGNLKPEKGKYSHRGNSKRAFWMKGRIFNFAKYKAWNLGMITSRVNPRNTSRECARCHSLIVRYAQGQPVEGYSPGTPLCLCQQCQMRGNADRNASLIIGQRLIVRCQEPFKEKPHAPVRRAGRVEKSTGVALSQEAKRKKGPSLSDARHGDDNAHGTAQEGTLWMDERPSAIPTQLRLPLE

SEQ ID NO: 21989 - protein, 484 aa, Mycolicibacterium sp.
VRRRRLVGAWCFSQFVGFEDAEPVSGGDAPGHRTVVRAYRFALDPNIEQQRMLQSHCGAQRFAFNWALGRIRANLDQRAAERSYGVTEEMLTPYVDRSAYGLRKSWNEAKEGVAPWWRENSKEAYASGIANLAAALGNWANSHSGARKGRAVGFPRFKSKKSRLSCRFTTGAIGLPDSDRRHVRLPRIGVIRTFESTRKLARRIDAGSARIRSATITKTRGRWHVAFSVEVSQTNALPRRQTRVVGVDVGVRHLAVLSAPAPGISDENGMVANPRQLAKAQRALSRIQRQAARRQGPDRDPAASPSKRWLRSQKRMSKLHASVANSRADGLHKLTTNLSRRFGVVVVEDLNVAGMLRNRSLSRRISDAAWGELRRQLAYKTQWTGGQLIVANRFYASSKTCSACGAVKAKLRLSERLYCCDSCGLCIDRDYNAARNLASLATTSGHVLPELRGDDKRARWKSASDRAPSAEDMATGSPRRGNVA

SEQ ID NO: 21990 - protein, 549 aa, unknown
  TnpB Polypeptide
MPKAPKKKKTEFNNNPVKSVFLYGNPNKGKLDVLWQMERKYVELINFNIEALMNIPDIHLQLIKNDKKDPYIRSLQKQLRPKDINSAFCQNAFDTAFTKLSNRLDAIRLEMLKSMDTVFCKSKALFGLSLDHVSKDDMVIFVREMILTSKKDNSFYRECLLILNIMSDNEFENQMIEFFDLYDMLSLQYRTPYTRSEAIPFDTRLMKIERSVSAKMPYVITLTNPFEKGKRFAVPVNTSKHSLHKISCDDMASTVTVKPQGKKVRIGWSFSKKFKEPVTTEVMGVDTGIKDSFFLSDGTSVGSMKDVIDFYHSEVEPAFAQLSNLRNKKRSISYYVRHHSDLPEDVRRSLINKMDRLEQMIHTADAPYRKKRAYYNMLNHEINQDVKTYMSCITHDTLTVLELLDIKEFEKSHKLNGDLSTFARGKLQQKLMSELNWYGYSYVEVPPDYTSQTCPVCSCCNSLNRSKTDSKKFRCTCCGYEDDADHVGAVNIRNRATDTELLEVCQKSKNHKALQSGIKKLLDSRNISWLTANQKTPILHEPEKAISLS

SEQ ID NO: 21991 - protein, 384 aa, unknown
  TnpB Polypeptide
MVEEVPKIEGKRRVKIVRSSKCSLKYATSNKKKELQTILTEYGRVCNIFIEYFWKNGTPSKSKLLKDIVDLPKDTWLSARLRKVAAREAIDMINATQERWKNKPQNMRIPIHKGKRMYVSCTIADLTESKNAKEYDAWLHLASIGDKKILDLPIKYHKHFNKYNEMGKRLNSYIITENYVQFSFEIETGAKREGANAIGIDTGINALASLSNRSQIGTDIKSCINRIKRCKKGSVGSRRAIRALKQRIDESVQDVMALEPDLIVVEKLKDLNKNSKLKGRLSKNIRSSIGAWNWKYWLNRLEQACQLNRVKFRTVTPFYTSTTCPVCDHNDRANRNGEKFKCLLCGHEDNSDLNAALNILKRFVSGPYGVAYKLDDLTFQNVQV

SEQ ID NO: 21992 - protein, 369 aa, Herpetosiphonaceae sp.
LLKTFVYRVYPSKTQIKRLERVLETCRHWYNDCLSERQVAYAERGEQIGKFEQLAKVKERRHVNPWAAEVHSHVLQVVVTDVDKAFQAFFRRVRGGETPGYPRYKSQSRFHSFGYKEYGNGFKVDGRRLRLSGIGRVALRWHRPIQGTIKTVRLVRKVGWWYACFACEVEQQPLPATGQEIAIDAGLTALIVTSQGEKIENPHWFRKAEHKLRVFQRRVARRKLDGSNRQKARLQLQRYYKRISNRRKDFHNKLVYSLIQQYDRIACENLHITYMVHNRKLAKSILDASWGYLIRHLQSKAVEAGRAVCLVDPSYTSRICSQCGHLFEALSLNDRWISCRCGLSLDRDHNAAINILNRAGQVRWALNSP

SEQ ID NO: 21993 - protein, 300 aa, unknown
  TnpB Polypeptide
VTLLADGPRLYVDVTAEIEVERYAPGEAPDPNRIAGVDLGIIHPFAVAGGNGALLVSGRALRAESRLHLAETKARRRATYRRAPTKGQRGSRRWAQYRARTRVLEGRHRRRLAQARHEGAKTVVDFARQKRIGTLVVGDPRGVLDQDSGARQNLATRNWRVGQLIEVLVDKAEAAGIDVQLVDERGTSSTCPCCTKRVPKPKGRNFSCPHCGLLAHRDMVGATNIASRSPRGGINVNLSGLAITHRRAGRHLPGRTRRDPRRVALEKRGQLKGLWPAVGRPGDVGDDDPAESLAQVASAA

SEQ ID NO: 21994 - protein, 581 aa, Rhodothermus sp.
VKAHQAFRFELDPNASQRRALARHVGAARFAYNWGLEQCLKALEAGERIPSAVELHRAWNRWKRAHAPWWVEVSKCAPQEAFRDLERAFRSWRERRAGFPRFKRKKSLDDNKARFTGAIRVFARHIQLPRIGKVRSKEKTDRLLTLLSAGKARILSATISREADRWYVSLTSEVERPDPEPKEVGSEHDIVGIDLGLSAFAVLSDGTRIEAPRPLGKALRLLRRRSKALSRKQNGSNNYCKATLRLARLHRRVRNIRRDFLHKVTTELARTKPVLVIEDLNVKGLIRGRLSRSVADMGWSEFRRLLEYKCHWYGSRLIVVDRFFPSTQTCAQCGTAGRKLPLFERTFRCEQCGLELDRDLNAALNLWRCGLATLNGPTASSAGSDACGDSSGGGTLRVMGRGSRKKSGNKIPWISERLVEACVLSAQPDVSARRRCRWLRAALTLIEAIEDEEVQEGLRDFVGMAAVELGHARLVRQIAATMRALGEEAEAERLWLQAALLEGRNRRDERLATLPDAEKNALLPLVFDGLRRRGRYGRAGELARLIPDPCRRLAALLLLVRAMAGIVPHGEGTLVSLLVVS

SEQ ID NO: 21995 - protein, 459 aa, Mycobacterium sp.
  misc_feature (372)..(428): Xaa can be any naturally occurring amino acid
MARLKVPEGWCVQAFRFTLNPTQTQAASLARHFGARRKAFNWTVTALKADIKAWRADGTESAKPSLRVLRKRWNTVKDQVCVNAQTGQVWWPECSKEAYADGIAGAVDAYWNWQSCRAGKRAGKTVGVPRFKKKGRDADRVCFTTGAMRVEPDRRHLTLPVIGTIRTYENTRRVERLIAKGRARVLAITVRRNGTRLDASVRVLVQRPQQRRVALPDSRVGVDVGVRRLATVADAEGTVLEQVPNPRPLDAALRGLRRVSRARSRCTKGSRRYCERTTELSRLHRRVNDVRTHHLHVLTTRLAKTHGRIVVEGLDAAGMLRQKGLPGARARRRALSDAALATPRRHLSYKTGWYGSSLVVADRWFPSSKTCXXXXXXXXXXXXXXXXXXXXXXXXXXXXXXXXXXXXXXXXXXXXXXXXXXXXXXXXXRPGLARPGGREARKATGHPAGEQPRDGVQVK

SEQ ID NO: 21996 - protein, 438 aa, Natronorubrum sp.
MEYSHRYRAYPSGEVATAAEHHLDVHRQLYNHVRWDYTISPDDDKPSEYQQNNKLPEWKRRWPVFAELHSKAAQATVARFHDNLSNLRKKKEKGYNVGWLKRQSPAEYRSVTYNQSGFDLDNKRGRNGFAYVRFSKIGWVKIRYHRPLTEHSTIKEVTLKKEVTGEWFVSFSLETDDEHVPEKPDVDSLNARNSVGIDLGILNYIHTSDGKTVDWIDLEDEYERLRREQRKLSRKEQGSNNWEKQRQEVAKVKRKIQRKVLDYQHKITTWLVTEYDAVFVEDLDVAGMLQSDGNARNKQDVAWRQFITLLEYKGDLYGTHVVQVPARGTTKECASCGVKTAKPIWVREHSCPSCGFETDRDANAVVRLRLTGSKIACDFATAMNVLQRGFSKLGLGWPEDTPVETALPTDTADFQRVSAKRVVESGSLGVDRESKGLS

SEQ ID NO: 21997 - protein, 371 aa, unknown
  TnpB Polypeptide
MKQTLLIKLVPTETQFKTLKETMEAFNEACNSISETAFQTKTFNNWQLHHLVYYNIRKHFNLSAQMTVRAISKVTDAYKINRKTKATFKPHGAMVYDQRILSWKGLEKASILTLDGRLKIPIRIGDYQKARMDRIRGQADLILRNGTFYLAAIIETPEAEPFKARDFIGIDVGVRNIATDSDGKRWTGKELNGIRARYQKIRSKLQSKGTKSAKRLLKKRNRKEHRFVTAVNHSISKRIVQKAKDTLRGIALENLKGIRRRVTVKGSRQRRIIHSWSFNQLQNFVEYKAKILGVPIVYINPKNTSRTCPKCGFVAKANRNGESFHCGKCDFAGHADHVAAVNIGRVAVNQPDASRDFFRHLSSPLGASHPF

SEQ ID NO: 21998 - protein, 490 aa, Isoptericola sp.
VTAGSVLDVVRHTTFQLVADPTVEQARVLARHEGAARFAFNQGLRLHLDARHASKSTGPDDVAATVKVPWTGFDLINAFNAWKRSEDAGRRFVVDGSRAAEVEVTGLAWRTEVSAQVFEEAVVDLGKALKAWTDSRRGKRAGRTAGHPRFKKKNPERGSFRMRNKVSRTKVGDRSTIRVGENGPRSVTLPGIGAIKVHDDTRRLRRMLATGRARILFATVSRRGGRWRISLNVEATDLHPAARHQVRDVTDHSGWAGVDRGLHAPVVAALADGTATLRIAEAPKALRAAQPVTRRLSKSVSRKAKGSVNRRAAVRRLARHHERVRARRHHFLHQVSNLLVQTHDRLVIEDLNITGMLANHRLAAAISDAAWGELARQITYKMAWRGGQVLTADRWFASSKTCSTCGDVTTTLTLADRVFVCDTCGLTIDRDLNAAVNLATWGEQHHHSQVLDPEARGQVTNAHRPDGAGRRSRDDETSRDDVGTRTVTAA

SEQ ID NO: 21999 - protein, 398 aa, unknown
  TnpB Polypeptide
VHRSYKFLLRPTAKQVAALEACLEDTRQLYNAALEERREAWRMRKVSVSLYSQTAQLKDIRAADPERYKRWSFNCERAAVYRLDLAFQAFYRRCKAGGKPGYPRFKGRGWWDSVEWKNGDGSRWDSVPHPTVTRVYFKGIGHIRVHQHRTVKGRIKTVTVKREGGRWYVVLSCDDVPAEPLPATGAVIGIDLGVTSFLSTSDGAHVPNPRPPAAAADRLAAAQRSLARKKRGSNRRRQAVRKVAALHGKVRRSRLDRAHKTALALVRDYDVILHEALKIANLTRRPTPKLGNDGTYEPNGAVTKTRLNRSIYDAGWGVFLDVLHAKAESAGRQVIEVDPRHTSQRCSRTSCGHVAKGNRTSQAMFRCVKCGHEDHADVNAAQNILRAGLVLREARDAA

SEQ ID NO: 22000 - protein, 578 aa, unknown
  TnpB Polypeptide
MARYGVHSRTRQAPQIGTQTYLEPTQDLDRLLWDLCRLFGRDLRRVYTQIYDHHAQWFIKGGGGLRNQLASEGWLRQEADAMHWKAAADHDSLRESRQLNLQQVGEQIAEARKRLKDKKKKLAGRRKHHLHNKIQRLESRQEQIKQQLEDRSYRVVFGGRKLAKAGNNPQLHGYESREQWRQEYDRARNGYWSCQGNIIATGGNAAAQLILSPDGDKLRLHISRQLGRPEAWVEIPVRRLEYRRAEFSLVATPDQETTDRLRAAWKELPEDKRSKRPPRRRLVIVPVSYQIRWSERKQRWYLDVSWEDTCRPEYEQDSGWRCGVDINPDHLACCVIKPDGNPVAWIKIPCDLDGTHNQVADRVSLAAQQAVWFAKSYNAELVVEELDFTRSRAQLAYMPNHVARLLSSFAYRQVLLSIGRHGRHQAVRVHPVDPAYTSTLGRINFAGVYGVSVDQAAAASIARRGLGLVERARPSVARSLPGCAGAGHAKQIRLLHRRLKYQSRSTTWDKGSGLLRRGLPGYHHRGGSPAAGKVKTAVGSISARVSGPNGQLSLSGRRSGETPDVLRNVLVNNGQHQP

SEQ ID NO: 22001 - protein, 578 aa, unknown; identical to SEQ ID NO: 22000
  TnpB Polypeptide

SEQ ID NO: 22002 - protein, 694 aa, Lactobacillus sp.
  misc_feature (248)..(269): Xaa can be any naturally occurring amino acid
VLKGIKLRLYPNRTQQNQLEQIFGNDRFVWNQMLAMMNERYQNNKALPFLGKFKLNYLLKPLKKEYPFLKNSDSSSLQVVNEFLTQSWKNFFQDKSGQIGKPRFHSRKYLKKSYTGKSIIKTAGKRYLKIPKLGYVKTSKTGVLQNTKIKRYTVLLEPTGKYYLSLQAEIPEPEKYSLTDKQVGIDVGVADLAILSNGLKYPSFNSSYFEKKAKVWQRKYARRRHLAKLLVLQDRNKKVLCPRSLESXXXXXXXXXXXXXXXXXXXXXXAFFFCFFACSPFFLKHMFDIILKRKEGTNVLKGIKLRLYPNRTQQNQLEQMFGNDRFVWNQMLAMMNERYQNNKALPFLGKFKLNYLLKPLKKEYPFLKNSDSSSLQVVNEFLTQSWKNFFQDKSGQIGKPRFHSRKYLKKSYTGKSIIKTAGKRYLKIPKLGYVKTSKTGVLQNTKIKRYTVLLEPTGKYYLSLQAEIPEPEKYSLTDKQVGIDVGVADLAILSNGLKYPSFNSSYFEKKAKVWQRKYARRRHLAKLLVLQDRNKKVLCPRSLESFTNWQKAQKSKAKYQAKAANQRRDYLHKLTTHLVKQYDVIAIEDLKTKNLQKNHHLAKSIANASWRIFRQMLEYKCEWYGKKLIAVDPKNTSRICSKCGYNSGAKPLEIREWICPKCQTKHDRDINAAVNILHKGSTKLNGQGLAMVTS

SEQ ID NO: 22003 - protein, 173 aa, Microcystis sp.
MFVLRYKLRGKSSQYQAIDEAIRTVQFVRNKCLRYWAENKSVGQKDIYRYTTQLRDEYSFVKELNSTACQQACERTWTAILRFYSNCKKKIAGTKWYPKYSKRTHSVEFKKSGCKLNRNSNRITFTDGKNIGELKLIGSRDLFYFQEWQIQRVRIVKRADGYYCQLINSILEI

SEQ ID NO: 22004 - protein, 442 aa, unknown
  TnpB Polypeptide
MKIISSYGVELRKQNIPIRQTLEIYRSAVRYLVEVYESVWEELVKIEESKKRFNAAEHLVHTTKRNPARFDFDFCFPKMPSYFRRAAVQHALGSVSSYRTRLEQWKAEGQKTGKPYLKSEQYAMPVFYHDVMYRENTEEKDAAFLKLYDGHDWKWFAVRLKHTDMEYLRKHWSGKKASAPMLEKKHDKYFLRFTYAEEVSLNQTPVKEQTICSVDLGINTDAVCTIMRPDGTILGRKFINFPSDKDRMYRVLGRIRRFQREHGSRQTQGRWAYAKRLNTELGKKIAREIVFYASENRADVIVFEYLEMKGKLSGKKKQKLQMWRKRDIQKRCGQQAHRKKIRISRICAWNTSRLAFDGSGEIARDIQDHRLCTFQNGKRYNCDLSASYNIGARYFIREILKPLPATERSLLEAKVPAVKRRTSCVYADLRDLISEMELRKAA

SEQ ID NO: 22005 - protein, 343 aa, Meiothermus sp.
VPENIRNSARIQQLTYKEVRQRFGLSANLAVRAIARVSMNRKAAKELGSKVKAFKPTSVDYDARIFDLRLRDETASLTTVKGRLRVDLRLSKYHLQKLQGAQPTSATLVDSKGKLWLHVQVKREVPPAAEPQDVIGVDLGRTDIAVTSTGKSWSGQAVTKVRDRYARTRQMVQKNRSKGTRSTRRRAGALLRRLSGKEKRFQKHVNHVVSKAVVSEAQALGAAIALEDLTGIRERTNTQPRNSTERRRSNSWAFHQLRGFVEYKAALAGVRVIPIPPAYTSQTCHHCLHIGKRQGKRFACGNCGWVGDADHNGAQVIRLVGLTVTQPRGSELLSCIFRAPESP

SEQ ID NO: 22006 - protein, 466 aa, unknown
  TnpB Polypeptide
MIIGMKSRIGYAHPECNSGKVGALNELHGVYREDIQKYVNEMVKSKRHHIKPSAYKTFFSGSVMSSHLKQCAKAQAVNMVDSWVRGLYPRLKHRIYEQPFTDQQRMELRCVGKYMLTKAGKFGKGTISQGMVDLYWSWVWDKDIAGNTPVVSEDFPMWLAKECCVFGESKNADSLGGWWVAVSCLRNGKRVQIPLSNSPFLKSPDVFAKSVLVGKRDGRWTFQFVDKTPDVMFTKTSNKLGVDVGLNVLAATSDGELFGQRVKPVFDRRYKQLQEVRANRQRQDLKEDSKRINKLERSLTGFVKTEVGSVANQLVKRHPDTTFVIENLDLRGCRGQKRFAYRLLQKSLVGKAPTEKANPAYSSQECPSCHYVSRSNRDGVQFHCRCCGRISHADVIGGKNLLGRSGDKQITPSLHYRQVGTILRERFRLRRTSSSGCRKKRLTVGPDAYCDASGRIASNAVVEVTP

SEQ ID NO: 22007 - protein, 351 aa, unknown
  TnpB Polypeptide
MIVRTLKLKLTKAQESQFNRWLWNLTGLWNWAIRKIENDARDKVYHSPFDFVNLIADHSKRMGIPSHTMQGILNQAHFAWRRCFRKMAKKPRLKGIRNRLNSIPFPDPIKPPKDGRIGIPEIGKIRFHKQDLPEARIKCGRIVRRASGWYLCLWLDRDHKFPVKDTDRAIGIDPGFHTLLTLSDGTKIENPRELKKGAKRLAQAQRGHDKHLAARLLERQANRRRDRNHKISRELVEDFKTICYSDDNFKSMARRFGKSVTEAGLSNLIGMLICKSRTGGRELIPVNSFHTTMTCSSCGALTGPQGLGGLAVRRWTCSECGSDHDRDVNSAVVVLNAGLGTSHEGGLRHVA

SEQ ID NO: 22008 - protein, 514 aa, unknown
  TnpB Polypeptide
VRAQTSSYVVSVKLKLSESIENHLEKSFRIANSAYNEALSFGLHRFEALKRNSDYQNLLEVRHLALSGIAGLKKAKQKTVGLTQQVKCYNKALFELRKAYELTEFGLSAHLGQQRRKDGSSYQRLNTGELQVIASQAMKTLEKVLFYQIKPHKVRFKSKFDLNVSFRNRVNTTGTRLISSNKKGVAYRLYLHKMSTFVDIPVKAFNTYQQMSLLRSEKIKYVQIIRKTIRGKKVYILQIVCQGLPPAKVTKGGGVVGIDPGISTVAFASSKEVALVDLVPNDITRKEKLLKRLDRAIERSQRINNPECYKEDGTIKKGARFKRPSNRQIRLRNRRLKTYRSLSEERQKLQGQLVNRLVSQASSIKIEDLGAKRLQKRSQDIRINPKTHRPYSKKRFGKAIFRAAPSAFRSALETRARQLGINFEVISPKGVKPSQYNHITQTFEKKPLSIRVYDLSDDYPDVQRDLYSAFLIGHIENGHYQQEQLEQDFPAFYQQMKFFLHQTPETNRLGWYLK

SEQ ID NO: 22009 - protein, 339 aa, unknown
  TnpB Polypeptide
MLLTFNIKHGRDLSAELTKARRVAEYAVEHHSFSSADVRHIGLKSALSGQILRKYGRNRSLKRIGSVQLTVPGQAVKVDEGHNELYISCLKLRLDISYLPTLEKVNRVELDKEYAHIAVTINELPVREVEQWVGVDLNSTGHVAVVANPTTGKVDKYGKEAPHIHRKYSKMRRRLQIQGHYKVAKKRIRSKENLKVKDINHKISRAIVDKAAQQACGIKLERLSDIRTTARTFKPTRPSLHSWSFYQLQFMIEYKAKLLGVPVVHVDPAFTSQTCSRCGLIGTRSGKDFTCSCGHVDHADVNASFNIALRPSLEESIGRSHADRDACKGLIGVPQEAPA

SEQ ID NO: 22010 - protein, 243 aa, Sutterellaceae sp.
GPFQKELLASGKRKECNLVLHPRRGRKEAFWELHIAVESQGCSGEEHLKNLKADEIMGIDVGENNIAAVSTGRIWKAGALKDKRDRYMSQRKRLQRNGSQSARQHLKKASGRERRHVTHVNNVVSKEIVQEAAKRGIKLIALEDLTHIRDHIKAGKRIRSRLHRWSFRELQEMIVYKAAAAGIRCVFLDPRYTSQTCSQCGAPGKRHKHGFRCSQCGHLAHSDLNASRNLQGLCRQLSAQGLM

SEQ ID NO: 22011 - protein, 346 aa, Prochloron sp.
LLRDGDVKANWKAIKTGLLNDLPEWAKEVPYQIKSIAVKDACTAVGSAKKKYNSTGKIQQVRFRSRKNLIQSCYIPKTAIKDRGIYPTKLGALTYSQQLPDSLCDSRLISNNGNYYLCVWNKVASSPAENQGRVVALDPGVRTFITFFSENSVGKIGSGDFSRIQRLCQHLDDLKSKISKAIAGQKRRIPKAARRMVIKIQNLISELHHKTARFLVDNFDVILLPTFETSQMSKKRDRKIRSKTVRNMWSLSVAEVLTFAHYRFKEFLRFKAQETGKMVVDVCEAYTSKTVSWTGEVLNIGGSKKIKSKVDGQVMDRDINGARGIFLRALGDTPWLRNQLALVSQV

SEQ ID NO: 22012 - protein, 428 aa, unknown
  TnpB Polypeptide
MKTIIFKIKLNKELQKVIDEDSRICSSIYRFAFNRFQDRLSNKDNYILISEKFKDVNCHLRNSSLRAANSLFKKLKFTKGVKFGLVDKIKKGLITKEEYKQSRNVGILSEGEFNQKGNRLFQIDLKNNCFIYKRSVKEHYKLEIIEKLNNKRKHILQILYNLMISKTIPVTFKLKNDLVYITYDESIVEKEKQFKNLFNNRVLGIDLNPNYFGLSIIEFNHNNNFKIIFKQVIDLNELQNINNKNKIKYELQQINHYLIKLCKNYHVSKISVEDLKFNPKNKFWNKDLNRLCKNKFRYSIIKNHLKTLCNTYGVQYIEVNSCYSSIIGNFKYGSENCPDMIAASIEIARRCYKKFEKGWFQPMFITKQRLQKVLGNQWKKELKLSCKSWKELTRKIKELKLKYRFQLIPLNAVFSVFYIKKLYKLYTF

SEQ ID NO: 22013 - protein, 384 aa, unknown
  TnpB Polypeptide
MIQNKAYKFRLYPNKQQQEQIDKTIGCCRFLYNIMLSDKIDCYQENKTMLYNTPAMYKDFYYFLKEIDSLALANVQLNLERAYKNFFKNIKVGFPKFKNKHKSKWCYTTNNLGQIQIENNKITLPKLKEVKIVQHRQIKGVIKSCTITKTRTNKYYISILCEYENQVEPILINMQKSKMVGLDYSSSHFFVSSDGEIADYPKFFRNSEKKLAKEQRKLSLKKNKKSKNYQKQKLKVAKIHEKIANQRNDWLHKKSSELVNAYDCIFVEDIDMKSISRCLNLGKSTMDNGFGLFRNMIEYKVKEQGKCYMKIDRFSPTTKLCHVCGYKYEDIKLSVRDWTCPICKTYHNRDINAAQNILAFGREILFRGRNCLDSSVVYSGSKQN

SEQ ID NO: 22014 - protein, 379 aa, unknown
  TnpB Polypeptide
MEQFAYKFRIYPNNKQKELIDKTIGCNRLMYNLMLAERKEIYQKYKNDKNTLYKYKYKTIKQIKNEYKFMDEVDSQSFMWTFVNLKDAYNNFYKSLKVKNNFGFPQFKKKKYGGSYTTSFINNNIKINYDNHKIKIPIVGWINYKDKRKIIGKIKHATISKDTSEHYFISFNVEQDINIKQVQINDESKILGLDMSLQSFFIDSNNNSPEYIRLYRKYEKYLKQLNKKISKKKHNSNRFRKLRKSISRIHYHITNERTNFLHNLSNKLVNENDIIVVESLNLKGMSKIFGKSVNDLGYAQFIWQLQYKLKRKGKYLIFADRFFASSKICNNCGYKYKELQLKDRQWTCPNCGSLINRDLNAALNLKSLGESIIHKCTSR

SEQ ID NO: 22015 - protein, 395 aa, unknown
  TnpB Polypeptide
MYRAYKIQIKENDYLKQITMSSNNLYNYALYNVRQNFFKNKTFLNYFGLYPICKENENYKNLPSQAAQQVLKQVDNSFKSFFQTLKDYKKNPKKYKSRPKIPKYKEKCSKNIITIPGQTAYKKGNYLQFPKTDFKIFLGKLQINKIIEVKIKPYNKYYEVFIIYEKEDKKHVEQNENYIGIDLGINNFVTITNNIDKNPIIVKGKVIKSINQYYNKKKAKLMSYIGNKGTSNKIEKLSRKRENKINDYLHNVSKRIINYCINNNISNIVIGYNKGWKQNVDIGKVNNQKFVSMPFNRFINQLQYKSEEVGIKLILNNESYTSKCDALCLEDLKHKENYFGKRIKRGLFKTKNNELINADINGSLNILRKVIGNDFISLLNRGLVKSPFKVNFNSF

SEQ ID NO: 22016 - protein, 455 aa, unknown
  TnpB Polypeptide
MITLKIKYNTNLNNINIIKQYQRQYTICYKVIYKYLKLGLKSNQIKEKLKNYKNINLIINNSWFINCLFYDVKCILKETNNVCFNYNLHLKRNKNLITKQEFKENKYFQVCSNGEIDKKCNRFFKILNINQILFKPNKYTKILLNLQSLGKNRIKILQQLLNLQNKNNILSITYKLNKDYIYLTFDESNLSLIKLKPINNRIFAIDMNPNYIGYSIIDWKDTENLKFNLINAGIISLKSLNDKYFSFKKLKLSSNNKLKLHLTNKRKFEIFEVSKQLIKLAKHYKCEFFAIEDLNIKSNDKNLGKKFNSLCNNLWNRNKLQQNIQKRCNLIGIKFKKIIANYSSILGNSLYRNLKLPDMILSSIEISRRCQEFNLQYIKKSKKVTKNIIFPNLTEKVRNLLNQTMEVLGNKFQFETINNFCYFLKKNFKNKYRVPLDLTRVFRQKHLKYQLINFI

SEQ ID NO: 22017 - protein, 414 aa, Pandoraea sp.
MQRLQAFKYELMPDGGQQRQMRRFAGACRFVFNKALALQKENYAAGGKFVGYVPMAKHLTAWRNGSETPWLKEAPTHPLQHALKDMERAYQNFFAKRAAFPRFKKKGQGDSFRYPDPKQIKLDQANSRIFLPKLGWLRYRNSRDVLGAVRNATVSLSGGKWFVSIQTAREVDAPVPQATDAIGIDMGIARFATFSDGTHLAPLNSFRKHEARLRRYQRAMCRKIKFSNNWKKAKARIQRIHARIGNARRDYLHKATTTISQNHAMVCIEDLQVRNMSKSAAGNTEQPGKNVLAKSGLNKAILDQGWFEFRRQLAYKLTWNGGYLIAVPPHNTSRTCPCCGHVSVENRMKQAQFKCVACGYENHADVVGAINPPRGLPTGRILERGQRLFACGGMVQSGHPAKQEPAEATAQLIA

SEQ ID NO: 22018 - protein, 389 aa, unknown
  TnpB Polypeptide
MMPRKKKKMKSGQELRQRAIKVRLYPTQEQEILLAKTFGCCRFIWNNMLSDEMRFYNETDKHFIPTPAKYKAAFPFLKEVDSLALANVQLDLKAAFSRFFKDSKHFGHPDFKSKKKSKKAYTTNCQYNGNAQTISLVHRGICLPKLGVVKAKIHRQPMRGWKLKAAAISQSRSGKYFCSLLYEFAADIPKATLPEKETAIGLDYSSPDFYVDHMGRSPDKQHWFRETEKTLALYQKRLSHMERGSQNYEDQLHRIQVLSEHIANQRKDFAHQESRRITNAYSAVCVEDLNLRTMARTLNLGKSTNDNGFGMFRSFLGYKLHDQGKHLIFLDKWYPSSKTCHNCGYVNSELSLGDRTWVCPSCSQTVQRDMNAALNIRDAGIDQFYSMNV

SEQ ID NO: 22019 - protein, 378 aa, unknown
  TnpB Polypeptide
MIRTYKYRLNPSQKQFHLLDTLLFQMQTVYNDALHERRWAWQRSRRSVTYIDQWNRIRDERHALPDEMGMLNATSIQQMLRRVDKAYRAFYKGQRGAPRYKGRHRFKSIEYRHGDGCKLEGNRLYVQHVGAIRVRLHRAVPTDARIKHVVIKRSGDKWDLCLILELPMAEPPLHKGEAVGVDVGLHSLLALSDGTLIDNPRWLRASLPKLRTAQRRLSRRKKFGAGWRKAAKQVAKLQERIADQRRDFWHKTTTELAQTYSLIAVEELNLSFMTRNGNLALSAHDASLRLFRQLLDYKVESTGSRVVGVNPSGTSQACSGCGVIVPKGLNVRTHSCPHCGVSLDRDVNAALNILARGLRVEALTWPVAACVASEAPPL

SEQ ID NO: 22020 - protein, 369 aa, Nocardia sp.
MQLRYSYRVYPTPGQRIALARAFGCARVVYNDALAARMEAFAKSERISDTELSKRLTAAKATPQRAWLADVSSVVLQQALADLNTAYRNFFASVSGRRKGARVGVPRFRSRRAHRQAIRFTKNSRFAVTSGGKLRLPKIGEVRVAWSRDLPSDPSSVTVIKDATDRYFASFVVQVDEQPLPELETEVGIDLGLTTFAVLSNGKTIDSPRFLRRAERRLRKAQQVLSRKEKGSKNRAKARVEVARAHAKVADTRRDWAHKHSTRIVRENQAIFVEDLCVQGLARTRLAKSVHDAGWSTFVTMLEEKAARCGRTFARVDRWFPSTRLCSRCGVVGERKALHVREWTCVCGAVHDRDVNAAMNILAAGRAER

SEQ ID NO: 22021 - protein, 352 aa, Beggiatoa sp.
VSRLAYNKTVEYLKKDGTKADWKAIKTDLINGFPDFARPVPYQIKSIAVKDACLAVRKAKQDFAKTGQFNEVKFRSRKQPYQSFYLPKSAIKEHGFYVKLLGKNSRFREKIPVFLMDARVAIQNGRWFVCIPTKITPHDPDNQGRVVSLDPGIRTFLTFYSETSCGHLGQGDFGRIQRISHRLDNLISRTSKAKGAKKYRMRKAQQRMRNKISDLIDELHHKTALFLVKNFDVILLPAFDTGKMAKRAKRKIRSKSVRSMMTFSHYRFKKFLENKAFEHGKIVIETNEAYTSKTVSWTGEIVKNLGGAKIIKSQQTGLSMDRDLNGARGILLRALVDAPSLNLVKCALVNNC

SEQ ID NO: 22022 - protein, 373 aa, unknown
  TnpB Polypeptide
MILGKKVRIIPNMEQEQKLWQSVGTTRFIYNWTLARQEENYKNGGKFISDGALRKELTILKKTKELNWLNDVSNNIAKQAVKDGCEAYKSFFKGLADRPRFKSRRKSKPSFYNDNVKLKVKENSVLIEKVGWIKTAEKIPMKVKYTNPRISFDGKYWFIAVGIEKEQPIVKLTTESIGIDVGIIDLAICSNGMTFKNINKTKDVKKLEKRLRRLQRRVSRKYLKNKEGSKFVKTSNIIKIEKQIKLLHRKLANIRSNHNHQATNKIVKTKPSRVVMETLNIKGMMKNKHLSKAIAKQCLYEFKRQMKYKCEFNGIEFVEADKWYPSSKICSECGHIKPKLSLSERTYICEECSCVIDRDYNASINLSRYELVV

SEQ ID NO: 22023 - protein, 535 aa, unknown
  TnpB Polypeptide
MQNGRRLVITASRRRKASRSLPVSGSALVADDAGRCSQSRQVCSRRCAPMNRQRDGIAVQLERPAIQAGVSLCLVLAERSDSGRRERSRRRIDLWLPRAVRLLRGVPGLCAGQGVSSSPCGTMYNVAIRNRLYLDTGQRLVLAAHCAHARFVWNLAVEQQSWWRPGRGSAPDRKERQRQLAEARAGTWLAEGSSSVQQCALRDFDHAMAAFLDPKNPAGRPSFRSKRGPQGFVIRDTKVRRLNRRWGEVLVPKLGYVRFRWTRDLPAKLGMARVTVDRAGRWHVSFPAPQPALNRELTGAVVGIDRGVRTALVTSDGQHYRVPRISDRRAARYLALQQRMGRQQKNSRKREKTRLAMARITARVADRRRNWAEKVSTRLVMDHDLIVFEKLNTNGMTRKPAPKPAPDRPGAFLPNGARAKASLNRGILGSCWGYLATRTEQKAAASGAAVVYIDPRFTSQQCRMCGHVAKENRESQAVFLCVSCGHSDHADANAARNILARGLALPATSAQAPGPWGIRPHQPATAAAGTTRSAA

SEQ ID NO: 22024 - protein, 274 aa, unknown
  TnpB Polypeptide
VGRSDRVTFPQVPVGCHLDAEARRRRVMNVGLVKVVVPRPLQGTPKTATIQRSSTGKWDVGFSCERAEPSPLPATRQDVGIDVGLELFAVPTQGEPIENPRFFRRDEKALAGAQRRLSKREKGPPERAVRRQVVARIHERLAWRRGDFAHQHSRRLVNAFAVIAVDDLSVNRMGHTPCLATSIHAAAWTPFAAYIAHQAAWAGRRFLAVNPAETSQDCSGCGHRQTLSLADRLYTCCGLVLDRDRNAARNILRFARALLGLGQQSLASAEKPPD

SEQ ID NO: 22025 - protein, 340 aa, unknown
  TnpB Polypeptide
LYHTDRSERRGGQLQAEWIRKECAQEVRPATHDDVQRRRTSRCPPRPFHERRATTRPQARERYRVVRQNPAPRGLPPLDASTTESRTTGLVGSVERGRRHDGRESAIRAGTERGIFTSPQPATQRAVPRCPTKNGHPSVSILGKRRSSRCVTVTTTGRPTAPELWADEGKTVRRLRKTYFTATRRLQTRGSERIAESFGDDLWNQIDDVFHRVTREVVDYAESVKNPVLVLEDLTYIRESMDYGEYMNRRLHGWGFAKLHAQIRYKAVEKGIPVKTVNPRNTSKECHACGGGIPPTTGDVQVYERCVLDGRVPSGRERSGEHRRPLPQRRESFQRTRERR

SEQ ID NO: 22026 - protein, 363 aa, Thauera sp.
MDKPTKTLKVRIKDKHAPLLRQWAASVNFVWNYINELSSRSIKERGKFLSAFDIHAYTTGASKELGLHSQCPQVIAKEYVTRRKQFKKSRLAWRKTNGVRRSLGWVPVNTGMASWKNGQVYHNGQYFGVWDSYGLAGYKFRSASFSEDSRGRWYFNVVVDVEEKLSPGQGAVGVDLGLKDLATTSDGEKLEAGRWYREEQAKLGIAQRANNKQRVKAIHAKIANRRKDALHKFSRRLVDTHGEIYVGNVSSSKLVKTKMAKSVLDAGWAMLKTMLEYKGAHAGIVVREVNESFSTQVCSCCGSISASSPKGRAGLRIREWTCVACGSTHDRDINAARNILGRGRAPLAVGIPVLPRVSGQPQG

SEQ ID NO: 22027 - protein, 435 aa, Thauera sp.
MSEGAGFHRAYRYRLRSNRKAEAVLRRWAGCSRKVWNLALAEQQARRERGEKYAGFAGMCQWVTTWRKAPETAYLAEVPVHALQNVVRALDGAFQRFFRKEGGYPKFKRRGDPIGLRETDVACFAVDAANGRIRFPKVGWLRYRASRPIEGRPITVTLRAEQDGWYASIACEISNAHLPVGTGTKACGIDRGVNNFAAFDNGQLVAPRDAHRKSLARLRRYQRAVARKLEAAKVAAGIPKDKPFPKGFRLQASNRLRKVQARVAKIHQKIARQRADFLHKLSTQIADKYALVCLEDLKIRAMSASAEGTQDAPGKRVRQKAGLNRSILDQGWSMFKDQLAYKLEWRSGQLVLVNPAYTSQRCHACGHTHADNRKGETFRCVYCGHTDHADVNAAKNILAAGLAVLAGDGHALVEETVQSGRPEKREPTEGLRHAA

SEQ ID NO: 22028 - protein, 523 aa, unknown
  TnpB Polypeptide
MIQPELKAYRRCSDRHVLVLETNLTYVEKCQIFHYADLVRKAGNELTGIMKKRYDQLVRTKRYRKLKTLYKKYKDADNKKALKDVCDQMKEMQKQYDVTWDYCRTSMIPIGKKYGIDAVFALTKAEDVFRGIEKCLYSDGETVHFKKRGDLPCIRAKQTKCGIVLKYTEHDLIFKLRNIRFGVNIKDRYEQEEVDAILYYLKHAEFMDSIAANTYKETNICVSTYRPCYVSLVCKKIRGKLRVYVHITIEGVTKPKRDRFGNMKHNKGKGIVGCDIGTQTIAYTTETKAGLKNLAERGSCIEVNERKERRIYRAMDRSRRAMNPDNYNEDGTIKKGKKKWTYSNRYKKLRTKHTELCRINAINRHLAINEEVNELRSLGDIFVTEPKNAKKLQKKAKTGKRKKRFGRSIKNRCPGYFQSQAKRKFRIYVEVPNDYKASQYDHTSDEYIKKSLSQRMYKLQDGTMVQRDLYSSFLLYCIDLNTNKIDKNKCIHEFEKQYKNQNETIEYIQMNQIKVMNSGIRVN

SEQ ID NO: 22029 - protein, 358 aa, unknown
  TnpB Polypeptide
MQRSVTIWIPKSDDLVDTIVQYNSACNDCLKWGFGNKTYNKSKIHKATYEDIRTRYPDLQSSLVCAARDQAADMLKREKLKRFPKKKTFSGIRYNARTISVSADGSKVSLSTIAGRYRFDLNIPKYFQKYGTGKLCAATMSCQNDKIKLVLNFEFNPIQKCENSKVLGIDRGIINPVVTSDNGFFNSKKLRSVKGRYQYQRRKLQQKGTRSAKRRLKQISQKETRFVTDMNHCISKQIADSDFGIFVLEKLEIKRSKKVGKKFNRKLGNWSFAQFSKLLEYKAEDRGKIVIYIDPRYTSQKCSVCGNTEKSNRKGSKFICKKCQFSLNADLNAARNIAQLGISQMSRLLVNQPTVASC

SEQ ID NO: 22030 - protein, 358 aa, unknown; identical to SEQ ID NO: 22029
  TnpB Polypeptide

SEQ ID NO: 22031 - protein, 355 aa, Azotobacter sp.
MKQTKTLKVRVRDKHAPLLRQMARSVNFVWNYLNELGCRALRERGLFLSAYDMDRYTQGSGKELGLHSQTLQEVSREYATRRRQFRKARLNWRKSGGVRRSLGWIPFKSGAVQWKSGQVCHNGHYFKVWDSYGLGRYRFRSGSFSEDARGRWYFNVVVEVDVQPSLGQGAVGIDLGLKDVATCSDGTKLENGRFYRDLEAKLAIAQRAGKKARTRAIHARIANRRKDALHQFSRQLVNRYGEIHVGDVSPTKLVKTPMAKSVLDAGWGRLKTLLEYKCAHAGIVFRVVDERYTSQACSNCGGLPDSRPKGIAGLGVRAWTCCECGVTHDRDVNAARNILAAGHGRPAVGIPFLSV

SEQ ID NO: 22032 - protein, 456 aa, unknown
  TnpB Polypeptide
MSSSGQLLGHEEREPISPAIPEEGIYEVEYKNKRTNVVRLLPNGFEERKLRKLADTSARLFNEVNYERRQQFFRGEKVDFKSTWNKYYEKYKGILGPANAQAVLQKNNEAWSSFFSLLNLKKKGKLPPHMNHVSPPRYWKEEKKRKLLLVIRQDRYEVDEKNHKLILRDFNLEIEFAGRLRWYGKQGRLEIRYDDVENAWYASIPVEVGVEVTKTGKKSKYIVRGERKSIQVEAPKGNKVAAIDLGINVLASVVMSDGTWLLYKGVRAKEDYFYLQKKIAEIQSLADMARKLGEYEAQEELNREKRRLFKKLTRRLQHLYRTLASHMVETLHKQGVSIIFLGYPYNIAQDNGNKFTTNMWSYRKLANAIELEAQEYGMKVYEVIEYNTSKYCAYHNVVVSRNPRGVVICPKGHKLHSDLNGALNILKKATGITISTVKKPLSFIVGHNGVAPVKGV

SEQ ID NO: 22033 - protein, 439 aa, unknown
  TnpB Polypeptide
LQIVLTAFRADSLLSWANGTLCVVAIRNRLYPAADQEFGCLRHCAHARFVWNLALEQQSWWWPGRGSAPGSAERQRQLAEARSGEPWLRDGSSSVQQQALRDFDRAMAAFFDPANHAGKPRFRSKRGTQGFVIRDTRVRRLSRRWGQVFVPKVGWVRFRWTRPMPPRLAMARVSVDGAGRWHVSFPAPQPTVDREPTRKAVGLDRGVRTALVTSDGQHYRAPRISDRQARRYLCLQRRFSRQRKGSAKREKTRHAMAVLAARAADRRKDWAEKLSTRFVREHDVIVLEKLNIKGMTRKPVPKPDPEQAGNFLPNKARAKAGLSRGILASCWGTLGQRIEQKAQAAGVTAVFTDPRFTSQQCCACGHTSPGNRDNQAVFRCEGCGHQDHADVNAAKNILARGLALTTDEIVPAHAPGHGVPRPRKSLARAGAAGTTRTAA

SEQ ID NO: 22034 - protein, 377 aa, Variovorax sp.
VLRAMARDVNQVWNYCNDLGQQVLRREGRFMSGFDFQKYLNGASKEGLLVGSAVFQQVAEEFATRRRQFKKARLRWRVSDPKRANRSLGWIPFKARSLRYKGGQVAFQGHLLSLWDSYGLAGHELGAGSISEDARGRWYLNVTVKVQPKAKPSPEGLKGAIGADLGLKSHMTDSSGTSVDAQRFYRDLEPKIASAQRAGKKHRVRALHAKVANRRKDFLHKLSTAQACGHAAVFVGNVNAASLAKTRLAKSVLDAGWSSYRTMLKYKCDDAGAWFAEVDESFSTQDCNVCGTRAGPKGRAGLAVRQWTCPCCSTHHDRDVNAARNILARGLVWLEKTFSAADSSSTKSAAAVNKAPGPLGLGAAAGHGRPAVGIPVL

SEQ ID NO: 22035 - protein, 371 aa, Actinomadura sp.
MARQVKRAFKYRFYPTDEQAAELARTFGCVRLVYNKALEERTRAWYTEQRRVSYVQSSAALTEWKKTPELAFLGEVSSVPLQRNIVWSRPLPEGAVPSTVTVSRDRAGRWFCSILCADTIARLDPVDGAVGVDAGITSLVTLSTGEKVTNPRHERRDRERLAKAQRNLADKAEGSKNRDKARRKVARIHARIADRRRDFLHKLSTRLVRENQTVVIEDLSVRNLVANHSLARAISDAAWRDLRTMLEYKADWYGRELVVIDRWFPSSRTCSQCGTITAKLPLGVREWNCDGCGAQHDRDVNAARNVLAAGLAVSACGADVRPKRRKPGGQPARKQEPQRVTARIPRLSAGKRPSEERVRQQHTGSTHGRRP

SEQ ID NO: 22036 - protein, 169 aa, Paraliobacillus sp.
VLICYLFPIAVLDKHIKLPKLGLVRYAKSREVKGRILNVTVRQNPSGKYFVSILTKTQVKEIPKTGSAIGIDVGLKNFAIVSDGTIYFNPRFFRTLEEKLAKAQRIMSRRTKYGANWNKARIKVARIHEKIANARKDYLDKISTEIVKNHNLAKAISEVKKNMESYKIS

SEQ ID NO: 22037 - protein, 398 aa, Hydrococcus sp.
MFRVVKVRLYPTNEQQNRLAQWFGCARWFWNYSLDLTTKTYKETGKGLSRVQIQSMLPALKKEHEWLTEPYSQCLQFVALNLSQAFLNFFEKRASYPNFKSKRSKQSISFPQNVQIVDKGLKLPKLGVIEASLSKLYPGEVKTVTVSRNPSGKYYASVLFEIEGSEPDPSSEGKVIGLDLGLTHFCITSDGSKYDNPKHNYKHQKNLARKQKKLSRKNLGSKNRHKTVKLVATIHEKIFNTRRDFFHKLSSKIVNENQVIIVEDLAVKNMVRNHKLASAISDCSWRTFTTFLKYKCERNGKVFVKVDRFFPSSKTCSNCYYQVTEMPLDVRSWQCPNCGTHHDRDVNAATNIKDEGLRLLALGHSATASGGRVRPSKGFAFVRQQPVNEESPTTPLCG

SEQ ID NO: 22038 - protein, 377 aa, unknown
  TnpB Polypeptide
VNNVEKAYKYRIYPTKQQEILIQKTFGCCRFVYNQYLAKRIELYKQNKSTMNYNACSNDLKRLKQEFEWLKEVDSVSIQSSLRDLDIAYQNFFRRVKQGDKKAGFPRFKSKKDNKKSYKTKCTNRNIQVLANKIKLPKLGLVKCKVSKQIEGRILNVTVSQNPSGKYFVSVCCTDVEIPQYSSTSAVVGIDLGIKEFAITSDRQHIKNPKFLAKSQKKLAKLQKQLSRKTIGSKNSNKARIKVARQYEKIANQRNDFLQKLSTQLIKNYDVICLEDLQVKNMVKNHKLAKSISDVSWSKFVRQLQYKADWQHKVIQKINTYYASSQLCSVCGYKNTETKDLSVREWVCPQCGTHHDRDENAAINILNEGLRLLQLSA

SEQ ID NO: 22039 - protein, 488 aa, Bacillus sp.
LKIKKGVTRKELKPMARKSTPTYTIEFSLNIPVWQKHRLEKKFKIARTVYNSCLGEALKRHKYVKADKKYRTLLKEPKSKERNHSLSNLRLAYSFSEYGLHDFVKAIQHKFKENIGSFEAQKLATRAFEAVEKLHFGKARKVHFKKFDDDISVENKSNNTGLRYVNGNILWGDKPTKKLPNPKNWLCMPIASKANDEYAHLALMDKTKYVRILKKVVRGKDRYFVQLIQEGFPPTKRNRKAANDETKRVGIDIGSSTIAVCCETSVELRELAPECHVDQAKIRLIQRAMDRSKRATNTNNFKKDFTIKKGRLQWNYSNRYKKLRTIRKELYRKIAVQRKISHEKLANDILALGSDIRVETMRFQSLQKRTKKTTLNKKNGKINHKKRFGKSISNHAPAMLITIIDRKLGYQGRFVKKIDTYATKASQFNHITGEYTKKQLSERWNEFETFRIQRDLYSAFLIGNTTETLNLVDVDLCNAGWNNFVKIA

SEQ ID NO: 22040 - protein, 509 aa, Bacillus sp.
VKRLYSTYKIQIHSDHKLFDYCDSLCFKAKNLYNITNYYVRQVYTALKAEKKNENQLQVLMDIETHLPIMNEIRLKHYEKEMEKPKKVDKKGKELEPKLKLFNMPTKEQSFIGYSFVEALFKVMKQIDYISMPSQSNQQTMKKVFDDWKSFFEASKKYKINPGCFSGKPKIPKYKTKTGRTTCYLTNQITAIKEGNVLKLPGTSLQLKLGKIDLSEGKLQQVRIVPFYGRYVVEIVFKAEQQEKAIVRTAEQNNHFIFKPKKVMGIDLGVDNLATIVDNLGLKPLLIKGTWLKSINQYYNKLRANYMGIIRHGKSPKEGVFMTNRLVALDRKRNNRVMDFLHKASVKVVTIAVERDIDTIIIGKNSGWKLDVNMRKSAKQTFIQIPYTTFIDMIRYKAERKGIQVIIREESYTSKSCFITKDPIPTFGEEHQTTFSGQRVKRAFYKITGSKIQIHADVNGAFNIVRKHVGGAFEGLDKKQFLQSPKKIIILKSKKKAKRKKKAKLKASA

SEQ ID NO: 22041 - protein, 317 aa, Enterococcus sp.
MEVLKAYKFRLYPTQQQRRFFIETFGCVRFTYNTLLKYRQESHKPKNVRLTPARLKEDFPFLKKTDSLALANAQLNLERAFRNYYKGHAGYPKLKTKRCIWQSYTTNNQHHTIYFQDGKLKLPKLKTLVSLNKHREVPGQIKSATISAKNNRIFYVSILCKEKVVPLPLTKRSVRLNFSKTCLVEASDSELSFPDFSQAEIEGKLQKAERKLAVRGKAARNRHISLSQAKNYQKQKEKVRNLYTHYYERKKTYLNELSMQIIRTYDEIYVETNNKRVNATGPFTSSDWFHFIQKLKYKAVWYGKTVYLNEENRSKIG

SEQ ID NO: 22042 - protein, 409 aa, unknown
  TnpB Polypeptide
MRKYDRGVQLRYNYRLYPTRGQRSALARAFGCARVVFNDALRLREQAYAAGLPYLPDADLSARLTAAKVTPDRAWLAGVSSVVLQQALADLNAAYRNFFASVTGTRKGPKTGPPRFKSRKDRRQAIRFTANARFKILPGGKLRLPKIGDVPVRWSRDLPSAPSAVTVIRDPAGRYFASFVVRTGLAADATRFPATDAEAGIDLGLTWFAVLSDGTVIRSPKFLRRAERKLRRLGKSLARKQPGSSNRDKARVAVARAHARVADSRRDFHHKTSTRIIRDNQAVYAEDLCMAGLGRTRLAKSVHDAGWSAFTAMLEYKARRYGRYFGKIGRWAPSTSPCSACGVNGGPKPLNVRQWTCTACGAVHDRDRNAAINILALGRRERLNACGDSVRPPLAVAAVSETGTPRGAA

SEQ ID NO: 22043 - protein, 409 aa, unknown; identical to SEQ ID NO: 22042
  TnpB Polypeptide

SEQ ID NO: 22044 - protein, 448 aa, Streptomyces sp.
MSRFRMYPSRAQAERMLTHCAHARYVWNLAVEQHAHWRRWRKSAPGFAEQCRQLTEARRDNAWLGAGNADVQQQALKDFAKAKNARFTSGFGEPTWRRKHVHEGFRVIGTDRVPEHEVDGSPRLNAKTGRQVMGRSVVVQKLNRRWAQVKVPGCGWVRFRLSAKGKGAQLPDAKTFRVTFRNGRWYIAFAVVPEPIPAPGTGEVIGIDRGVTVTAALSDGRTLNCPQLTTRERAQIRKHQRRAARAPKDSKAKTAEYAKVAKLKAREANRRKDWCEKTSTMLARSYDLVRFEKLNIKNMTARAKAKPDPDQPGQYLKNGRAAKAGLNRGILAQGWSLLRQRTGHKAPGRVEDVPAPYTSLRCSACGWIDKNSRKSQAGFECSSCGFTCNADTNASINIAAGQGGIPRPRRTAGAGGTTPRKGPSVREPQPQWVGIPLFQEGEDVKRVA

SEQ ID NO: 22045 - protein, 316 aa, Streptomyces sp.
LTRQVKRAFKYRFHPTDEQAAELSRTFGRVRLVCNKALEQRTRAWYSEQRRVSYVQSSAALTEWKKTEELAFLTEVSSVPLQQALRHLQTAFGNFFAKRAKYPRFKSRKKSRASAEYTRSAFTWRDGQLTLAKTAQPLDIRWSRPLPAGAEPTTAAVGIDAGITSLVTLSTGEKVANPKHERRDRARLARARRELSRKAKGSANPEKARRRVGRVHARIADRRRDFLHQLSTRLVRKLCGACGTVAAKMPLNVREWTCECGAVHDRDVNAARNILAAGLAASACGDGARPQRESSRTGRSSVKQEPQRATAGIPRL

SEQ ID NO: 22046 - protein, 431 aa, Aphanothece sp.
MIITYQYKLRPNKVQVAKMQAWLELLRRHYNYCLGQRFDWWEHNRCDVNACPLTCSVTPLADRPNYYSQQNQLLETKALFPEYKNIHSQVLQNCVKRVDLAFSRFVNPDATGKRFGKPRFKGRGRYRSFTFTQIKADCIDGNKIKLPKIGEVKFIYHRQIPTGFACKTATISLKADGWYIALVLEDKSVPVFTPDESPNEENTIGIDLGLIDFLVDDSGNSEPIPQHYRKAEKKLAKLQKKLSSKKRGSKRRANAVQKVAKHHKKVGDKRKHFHHSVANKLVRKAKFIGCENLNIKGLAKSRLAKSVNDAGWASFISILKLKAANAGGLVIEVDPRGTSQHCSNCNAKVAKTLADRWHSCSCGLELSRDHNSAILIKKRAIAEGHPVIGSKPNAQSRETEKPPLYRLRYLVGSMSRIEKVFRVDEYDQQVG

SEQ ID NO: 22047 - protein, 422 aa, Herbidospora sp.
MREARDAEQRVVLRFFPMRDAKLFAMSRYRLQPTQAQAAALLEHCRHARFVWNLAVEQSSFWKPGRGHAPGFAEQCRQLTEARAEYAWLRAGSAIVQQQALKDFARAMAQFFARTHRMPTFRRRGQNEGFRIVAFKKEDVRRLSRNVGEVKIPKVGWVRFRWSRAVPAGAKSFRVSRDQLGRWFVAFAVAPMPIARPGNDEVVGVDRGVAVSAALSTGELLRAPTLRAVERARLLKLIRQLARARKGSKRRDDVRTAIGRLRARETARRKDWVEKVTTSLARRFDVIGVEDLRIGNMTRSARGTIEAPGRNVRRKAGLNRSILSACWGRLVMRLEDKAPGRVIKVNPAFTSQRCSVCGVVDGKARESQAAFRCRSCGHAGNADVNAAQNIEVIAAGHAVNARGGDRKTGPGNREPQLVLRPV

SEQ ID NO: 22048 - protein, 425 aa, Caballeronia sp.
MERRKVTFKLYPNATQAERLTGWIRLHCELYNAALEERIDAYGKTGKSISYYEQQNVLPAIKADRAEFVELGSHALQQTLRRLDLAFQAFFRRVKAGQTPGFPRFKASKRFSGFCYPDPAGWKLMQCGARGATIRIGSGKDAMSIRARGRHRLGDGAMPNDLTIMRKNGEWFASVTLRVSADACARVRTGEDHRGVDFGINDWATFDNGETIANPRFVRNELAWMADLQRQQAKKKRGSVRYKRLGKQVAKLHERIGNLRREFLHKKTTILVQSCAVIATEELRTQNMSRSAKGTQDKPGRMVKQKAGLNREILSAGLSMAHNMLAYKAVEAGTRLHVSNTRQLKPSQRCAACWEIVPKTLAQRVHECPHCGHTAPRDQNAASVVLIDAHTPGTGVAARPKPLARQRAKSKSVTRETPATAWQDA

SEQ ID NO: 22049 - protein, 338 aa, Moorea sp.
MYKRIPIKAVFSDEERAFWEFQCQQANSLFNCAVYYAKQKHYKWLEEQEAYTTYWHGDELKAGFKTYKCGVRYPDIDKALKMSPHYKAMAAQSAQQTLKTVGEAIKSYNQLVGLYYKGEADRPRFPRYRKSGGFAAVTFPRQALTYKRGLFYPSISKESKPELLTQIALTPPEFIDPDWVREVTIRPCYGQLWINWVIDDEKQPMGTNSDLDYSQALGVDHGGNNWLTCVSTFGKSFIIDGKKLKAMNQGYARLVAKHKAGKSEKYWDSTLDQIQLKRNNQMRDAVNKAARFIVNRCLNDGIGNLVIGGNEGHKTRSNMGKKENQKFVVIPTKRLIER

SEQ ID NO: 22050 - protein, 312 aa, Okeania sp.
MGTAYQYKLRPNSYQIATIETWLELLCRQYNYRLSERFSWWEENRCPVNACPLVMPIPQLLDDPNYYSQKKDLVNTKDKFPSYKLIHSQVLQDCIKRVKLAFDRWFKADKNGTRLGKPRFNGIGRYRSFTYPQIKQNCIEGNQINLPKIGNIKLIQHRPLPDGFQIKTVTISRKADGYYITLSLENKSVPALTTKVEPTLKNTLGIDMGLKEFLVTSEGESIPIPQYYRKYQQRLKTLQKRLSRKKKGSKRWLKAVKTVAKQHKKVADKRKDFHFKTANELLSKAEVIAHVDAERRAGGKLKYQRASKDPFE

SEQ ID NO: 22051 - protein, 380 aa, unknown
  TnpB Polypeptide
MERIYISMLKAYKFRLYPTKSQRSKMERTLDLCRWVYNQTLAYRKDAWEKEGRSTSKYETNNLLPNWKVEKPDLNEVFSQVLQNTQERVDLALKGFFRRVKAGEKPGYPRFRGSGWYDSFTYPQFGFKQLSGKLRLSKIGDIKIKLHRLIEGEIKRLTVRRSSTGKWFACFSVEIDDPPKPPWKDGLSVGIDMGLESFATISNGEKIGNPRFFRSDEKALAKAQRRLSKCAKGTSQRRAAVKVVQRVHERIANRRYNFAHQISNQLVSKYGLIAFEDLNIKNMLKNHCVAKSISDAAWRMLVTTTSYKAESAGSKVVLVDPRNTSQLCSRCGVKVPKSLSDRVHKCPQCGLVMDRDENAAINILRLGMQSLRKSDRSPSL

SEQ ID NO: 22052 - protein, 542 aa, Streptomyces sp.
MSGLREVAAPFVVPGPAGVAIRARLKGLTPEDEEVLRLVGAHLGSLASRDLKVRCADGLEHSAETWAVRKRELTPLSSSRWAGAITKATHDQWALARRGQAAHIQSLEAGIRTIRHRLSLPLGEKGSKRAPGGYRSQGEWFHKSRRLHVLQDRLTAVRADREAGVVRVVRGGRRLLATRHHLEEARLTEAGWRERWEAGRWFLQADGESGKRYGNETIRVAPDGEVSIKLPKPLAAHANSGHGRYVLAARVSFPHRATEWADRVEANRAVAYRIHHDTVRGRWYLTAAWTFPVTRTVPLAAALAEGVIGVDTNADHLAAWRLDPHGNPIGSPRRFFYDLSGTADHRDAQVRHALTRLLNWARSCGVKAIAVEDLDFTAEKTREKHGRRKRFKQLISGMPTGKLRARLTSMADATGIAIIAVDPAYTSMWGAQYWKKPLTTKNRQTTRHDAASIAIGRRAQGHPIRRRTAPPRDDRSDRRGHRTVQARPDTLGREGPRPRVPGPRTRCEPPDAERTRATRTPNTVRDVRSDQVWVQDPLLLAE

SEQ ID NO: 22053 - protein, 431 aa, unknown
  TnpB Polypeptide
VAMAKSKKLMGVQQCLITPDKDLKAILEYICSESNKLNNCVVYYARQVWFKTRKFVTGFDLVNELGSNKHFSALPSEAAVQTCLSVGESVKSFSELLKKSGKGELDHKPKFPKYRKHGYQLVAFPKRALRLVDNMIRFPLGLQVKAWFGLKEFFLPMLSNLDFALLKEVRILPRNGDFYAEFVYPKTNIESELDPNKCLGIDHGLNNWLTCVSNIGTSFIVDGKHLKSLNQWYNKRTSVLMDSKPNGYWTKRLANITEKRNRQMRDAVNKAAKIVVNHCLANRIGTIVFGWNKGQKDGANMGAKTNQKFVQIPTARLKERIKQLCEIYGLQFAETEETYTSKASFLDSDIIPVYGEKPELWKESGKRVKRGLYRSAKNTLINADCNGAANILRKNVAVTLGFDLSGISRGALTTPLKFKLWTIQESQSLQR

SEQ ID NO: 22054 - protein, 345 aa, Halanaerobium sp.
MTGKKIIREKGYKFRLYPNKKQKILINKSVGCTRYVYNHFLSKAKEDKYKTYTEYSKQLTQLKRELMWLKEPDKFALQNALKDLDKAFNNFFSGKYDFPQFKSKKNIKNSYRTNKFVRKSGTTNIEIKDNKIKLPKLGWVKFSKSQKVKGKILNVTVTKTNTDKYFISIAVKEEIKKFPEVDKKIGIDLGLKEFAITSDGEKKANPRVLNKYEKKIARLNRSLARKEKGFSTKLIEENQLIAVETLEVKNMLKNSNLAKSISDVSWSKFIELLTYKAKWYGRDLIKIDTFFASSQLCNNCGYKNKEVKDLKIRNWKCPECGKVHDRDINASKNILDEGLKIQKAS

SEQ ID NO: 22055 - protein, 690 aa, unknown
  TnpB Polypeptide
MKNAPTQPSYFFSEDMLSGSYGVVQNFSKKDIQKQCDLNPTKQTIVTLQFKIKSLKPSLIAKLRQGAMEVNTSWNYCNEISHKAIADRHIWLTHFDLNTLMTGNMRFSDDNPFGFKVINNAVTQCVAAEYVTRREQFNKSLLRWRKSTGSLSSGRSTSWIPFKEEHINITYPYSFIQTTTTQKIKTHKKTGEQIVSTVVKETTQHKTVRVAGKNTPVENLYALYSMHNDSGSEYGLPRCLGTPTIKVLGTHLKVFNEEYLGYYLYHLGAIVKSGSITENTIGEWFVNLAVAIDADIYREKHCFGKLNINPVAQREKLGLDPGAKTMVVASDGTEYYANGKRCVVSAYADANTSSTPTTLSDNPPLSPYLALEEQIKQAQRNNDWDQVRRLYLKGKNQLKDATSKAALDIIRKTQWINMGNLKITAVVKNRTVTLSEKDLKKRKSQAKRQSGIEKQTKKEELAKQQQHQELFKNKYNSVHNSSNSSNSSNCVSLQGQTSTTNINKNTNKKNSTKNNNSQTTVANQPEHRLTKKRKGLGKSLLGQGIGQLKSRLGVYSQRTGRGYKEENEAFTSQECCNCGRRTGPRGLRQLGVRKWVCGSQHQIGLFDPMKVKIVHEGCGTTHLRDHCAARNLERRENPIVKAHGLTQHPPRNGQAFEKSEKNNSSKTHQRNSQNTTELSGSSRAGKNRKR

SEQ ID NO: 22056 - protein, 227 aa, Halorubrum sp.
LDAEDCVGIDLGITNYIYTSNGDSVDWLDLSDEYERLRREQRSLSRKEHGSNNWEKQRQEVAKVKRRIKRKVEDFQHKLTTWLVKMYDAVFVEDLNVVGMLQQRGNARNKQDAAWRGFIEMLEYKGDLYGTHVVQVNPAGTTKECAECGVETEKPLWVREHSCPSCGFEVDRDANASYNVLSRGLQELGLGQAEVTPVETATAVETDGGRSSSVPASHVIETGSLGA

SEQ ID NO: 22057 - protein, 424 aa, unknown
  TnpB Polypeptide
MSIKAYKYRVYANKSTTEKLHWVLDRCRELYNAGLQERRDAYEMGVKHHPNYYDDELCRHLTREHAVGYYEQKRELVDIKELRPEYQEIASHVLQDVILRLKRTYDRFFERVQNGEKPGYPRFQGRNRYDSFTYPDGAGWKLETKERPADKKGMVRVNLGLTKIGTVKVHLHRDMTGKIKTLTIKREGEHWYAIFTCEIGKPEPLPVSDVDVGIDLGVIHLAALSNGGFIDHPRHFRRAEKKLAKAQQALSRKKRGSHRRVKAVKQVAKAYRKIRNQRKDFHHKESRKLVNRYQIMVFEDLQTANLTKRPKAKQDKETGKYLPNGASAKAGLNKSILDAGWSMLTEMVSVKAAWAGRTVIFVNPFMTSQRCSGCGAVVKKDLSERWHSCSCGTELDRDTNSAKLILNLGYQHLSVGTRPTSATA

SEQ ID NO: 22058 - protein, 389 aa, unknown
  TnpB Polypeptide
MIVLEFKLKGKESQYRIIDEMIRTAQFVRNSTLRYWMDHQGVKLADLYKQCAILAKEYEWALLLNSQARQASAERTIFSIQRFFANCKANKPGKKGYPKFKTNTRSVEYKTTGWKLAENKRKISFNDGFKAGIFKLIGNRDLHYYSPDQIKRIRVVRRADGYYCQFCIAVDRSEKIVPTQKTVGIDLGLNHFITDSTGATVANPRNLKKSEKALKRAHRKVSRKKKGSSNRRKAINRLGRKHLKVSRQRKDFAIKTARCVIQSNDLVVYENLPVRNLVKNHKLAKSINDAAWTQFTQWLEYLGRVYGKIVIPVSPKYTSQECSSCGTIVKKTLSMRSHICHQCGIVLERDYNAALNILAKGLETYRRASGNDQAWGEMHLCLNDVSPER

SEQ ID NO: 22059 - protein, 469 aa, Streptomyces sp.
VSQATLIKRQFGHRARLALSPDRVRAVDDQAHAARALWNLLHAWWLMMPKDKRTLANADAAIRQARKDIGFLAVLPAQAAQAVLKTYFQAWKNCWEGRAEAPNFKGRFRTVMSVDIPQGRDLNITRVHRRWGMVSIPKVGRVRFRWTKDLPVGKHANTENRITGARLIKDALGWHIAFRVQTLQGKPEPHQGPDIGIDVGITVPIALSDGETYEHGEWLTGKEKAKLLHLEQRAAQRKRHRRPGERTSRRLHRTYDQIAGLRAKAKRRALDWQHQTTTTIARTYGTVVVEALAITNMVKSAKGTMEEPGKNVAQKAGLNRSISQEAWGRTVTMLAYKTAQLGGTLVKVPAPGTSRRCSACGFTMPGSRESQAAFVCKNPDCGWSGNADHNAARNVLHLYRMGLALIPAAGRAVVRRAKRVKPAAARQAGISRPQPGEHFKATGSSTPPVCRSSATTGARCSTPRSAWAS

SEQ ID NO: 22060 - protein, 379 aa, Nocardiopsis sp.
MKVVVRVKLLPSPEQAEALQATLHACSQAANAASQVAFATGATHKYALQQRVYAALKAEFGLSAQPAVRVIGKVADAYTTQNSHLTRGLLGRRGSKRRARAEASPIRFRPDSAQPFDARCLSWQMDAHTVSIWTTRGRMKNLAFTGSPEQLKTLAEHQRGETDLLYQDGMWFLSAICEVPEKPLNTDSAGFVGVDLGIVEIATTSTGQRHAGRTLNRYRRRQNRLRAKLQKKNTKSAKRVLKRLRRRETRRARDVNHTISKSIVERAERTGHGIALEDLKGIRGRVRQAKKNRYALHSWSFAQLRDFITYKARRAGVPVVVVDPAYTSQSCSECDHTSRRNRPTRAVFACTSCGVVLHADTNASRNLARRGEAAWNAGR

SEQ ID NO: 22061 - protein, 551 aa, Nocardiopsis sp.
VESVAKRGTTRLRPIEPSSVVPGPSGVAVRDRLQHLTPADEQVLRSVGAHLGSLASGDLATRCRQGRDHDAGTWAVRKRELTARSSSRWAGSITKASHDQWALARRSQAAHLHKLQAGIRMLEHRLSLPLGEKGTKRAPGGYRSRREWHAKSRRLTVLEDRLAKVRQDWEAGIVHVVRGSKRLLNTRHHLEQAQLTEAEWRDRWEAERFFLQADGESGKRYGNDTIRLTPAGRVSIRLPAPLEYLANAPHGRYVLSCRVAFAHRGAEWADRVEANRAVAYRIHLDVERGRWYITASWTRPKTRTLPLAAARAKGVVGVDMNADHLAAYRLDPHGNPVGDPERFSFDLTGRAAHRDAQVRHALTRLLHWTKRTGVQAIAIEDLDFATGKTREKHGRRKRFRQLISAMPTSKLRARIVSMAAEFGLAVVAVDPAYTSKWGAQHWAKPLNSNNRNMTRHDAAAVAIGRRALGHPIRRRTVPPRHHRSDGGGPRTVQTEPGSLGCEGPRRPATERAHDARVRAGEERTRGTSASSTVRDARSDSRWVLDPLLNTE

SEQ ID NO: 22062 - protein, 488 aa, Nocardiopsis sp.
MAAAEKKPKKKRGFEPRPGRVVQAYTFALDPNAGTEARLRSHCGAARVAFNWNLACIKANLVQRDAERSYGIAEQELTPALDWSAYSLRKAWNAAKEEVAPWWGECSKEAFATGCANLATALANWKASKSGVRKGPRVGFPRFKSKRRTVLSCRFTTGTLRVEDDRRHLTLPRLGTIRTHENTRKLHRRLANGSARILSATVSYRRGRWRVAFQVEVKRETDAQARPEAVAGVDLGIKTLAVVADDSGRTRQVPNPHHLKKELGRLRRASRKVSRRRGPDRRTGQVPSNRWCRADAERKRVHHRVANLREGALHKLTTSLAREYGTIVVEDLNVAGMVKNRRLARSIADASFGQIRRQLDYKTVWNGGRLVVADRWFASSKTCSACGALKAKMPLHVRVFDCDECDLVLDRDVNAARNLAALAAACRTGTGVAGDRDTPVSKPRGADRKTRTTRRGRKATAGRAGGTRPAPRGKEARDRRRDTQLTLW

SEQ ID NO: 22063 - protein, 525 aa, Nocardiopsis sp.
VAVRDRLTHLTPADEQVLRVVGAHLGSLASGDLATRCRQGRDHDADTWAARKRQVSREATSRWAGSITKASHDQWALARRSQLAHLHKLEAGIRMLEHRLSLALGAKGTRHTSGGYRSRREWHAKARRLATLEGRLAEERADFQAGRVHVVRGGKRLLNTRHHLDQAQLTEAEWRDRWEAGRFFLQADGESGKRYGNETIRLTPEGRVSIRLPVPLEHLANAPHGRYVLSCRVVFAHRGAEWADRVEADRAVAYRIHHDAERARWYITASWTRPKTRTLPLAAARARGMVGVDMNADHLAAYRLDTHGNPAGNPERFSFDLTGSAAHRDAQVRHALTRLLHWTKRTGVQAIAIEDLDFTTGKTREKHGRRKCFRQLISGMPTGRLRARLVSMAAERAIAVVAVDPAYTSKWGAQHWAEPLNSNNRNMTRHDAAAVAIGRRALGHPVRRRTAPPRHHRSDGGGPRTVQTEPGALGREGPRRPATERAHDARHRAGEERTRGTSASTTVRDTRRDSRWAQHPLLHTG

SEQ ID NO: 22064 - protein, 273 aa, unknown
  TnpB Polypeptide
VKTTEMGGPRGYDSGKRIKGRKRHLVVDTLGLLLAVVVQGEIHPAVVGDKEQAIVITCRERRSRSQGNAKRLAKIAKAIARKAKGSRRHRRLVRAKARMKAKHARIMRDIEHKVSHEIVEFAAERQAGTIVIGDVRDIADCVDKGKVHNGRMSRWNHGKIRFSIGYKAEAEGITVAPLVDEYSISKTCPHCGQRHNSRGRNFSCPTFGIRTHRDVVGQTNILSRFLEGDVGRLPVPTDVKYRIPRNVRVLRSRCEHRPGSNPRSPGAIPRNSD

SEQ ID NO: 22065 - protein, 366 aa, Firmicutes sp.
MYKALKFRIYPTKKQEKQIINNFEASRFIYNYYLEKAKTEKTNNFLNDYKKNTPNNNLKKQNQTVIMKTIFHLEDNIKKYGTTLRYKNKYERNAYTINNNSLNKIELDLKERIVNLNDIKKLKIRGYKNLKRVEGKITNACISREPNNKYYISILYELPNPTKIEPQTLLGIDLGIKKLITLSDTQTIENNKYIEKYEKRIQQKQKELSKKQKGSNNYYKCLRKLDNLYTRLRNARKYNIHKITKQITNEYDIITTENLDNKQMIMEKKLSKSLTDASLTEIINTLEYKANEKGKYLFKVGRYYPSSQKCYICGNINHKYKDLKERIYKCNKCNNEIDRDLNASINIMTEGYKMYIKSKYKIIKEI

SEQ ID NO: 22066 - protein, 316 aa, Lachnoclostridium sp.
MPDTVSWRILEQYVYMVFVSFHAHYIPVMLRRRIVDEPLYVRIEPAMKKRFSVLRDKDQMHEQLSLVMPTVMVAVFVKKHHEIPAQHVSATKEVPDFERGNVTHVVGIDRGLRFLEAVYDSDTKTSFVSGKTILAKRRKFDSVRTQLQSKGTKSAKRRLQEISRRENRWMSDVNHQMSKALVRKYGPGTLFTLEDLEDVSTDERNFKSKQQTHDLRSWAFYDLETKLSYKAAESGSGIVKVDAYHTSQRCPRCGRVQKENRIHARHEYVCDQWGFRTNDDCIGAMNIWLLGTLWVSGDDSPTFRKRQAADKTDVTE

SEQ ID NO: 22067 - protein, 424 aa, unknown
  TnpB Polypeptide
MFRAFKYRIYPTKEQTILIHKHIGCSRYVYNLALETKTYAYKEFNHSYSANKLITQLPDLKRELAWLKEVNSQTLQASIRNLDDAFIGFFKHGKGFPKFKSRNNDVKSFHIPQNIEIKDNRVFVPKFLKRGIKIVLHRNYEGKIKNATISEHCGKYFISLTCEVDDVLEPKPIKNRTDITGIDVGLKDFIVTSNGIKISAPKYYRKEESKLKYIQRKYSKYKGKRTKKKLALQHQKVANLRKDFLHKVSHQLVSENHALAIENLNVKGMMKNRKLSKSIGDAGWGMFRQMLTYKSEFSSKHLLVIGRFEPSSKTCNCCGHKNSELELKDRHWICSGCGSNNDRDKNASLNIRDFAWRDYSGEELGYKNNNVSGTDTKKAEGVACKRPYTKRKVGSRSVDSRSVNASYVSPSLEGNIKPSNLLDA

SEQ ID NO: 22068 - protein, 404 aa, unknown
  TnpB Polypeptide
MLVLEFKAYGKTNQFVAVDEAIRTAKFIRNSCIRLWMDNKGTGKNDLQKYCAVLAKEFPFADELNSMARQASAERAWSSISRFYDNCKKGVLGKKGFPQFQKDCRSVEYKTSGWKLDDARKCIIFTDKKGIGRLKLKGTRDLHFYQTTQIKRVRLVKRADGIYVQFCVDATRNENLEPTGSAIGLDVGLNDFYTDSNGETVSNPRFLRKGEKKLKRSQRRVFRKVKASKNRGKARQILGKRHLKISRQRKDHAVKLARCVIQSNDLIAYEDLRIKNMVKNHCLAKSINDASWYQFRVWLEYFGKVFQRVTIAVNPQYTSLECSDCGQVVKKTLSTRTHSCKCGCILGRDENAARNILSRSLGTVGHTGTFALDASNALGDESSTPTGASLFEQDLSMIKESQCL

SEQ ID NO: 22069 - protein, 378 aa, unknown
  TnpB Polypeptide
MGNRAIKYRLYPTTEQAVLFAKTFGCCRKVYNLMLAEKIESYKETGKFAKVTPAKYKTEYPFLKEVDSLALANTQLALQGAFRNCFDKTRKTRNGFPKFKSAKHSRKAYTTNNQHGTVTIIGNTIRLPKIGRVRAVIHRQPKADWILKSATISQDKDGKYYAAVLFEYDDISSSYTADITNAIGLDYASDGLYVDDKGNIGSNHKYYRESQKKLAKEQRKLSRMVGSKKGEVKSANYQKQQAKINKIYRHIANQRFDNLHKRSTEIANQYDVVCVEDLNMRAMANKGFRNGKSTLDNGYGMFLNMLAYKLAERNKHLVKVNKYFPSSQRCHQCGKLHSEMKNLAVRKMTCDCGLVMSRDQNAAINIKKEGLRILKFGA

SEQ ID NO: 22070 - protein, 642 aa, unknown
  TnpB Polypeptide
VLRLAVDTTDPVQRTRIEAMFSAGHSIRRAVQRDARDRCFAYRAARHERERGPADVRARLGLSRTALEHAAYDHLDAAPHVRRFVTKALAMHLADTVWSATERHLFRDASGKTHGIPGASRWHEFTRLPGRARSHTSPRKWETFRLHGTLAGHRAAYPGSGEVFFQPRSIRSVAEPADSWWTHDGPLVVVFSGLPAGNLVLPVRLPAAASNQPILDHHLADPSRWHKLDLVRRRDPNASGGWRYEAHLMVLASPYVAPSVAASRVVTAEQTRGRHAGIDVNVSNLTVASFHDAGDLAITRIERDARTGQRSHRRARKERQRQRSLERSRRAMNAQHYQLSKRQEKRARRREAVGLAAKQVIPAGPRIARSDGKPLQAYRNDQLSNSYRRDRAAQVATAASVTQARRDHARQVASSIVGEHGFQLTVEDCDLRRWSNLWGRSVAAFSPGTLVSAIEREAQAVARIAGMPGGLSRASTWTTAMSQHCLCGGRVAKSLVDRVHDCPACGLRGDRDAVSASLAACVVFGNPAVPASATVDLATSRALLDAVATRAVLEDTLTISMQGRQDVPSESNAHSAHDGPSGVETGRTPAYVRWLGETLARCRVQPQMRRAFKARPRWNEREREPTWPESGVATWTPLRDSS

SEQ ID NO: 22071 - protein, 497 aa, Bacillus sp.
MYRTYKIQIHPQHELFNYCDLLCFKAKNLYNITNYYIRQVYTALRKEIKNENQLQVLIDIETYLPQMNGIRMKSYERAKAKPKKIDKKGKIIEPKLKLFEMPTQERSFISYAFVEALFKVMKQIDYTTMSSQSNQQTMKKVYDDWKSFFEASKKYKINPASFSGKPKIPKYKPKNGRTICYLTNQITEIKDRILKLPGTPLQLNLGKIAHFEGKLQQVRVVPSYGRYVIEIVFKGEQEKEIKRTDKRKNEFVFPPKWVMGIDLGVDNLATIVDNTGHKPLLIKGTGLKSTNQYYNKLRAKYMCILRNGKNPREGRFTTNRLISLDRKRNNRVMDYLHKSSAKVVEIALERNIDTIIIGRNIGWKLEVEMKKANKQTFIQIPHATFIEMIRYKAERKGIQVIDREESYTSKSSFLDRDPIPTFGDDKLPNFSGYRSSRAFYKIKGSKVLIHADVNGAFNIVRKYVKDAFEGLERKRFLQAPEKIIIMEKKHAKLKASA

SEQ ID NO: 22072 - protein, 415 aa, Ktedonobacter sp.
MDRTVIIQLKPTPEQATILQRTLAEHTACFNAVAKIGFETGVGNGVELHKRTYYDLRRRYPDLPAQLVIAARVKATEAVVSALTWAKKHEASYHKKVEKWQKQGKDILPFKPVKAPQAHSCPIRYDARSYWVNWNHMTASLATIAGRLEIAMSASRHAQQYIGHRVCSADLCYHQRRFWLHVVVSIPVPIVEPDPTVIGVDLGETRPAVTSSRHFLGQRRWKAQERRIFRLRRKLQSKGTKSAKRHLRKLSGKLFRQRRDHDHLLSKRLVQHTPAGGTIVLENLREIRSRGERRGKAARRRFHTWSFAQLAGFIAYKAEQRGIAVFRIDPRTTSQRCSRCGHVARNNRRSQSLFLCRKCSYCLNADLNAAKNIREKYLTSLASVGTPSLVGSQSSCLSSPPSGEGQASSLSLEVT

SEQ ID NO: 22073 - protein, 282 aa, Bacillus sp.
MLVKKAYKFRLYPNERQKELIDKTIGCARFVFNFSLAEQRKKEKLWLQVKELVQAGISLFEEYKTGLFSKYQAIPNIPKLKKNYSWLKEVDSTALQSSIEDLHEGYTRFYKKQGGKPRFKSKKNPVQSFTSKRVSNNIEVIENRSRLPKLGSVKFANSREVVGDIKRVTVRKAPSGRYYISVLTDTEVVQLPKTGNTVGIDVGLVRFATLSNGKEYVLPTSPKLEQKLIQLQKVLSRRKVGSSNWEKQRKKVARVYEKIKNMRTDYLQKFSTMIIKNHDNKG

SEQ ID NO: 22074 - protein, 362 aa, unknown
  TnpB Polypeptide
MFVTYKYRLYPNKKQQEYFAKCFGCVRFIYNRMLSDKIDYYKKTKKKLNNTPAQYKKEFEWLKEVDSLALSNAQMNLQTAYNNFFKRPEMGFPKFKSKKNHHYSYTTNNQSGNIYVSDRHIKLPKIGLVRVKKHRNFEGLIKKVTVSKTPSGKYYVAILVNQEEKEKLPKIDKQIGIDLGIKEFAITSDGEMIKNPKYLHKSKKRLKKLQKDLSRCKKGSKNREKCRIKLAKQHEKIANQRKDFLNKLSHKLIMENQQICLETLKIKNMMKNHKLAKSIADVSWGEFVRQLEYKSDWYGREIIKIDTWYPSTQICSNCGHKDGKKALSIREWICPVCGAHHERDINAAINILNEGLRIYNEN

SEQ ID NO: 22075 - protein, 402 aa, unknown
  TnpB Polypeptide
MEIKKTYKYRLYPSKDIAKRMEKNLEVCRRTYNDLLSINQETYLAEGKGLSKFDMNKCINHGVNAEIKSVHSQVLQNVSNRVDKAFKNFFRRLKERKSGKDISVGYPRFKKRYKSFTYPQNGYKLDGNKLTLSKVGIVNVRIGRTQNRIVGQIKTLTIKREPTGKWFACFSCVEEINPTKNKNKEKIGVDVGLKEFATLSNGETIENHRFFVKSEKRLKKAQRILSRRKKGSNRREKARYRVALIHEKISNQRHDFHHQLTRKLVDNYGTIVIEDLKITNMVRHPYLAKHINDASWGQFARFLCYKAESAGCRVEKVDPRGTSQDCSHCGNKVPKTLAQRWHRCTYCGVVMDRDLNASKNILNKDTVGTTEIYARGDGSSPLGYGLEDSPSRKREARLLVVG

SEQ ID NO: 22076 - protein, 515 aa, unknown
  TnpB Polypeptide
LRDYAKRFISSRSDASAPSPKSAAGNAVEGVDQLRQSDHGREVHRPVEVAALAVELHRRNLEVRAQVSDDLFKPHEVPVRKDRSRYFVAGTRCASGMRTRSASEYVVAVRRASHTDGVQLRYNYRAYLTPAERSAAGRALGCARVVWNDALAHRRAAHEAGERYPTNAEMSALLTASKGTPERAWLNEVSSVVLQQSLADLNKAYRGFFNSLSGRQKGPKAGAPRFKSRKASRQSLRFTANSRFKILPNGRLRLPKIGDVEVRWSRDLPAAPTSVTLTRDAAGRYFVSFVVEVTPRPLPETDAECGIDLGLSHFAVMDDGTKVTAPKFLRRAERKLKKAQRDLSRKQKGSKNREKARVKVARAHTRVADARRDFHHKLSTRIIRENQAVMVEDLAVRGLARTRLAKSVHDAGWTAFTGMLEYKATLYGRQLRRTGRFAPTSQVCSACGVKDGPKPLSVREWQCAACGAVHDRDVNAARNIAALGRREALNARGGRVRPQETAAVAGEAGSRRGAE

SEQ ID NO: 22077 - protein, 404 aa, unknown
  TnpB Polypeptide
MKVIRTEKHIIYSNDKYYDLIKHYCKISKDLYNQANYIIRQEFCNNHKWIRYDNNLIKLLRENEEFNNIDKLPCVQCSQQILRLLDKNWKSFFKLIKDWKKNPSKYLGRPKLPKYKNKNGFNILIFTNQNCKLKDEFIVFPKKMKGFKLKTKVDNIQQVRVIPKSNHLIIEVVYYKEIQEFKELESKRIIGIDLGLNNFATIANNCNLQTFIINGKSLKSMNKYWNKLNSNYQEIAKRMNNKNSTNKLHKLVLKRNNKMNDFMHKSSKYIVNYCLKNNIDTIVIGRNNNWKQKINIGRINNQSFTQISHQSFINKLQYKCIENGINFILTEESYTSKTSFLDKELPQKHEKYIGNRIKRGLFSNGKNLINADLNGAFQIIRKVFDEVEIPVNRGFVFNPIKVNV

SEQ ID NO: 22078 - protein, 405 aa, unknown
  TnpB Polypeptide
MLKVVKVRIYPDSSQKLALAKAFGSCRWVWNKFLSLMNETYKETGKGLSGYDVKKLLPELKKQEETAWLKETYSQCLQQVCLNLGVAFNNFFERRAKYPNFKSKHGKQSLQYPSNVSIKDDYLNVPKIGLIYAKIHRPIEGKIKTVTITKNYCNQYYASILVDDGKDKPESSTEGKAIGIDLGLTHFAITSEGSKFDNPKILNKHEKNLKRKQQQLSRKQKGSNNRNKARLKVAKVHKKITNCREDFLHKLSRRIVNENQVIVVENLNVQGMMQNHCLAKAIQQVGWGQFCTMLKYKAEQEGKVYLEVDRFFPSSKTCHVCLNRVDSLALDIRYWECPKCGAKHDRDINAAINIRDEGLRILKTSGTGDKACRQTVSRGKGGRKKSTTTLVSGQEANTVPSGQCG

SEQ ID NO: 22079 - protein, 405 aa, unknown; identical to SEQ ID NO: 22078
  TnpB Polypeptide

SEQ ID NO: 22080 - protein, 406 aa, unknown
  TnpB Polypeptide
MIRARKYRLYPTVAQEAQLLAWMEACRRLWNYSLLDREQAWDACKRELDENADGDASAIKKKWSISYIDQCAQLTKSRAQYPELRDVPVKFARGILKNLDLAFQAFFRRCNNGETLGYPKPKRDAPNLISRDAGEVGRWRNGKVSVPNIGLVNARPKAPSNLDVKTLSIQYVAGKWYAALAGDNGILALPTVAADCCIGIDVGCSSLITTSDGEEVKPLHYYRKAQEKRTKLARQLAKKKKGSANRKKAKLKLARAEHDVANARETFLHTLSRQLVEQYDLIAVEDRIAGALLQKKNGGGQQEKGLHKSIADAGWAQLVEMLEYKCEEVGAQLVRVPARGTTQMCSQCGAIVPKRLWDRVHDCPECGLRIGRDLNAACNILKRGLQQIGRCSPDFMPVEGRESCQV

SEQ ID NO: 22081 - protein, 416 aa, unknown
  TnpB Polypeptide
MPVLTYVFRLMPTRAQHAALAEILENQRLLYNAALQERRDAWRRGVSIGMNDQTKSLTDIRSFDDAYGGVPYNVSKWTLKRLDDAMKAFFRRAKARRGKAGFPRFRSRSRWLSFGFHQRDGLRVREDRLLFSGGLVGGLRMKMHRSLPENGVVKSAVFNRELGIWRVAIAIEVEVMAQAGEDTFDAIDVGVEFLATTANGVHFENVRPRSRGAQALRRAARALARARRGSARRRKTRERLQRIQRQVKNARRTHLHAVSRQLAGIATTIFVEDLSLKNMTRSARGTAEKPGTNVRQKSGLNRALADAAPARLISMLTYKAESAGREVIKVDPRGTSQTCPACGSPAPKALSDRWHSCACGAELHRDHAAALNILKRGLEMISSAAPGAARRPGELNVAGCGVRAPGNTDQLAACAA

SEQ ID NO: 22082 - protein, 424 aa, unknown
  TnpB Polypeptide
MLRAYKYRIYPTAQQTELINKHFGCCRLVYNLALQVKNEAYKTQNKYLSAIDLCYQLPELKKEFEWLKEIDSQALQASIKKLDIAFKNYFRQLKDGTIEAKKKAYIKEQKIKGLPIDSGKLASIGFPKFKSKYDKQSFQCPNNTRRINWNEDTLGLPKIKGIPIVLSRTFKGKIKTVTISRTPTNKYYASVLVETGESIPAKKMVTEQTAVGIDLGLHHFIVTSDGVKIDNPKYLRKKILHLKYLQRQASHKVKGSNNRRKANLKVAIQHERITNSRKDFLHKLSHEITNQYDTLCFEDLNIAGMTKNHKLAQAITDAGWGMYVDFCKYKAEWKGKNILQIPTFEPSTKLCNVCGAVNHTLTLADREWVCANCTTLHDRDENAAKVIKNYCLKNCGGVHRKKPVEMLALAKSTKQEVIRVGNYL

SEQ ID NO: 22083 - protein, 392 aa, unknown
  TnpB Polypeptide
VRRAYKFRIYPATGQVSRAAQCLRDHQRLCNAALEERREAWRMRTVSIRYGQQSAQLKDVRGLDPDQGRWSFSSQQATLRRLDKAMAAFYRRCKAGERRAGYPRFKALDRWDSVEWPSDGDGCRWKPDMGRVYLQGIGHVKVHAHRAVQGRVKTIGLKREGRRWYVVLSCDDVPAEPLPATGREVGLDVGVARFATTSDGEIITNPRFTRESADELASAQQALARKKRGSSSRRRAKAKIGEVHRKIRNRRADFHHKTARALVNECDVIALENLNTAGMTRRPAPKPDPDQPGEFLPDNAAAKGGLNRSILDAGWAQFAGILAAKAEEAERRVVFVNPAYTSIDCHQCGRRCTRPQQDTVVCPVHGSMDADCNGALNIYARAGLGSGQAHAA

SEQ ID NO: 22084 - protein, 392 aa, unknown; identical to SEQ ID NO: 22083
  TnpB Polypeptide

SEQ ID NO: 22085 - protein, 386 aa, unknown
  TnpB Polypeptide
MNLVAYKFRLYPNNEQKEYFSKCFGCVRFFYNKSLSDMIEYHKTHKDFKNITPTIYKNEFPFLKEVDSLALSNAQLNRNSAYKAFFRGQNRFPKFKSKKNEQSYTTNMINNNIKFSDNNRYITIPKCKRIRIKKHREFSGVIKSATISKTSDDKYYISILVETEIKELPKANKSIGLDLGVKDLVITSNGLKYNNHKYLAKSEKKLAKEQRKLSHMVKGSSNRNKQRVKIARIYKHINNQRNDYLHKLSKHIIDENQIICVEDLKVMNMTKDNDYNKSLLDSSMSRLLTMLTYKASWYGRTIIKIPSDYPSSQLCSSCGNKNSITKNLSVRTWTCPYCQSKHDRDINAANNILRKGIQLLSKDGTHPDSLFMLDPLGSSSKKPPHL

SEQ ID NO: 22086 - protein, 416 aa, unknown
  TnpB Polypeptide
MIIGQKICIAPDKEQIEVFRKACGIARYTYNWALCEWKRQKSLGVTKVTRNDLKKLWNATKPEWVYEAPKDANQQPFTDLYNGLNRYFKKQSKFPKMKKKGRCKDSFYISNDKASIDDLYIKLPFVSKVRMDERLKHKVRDIKIMSCTVSAHADKWYVSVNYEIDDSLIQKESLINIVGIDVGLNDFAVDSNGNSTKSPKPLKKYKDKLAKLQRCLSKKKRGSKNRQKTRKKVAKCHARIANIRKDFLHKLSTDYVKNNKLIAIEDLDVKQMLKNHKLALHIADASWGEFKRMLEYKSKKYNSILIKIDKYFASTKTCCECETVKDKIGLGDREYICHVCGSCMSRDYNASINILAYALRILIPRASGVMPMELVSLAKRAIASLNNNDEVPFGDNDSFIESLGNQVLVYANNMNR

SEQ ID NO: 22087 - protein, 404 aa, unknown
  TnpB Polypeptide
MLVRGVVFYLDSELPFDAKSLLEDFRLAVNNSIRAGLHARVTSRNALCRLAYKDFREQHPRMYAKHLVSAFEVAGSVLKNHRRRVRKGVTCRIPYVKRLMMKAENQAYKLDRKSGVIDLPIRAGCHVDLRPVVSQYHRKYLDDMSLSLGSLTVLPDRVIVAFRKEAPKPYAPESVLSLDTNERSLDGVFVEGDVAKAVKAEFPEVAIIQQRHHDRRKRLQKRKAHDRRISKRLCRMEGVREHNRIDHRLHQVANSVLRFAEERKSAIVLEDLKGMRPRKSKELNRRLSLWPRRKLHQIIEYKARWKGIPVVKVDPRNSSRTCPICGRIKYSRMGAEFACNCGWHLDRHINASINLLQTAISIGMAGGLRFNPGAFQHDVMMILYEPAMAARSEPNGTSGIVGVT

SEQ ID NO: 22088 - protein, 484 aa, Microcoleus sp.
MTNSNTLDTDSTSHAKKFLPFWDKSCQEISRQLWSSIALTYSRPGVDRSILSSGSVNSKIANSWFCAEQTYLPNQKWLKISYESSRLTIADSTPSVKTNLLSKKIRVYPETKLAQKWRTWIAASRWCYNQAIAILKNEKIGKYELRKRIMDSAPEWVSQQPYNPRQLAVFQACEAHKAACKSQGTAKFRSCKAPTQTIRFQTANWKSNTFYPRETKGLSFKASEAIVEVMQHEPTLSIINDQWFICYAVDTVAPPPTQSELAIALDPGIRTFMTGFDGHNILKLGKSDIGRIYRLARHLDKLMSRLGKSKGSQFKRLRYRSRKVAARIRVKIKNLVSELHNKAANYLVSKYKLIFLPTFETQQMVKKGKRKLATKTARAMVTLSHYRFKQTLKHQASKYGCVVVDVTEEYTSKTCSKCGHIHSKLGGLKTFKCPECGHTLDRDLNGAFNILLKALRDTSMSGKLQAFQIMPYTVDLGGFLDLPG

SEQ ID NO: 22089 - protein, 401 aa, Microcoleus sp.
MLVLEYKVKAKSTQYLAIDEAIRTVQFIRNKSIRYWMDAAREDKIDRFALNKYSTKLRHEFAFVKELNAMAVQAAAERGWLSISRFYDNCKKNRPGKKGYPRFVRSNRSVEYKTSGWSLHPIKRRITFTDKKGIGELKLLGKWDIHTYPVAAIKRVRLVRRADGYYCQFCVDVECRDIQPKTGKELGLDVGLESFYTDSNGHHEPNPKFLRKSEPSIKHAQRLIYKKQKGSNNRRKARIKYSRKHLRVSRQRNEHAKGLARQLCKSNDLVAYEDLKVSNMQKNHCLAKSIADASWYLFRMWIDYFAAKFGKLAVAVPPHYTSQTCSQCKRRVKKSLSVRTHTCQCGCTLHRDTNAAINILLKARSRDGQSRSNANGVGTSTLLGESLVEQVLTLKLESPRL

SEQ ID NO: 22090 - protein, 463 aa, unknown
  TnpB Polypeptide
MKARIAHARPETNKGKFLALDSLQVVYRAYVQECLDLMVQSKRHHIKPADYQKFFSKAKNLTSQIQKNARQHAIHTLDSWRKSLYQVTLKRKIHESGFDDHRMMELRCVGKFGLVSAGKCGKGDISQEAVDLYWSWVWDCPTPKVSVDFPVWLSEMTCAFGPSKESKFSGWWIAVSGLIRGKRIQIPLNPHPYLTDSAILAKSVLMRKDRKRRWTFQFTDKREDVVPIGTAGKVAIDVGLNVLAATSDGRLLGKDFKIPFDRLHKKVKTVRANRQRQDLKEDSKRLIRLEDRLTGMTKTATGTVANQLVRSYPNHTFVVENLDLRGCRGSKRFAYRALQHSLGRKAVLETVNPAYTSQECPSCGYVARGNRNGTSFRCLSCGRISHADVVGAINLLRRSGDKQIGLKASPWLVRPILEKRYRKARDSSPRRMAKATRSPTVGPDSYCLIPAGIESNSGVLALR

SEQ ID NO: 22091 - protein, 297 aa, unknown
  TnpB Polypeptide
MRLEPDHRHLTLPVIGTVRSKENTRRLERLLAKGRARVLSMTLSEQGARMFVSVTTIVARAPRNPSEPTARCGIDLGIGAEWAVVAHADDTIERITHPAPWTAVPQQRRRLARRLSRRVVGSRGHRQARAKLADLDRRAANLRRESIHTLTTLLARRYGTIVVEDLDVAAMARGMGQRAFRRSVYQAGLGRVRPTLAYKTGWAGGRLVVADRWFASSKTHYGCGGYLADLNLGQRVWACPACGQLVDRNANAARNLRDWTGPVVDRNVQRGGVAAPVPFVGDHGGQVHAAAWACEAL

SEQ ID NO: 22092 - protein, 416 aa, unknown
  TnpB Polypeptide
MSLFVNNTEVRRAVPVKLDVTDEQADLLHETVDEFLWAANYVVDAAWDGEWAETRKSVLHEETYDEVREQTRLHSNHVQLARDRAVDALESVVTKWSKGEHASLPTFSAPFVEYNQRNATFHDDHASLSTVDGRATVEYVLPDENRDTPHSEFLRSDEWEQTGATFHYRRGDFYLYVRTTADVDDPDPAENGAVLGVDLGVENFVVTSTGVFWSADELNHWRQEYLERRKSLQECGSRWAHETVQAVGRKETGRFEQYLHRVANELLDEAVASGCTVIAFEDLTSIRERMPTVREFHEWAFRRLYEYVAYKAEERGICVEQVNPKNTSRRCSSCGFTHEDSRSSQETFCCQSCGYENHADYNAVKNIGYRLLRSQTGGEGGAPVGARSNTGMLNANGVKPLPDSVRAGVHGEHPWL

SEQ ID NO: 22093 - protein, 399 aa, Streptomyces sp.
MHLRYAFRMYPNGPQRSALARAFGCARVVYNDALRARETARAAGEPFPKTGDLSKLLITEAKKTDERAWLGEVSAVVLQQSLRDLDTAYRNFFDRLKGNRPRMGAPRLKSRKDNRQAVRFTANARWKITPGGDLSLPKIGDVRVKWSRRLPSVPSTVTVVKDAAGRYFCSFVVDTEPGEVLPEVTPEVGIDLGLGHFAVLSDGRKIDAPRFLRRAEKKLKRAQQALSRKARGSSNRGKARLKVARAHAKVADARREFHHHLSTELIRENQAIAVEDLAVKGLARTRLAKSVYDVGWSQFVSFLEYKAARYGRTVTRIGRFEPTSQVCSHCGVREGPKPLHIRVWGCGACGSVLDRDINAAVNVAKAAGLAVSACRAQVGPGLVPAQRGEAGTHRDGQPT

SEQ ID NO: 22094 - protein, 503 aa, Streptomyces sp.
VPRGVRTGRGRCSPADSPDRPVSGCCSVCRPTDCSALRPALTARIDRGVARRSDLDCAHGSALLSVAPGKVQLMHLRYAFRMYPNGPQRSALARAFGCARVVYNDALRARETARAAGEPFPKTGDLSKLLITEAKKTDERAWLGEVSAVVLQQSLRDLDTAYRNFFDRLKGNRPRMGAPRLKSRKDNRQAVRFTANARWKITPGGDLSLPKIGDVRVKWSRRLPSVPSTVTVVKDAAGRYFCSFVVDTEPGEVLPEVTPEVGIDLGLGHFAVLSDGRKIDAPRFLRRAEKKLKRAQQALSRKARGSSNRGKARLKVARAHAKVADARREFHHHLSTELIRENQAIAVEDLAVKGLARTRLAKSVYDVGWSQFVSFLEYKAARYGRTVTRIGRFEPTSQVCSHCGVREGPKPLHIRVWGCGACGSVLDRDINAAVNVAKAAGLAVSACRAQVGPGLVPAQRGEAGTHRDGQPTVVGIPAPLGGGAAEVNPRRRSGSGSSRRRPP

SEQ ID NO: 22095 - protein, 479 aa, Mycobacterium sp.
MSRHTTFKFCLNPTVEQHNVLARHTGASRFAFNQCLRTVMTALTHRKSDPTLGVPWTGFDLINWFNAWKGTEAAGRVFAVDTEGTVTTVVTGLAWRAEVCQQVFEEAAVDLDRGLQAWSDSRSGKRKGTPVGFPRFKKKTSAESSFRLRNKHRKGKTAAIRVGDDGRARSVTLPGIGRIAVFDDTRRLRRLLAKGRARILFATITSRAGRWWVSLTVEAADLHPAQQHPRRSDDDRGGWIGVDRGLSVFLVAARADGVEVTRITDAPKALAEGLSRQRRLSKSLSRKQKGSHNRRDAAAKLARHHRHVANVRRHFLHQVSNELVKTHDRIVIENLNVAGMLRNHRVARAISDAAWTAFARILGYKQDWRGGELVEADRWYPSTRLCPVCWAVDTDMTLADRIFVCGCGHTADRDLNASVNLARWGQAHHHEASPDPRTPKQRGRATNARRRDGSDQHPTCAGETSPKDAGTDVHTTPAA

SEQ ID NO: 22096 - protein, 725 aa, Mycobacterium sp.
LASTGHQVVDDPVHGRIGWCSTVRNWCSVDPVCAGQVRYRRGGSVSVVCGCMLFMASVPTAFIAATSGDAVVGGPRRRGKSKAPNFTYDGPVAVIRLELDATDDLVRRRLQRQWAAVFRLRRAVQRDAAARCAAYWAAHHERAADPKALRARLGLTRKGIEAAAKTHIEASGWMRDHLTKAVGLHVADEVWETIDRYLFSDSSGRRYGPPRVGSWWDFTRIPGRARSHTKDQPTWETYRLVGTLDGHLTTYRHPQLPAGVRTAQQAATRAVGTSILAQPARLQTPVRPASKSWWHHDGALAVVFTGLPAGDLVLPVRLASGAGHWPHLTHFLADPAFWHKIDLVRVRDRKAPGGWRYYAHLLIHAGGFQSPSTIARRDRIPTGRRAGVDANVSNLAIASFATAQPEQGLLVDRIDCTKEQQKTAMRAAQRARARQKALDRSRRNTNAAQYGPSARQHQRAQRRAAEGLPAKQIATPGGARHARTDGVPLRAYRHDALSRRYQRTRCDHSAESRRTSQAKQARATEVAAAIVAAHGNIVTVEDCRISAWARLWGKRIALFSPGMLVAALGHECHATGGRLYRAGTHGTAMSQHCLCGTRVSKALKQRTHVCPHCGLRADRDIVSAVLAACVELANPDDPRTARVDYRLAHALRDGLASQQEWEGSVNRHQPPPSPDDGSARTGSHHQAVASAEQAAPGTPPNRPAQKPGRHGTSRKQPAPKLIGAA

SEQ ID NO: 22097 - protein, 515 aa, Mycobacterium sp.
LLKNQLPRQCRGSHRSRSVRWAGARCLRAGGHPVGDMFIGAVGAVALLARRRSARRTCGLPRQLRVSNSRLCSTTRAVARRSLLVRVLSVCCAILAVMSRHTAFRFCLDPTVEQSEVLARHAGAARFAYNQCLRIVKTALTQRKFDPSIEVPWTGFDLINTFNAWKKTEDAGRVFTVGTDGTIGVLVTGLAWRAEVCQQVFEEAAVDLGAGLKGWSDSRCGKRNGKRVGFPRFKKKAGALPSFRLRNRHRKGKPAAIRVGEKNRPRSITLPGIGLIGVHDDTRRLRRMLAKGRATILFATISHHAGRWSVSLNVEAADLHQAHQHPARHPGDDGGWVGIDRGLSAFLVASTSDGQQVGRIDDPPKALAAGMAKQKRLAKSLSRKKKGSHNRRDAAAKLARHHHHVANVRRHFLHQVTGALVKTHDRLVIEDLNIGGMLTNHRLARAISDAGWAEFARLLHYKQAWRDGQVVIADPGIHPASGAGNAAPSATTSPLLTACSLVLADIAWTATATPR

SEQ ID NO: 22098 - protein, 266 aa, unknown
  TnpB Polypeptide
MNILPWSATVQEVGIIPITICSLSEVTIGEKLKNVKAKLHRNFSGQIKSATISQVPSGKYYVSILVETEHTELPHTNQNTGIDLGIKELCITSDGKKYENPKIIRKYEKKLIKLQRQLAHKEKRSQNYYKTKKKIALCHEKITNTRKDYLHKMSHEIISENQVIVSEDLQIKNMVKNHHLAKAISDVSWYELTRQLEYKAKWNGRKYIKIDTFYASSQLCSVCGYQNPDTKDLSVRTWICPKCGAEHDRDINAAKNILTEGLSQIA

SEQ ID NO: 22099 - protein, 384 aa, Clostridium sp.
MYNVALYNVRQYYFNEKKFLSYENNYHSCKTNENYSMLNCNSAQQIMKVVDRNFKSFFALIKMAQKGEYQYKDIKLPKYLPKDGFFNLIFSEFNTSKEIFSVPMSPIFKRLYGKVEIKIPTNLKGKAIKEVRILTKNKARFFEIQWIYEIPEFKGNLDKNNALAIDLGIDNLCTCTTNNGKAFILDGKKLKSINQWANKKNSRLQSIKDKQRIEKTTKAQRKLWDKRHNKVNDYLNKTVKIIIDYCLNNNIGTIVVGYNSTLQKKCNLGKINNQNFVNIPIGNIREKLSYQCQRYNINLIEQEESYTSKADFLVNDNIPVYNSFDKEVHTFNGKRTTRGQYKSSIGIILNADVNGSLNIMRKANIKNINLANCEYLNPVRIKIA

SEQ ID NO: 22100 - protein, 489 aa, unknown
  TnpB Polypeptide
MYYHLIMVVRYRRKVIDNPISERAKGIWEHIAPRYGIVLEEWNHDIDYVYVMFHAQPRTEVGEFINACKSASSRLLKKEYLEIREKLWKEAFWSQSFCLADNRRGSGRSNPSRHCNPRREKVLNIAYRFRIYPTEEQKILLGKTFGCCRFLYNQMLNDKIREYEKTKKMLKNTPAMYKKEYPFLKEVDSLALANVQLHLEKAYKNFFRDPKIGFPRFKSKHHSKNSYTTNVVNGNILVESKRIRLPKLKWIAMKKHREPAEGLRLKSVTVSMEPSGKYFASLLYEGYSCENQAAGPDYSTAKILGIDYAMQGMAVFSEKVETEEAGFFRKNEKRLAREQRKLSRCVRGSHNYELQKKKVGRCHEKIRNQRRDHLHKLSRKIADGYDAVAVEDIDMKAMGQCLHFGKSVQDNGYGMFREMLDYKLAWKGKKMVKVDRFFPSSKKCCKCGRIKKELKLSERVYHCVCGNEMDRDRNAAINIREEARRMLTA

SEQ ID NO: 22101 - protein, 369 aa, unknown
  TnpB Polypeptide
MKTYKYKIGAQSNTIRIGNLLDDMWQVHAYFHKWQDQRYKAGLPYANYAAMCKHAKDLKRTTHPHWKSLPSQAIQAELERIDNAYQRFFNKLGGKPHIKPRHKFKSISLKQTGFRLTNNRITLTFRKWDKGKWRFDKVPYTFHKHREWHGTISRITIKRDTCGDYWLCITTPNTDFKPLPTTGESVGADFGMKDAYLTLSTGEKIQHPQPLKHSLKELRKLNKSLSRKVKGSNGWWRCVRTIARLYRKISNQRKDFHWQLASKLCKKFDTIAIETLNLAGMKRLWGRKVSDLAFYQFVEILKYKCRKHKRLLKQVGQWTATTKPCSDCGFHNENLTLNDRQWTCRDCGSHHDRDVNAAINILRAGIAVT

SEQ ID NO: 22102 - protein, 390 aa, unknown
  TnpB Polypeptide
  misc_feature (239)..(239): Xaa can be any naturally occurring amino acid
MKLIHRSYRVALRPTQDQKVLLDKHFGSVRYIYNHFLNQRKEQYQLFNKSDTYFEQQKLLPILKENEETSWLKEVNSQSLQVALRNLESAYQRFFKGQSKFPKFKTKRSRNSFGVPQKSKIQQNKLYIPKFREGIKYIDKRTIDGKICNVTVTKSSTGKYYASILVEQEYEQKPKTGLSVGVDLGIKDLAVTSDGIRLKNNRYTKTYERKLTKAQKHLSRKKKGSRSFENQRRKVAKIXEKISNSRRDVLHKITSKLIDRYDTVVIESLYTKGMMTSRSFSKNIRDASWWTFIHYLKYKADWNDKQIVQVDRFYPSSKTCNVCGWINQNLNLSMREWTCANGHVLDRDLNAAKNILHEGLKILNSAGAVENTDGDDVRLSNQQLSMKSEV

SEQ ID NO: 22103 - protein, 396 aa, unknown
  TnpB Polypeptide
MIILEFKVKAKPVQYNAVDEAIRTVQFIRNKCLRFWMDNKKVSKYDLNKYSAVLADSFGFADKLNSMARQSSAERAWSAISRFFENCKKKVIGRKGYPTFQKNNRSVEYKTTGWKLAPNRKSITMTDKNGIGKLKMIGTRDLNFYSTEQIKRVRLVKRADGYYCQFAIAVERNIDLLPTHQTIGLDVGLESFYTDSLGNKVDNPRFYRTGERKLKRKQGLVSRKVKGSSNRNKAKTILGKVHLKISRQRKDHAVKLARCVITSNDVVVYEDLGCANLVKNHCLAKSINDAGWYQFRVWLEYFGKVFKRITIAVNPAYTSAECSSCGVIVKKSLSTRTHICQCGCVLDRDENATLNILKKGLGTVGHTGTLGLESINASGEMTSTLTGAILLEQAIS

SEQ ID NO: 22104 - protein, 424 aa, Streptomyces sp.
VFPATSSGVCSYDHRMQLRYAFRLYPEPGQRAALARAFGCARVVFNDAVRAREDAHAARQPYPSTAALSRQLVTRVKNTPERSWLGEVSSVVLQQALRDVEAAYRNFFASLKGERKGKRVGAPRFRSRKDARQAIRFTANARWKITEGGRLSLPKIGDVQVKWSRILPAVPSSVTVILDAAGRYFASFVIDTDPDTDRARWTEPDPEGAIGIDLGLTHFAVLSDGTKIDSPRFVRRAEKKLKKAQRELSRRQKGSKNRNKARLKVARAHAAVADARKEFHHQLSTQLIRENQAVAVEDLAVSGLVRTRLAKSVHDAGWSQFVTMLEYKAKRYGRTFVKIGRFEPTSQACSACGHRDGPKPLHVREWTCPACGTVHDRDHNAAINVKRAAGLAASACGAPVRPGLVPAQREETGSHGTPTRTCAA

SEQ ID NO: 22105 - protein, 390 aa, Streptomyces sp.
MVLIPSWRFEARGMSKPKGVGWMIRAYKFLLRPTVRQGQALGEMLRDHCSPYNGALQERRDAWRHASKTSVKYGMQSAQLKDIRSFDPEHQGRWSFSSQQKTLRRLDNGCRWDSTPHDPVTRVRFQGVGQVKVNQHRPVVGKVKTISVKREGRKWFVVLTAEQAQPEPLPATGSVVGIDLGIANFLADSGGGFVPNPRHGRKAAAKLEAAQQALSRFPRRKAKDRTANHQRAVEEIARLHGKARRQRLDHAHKTAVGLIRGHDVIAHEDLKIRNMSKAPEPKPDPEQPGSFLPNGAVGKAGLNRSISDAGWGVFLAILHAKAESAGREVIAVDPRNTSRRCPECGHTARENRPTQEKFHCVSCGHSAHADTVRVVNVLRAGLVRRDANPA

SEQ ID NO: 22106 - protein, 327 aa, Vulcanisaeta sp.
  misc_feature (258)..(273): Xaa can be any naturally occurring amino acid
MLRRAVAVELEVTKEFNKLLYGVESAYLGIVREVVEYAVKHNVTSAVKLQGIFYHKYRLEYPSLNSQLVIQAIRQASEIAKSFIAQRKKGLASKPYPEVRSISIRFVETTWNYEEFVKSIAPVRIAISLLGGRREVWLRPHKRFWLYWWRVLNGEAELASTLIVKRKANKWYAIFIFEIKPRREVPQSVVAFDINENTVAVGRIDLPSTVDRVVDWNRRYTTPQLYMIRTDFGKLAKRYKAIRNAIIEKLKPGFALPXXXXXXXXXXXXXXXXRPTGQGGGQSPEFKRLYELSYYFSSTYALPATSSLPPSSLYKTALSRILSGLGI

SEQ ID NO: 22107 - protein, 443 aa, Lachnospiraceae sp.
MLLSEEHRIKACSSRSLFRQIDSYCYCAKNLSNSVNYMIRQIFRIHTKLKEGKVPEEWEAELMEQVNCGIRDYNEGRAKDRTLRHIDETNGFVADAYFLSWYLKKTAEYKAMPYATCSQICIQEKCREWKAFYRAKAAYAKDASSFAGRPCPPGYLDPSKGRGWLVITSQNFRIDENRNVIMPGFLKGIHIRARHDSVRQIRILTAGDGIVIRLIYEKKEAPAAETKNVMGIDLGVDNLIAAAWNSNQPPLVLNGRPLKSMNQYYNKRKARLQEEAKSANGLDMTRRMERLTKKRNRKVKDYLHKASRKIVQLAEAANTGLIVIGANKGWKQKVNLGNRTNQNFVAIPYKTLIDMIRYKAALKGIEVKVVEEGYTSGTSYLDGEFPEAASYDRKRRIKRGLFKSNSGTCINADVNAAYQMMKLAGVCNLQIKAGEKVTRIKAA

SEQ ID NO: 22108 - protein, 486 aa, unknown
  TnpB Polypeptide
VPKKKTPSFIVEYPIIVDSQQERELNARFNAGFRLLNAIQSEALIRMELVRNSEAWAEAKKLPRRIKNALGEPINNPERAKAFEAAKKQYRFTDFDLQAYGSLVAKNSVWIDAKLDAQSIQKIGTRVFKAVNKILLGKAKKVRFKNNRSFSSMEGKQITTGIRVDRKTETFVWRNIKCRLIIDWLDPCEKHGWEQEWKYARIVRRELNGKTRWWVQIICEGIPYQGRKNTQTKDDLVSIDLNICNVAYVSSSHAELKPLADKVPTFSQEIKGIQRKQDRSRRVNNPDNFNPDDIVLKGKKQGRKVKRTGQIKRGKKLKWLESRNYKRLGRKRRELERRKAAYTKSQNRALANEILRKGGKNVNLENVSVKGWQKRYGKAISAKSPGFFQSELIRKAESAGGLVNKYSTQKTACSQTHLDGQRVKKKLSERIHRDRTGVRMQQRDLFSAYLGLFVNQDGYLSVEDARVGYPRSEPILTAAWRRSVKA

SEQ ID NO: 22109 - protein, 338 aa, unknown
  TnpB Polypeptide
MAQSCICTVIARYRTVQTQLRKERVWDGYKKDNHGNDVKNYVSKDLDFLWKPIEFKRPQLDLVRNRDYSHRDDNTMSLNTIHGRVIVNAVFNGFEQYFDGSWKLGTAKVLKSGKHWYLHIAVTKEIELPEFKPSHVVGIDRGLRQLLTIYDEKGQTTFVNGKTILQKRRYYKRLRAQLQSKNTKSAKRRLEAIGQRESRWMSDVNHCLSKTLVNRYGSGTIFTLEDLTNVTFDTVSKRAKKDRYEHHSWAFYDFEQKLIYKAFDKGSQVISCDAHYTSQRCPKCGYIDSKNRDKSRHEFCCKACSYRTNDDRAAAMNIQFLGTLYNSGNPKSSFEKLD

SEQ ID NO: 22110 - protein, 489 aa, Moorea sp.
MPWKAGAIKKISTQVVPVVGMTKSVEIELLQVMRKLGIVRSESYNKLGSISHWGLDWKKAYPEIRSFRTPESLGLPSKLMEWTVSDVAKAITASQAACTETVIKKIYKRFSGKENQKRRKELCKKLKTLAFLEDPLLHRFVRKEFQRGYSWVKNQIVYQQGGYKCKRLSRNTYQLELAGLTRGKRNQIFVRSNRKLKGQIRLIFNRLLPRFEIHFLVDHGTVDISSERRSVGVDKGYTEAFYDSEGQAHGKTLGKVSTNKSDRICFKNRNKGKLWAIHRKLEKVDPVKSARILENNLTRKTENRRYRQNQAEITAIIGAASKSIFKEESLKVFAEDLTQPIRTKRQSKAVSRKLNSWMKGVMRDSLQKWADWTGSVVIEVQPSYTSQIDSRNGTLLGKRTGDNFTGFDGVVLQADCNAAKNILARGTDFEITRYSSRAEVQAVLLRRTARYLKGMGLSLADAVELGWLDCKHELCSSFQATPQRDLRNA

SEQ ID NO: 22111 - protein, 418 aa, Moorea sp.
MLIKVDKKLIMKSYTAIKIRIYPDTCQQEMLAKAMGCSRWWWNYALNLTIGTYKETGKSISKTGLNSLLPKLKKEVETEFLKTDVYSQSLQQVTENLSRAFQNFFEKRAKFPRFKSYDGKQVVSYPQNVKCLVNKSTIKLPKIGEIKAVYHRPFQGVVKTVTVSKNRAGQYFASIRLEIDREIPVTNNGVVTGIDLGIKEFAITYNGSKCSKYENPRHTEKSARNLKRKQQKLARKQPDSNRRKKARLLVAKVHNKIHNTRHDFLHKISRKIVDTSQTVVVENLNVKGMVKNHKLAKAISDTGWGTFVNFLAYKLEKEGKKLVEIDRWFPSSKTCSNCLYQLDELNLAIREWICPHCGTNHDRDQNAAKNIRAEGIRLLSVLGTSTAASGGDVRHRLGRKVKTVQSPVKLEASALPVG

SEQ ID NO: 22112 - protein, 391 aa, Microbispora sp.
MHVDAQLLCAAPVQLPPLPDPGPASSTGPGVRVRADGVQRRAARTAGSPRGRDAAHLRRGAVQAGHHAGEEDPGTRLAGRGVGRGVAAGAGRSDTAYRNFFASISGKRKGPKIAPPRFRSKRDNRQAVRFTRNARFSITAGGKLRLPKIGDVPVRWSRDLPSEPSSVTVIKDAAGRYFASFVAETADEPLPATASQVGIDLGLTHYAVLSDGRKIDNPRFLRRAERRLKKAQQALSRKAKGSANRKKAVARVARAHARVTDARRDFAHKLSTRIIRDNQAVMVEDLSVKGLARTKLAKSVHDAGWGRLTAMLAYKAARHGRTFVKVDRWFPSSKLCSACGTVAESMPLNLRSWTCPCGAVHDRDVNAAINILAAGRADRLNACGGTVRPAA

SEQ ID NO: 22113 - protein, 442 aa, Frankia sp.
VRTLAAYRFALDPNDAQLAALSRHAGAARFAFNWGLARVKAALSQREAEKSYGIPDSALTAVPWTLPALRLAWNQVKNDVAGWWAVCSKEAFSAGLDHLARGLKAFSDSRRGKRKGRRVGFPRFRKRGKGRDSFRYTTGAYGPAGDVRVKLPRIGRVKVCESMGALTGRLAGGSARLLGATVSRSAGRWFVSFTVEVDREVPAGPSPRQRRAGPVGVDLGVKHLAVLSTGETIPNPKHLGGSLRRLRTASRAYVRSKPGSAGRRKRAGRLARIHARVACQRRDGLRKLTTRLAKNHDTIVVEDLHVTGMVRNRRLARAVADTGMAQIRRQLAYKTGWYGSTLVVADRWYPSSKTCSGCGWRNPNLTLSDRTFICQSCRLVLDRDLNAAVNLRSLVAASASETVNARGVDRKTRASGRVAAKREPGTARADQTGSASPRGGAA

SEQ ID NO: 22114 - protein, 386 aa, Frankia sp.
MSRYRLYPTAIQAVAMVEHCGHTRYVWNLAVEQQSWWNPRRGPAPGYVEQNRQLTEARRAFDWLAAGSIIVQQQALRDFSTAMAGFFRGSHRKPGFRKRGRSEGFRIVAVKPSDVRQVNRRWSEVRIPKVGWVRFRRSRTVPDARSYRVTRDRAGRWHVAFAAVPAPIAAPGVGEAVGVDRGVTASAALSTGELLRCPGLRPAEAARLRRLQRRLAHARRGSNRRAALKARIARVKAREADRRKDWVEKTSTDLARRYDLIRVEDLNVRGMTRSARGTVEAPGRNVAQKAGLNRGILAAGWGLLARRLEQKAPGRVEKIPAAYTSQRCSACGHVAAESRESQAQFCCVACGFQSNADVNAAMNIAAGRAVTARGGAGLPVPVNREP

SEQ ID NO: 22115 - protein, 304 aa, unknown
  TnpB Polypeptide
MLTYKYKLYNTPRTVWLDRMLRECAFVWNHALALQRRYYHMYGKYISSVNMQKHFAKRIKRNLLYSHNSVEVLQRLDAAYQRFFKKLAKRPPKFRRAADFQSFVYKLHYGYKIDGNCFTINRLKKTYKFHKSRNFSGNIKTVRIKRDPCGDFWLYITTDAEVEASNTTHDGAVVGIDFGLKTYLTLSDGHTYTNPEFFKQTLRDIRKAHRRLSRSVKGSNHHRRRRLELDRLYRKISNRRDAYQWRLAHELCRHYSTICLETLSLDGMRRLWGRKVSDLSHASFVSRLEYVATKYNTHIVHVDK

SEQ ID NO: 22116 - protein, 380 aa, unknown
  TnpB Polypeptide
VRAFKSVWQHYTPTPEIAWLLEQFRQMLNDCIRIGLAENVTSLKSLSLKAYRQLSGYDLASYYKLCAISAATGILRNYRKAKRKNPHVREPYARRPRLTTCYGFKVRDGELSLPTHARKHIRIHVNQHTQAMINGFTVRSVTLTEGILSLAYASEIQDVQPRGFIGIDRNLENFTVAATDRTVHRYDLSEATRAKAVYRDIRSHFGRNDVRIRREISNKYGQKQREKIQQILHHASKSVIEEAKTKQYGVAMEKLTGIRRLYRRGNWQGRWYRGRMNSWSYAELKRQIEYKAKWEGLLVIYVHPHGTSSRCSICGQKMVPEENRMLRCPSCGYVVDRDVNAARNILAAGTLRFGVVDLAGEAMVPEPASVRQSAKSMRGS

SEQ ID NO: 22117 - protein, 402 aa, Richelia sp.
VYHLTYQYKLKLTSSQQQKYESWLETSRRVWNYALAERKDWFKSRSCQINACSLKSEYIISADTPRPTYASQCKSLTQARKVNVDLKAAHSQMLQQVLRRLEKAFVSMWETQHGFPRFKKQGRMRSLVFPQLGKNPVDGNKIKLPGIGQVKMRLSRQIPDNFTIKQAQVVKKASGWYVMLTLQLDVEVPSPQPHGEALGIDLGLTSFIATSSGELVTRPRFYVDLQRKLKLLQKRVSRKVKGSNNWKQAVARVSKLHEKIANTRRDFHFKLAHRLCDQAGMIFAEDLGCKALAKSMLAKHCLDAGWGQFLDILEWVAQKRDVFFVKVDKNGTSQFCPACGTHTGKKDLSLRVHECGCGYRTDRDVTAAQIVMQRGLAAVGHTVKMLSEGKVVGLPAMKESYS

SEQ ID NO: 22118 - protein, 200 aa, unknown
  TnpB Polypeptide
MPRYRLVPTATQEAVLRDHCAHARFVWNLAVEQQSWWRPGRASAPGYLEQCRQLTGARAGYPWLAAGSQMVQQQALRDFAQAMANYFGGTHDRPSWRKAGRDEGFRVVAVKPEHVRRLSRRTGEVWIPKAGWVRFRSSRVVPAGVKSYRVTREVLPGDDGPRRALACRLCGCSCSDPGARQRGGRRHRPWRSCQRGPVDG

SEQ ID NO: 22119 - protein, 250 aa, unknown
  TnpB Polypeptide
VKSYRVTMDRAGRWHVAFAAVPAPIPGPGNGEVVGIDRGVAVSAALSTGELLHTSGLTARERGRLLRLERKLARARRGSERRRRVKLTIARLKARETDRRKDWAEKASTDIARRFDIIRVEDLKIGNMTRSAKGTRGNPGRNVRAKAGLNREIMRSGWGLLALRLEDKAPGRVEKIPAAYTSQTCSGCGHRHPESRESQSRFRCRACGLTVNADVNAARNIAAGHAVTARGGDGVARPVNREPQLLLQSA

SEQ ID NO: 22120 - protein, 395 aa, unknown
  TnpB Polypeptide
MVAAHIENRDAGHWMTDGELKRMTKGGQFSLHANSVQALAEKLIANVRTTFSNIKREKEAGLPVTSKFPHRIKDFQNVVWKGCGSPALKIDGRRLSLSNGRGNDPLILTLPSIHSESDIAQAELDWQADHYVLLLTIDTGETNPPLLEGKRTAGCDLGEINIAAVVTEEGEGIVISGRHLRSVKQLRNKRHSDLDRLLQRCKKGSKRHRKLMAAKNRASSKAERQQRDILHRASRKVVDFCEKEKIATIAVGDVRDIADGVNKGKKTNQKISQWTHGLFTTYLKQKSRVFGINVRLIDEAYSTRTCSHCGNVRTSSPKGRIFICPSCGVRMDRDGNGAANICSKHRFGEFGSVQPGSLSHIKPIIVGHRSIYEGLVPSSRAADVSRGEIPVASVV

SEQ ID NO: 22121 - protein, 461 aa, Clostridioides sp.
VVVVEKAYKFRMYPNKKQQELINKTFGCCRFVYNKYLAKRIEVYKNDKETFTYKQCSSDLTNLKKELKWLKEPDKFSLQNALKDLDNAYKKFFKEKAGFPKFKSKKINRFSYKTNFTNGNIMYFSQHIKLPKLDMVKIRDKQVPQGRILNATISKEPSGRYYVSLCCTDVDIEAFENTNNQIGLDLGIKEFCISSCGEFIENPKYLKKSLNKLAKLQRELSRKTIGSLNRNKARLKVARLQEHIANQRNDFLQKLSTKLIKENDIICIEDLQVKNMIKNRKLSRLISDVSWSEFVRQLEYKANWYGRQIVKVGKFFASSQICKLKVARLQEHIANQRNDFLQKLSTKLIKENDIICIEDLQVKNMIKNRKLSRLISDVSWSEFVRQLEYKANWYGRQIVKVGKFFASSQICNKCGYKNEEVKDLNIREWICPSCNETHDRDINASINILKEGLRLITIQNK

SEQ ID NO: 22122 - protein, 422 aa, unknown
  TnpB Polypeptide
MYLTASIHIKPTHPLYDLLDEYAFLCKNLFNVATYHQRQAFFTQRHTFNAFTLINRFTQEKQPDYKAIPAKIAQQIVKQVTQNFQSFWASICAYRQDKSKFKSNPKLPKYLHKTKGRANIILTKQAVSKRDWHKGILTLSSYFDTPLSFPLGKLKNMIPYDHVQEVKVVRVANGYDIRIAYKVVEPELKSDNQRYLSVDLGLNNLLTVAGNTECKPFIITGKPVKSVNQYYHKSKSVLQSGKDRLPSRAVAQLKYLNKEMEQLSCFRKNQIHDYLHKASRYLVNHAVSNNISKIVIGYNRNWKQEINIGSVNNQHFVSIPFAQLVSMIQYKAQLHGIEVILTEESYTSKCSFLDNKSLKKQDSYLGKRVKRGLFKSAGGKTINADVNGAFNILKKVIGNFKFDPIVVCSTPKKINVWQITSC

SEQ ID NO: 22123 - protein, 407 aa, unknown
  TnpB Polypeptide
MEVSEEAGRRFAVDCHGTAELVEVGLHWRSEVCAQVFEEAAVDLGRALGAFARAKGTSKRIGFPRFVKKGHGTASFRLRNKVSMTGRPSIRVGDTGPRSITLPVIGAVRVIQDTRRLRRLLRSDRGRICSVTVKAHRGRFVILVIVEAAELHPAMLHPSSDHGFVGVDRGLSSYLVAARADGTEVARVEGLAPLARALPSLRRACRRQSRTQPQSKNRRKANARVALIYAKVADQRHDFLHRVSSTLVKTHDHLCLEDLAVGNLMQNRHLSRRIADATWGRFAQMVTYKSAWYGTELLTAPRFFPSTKSCSSCGWVWAEMGLGHRIFVCQACGMVLDRDRNAASNLAAWANAESAWASQAPDPEARGRVTNACGGNGAGRCSSGGATGPAIDRSHPARKQEPAHSTG

SEQ ID NO: 22124 - protein, 151 aa, Solobacterium sp.
QNVKGFTARMSFITDKRNRQVTDHMHKAARHIADYCIANDIGTLIVGHNVDQKQSANMGKANNQKFVQIPFDLLRTYLKTLCERYGIAYIETEESYTSKASFLDGDEIPVYDAEHPYTGIFSGKRVKRGLYRTKENTLVNADINGACNIAR

SEQ ID NO: 22125 - protein, 475 aa, Micromonospora sp.
MSYRVFTVLGVADRERLSVMQSYRFALDLTPRQERVVLAHAGAARVAHNWALARVKAVMDQRAAERTYGVDEASLTPPLGWSLPALRRAWNAAKPVVAPWWRECSKEAYNTGLEALARGLKNWSDSRGGRRAGRAVGFPRFKSRRRSTPSVRFTTGAIRVERDRRHVVLPRLGRLKLHESARKLARRLDAATARIVSAMVRRDGGRWHVSFTCAVQRVQRVPARPDATVGVDLGVRHLAVLSTGEVEPNPGYLHTATRRMRRLARRMSRRVGPDRRTGRRPSKRWETARGQLARAHARVVNLRRDGLHKLTSRLAREYGTIVVEDLNVAGMLANRRLARRIADTGFAELRRQLAYKTAWNGGRLVVADRWYPSSKTCSGCGTVKTKLALSERTYTCTPCGLVLDRDVNAARNLAALAAEASTAGSGPVAGRGADRKTPLAGLVAVKRQPGTATAGKTGTVPPQGRTSNHVPTNAS

SEQ ID NO: 22126 - protein, 348 aa, Bacillus sp.
LLPTKEQIQLLKQSSHEYIKVINTLVIEMVEAKKSTKKTTKDVPAILPSAVKNQAIKDAKSVFQKVKKAKYQIVPVLKKPVCVWNNQNYSFDFTHISIAFIVNGKSTRLKVRALLVDKDNRNFDLLKHKLGTLRITKKSNKWIAQISVTIPLDEKPGTKIMGVDLGLKVPAVAVTDDEKVRFFGNGKQNKYMKRKFRTARKKLGIKKKLSAIRQLDDKEQKWMKDQDHKVSRAIVDFAKDHNISVIRLEQLTNIRQTARTSRKNEKNLHTWSFYRLAQFIEYKAALVGIRVEYVNPAYTSQTCPTCTEKNKAKDRKYVCNCGFNKHRDLVGAMNIRYAPVVDGDSQPA

SEQ ID NO: 22127 - protein, 291 aa, unknown
  TnpB Polypeptide
MTRWSSRRTGTGAAGTPPRTTPGPAYDSKASGTCACNQHRPVRGRVKTISVKREGRHWYVVLACDEVPAGPLAATGSIVGIDMGVTHFLTTSNGEHVENPRFLEASAVDLATAQQLLSTFPKRTKRRTKKHRAAARKVAKLHAKIRRQRLDHHHKAANALVTEHDVIAHEKLNTAGMTKTPAPKPDPDNDGAFLPNGAAAKAGLNRSILDAGWGLFFAILAQKAESAARRVIPVDTRNTSRTCPECGHVAKENRVTQAKFECTACGFLANADHVGALNVLSRAGLVLCAGA

SEQ ID NO: 22128 - protein, 387 aa, unknown
  TnpB Polypeptide
MWKLLKSFKTEINPTSEQKVKINKTIGTCRYVYNFYIAHNKELYDNGEKFVSGKSFSVWLNNEFIPDNPDKAWIKDASSKAVKKSIENACTAFTRFFHHQSAFPNFKKKGRADVKMYFVKNNPKDCACERHRIHIPTLGWVKLKEKGYIPVTKDGWKIRSGTVSIKAGRYYVSVLVEVPDTKAANNSGDGIGIDLGLKDFAVVSNGKTYKNINQSAKIKKLEKRLRRAHRRLSRKYENLKKGEAAQKANIQKQKLKVQKLYQRIDAVRTDYINKTIAEIVKTKPSYIAVEDLNVSGMMKNRHLSKAAASQKFYEFRTKLKAKCEENGIELRVVDRWYPSSKRCHCCGGIKKDLKLSDRIYRCICGYAADRDFNASLNLKDAEAYEIA

SEQ ID NO: 22129 - protein, 388 aa, unknown
  TnpB Polypeptide
MIVQTYNIPLIMDDTNATHWYNLLVCARDAYNRCTRILHDNKITLSLKKVHEACYNVIRTEFPALSSQMVIKCEQAAASALKSIKANKHKNAEVPQRKSLTMTLDKRLYGVLTSEGITITGAQKNKRTFVPFNVYPKAKEMLSTYKAYDPTIFYRNGNFFLSVPFEVPEKPLHSEECIGVDLGARMIFVTSEGKAFKDTTYLKKRRDIRYLKRKLQEKGTKSAKRHLKKVRNKERNLSKDMCYRASKVLINSTNASIIVMEDLTKIKKKTSRTSEGYKRAKHNNALSQIPFYEFKRILTYKAPLAGKQVETVSPMYTSQMDCRTNNRDGERRGRRYICVDGVVFDSDWNAAINIGQRSNHPVSSFLPIEGQLVILTGREQSTSQSTCL

SEQ ID NO: 22130 - protein, 399 aa, unknown
  TnpB Polypeptide
MLRAIKIRLYPNKEQELKLNKVLGCYRFVYNQTLARKQQEYTENKKSLGLTDLSKYFHNELLKDEQYSWLKEENTKIMKQSIRQMLSAYEKFFKQHNGFPKFKSKKDKQSALFPLEAISKKNTFETRKITLTQPLKDIRFRCSDLNHNRLRQYRDGIRSATLSKTKSGNFFLSILIELPNEEVVKFKLTDEHVGIDLGVKDFVITSDGEVFENKHFYKLQEQKIAKLQHQLSKKQKGSNNRNKARIKLAKAFEKLNNQKENYIHSVVNELLIYYDVIFMEDLNVSGMLKNHKLAKAIQEVGFYRFKSILVDKAFNNGKQVIFVDRFYPSSKTCSVCGYKKHDLKLSDREWTCPQCGEHHDRDINAAMNILLEGERIIGVRSTEYTLMENLTVDDRGNAF

SEQ ID NO: 22131 - protein, 491 aa, Gordonia sp.
MARFEVPDGWTVQAYRFALDPTPAQVRAFRSHAGGARTAHNTMLAVVKAVMNQRAAERSYGIAEADLTPSLNWSLAGLRKEWNARKDEVAPWWAENSKEAYNTGLDALARGLQAWHTSRTGERAGKAVGFPRFKSVRSRRSVRFTTGVIRVETDRHHVTLPRVGRLKTHESTRKLARRLHAGTARIVSATLCEDSAGRWHVSFHTLVQRGHGRVGAGEPVVGIDVGVKADSLCVVATPDGRELDRVAAPKSLTKAHARLRALQRRAARQQGPYDPVTRTRRAPSKRWITQQRRIARTHAHAAAVRRDVLHKHTTALAHHHQVIVVETLNAAGMRAAGGARKRGLNRSLADAAVGEIRRMLDYKTRWYGSTLVEADRYYPSSKTCSGCGRRKPNLTLAERAYVCEHCGLQIDRDLNAAINLARLGDTPHTGDTGTGTGSSPAATHRGGHGRGATQESATTPVVNAAGDEASTRHQHPLDKTGTASPQGEAAQ

SEQ ID NO: 22132 - protein, 395 aa, unknown
  TnpB Polypeptide
MRFRLYPSAAQKRLLLEQCGHARFVWNLGLEQRLMWARWKGPTPGFNEQAAQLTAARKAEPWLAAGSQTIQQQALRDLDQGWRMFFAGSHRRPTWRKAGQHEGFRIVGPQALRVRQDNRARSSVLVPKIGWVSFKRSRALVDWKSYRITRERAGRWHIAFAVIPEPIAAPDTGEVVGVDRGVTVAVALSTGEMSSPQGLRPKEAERLLRLQRRLARARRGSGRRKKVKTLIGQLKARDADRRKDWVEKTSTDLARRFDVIRVENLNIKGMTRSARGTVEKPGRNVAQKTGLNRGILKSGWGLLVARLEQKAPGRVEKVRAAYTSQTCNACKRIASESRKSQATFVCVACGHRANADVNAARNIAAGHAVTVRGDRRVLARSVKREPQHARPPKVA

SEQ ID NO: 22133 - protein, 479 aa, unknown
  TnpB Polypeptide
VKIKNEVLTTRKKEKLRRITGRDTRIIEKYVRIIHHNRRKICRRTKKGKGEIRVHKGKLDELTLTTSRLKKVEERRESVPHDFKKMFTYCSHDEFQECRDIAVQLYEQGYRPEATRPPIKRARRQLINKKRFILVHLPKEKNNILTRWWVGIRDSLDTWRKGTRYHQRLWLPLEMSTFHQKELKKGQIKSLELRYKRSTREWWVYFQLKVLPPSSFYPPEEESSSSLPPAVLGIDLGINIPAAGVLLTPKKKLTIKEIKFWHTKQWNRINHRYKLKLSRLQRKGALNDQSGKKHQIYRFLGLLRRRYRNVKRSYIHQFVSDIVQTIESYAQVYDLFVVVGYPKNVRKGKEKGKGKSTRYFRRKLHQWNYALVLGLLRRALILRGFAPHRIITLDERGTSSHCSCCGKEVSRPVRGLVHCSSCNYTFHSDLTGARNIAHKFLSHLFRPLATTITDYSTGQKFSLTHYTVCQGLSHWLQSQ

SEQ ID NO: 22134 - protein, 335 aa, Enterococcus sp.
MLKAFKFRIYPTASQKEWFIQNFGCVRFTYNHLLKARQESYARTGAIDYSMTPATLKKKYAFLKSADSLALANAQLNLDRAFRNYFNGRASFPKLKNKKSMWQSYTTNNQKGTIYLEDKYLKLPKQKELIQVRLHRPVEGVIRSATISARYNESFYISLLCEVQIAGVPTTNRWLGVAYDPKKLVETSSPVEVQMPLFRQTRDKMKVAKRKLVIKSKAAQKRKARLENARNYQKQKRKVMDLYQKQKLQKEDYLERVSGNLIRNYDYLFVEAVPSELSSADFQLQDWYKLITKLRYKAQWYNKTLLFINVNEQLNEPPEKKSMELEKIGKQVIFE

SEQ ID NO: 22135 - protein, 473 aa, Lachnospiraceae sp.
LETSEGSREKDSMEITSSYGVEIRKVNVPVSLTYRIYREAVRVLALFYDTVWEELSAITDRKERFNHAEHLVHGTKKNRAVYDFDSLFPKMPSYLRRSAITHALGAVSSYRTRFAQWEEGGKEGKPPVLGERTHAMPVFYRKNMYEKGEGDMASLKLYNGKDWVWVKARLLHTDMEYLRKNWSGVKASAPTLEKKHRKYYLRFSYTEERELPEKEAGGQRICAVDLGLNSDAACSIMEADGTVCARKFINFADDKDRLWKVLDRIRKMCRDHGPKSTGGLWKYAVRCNEELSKKTAAAIVRFAEENHADVIVFEYLDMRGKIRGKRKMRLHMWKKRGVQKISTHMAHRKGMRVSRVCAWKTSALAYDGSGKVERDKENHSICTFTNGKRYNSDLSASYNIGARYYIRELTKPMPATAWSGKSPCSTEQKYMCLCGSCQAPCSDAGEWLDSVNTGMHSAECLPCGDGIPIGTRS

SEQ ID NO: 22136 - protein, 440 aa, unknown
  TnpB Polypeptide
MKNSKKNEEEDDWGYRRYSIVIKKSSPDYQEIDELCFKSKNLFNATLYCQRQSYFDTGKFIKHNDLNTNFAHTNQPDYRALPAKVSKYTPKKVDHAIKSFWGLKKSKNITFTPKIPKYLKKDGRFVIEYEKDALSFQKEGFIKLSKTNIYIPIPSKLKIKGKSKGKDLKNFFRVVRLVPKNGYYLIEILYKKSIPKKRKKELTHQTRFASIDLGVNNLATVTSNVFQPLIINGRPIKSINQYYNKYQKKKQRLLPANQYTSKKIKQLGYKREMKLNDYLHKSAAFLVNYLVSQTIDVLVIGTNKGWKQNINIGKRNNQNFVSIPFYKFKQILTYLCEENGIEIHEQEESYTSKASFLDGDFIPTFTPGDNTKYTFSGDRVFRGLYETKNKKLINADVNGSLNILKKFINKNATIKFQWDDLWNDLVEVYSTPHKVTVPIG

SEQ ID NO: 22137 - protein, 381 aa, Kouleothrix sp.
VADATLRQTQAAFNAAASYCAAVAWEQGITNKNKLHFLVYGESRVTYGLGAQLACCARDKAAEAVRAVRAAPERRDKDTDQIIPKTCPTFNADSSIRYDARTYRLLSLDRVSLNTLSGRVVGQLVLGDFQRRYLYDTTWKIGGAELIRRADAWYLCITQSKAAPTPDEPTGYLGVDLGITNLAADSDGETYSGAEVQRVRERRYQHRRRLQLKNTRRARWRLRQNARHEHRFQKDVNHRISKALVYKAHTTRKAIVLEDLRRIRERTTVRREQRRVRHSWAFGQLRTFIGYKAQFSGVCVIHIDPRNTSRTCAACGFCDKRNRPDQAHFRCLSCGHTAPADTNAAVNIARVAVVNQPIVSLLGQSIERADTSRAVSTAAVS

SEQ ID NO: 22138 - protein, 387 aa, Escherichia sp.
VKRLQAFKFQLRPGGQQEREMRRFAGACRFVFNRALARQNENHEAGNKYIPYGKMASWLVEWKNATETQWLKDSPSQPLQQSLKGLERAYKNFFQKRAAFPRFKKRGQNDAFRYPQGVKLDQENSRIFLPKLGWMRYRNSRQVTGVVKNVTVSQSCGKWYISIQTESEVSTPVHPSASMVGLDAGVAKLATLSDGTVFEPVNSFQKNQKTPARLQRQLSRKVKFSNNWQKQKRKIQRLHSCIANIRRDYLHKVTTTVSKNHAMIVIEDLKVSNMSKSAAGTVSQPGRNVRAKSGLNRSILDQGWYEMRRQLAYKQLWRGGQVLAVPPAYTSQRCACCGHTAKENRLSQSKFRCQVCGYTANADVNGARNILAAGHAVLACGGCQQTG

SEQ ID NO: 22139 - protein, 387 aa, Yersinia sp.
MYRATKVRIYPTPEQAELLEKQFGIVRFVYNKALHIRSHWYKRHGVLLNNVKHIQPLLPIAKKSHSYSWLKQADSNSLQVALQNLDQAFKNFFEKRAKYPRFKRKHGSQSSYHCSSLKITADTIKIPKISAIRANIHREIVGKVKSITITRSATGKYYASILCDNGIETPAKPSKISRVMGMDMGLSHYAIMSDGVKVANPRHLINASRNLRRKQKALSRKQKGSANRKKARIRLAALHERVANARADFQHKLSRAIVDENQAVIVETLKTANMMKNHNLARAIGDASWHSFITKLEYKAVEKGVHLVKLEQWFASSKTCHCCGYKMPEMPLHKRIWRCPECGVEHDRDINAALNIRQKGILELKAAGLVVSAHGGQRKSVVQTVAA

SEQ ID NO: 22140 - protein, 414 aa, unknown
  TnpB Polypeptide
MIGKGSELKKNEMHEAFKFRLLPTKEQEVLLAKHFGCSRFIYNHFLAEKQKHYLENKETLKFNACQNMLIKQKKNEGYEWLKEVNSQCLVATLVNLETAYTNFFKKKSKFPKFKSKKNKNSFQIPQHISLKTSNTIRVPKFKEGIKIVKHRELKGKIKSATISKNPSGKYYISILCVVEKPIKHKKTGKSIGIDLGLKDFIITSEGQRYCNPKLIRKYERKLAKKQRILSRKEKGSKGRDKARIAVAKVHEKITNSRNDMQHKISSKLVKDYDLIAIEDLNVKGMVKNHKLAKAISDVAWSSFVTKLKYKAQWYGREVVVIDRFYPSSKTCSCCDNVKESLSLEERTWTCSQCNTIHDRDVNASKNILRRALSIKSSGTDDYRNGAEVRPEVVSKATKGTGDEVLKKKVYENTP

SEQ ID NO: 22141 - protein, 238 aa, Geobacillus sp.
LAVAITVEVQQREDTKAMGVDLGLRYIAVVSIGTKSLFFKGSQCAFIRRRYAALRRTLGKAKKFHMIRKIGRKESRWMKDRNHKISRQLVRFALANGVGVIRMEALTGIRKRATSSKEAGRSLHSWSFHQLQTMIAYKAEMAGIRVEWVKPTYTSQTCRCGHREKANRNGTRFRCQKCGYAIHADLNGAINIAKAISGFAAEPSALVTGAPPIGVHPNPMGRGDDTPLSLGVVRTRNG

SEQ ID NO: 22142 - protein, 380 aa, Symploca sp.
MYAIKVELKLNNKERTKMAQHAGFSRFIYNYGLSLMRQLDHKEFKGSSSKKIDEIQKTFTNFTKKQPEFAWTKKLSSRVYQTGFKSLKDAYSRWHKGLGKAPQFKRQKDRRSFTIVNGNGKVVLETGKRIKIPTLGTFRVKRSLDCRYVTGTFSVSETAGRWFVSFSVDAQKIPPLTHEVAEPVGVDLGVKCFATCSDGAKYVAPQPYQKAKNKLGKQQWRNRNKILGNRKQGIKASNNAKKHYVKLAKTHAHIANIRKDFLHKTTTEMSRKYAVIHIEDLNVAGMIANHKLASAISDLGFYEFRRQLGYKQKHYGNKVMLVERWYPSSKTCHNCGNVQPMPLNERTYECGECGQTAERDLNAALNLASVSSGWLKYLEP

SEQ ID NO: 22143 - protein, 396 aa, unknown
  TnpB Polypeptide
MENIVEIQGSNAQQMFLEQLTHRTKNRPEVKYDFSRDFYKFPSYLRRSAISEAIGKVSSYKSNLANWTANPIGKPPSITKAGNVYPAMFRDNMYVRIDDYTAKIKVFIRNTWDWLTISLKKSDVDYILRKCSFRKECVPTLQKRGKEWFLDFPFEEQVTLSQPPVEKRIAIAVDLGLHNACVCSAMMADGTILGRHFLSLPKEKDCLAHAINRIKKAQQHGATKMPRLWAKAKGINHAITSKTAQFIIDIVCFYHADVIVFEHLELKGKKHGSKKQKLHHWKCLDVQSIVANKAHRLGVRISRICARGTSSFAYDGSGKVIRDKNNYSMCTFANGKRYHCDLSATYNIGARYFIRERLKSLPETVRLGVEAKVPPCTKRSTCTLSTLIRLNAVLAV

SEQ ID NO: 22144 - protein, 170 aa, unknown
  TnpB Polypeptide
VSKGIVERYPHSLIGLENLTDIRERTRRKKGKKASVKQRKANARQSTWAFAELHSMIAYKALLHKSMTVKVDAHYTSQACPLCGHTSKDNRPGKGLLFVCQNCQYTLHADVIGARNVPLRTLLIRQDWMSTGVLSVRPDVSDSEAKAARLARYAELRWSPDTSPRLPDVG

SEQ ID NO: 22145 - protein, 530 aa, Arthrospira sp.
MKEYSADGTKMAQSRPSEPPLGNDDTTLSHILLPNQAVTNAKSLSMPELVAAPSSPTSTDRWPHCPTSTPKQKSSQKSEAGSTSRERKCWPDWDIICQEMSAWLSLPTQTDWQYGDLTCFDGSVSKTVAHSWFSTRQVSVQNQKWLRTSSLSSTASVPDYTDGVNTKLRSKKIRIYPSLELNQVWRKWLAACRYCYNQAIALSRSGKRLSKLKLRNEVMQSDLPAWVKETPCHIRQNAIFDAYLAFSASPDARFRSCRDSSQGIKFNNTNFSSGSWYPRLTKGLTFMVSEPIPKTCGQGTQLVFTKGRWLEIFPEPVAVTPTEANGVIALDPGVRTFITGFDGSRFLEFGSGDIGRITRLCQHLDDLMSRIAKEPCRSRRRRMRQAAQRMRTKIRNLVDEAHKQIAHYLTHNYSLIFLPPSRLPIWLPKVKRLIRSKTGPSHADMGALSIQTNPETSRGNNWDHSCRCDGRNTPTKTCTPGVMCIPSLGVVSKGVLYVLEVRVHSTQGLERCFWNLSKSFAGYRLCYLNG

SEQ ID NO: 22146 - protein, 379 aa, Agathobaculum sp.
MPVQKMNRAIKYRAYPTDEQASLIIRTCGCVRFVRNQMLSDARRFQEETDVFFIPTPAKYKTSYPFLKEVDSLALANTQLDLKGARKAFCKGNARAPQFKSRRKSKMSYTTNHQTRKRADGSVLHTVELDKNYVRLPKIGNLKIKKHRGPKKDWILKSATIERTRSGKFFVSLLFEFEMDITPVAVTKEKSLGLDYSSSNFYVDSNGDKANAPHCFRKMEDKLARAQQKLARMEKGSHHYEDQLHKIQLIHEKIANQRKNFCHTLSAVIAKQWAAVFVEDINLRGMAGSLKLGKSTNDNGFGMFRKMLAYKLAAQGKVFAKIDRWYPSSKACHKCGYINDNLTLQDREWTCPCCGTHHDRDHNAAINIRDKGLADLLSA

SEQ ID NO: 22147 - protein, 356 aa, Ureibacillus sp.
MLRAYKYRIYPTKEQEEYLSKVFGCVRFIYNKMLYDKIEHYKQTGKMLKNTPAQYKKEFPFLKEADSLALANAQINLEKAYKNFFRDKKVGFPKFKKKKGYQSYTTNNQNGTVAIINGHLKIPKVKTMIKIKQHRLFEGKIKSVTISKTPTGKYYASILVETEIEKLPNTDKKVGIDLGLKDFLVLSDGTKIENPKWLRRTEKRIKKVQRDLSRKQKHGKNYEKTRLHLAKLHEKIANQRKDFLHKLSSKIINENQVIVLEDLKVKNMQQNHRLAKAISEVSWSEFRKMLEYKANWYGREIIIAPQNYASSQICSECGYKNVEVKNLALREWKCPNCGTIHDRDINASKNLLKLAM

SEQ ID NO: 22148 - protein, 378 aa, Halomonas sp.
MLKATKVRIYPTTEQAGMLNRQFGSVRFAYNTGLRIMSHRYQRHGESLSAKHHIKKLLPVAKKSRKYGWLKQADSIALQQACINLDKAFQRFFDPKQKASYPRFKSKRGRQSSYHCVGVKAGDSWIKVPKLKAIKARIHRPIAGKLKSITLSRTVTGKHYASLLFETEQAEPAPLMDIEAANVVGLDMGLSHLAIDSNGTKTANPRFIKQAQKNLKRKQQSLSRKTKGSAKRAKARLLVAKAHERVANARNDFQHKLSRQIVDDNQAVIVETLKVKNMMQNGKLARHIGDASWHALITKLAYKAKEQGKHLVKIDQWFPSSKTCHACQHKMASMPLNVRSWDCPHCASSNDRDINAALNIKCQGLIQLKAEGLSVSAH

SEQ ID NO: 22149 - protein, 374 aa, Halomonas sp.
MTKRAYKERFYPTPEQALLLAQSFGCARFVWNNTLNYRTEAYQQRDESVSHSVAEKRLVALKAEHPWLKDVSSVILQQTLRDQKAAFDNFFNPKLKARYPRFKCKDGRQSIRLTKAAFRYRDGEITIAKTKVPLPIRWSRPLVSAPSSITLSRDRAGRYFISCLCEFTPKALPIIPNTVGIDLGLTDLFITQDGQKSGNPRHLKRYEAKLAYLQRRLAKKTKGSNNRHKLRQKVARLHARIADCRRDAIHKATRTLINENQVICVETLNITGMIKNRALAKAISDAGWGEFVRQLTYKAEWAGRQLVQVSQWLPSSKMCHGCGHKVKKLPLSQRHWHCEGCGQAIDRDINAANNIRTAGLAGLACGATGSGAAA

SEQ ID NO: 22150 - protein, 251 aa, Halomonas sp.
VPKLKAIKARIHRPIAGKLKSITLSRTVTGKHYASLLFETEQAEPAPLMDIEAANVVGLDMGLSHLAIDSNGTKTANPRFIKQAQKNLKRKQQSLSRKTKGSAKRAKARLLVAKAHERVANARNDFQHKLSRQIVDDNQAVIVETLKVKNMMQNGKLARHIGDASWHALITKLAYKAKEQGKHLVKIDQWFPSSKTCHACQHKMASMPLNVRSWDCPHCASSNDRDINAALNIKCQGLIQLKAEGLSVSAH

SEQ ID NO: 22151 - protein, 513 aa, unknown
  TnpB Polypeptide
MVKAKQDKKSYHVVTRRILTTDFQARKIDKVMDAANNLYNMGVSYYAPIVKTLMADPWFQYLLKKYRQWQDENPDSDKTNPYQAEVSMWIATLELREFDLQKWFGNIASKSFSKCINSAIVQKIATNLYSSIRKVIFSSGKHVHYRKQGGTNSLEGKSNVNGIIYKESTDTVSFSKMKLSLKPVREKDHYMQEALTSGKVKYCRIVRRTFKNGYKYFVQLIIEGPAPKKFVVKQGETGQDPGISTSTFYGDNYCGFETLSKGCEKYEKQIRQASIKYERRRRMANPQNYNPDGTIKGGIKLRWNWTKGIIEALFELKDAYRQKSEHVKNYNGWLSNRIVSVTSVLHQEQMNYPALAKRSKKPAERSDKASKIKTKKGVEKTVHKFKRKRRFGRSVLRRAPGMFDKMLRDKVVRYGGKVIALDPWQTASSQVDHITGQKTKIPLSQRTKKVGDKKVQRDFYSSFLNRYTDENNVLDRSLCKKNLSTFLERQRDVIHKIRQEGDRTGNFGLADFV

SEQ ID NO: 22152 - protein, 375 aa, unknown
  TnpB Polypeptide
MKTYKYKIGHQSNTIRLGNLLDDMWQVHVYFHEWQRQRYKDGLPYASYAAMCAHLTELKRTTHPHWNALPSQAIQEELKRIDRAYQRFFNKLGGRPKIKKRHKFKSFTLKQTGYKLKDNRITLSFRKWDTGKWRFDRVPYTFHKHREFHGTLKRITIKRDNCGDYWLYIITDFVDTKFLPTTGQSVGADFGMKDAYLTLSTGDKIQHPQPLKSNLKKLRSLNKALSRKQKGSNGWWRCVRQVAHLYRKISNQRKDFHWQLASKLCKKFDTIVLETLNLDGMKRLWGRKVSDLAFYQFVEILKYKCQKHKRLLEQVGQWTATTKPCNDCGFHNETLTLSNRQWTCPECGSHHDRDINAAINILQAGIPVKVSARYA

SEQ ID NO: 22153 - protein, 375 aa, Hydrocoleum sp.
MSKLTLTLKLPFYRLNACKAAEFERLTLLNTEVANTLLRVEKSERRKYTSKDFHHVEIGSMWINQTIRNTCAQTKVKKFKRLPIELNNQGYRVSRQGNLFTVSLSLYRGQKKRIPLAVHSASHQETLAHIINGEALLGSLKISKSRKGIWYALISVSMDVPDAELVNGWIGVDRGQNNIAVAGLPNSFGKFWSGKQVKSLRRKYQKLRSLLQESKKLRKVKEIERRERRIMTHINHVISKQLVQFAQDYNMGLRFEDLSGIRQSSLQRQKIKSDASQNRDYWAFYQLELFTSYKAVRAGVPVESVPAPYTSKSDHRNGVIGKRVKHTFTGVDGYTCNADWNASQNIGQWLGFSCPINLCLRQASPTESCICNGWG

SEQ ID NO: 22154 - protein, 598 aa, Ezakiella sp.
VNILLVSKVEKIKVKLDNKNIKKYVRTCRIFNREYNSVLSELLTEKYSLPTREEWDDLISDIVHLKKEIKSLKSRKKTEDEIFEESKEALKLFKGEIIENKTEANNKLLEEKEKQLELLLEHKNNIQILANNSNITNTTINYVMGGSSFDSYLKSYFQRILVTSIDRFKAKPKNKSNTEFNKPLAGLPKYRKISTPITLEFTNQSYRFLKNNKNKITGIKLGTLFPNIKFRSKLSDEFLNNEIKINNIALTPVSQYSIIDGKFYILINYEYENLRPLPNFINKVGIDVGLSDLVVTSDGEKFNYPEGVLEKIEEKRTRLQSILSIKKNKNKYWKKSKRYKKLKNRIDKLYAKEKNIREDFAHQVSRYLVNKYDVITMEDLNIQGMLKNKNLSFKIANASWNRLAILLEYKSKNNNKIFRKSYRFYPSTKICNNCKTESEIFKGPQSLSIRDWICPTCGTHHDRDINAAKNIRDWEPESENAISKTYKMIEKVRKSQLRDFTNWIVFSTYLDILRKDNNRKTLNKLLKLSNIKELNQEDLNYIDELLEKDKTRQNRKYDLSNNKIKELKGLKQISQLENKLRVEQLNRICLRLETLNIK

SEQ ID NO: 22155 - protein, 380 aa, unknown
  TnpB Polypeptide
LSPTVRQRAALAGLLGLQCELYNAALEERRGAWRWEHRSVAFFDQCRTLTALREVRPEVLGSGVTVCRGTLRRLDWAFSAFYRRCRAGQRPGYPRFRSRSRWDSLQWEDRSGWRLDPAAKRLHLMGIGGIKMRLHRPIRGTPKAITVRREGRRWWVTIRCVDVPGEPLPPTGRDVGIDLGVNVLVATSDGTLITNDRHAERAAHHLARAQQRLATKQRGSQHRHRAVERVAAAHRRVRNRRADTLHQLSRRLVNDHDLIVHEQLAVAKLVRRPKPKPDGAGEYEPNGARAKTGLNRCIHDAGWGQLLAMIAYKAESAGRTVIAVDPRNTSRTCAHCGHVSAGNRRGAVFECQACHHEAHADTNAAINILRAGRARQPRAA

SEQ ID NO: 22156 - protein, 412 aa, unknown
  TnpB Polypeptide
MRRAVKVRLYPTPAQESLFARTAGAARKVYNLGLGVRKDFYEQDSISVSTNDLMKMLPLWKEEFPYLGEVSDVALQQSLRNLDTAYTNFFKACKGEGKARFPRFKTRNSRVSFRLTTNGFRVKDGQLFVAKSKEAVPFKDANYTIPGDASSVTISRDAAGRWQASFLVDDVVSHPETTGEKIVGIDLGVKTLAVTSDGEEFANPKHFDKHARRLAKYQRQTARRKPKPGQKASANYRKAQVKAGRVHAKIADSRRNAIHQLTTNLAKRYDIIIIEDLNVAGLIKSKRMSRLIADAGWGEFRRQLEYKTEWYGKKLVVIDRFSPTSKTCSVCKNVNKKLMLSEREWACTGCGALHDRDLNAAKNILAAGLAVLGSNAQDACGGNIRPGPDSSGTGSPDEAGKSSKQRSALSAA

SEQ ID NO: 22157 - protein, 368 aa, Megamonas sp.
MKTYCFKLYNSKRNKKLHRQINAAGLIYNHCIAIHKRYYRLFKKSLHKFVLQKHLTKLKKRAKFSYLKEIGSQSVQNITERIDRAYKLFFRNQKHNVRSASPSFKKIRKYKSYTLKTSGWKLLGGNVIRIANQKYRYFKSRDIDGKVKTVTIKRDALGDIYLYFSCETNENEVLTRTGESVGFDFGLKIFLTGSERENIISPLFFKQNAKLIVKANRNLSRKQKASNNRQKARLNLARLHKKVTNMRRDFHWKTAQYLTGKYVLISIENLNLKAMQKRFGRKISDLGFADFVNKLKYETQKAGSNVVEVGNFFPSSQLCSNCGYQNKELKELRIREWTCPKCGKHHDRDLNAAINIKKEGERIFFSRK

SEQ ID NO: 22158 - protein, 552 aa, Shigella sp.
  misc_feature (9)..(154): Xaa can be any naturally occurring amino acid
VRSFSVASXXXXXXXXXXXXXXXXXXXXXXXXXXXXXXXXXXXXXXXXXXXXXXXXXXXXXXXXXXXXXXXXXXXXXXXXXXXXXXXXXXXXXXXXXXXXXXXXXXXXXXXXXXXXXXXXXXXXXXXXXXXXXXXXXXXXXXXXXXXXXXXXXXQAFKFQLRPGGQQECEMRRFAGACRFVFNRALARQNENHEAGNKYIPYGKMASWLVEWKNATETQWLKDSPSQPLQQSLKDLERAYKNFFRKRAAFPRFKKRGQNDVFRYPQGVKLDQENSRIFLPKLGWMRYRNSRQVTGVVKNVTVSQSCGKWYISIQTESEVSTPVHPSASMVGLDAGVAKLATLSDGTVFEPVNSFQKNQKTLARLQRQLSRKVKFSNNWQKQKRKIQRLHSCIANIRRDYLHKVTTAVSKNHAMIVIEDLKVSNMSKSAAGTVSQPGRNVRAKSGLNRSILDQGWYEMHRQLEYKQLWRGGQVLAVPPAYTSQRCAYCGHTAKENRLSQSKFRCQVCGYTANADVNGARNILAAGHAVLACGEMVQSGRPLKQEPTEMIQATA

SEQ ID NO: 22159 - protein, 470 aa, Rivularia sp.
VYKTVPIKAKFTDEEKAFWVDQCEHSNSLYNSAIYLARQNHYAMLLERKANTTYWCGDELRSGWKTYRLETNYYHLDKQLKTCIHYFSLAAQAAQQTLKLVGESITSYNKLVDKYYLGDGSRPSIPKYRKSGGLFAVTFPKQALACHNGYIYPSISKATKPELITSIKLILPEFISFDWIKEVIIRPSRGEFWVDWVIDDGKQPIINNKSLNYNHAISIDHGVKFWLSAVTTLGKSFIVESPQLKTALHKYRNQVQQHKKNKPSRYWDNYLDRITAKRNLQVRDAVNKAARFIINKCLKDGIGNLVIGWNEGNKTNINIGRNNNYEVVSMPTKRLIERLRQLCEEYGIRFHITTEEYTSKASFIDNDELHQYGAKPIEWKPSGKRISRDVYRTKDGLLIHADLNAASNILRKVADQIFINSGIAKLAFEIIKRGALTHPKRYDIFSNLKRSYRKQTMSRSMSLDYGVTTA

SEQ ID NO: 22160 - protein, 402 aa, Rivularia sp.
MVVFEAKLEGQSEQYRKLDEAIRTARFVRNSCLRYWIDNKGVGRYDLSKFCAVLAAKPEFPWVSKLNSMARQASAERAWSAIAKFFDNCKKKKPGKKGFPRFKKEQTHGCVEYKTSGWKLSEDRTNITFSDGFKAGSFKLWGTRDLNFYQLKQFKRVRVVRRADGYYAQFCVDVERIENRQPTGKTIGIDLGLTHFYTDSNGETIANPRHLCKSEKSLKRLQRRLSKTKKGSKNRVKFRNKLARKHLKISRQRKDFAVKTARCVVKSNDLVAYEDLQVRSMVKNRRLAKSISDASWSLFRKWVEYFGQVFGVVTVAVPPHYTSQNCSNCGEVVKKSLSTRTHVCPDCGHTQDRDHNAARNILEKGLSTAGHVGTNASGDINLCLSEETPSNKSGRRKRKPKK

SEQ ID NO: 22161 - protein, 433 aa, Rivularia sp.
LREKALLGMTKAKTSSFITEVPLVVDSFLERKLEARFQAARQLYNACLNEALRRLERVRKSTPYLRARELSKTKKKERRELFKQARDGAQFNEYSLHRFATVTAKQSKWIAKNVDSNTQQRLATRAFQAAHKILLGLSSKVRFKVPSRFRSVEGKSNKQGLCWKEEQVQWCGLTLEPIIDWSNRVVTHGLRSKIKYCRLLWRNLNGKKRWFVQLVNEGLPYQKPQNYVTKGVVGLDVNISNVAFVADEQAGLLPFADKVPTYEREIKVLQRKMQRSMRSNNPDNFEPDFDKKVGNRVVTKKGKVLKGRRPWKRTKNYRTLALHKAELERRKASYAKCQNRRLVNEILRHGNEIKTEKVSIKGWQKRYGKAIAAKSPGFFQSEIKRKAENAGGCFLQFSTQTTALSQTHLDGTRIKKISLRASSSRCYRGYNAS

SEQ ID NO: 22162 - protein, 485 aa, Rivularia sp.
LTGRGTVEFLSISLFGSRSIQSSTICVTVLSLFAAYCLILFNLRSDILTFNLVVFITLSTHCYHSSVIISITADEKQVRTAYQYKLRPTKQQAQDIDRWLSMCCAQYNYLLADRFNWYEQNRCPINACPLICYLPELRDKPEYFGQKRTLPKLKETHPHYKDVYSDVLQDVVKRVKVTFDRFLKGDSNGKRSGRPRFKARNRYRTFLYPRVKPDCITNGKISLPKLGNIKVLKHRQIPDGFKIKTVSITKKADGYYVTLSLEDETVPTIKPDFNPDSIAGIDVGLKEFLTTSEGDNVAIPQHYRKSQKRLRVIQKRVSRRRKGSNKRLKALKQLGKQHKKVADKRKDFHFKTANNLLKKYDVVAVEDLNIKGLARTRLAKSVLDAGWSSFLSILTNKAEKAGLLVIPVKASGTSQDCSSCGVKVPKKLHERWHDCPHCGCSLDRDHNAAINIKNRAVGHPVLKAKSLLSNSRIVLEAYTVLEESV

SEQ ID NO: 22163 - protein, 505 aa, Rivularia sp.
MGIKTFTAELQKPLVPFAIKYSKKHKATRNRAMRLVTGDLSKTKQNQELQKLGYNKRQANSLLIDIEGKIGSAKECREAHIETLEGKIKSAEEQITEWEEKLGKLEYACCGVRRNQFKSRQHELRFKIHHKRRYVLAQKRKLEKLREAPIQVNFGTEYNFSLVGSQGESNGNQICQYDSKKKSLKIRVPAEFESEFGKYVSANLEFAYGQDCIEAALMRRSVNRKNLETIPAGKGESLSWRIFFKNNRWYIAVSIEVTEVPLQSKPVRYGCIGVDLNPGVVGWCYVDFNGNPVAKGQIKLNLHSRRSGQVKAELSDAIKQLILLAQLYGCAIVIENLSFSAKKKRMREEGRRYSRMLNFFAYSTFNEVLQSQARKGIQVIKVNSAYSSLIGLTKFMSLYGMSSDTAAGLVLARRAMRLSESVPTHFALPAVMVVGRHVWSSWYRINKSLGSVRRHEFFNQQTLTAYLSHYSTSGKLVEVGKSEVIPVEEPSENLGCNPELVVKVG

SEQ ID NO: 22164 - protein, 376 aa, Rivularia sp.
MLLGFKTELKLNNNQRTVLLKHCGVSRHAWNWGLALTRAILEHNKINPDSKIKFPSAIDLHKYLIALVKSENPWYYECSKSAPQYSLRNLSTAWKRCFKKVSGQPRFKKKGKNDSFTLEGTCKTIDSFTIQVPRVGKLKTYEKLPQRDKIKSVTISRQADRWFISFKIDTQIQENRKARGTEDSVPQTLHNTTVVGIDLGVKVLATLSTGEVIEGAKSYRTFKAKLSRLQWLNRNKIIGSKNSRKTQLKIARLHRKIANIRKDTIHKFTSLLAKNHGTIVIEDLNVSGMMKNHKLAGAIADMGFYEVRRQLEYKCKMYGSKLVVLDRWFPSSKTCSNCGHKKEILSLSERLFDCENCNFTAYRDLNAAINLCKAVS

SEQ ID NO: 22165 - protein, 303 aa, Rivularia sp.
LKGDANAKLAGKSTLSGRLRGKKSGRPRFKGEGQYKTFTYQQFKQHHFSNKVIKLSKIGDVKVIVHRPIPDGFTIKTVSVTKKADGYYVTLSLDDKTVPTIKPDFNRDNIVGIDAGLIDFIVTSNNERVAAPKYLRKAERKLCKAQKRVSRRKKGSNRRKKAIRKLSKQHKKIADTRKDFHFKIANRLLKNYDVVAVEKLNIKGLARTRLAKSIHDAGWGQFISILTNKAENAGLVVIKVLPHGTSQECSNCGHKVKKPLSQRMHNCPVCHTSICRDQNAAINIRNRGAHDLYKQAQFMSRVA

SEQ ID NO: 22166 - protein, 413 aa, Rivularia sp.
MATKRITFRLYPSKTQNDKMHYWRRLHKDLYNACIEHRKISYKKFGKPISYYDQQNCLPDFKEEWGEYKELGSHALQDTIKRVDFAFKWFFKLKSGYPKFKASRRYKGWTYPCKSGWKACTNGKNGYLKISNLGNIKVRGQARDWGTPKTCTIMFKQGKWYASITVDCIPTRPTTDTGAIGLDFGTHHAIADSNGGVIDNPRFVKTAQVKINKIAKTSRRKRPPNFRRKVKASRRWKKANKAVAKIQSKVARQRQDWQHKVSTQIVSCNSLVATEKLNLKGMTRKSKGKNKRQKSGLNRSLLDVGIGNLKDLIKYKVTEAGGFYIEVPTKKVKPSQTCPNCGHQKKKTLAQREHYCEKCGYRCDRDVAAAMVMLNHARGMECASTDSDELTSTWCGSFKQVAQVKSQKRVSQR

SEQ ID NO: 22167 - protein, 507 aa, Rivularia sp.
MARSKTPSFVTEISLKVDSKQEKELSSRFQAARQLYNACLNEALVRMNLVKNSELYQQAKKLRGGDKKKRQDLFNKARETHRLSDYALKTFATQTANRSKWISSNLGAHEKQTIGTRAFKAVDRILFGQAKKVRFKVTTRFKSVEGQSNATGIRFINNQVLWKKLILNPIIDWNNPVIVHGLNSPIKYCRILWRNLNGKKRWFIQLINEGLPYQKPQNYVIKGIVGLDVNIAAVAFVADKKAGLLPFAEKVPTFEREIKALQRKMQRSQRMHNPDNFEPDFDKKVGNRIVRKKGKVKKGKKQWIKTKNYRRIQVRKAELERRKASYAKSQNRKLVNEILRHGNQIKTERVSIKGWQKIYGKAISAKSPGYFQSELKRKAENAGGYFLTFSTQTTALSQTHLDGTRIKKKLSERVHRDVTGIQPMHRDLFSAFLSRCVYNNKLSLWDAQCEYPGTEPFLLDGWQQSQSANRVAERESRNSYSSSEQMSNEALTSNQISQKDYKLEGNA

SEQ ID NO: 22168 - protein, 524 aa, Rivularia sp.
LGEKALLGMTKAKTSSFITEVPLVVDSFLERKLEARFQAARQLYNACLNEALRRLERVRKSTPYLRARELSKTKKKERRELFKQARDGAQFSEYSLHRFATVTAKQSKWIAKNVDSNTQQRLATRAFQAAHKILLGLSSKVRFKVPSRFRSVEGKSNKQGLCWKEEQVQWCGLTLEPIIDWSNRVVTHGLRSKIKYCRLLWRNLNGKKRWFVQLVNEGLPYQKPQNYVTKGVVGLDVNISNVAFVADEQAGLLPFADKVPTYEREIKVLQRKMQRSMRSNNPDNFEPDFDKKVGNRVVTKKGKVLKGRRPWKRTKNYRTLALHKAELERRKANYAKCQNRRLVNEILRHGNEIKTEKVSIKGWQKRYGKAIAAKSPGFFQSEIKRKAENAGGCFLQFSTQTTALSQTHLDGTRIKKSLSERVHRDVTGVTMHRDLFSAFLSRYVYGDQLSLQDALREYPRAEPLLVDAWKRSLVGEVSPTELRQYQQTARQVGASERKNYHSSSEQLSTQVLTSNQITTKAVKS

SEQ ID NO: 22169 - protein, 249 aa, Rivularia sp.
VYKTVPIKAKFTDEEKAFWVDQCEHSNSLYNSAIYLARQNHYAMLLERKANTTYWCGDELRSGWKTYRLETNYYHLDKQLKTCIHYFSLAAQAAQQTLKLVGESITSYNKLVDKYYLGDGSRPSIPKYRKSGGLFAVTFPKQALACHNGYIYPSISKATKPELITSIKLILPEFISFDWIKEVIIRPSRGEFWVDWVIDDGKQPIINNKSLNYNHAISIDHGVKFWLSAVTTLGKSFIVESPQLKNCTP

SEQ ID NO: 22170 - protein, 373 aa, Rivularia sp.
VDAGDIPNKRCSIDRCSLVCYLPELIEQPNYYNQKASLTQLKKEHPWYKDIHSQVLQEVPKRVEKAFDRWLKGDANAKLAGKSTLSGRLRGKKSGRPRFKGEGQYKTFTYQQFKQHHFSNKVIKLSKIGDVKVIVHRPIPDGFTIKTVSVTKKADGYYVTLSLDDKTVPTIKPDFNRDNIVGIDAGLIDFIVTSNNERVAAPKYLRKAERKLCKAQKRVSRRKKGSNRRKKAIRKLSKQHKKIADTRKDFHFKIANRLLKNYDVVAVEKLNIKGLARTRLAKSIHDAGWGQFISILTNKAENAGLVVIKVLPHGTSQECSNCGHKVKKPLSQRMHNCPVCHTSICRDQNAAINIRNRGAHDLYKQAQFMSRVA

SEQ ID NO: 22171 - protein, 383 aa, unknown
  TnpB Polypeptide
MFIFKQSYQQTKKWLSYQQLDKKLKTEDCYKVLPAHTAQHTLKLLTRNWKSFRRARREYKTNPKAFLGKPQPPKYKPKNGQQVAIFTNQQALIRDRKLVLPKKVPFSIKTRLPDHITLKEVRVIPRTVGYTIEVVYSKLVPELEVNRTNIGAIDLGIHNLLTYVDNLDGRPIVVKDEGKGIKSAIRYYLKEVKKLQKKYAKQQKVALKQKNKLVYGKKFHQLRETKRRRVRNWIHQMSSKFVKHWVETGIQRVYIGYNPEWKQQVRLRKKTTQMFVILPFDSFIQALKYKAEEHGITIERIEESHTSKCSFLDNEYPRKHWRYKGKRTKRGLFRTANGTLINADVNAAYNILLKGEPQALPRRSVGGVGGYVIYPLRWCFERC

SEQ ID NO: 22172 - protein, 374 aa, unknown
  TnpB Polypeptide
MKTLKFKLYQHKRNRLLKRSINATGVIYNHCIALHKRYYRMWGKHLNCAKLQAHIAKLRKRQEFWQLVGSQAVQDICQRIERAYQLFFKHHKKGVRPPNFKKVRKYKSFTLKQAGYKFLGGNRIKIGQKVYQYWNSREIEGKVKTLTIKRTPLGELFIVVVVDDIVGSKAKFEMSKIAGFDFGLKVFLTVSNGTQIESPQFLRQSLTVIKKANRQHSKKVKGSANRERARKNLVRKYEDVVNRRSDWFWKLAHDLTDRFDILCFETLNLRGMQRLWGRKISDLAFGEFLQIIEWVAYKKDKQIVFIDQWYPYSKTCSNCGHVLKELDLSVREWRCPSCQSINGRDENAAKNICAVGASTVKLGDVRQAMPAIAV

SEQ ID NO: 22173 - protein, 471 aa, unknown
  TnpB Polypeptide
MLNSISITLESDIKNIEEVEPILQKYCALYSSIERILFNELKNNSNSSFLFNELQREYIVKHNIHARLFKSLFRKAIGRIQSLKSNQVNYKIQKQVKIKKLYKKLFKCKNRKYRFYVKNKINKLNQQIKSKKEIQSVWGSKKLFKSQWTNEKYINSRDEWENEWKIKRDYNMFVIGSSDENFGNSLCQLQSLKKIRMTLPKSFEEKHLDIVVDFDKSKKIYKYLQDAIANKRALTHRIFQNSETKKWYVQISFSIENECADLNNGTIGVDINYNVISTCRIKKDGNKEQFKNYNFNIDKDDLDNNRRILSEIVNRIVDDALENKKTITIEEINLKHVLKNEKISLVCYNNFISLLRARCIKKGILLIEINPAYTSIIGGLKYQKRFGVCRHQSASYVMGRRGLNYIERVPPEYICLLQSEEKDKSLLDRWGSINKRLQKVSHEEKSLYLHSVYRDLPTCDLESYSVSFANK

SEQ ID NO: 22174 - protein, 311 aa, Blautia sp.
MLTELKKQEEFVFLKAADSIALQQSLRDLDRGFVNFFEKRASYPTFKSKHNRFQSYRTVNQKDNIRIVGRYIKLPKLGFVKIRQSMEVEKINHVIIEHTPAGKYFAVLNVDFEPEPRSNAGGTIGIDVGIKAFYSDSNGNTVSNPRYLERSMRKLIREQRRLSRKQKDSHNREKQRIRVARVYEKVTNQRNDFLQKQSTMLVRENQTICIEDLNVKGMIRNHKLSKSIASVSWAKFFEMLEYKAGWYGNEIHRVPTMYPSSQTCSCCGYRNPRIKNLGIRIWECPKCHAVHDRDTNASINILKKGLQMQSA

SEQ ID NO: 22175 - protein, 418 aa, Blautia sp.
MLLSHRTSVKIRPEYSNIIGHMCYAASKLWNVCNYERHHYKELGLEKYPDWYYQKKAHKGDLWYRQLPSQTAQETCKQLDKAWRSFYVLKKTRGIKDPNPPRFKQDNIPVTYMQMGIRHEKGSDQLRLSLPKDLKSYMEETYGIHEKFLYLENKIFRDMDHIKQLQIYPPENGKCDLIVTYEIEGPEQLSQNGHYLSIDPGLHNLMTCYDSGNGRTFILGRRYLSLERYFHKGIARVQSVWYAQQSERGIKYPRSSKHIQRLYRKKQNAVKDYLHKVTRWIAEYCRKEDIRCVVVGDIRNIRKEKDMGHKTNQKFHGLPYNRLYIMLGYKLKLYGIQLIKQEESYTSQCSPLSPEVSKRYAEALNRKERGMYITDGVSYNADAVGAFNILRKYLSVSGKEKTLSVTGLKNPEIIKVAV

SEQ ID NO: 22176 - protein, 334 aa, Solibacteraceae sp.
MLRNRGEASSKYYPELPSVVSKSLIAKYQRNRKCKTASNLIIPICADKERQIRFEGGGVRIFAVFGKEILPLALVHPCVADAEGRRNISAEFFMRGGEWYGAFSYRTPAAPRFQPTGMIGVDRNSVGHVATMADPQTGKVLHLGFNPARTKASWRGRNKNLQRQGKNRLLCKIKRRQSRRTKHETHIVSKVIVDYAATHRRTIAIEDLEDVRAKGSKIRSYTERSQWAFYQLLQFILYKAALRGVEVIQVAPAYSSQECSQCHGPTKPAGKKFACQHCGHNDHRDANAAFTLALRVEPIGGIARYSEGSRWGVLVTPFPGSIGGHRAGEAATCQ

SEQ ID NO: 22177 - protein, 329 aa, unknown
  TnpB Polypeptide
MREYSRTVNLYINKFWKDDVRKMDLRKDRLNSVKSWFTQNIKQDASIEAINIIGLMKHHVGKKPRHKVGSMCLTSNTIKCQDSGTEEFDLWLHLRGIGNKIIFDVPIKKHRHFNKLELIGKRLNSYVITKDYVTFSFEIETGPKKDVKEIVGMDTGIDTLATLSNGKQFGGNIKESIKRINRCKHGSNGQKRATSALRNKMSYIAKQIIGSGMDMIVIESLKNITQKTKMKGKIVKNTRKLIGRWNVRYFQDRIRQLSELNRISFRTVYPAYTSQTCSSCGSTDRKNRNKEVFKCKSCGYEANADINAAVNIRSRFLLGKYGSQYKHIN

SEQ ID NO: 22178 - protein, 380 aa, Aerococcus sp.
MYQGIECKIYPNEKQRQLIHMTFGHTRFIWNEMLAMLNARYENNPDLQMLSYNALSSLIPQMKKEYPWLREVDSVAVQCSVKRLSETFVRFFKGYSKYPKFKSKRNTRQSYLSTIRGNNIRFNDNQRYIKLPKLGWIKCKSSVLHIENERIKSVTVKYTPSGDYYISILVTSDNQAMPKTGNVVGVDLGLSDLAITSDGQKYQSQRLHLSYKKQLHYWEKRMARRRLQAKKNGVDLVDAKNYQQAKRQVARIHQRIKNIRKDYIHKITTDMVKSYDVIVLEDLKTTNMMKNHQLARSIAGQSWRMFRTILEAKCEMYDKTFVAINPYKTSQKCSNCGYDSGKKALNIRHWTCMKCNMHHDRDINAAKNILNIGLERALVK

SEQ ID NO: 22179 - protein, 324 aa, Klebsiella sp.
MKRAYKFRFYPTPEQAELLARTFGCVRFVYNSILRWRIDAYNERKEKMGYVQASARLTALKKEPEFAWINDVSCVPLQQSLRHQQTAFTNFFAGRAAYPAFKSKRHKQAAELTASAFKYRNGKLYMAKSKAPLDVRWSRELPSTPSTVTLSRDVAGRYFVSCLCEFEPVSLPITAKTVGIDVGLKDLFVTDTGFKSGNPRHTAKYAARLAQLQRRLSKKARGSKNRAKARLKVARLHAKIADCRLDALHKASRKLINENQVVCVESLKVKNMLRNPSLSKAIADAGWGNSRASSGTKANGPGVQWSQSTGFSRLQNAVAVAVSP

SEQ ID NO: 22180 - protein, 493 aa, Rhodococcus sp.
MARFQVPDGSTAQAYKFALDPTPAQVRTFRSHAGAARKAHNTMLAAVKAALDQRHAERTYGLAEDELTPALNWSLAGLRKAWNSRKHVVAPWWAENSKEAYNTGLDALARGLEAWSKSRKGQRAGKAVGFPRYKTARSRRSVRFTTGTIRVETDRHHVTLPRLGRIRTHESTRKLARRIENGTARILSATVSEDSSGRWHVAFQVLVQRTVEVPGHVGLGEPVVGVDVGVKADSLIVVATPDGREVDRISAPKSLSAAQARLRALQRRAARQRGPYDPATKTKQTPSNRWRKTQRRIGRAHAHAAAVRLDVLHKATTALARRHRVIVVETLNASGMRSAGGAYKRGLNRALADAALAQIRRMLSYKTRWYGSTVVEADRFFPSSKTCSGCGRRKPNLTLADRMYVCEHCGVMIDRDRNAAINLARLGETHRTGDTGTGTGSSSAATDSGGDGRGAMQESATTRVVDAAGEEASTRHDNTVGRTGTASSEGEAA

SEQ ID NO: 22181 - protein, 345 aa, unknown
  TnpB Polypeptide
VEHAYKFRIYPSAEQQRLIERTFGCCRYVYNHYLEQRTRAYRETGRAPTRFEQERDLTLLKRQEATLWLSEADVTALQSAIKDLDTAFQGFFRRVKNGERLGYPHFKSKRSPRQSYKSKRSGTNIKLLDGAVQLPKLGKVKCRVSKAVEGRILSATVSRNHTGKYFVSICCTDVVHQPLDKTGAAVGIAAGVDAFAVSSDAATYAYPDSLGRSYKKFARLKKSLSRKSRGSNNQRKAKAKAERMFERITNQRADMLSKLSTELLRSYDLICIESSPSGITREHSKALDADWRELRQKLRYKADWYGKRVVEVDASLLPLRELSAAQDQSSGAAATILNEGLRLLA

SEQ ID NO: 22182 - protein, 369 aa, Clostridioides sp.
VEKAYKFRIYPNKKQQELINKTFGCCRFVYNKYLAKRIDVYKNNKETFTYKQCSSDLTNLKKELNWLKEPDKFSLQNALKDLDNAYKKFFKEKAGFPKFKSKKINRFSYKTNFTNGNIMYCGQHIKLPKLGMIKIRDKQVPKGRILNATISKEPSGRYYVSLCCTDVDIEAFENTNNQIGLDLGIKEFCISSCGEFIENPKYLKKSLKKLAKLQRELSRKTIGSLNRNKARLKVARLQEHIANQRNNFLQKLSTKLIKENDIICIEDLQVKNMIKNRKLSRLISDVSWSEFIRQLEYKANWYGRQIVKVGKFFASSQICNKCGYKNEEVKDLNIREWICPSCNETHDRDINASINILKEGLRLITIQNK

SEQ ID NO: 22183 - protein, 371 aa, Bacillus sp.
MSTITAKIQLYIPNDQVEILFRTTKTYREACNFLSGLVFTTKELNQRKLNDLYYYELRERFGLKSQMAQSVMKTVIARYKSTQSNGHDWGLIKFKLPEYDLVWNRDYSLNQNLFSINTLGGRLKLRYEKQGMQHFFDDHWAFGTAKLVHKHKKWFLYIPMTKEIPELEFTDVNNIVGVDLGINFLATTYDSQNKTTFYNGRTVKHKRGQYKALRKQLQRRQTPSARKRLKQIGSRENRYVIDVNHQITKALVSKYPKGTLFVLEDLSGIRAATEKVCVQQRYVSVSWAFYQFRQLLEYKAQLYGHQVIVIDPKYTSQACPKCGHVERGNRNKKMHTFECRNCSYRSNDDRIGAMNLYRKGIEYIGTVTTGV

SEQ ID NO: 22184 - protein, 340 aa, unknown
  TnpB Polypeptide
MLEDKISYYKETGLTLYNTPAQYKNQFPWLKEVDSLSLCNEQLNLQSAYNKFFRDKSIGYPKFKTKKKSKLSYTTNSQRGFIKIIDNKYIRLRKLEKVKCKIHRQIPPTHIIKSVTITKTSSDKYYVSVLTEFQKDGINAQLDKNKILGLDYSSSSFYVDSQGVKADYPKFYRETERKLSKERHKLSKMEYGSNNYLKQKIKVAKLYEHITNQRKDWIHKLTTNLANTWDYICIEDIDLKSISKTLKLGKSTYDNGFGIFRTILKYKLEDRGKQLIKIDKWFPSSKMCNHCGYINSELTLSDREWICQCGKILDRDVNAAINIKNEGVRMITVGTTEIVC

SEQ ID NO: 22185 - protein, 495 aa, Anaerolineae sp.
MIRRSAPKKTLRYRLHLLTPQSGAWLVETKKLFNHSAEWYFGVFEAYPDFLNLKSNEVVPTIEKKTHRTKHNPRPKIAPPAEIDALPAYVRRAAIMAALGSAKSFFSNLNQWKDQKEKFEEKARKKKKKLVFRVRPPVPPRVWNRNPSFYQGLYKNFTGKNVMLKLWTGSNWAWVKFGITGREVPDGWSVGSPQAINRNGHWYLHVPIQKDEYEVPKKVEEQRKEKEILICAVDLNIGRNFACCTIQNSDGTILATLYIRGAEALYGRRKRELGRVAVRRSQTGILQPDVQDNQYLWRHIRAMGEYEAHRISRRIVDFAVLHEASVIVFEHLGHFQPHKGKYSVRGNEKRSYWLRGKIVQFSKYKAWNEGKITCRVNPAGTSRFCYWDGTKLVRFTPGQLIVGYTEGAPMVYCPTCHHLENADRHSTRNIGHRFFSPPKPSPKWDGVRPSAHERKLGKRVDVARPTTERGKARTGWHRPARLSPPTVSLVEATPL

SEQ ID NO: 22186 - protein, 420 aa, Okeania sp.
MSKKTKNMGCQQVLLHPDQNLSAILEYLSGEANKVFNCSVYYARQVFFKENRFVTQGELCGQMKWNRHFNAMYASSAQQICNGIVESFKSFKQLSKLFGSGELVNKPKPPNYRKPGLFTVSYPKRWLKLTEKGIRVPLGRKVKAWFGLENFYLPMASNLDWNSIKEIRILPHHGCFYVEFVYEIKIQLVKLDKTHALSIDHGLDNWLTCVDTLGHSFIVDGKHLKSKNQWYNKQIAALKENQPQGFWSKRLARITEKRNRQMRDAVNKTARLIINHGLKHGIGTIVFGWNKGQKQSIELGTQTNQKLVQIPTARLKERIKELCSLYGLKFVETEESYTSKASFLDHDVLPTYGEKPDNWEPSGKRVKRGLYHSAAGYLINADCNGAANILRKVAGRFNLNLDQLGRGALTTPLRVRFWIA

SEQ ID NO: 22187 - protein, 394 aa, Lactobacillus sp.
MLKGIKLKIYPNARQKQQLAWMFGNDRFVWNEMLNLINQRYKNNPSLKVLSAYDMNYLLKPLKQEYDFLKESDSSSLQVVTNNLYQAWLMFFKKKHGRPKFHSRKAYKQSYTGKSATIKVANARYMKIPKLGIVKTSKTNLLNDCKIKRYTVEHSPNGNYYLSLQVEFENQKLNKTGKVVGIDLGVHDLAITSDGVKYSKLQFKNLDKKARLWQRKYNKRLHNVKNIVATHNHDKSRLYDIEVEDFTNWQKARKNKAKLQAKITNKRNDELHKITTKLVKQYDVIVIENLKSKNMMKNHNLANVVSSNAWYTFKSMLEYKCNWYGKQLVIVDPKNTSRICSDCGKKNHEFDGLTQAQWLSTRNWTCPYCHKNHDRDINASLNILNRGLKQLNIQ

SEQ ID NO: 22188 - protein, 406 aa, Lactobacillus sp.
LVKLGRTIKLRLYPDTDQAAAFLAMSQEYQRLANIVSQWIFDHEFQLSWLKINHQLYKRFRQESSLNSQMVQSVFRTVSAHYKTVQDQMRQHPYRYKNEENKWIQIPKDLTWLVKPIHFRQPQADLVRQSNYSFVDKMQQLSITTLGKRTKLSFTDKGFEKYFTEDWKLGTAKLVHNRGKWFLHIGITKETSDFNPKDNPQIVGVDRGLRFLATAFDSEGKTLFFDGKKILRKRKKFLETRRQLQRKGTKSSKKKLKRLAQRENRWMTDVNHRLAKTLVAAYGSHTLFVLEDLTNVTFNTDDLPKSLRSSHRSWSFFQLETFLTYKALSIQSTVVKVNPAFTSQRCPRCGLVEKTNRHHETHEYWCKQCQYRCNDDRLGAMNIAMLGQEWLNGVKRPKIKKLTTIG

SEQ ID NO: 22189 - protein, 400 aa, unknown
  TnpB Polypeptide
VAEGTRAVRRAFKFRAYPTRPQEGRAARLLTDHCDLYNAALEERREAWRMRQVSVSYGMQSAQLREIRRADPAGQGRHSFTAQQQTLRRLNTVFAGFYARVQQGKAGYPRFKPHTRFSQAAFVAGDGAKWTPADGGMWARAAFQAVGSIKVRQHRPVPGTVKFLRLKREHRRWYVIVITDTEPAPLPARGRAVGIDVGVARFLTTSDGEIAANPKFLTASAEAIVGLQRRKELARRGSGNRKRLRRQLAKEWRKIRNRRRDFHHKTARALVNTCDAIALEKLSTARMTRRPAPKPDPSNPGAFLPNMASAKAGLNKAILDAGWAQFANILTGKAEEAGRQVVFVNPARTSTECHLCGLACTRPQQDTVICPTHGKIDADLNAARNIATRAGLGSGQAPAA

SEQ ID NO: 22190 - protein, 388 aa, unknown
  TnpB Polypeptide
MRAVVKAVKQNYSPTPEVLMLLESFRSMLNQCVRIGLETNATSMKSLSLKTYKQLCHYDVLSCYKLCASSAAAGILRNYHKAKRKSPNTKIPYCHREQLTTCYGFKIHDGKLWLPLRFHEQIPISLTPHTLAVLAEFNVRSVTLTARTLSISYSKETAEIEPTGYIGIDRNLNNVTTASSDGHTEQLDLSEATRIKAQCRETKHHMKRNDVRVRRRVFGKYGRIQKNKVQQILHHTSKLIVGEAKEKQVGIVMENIKNIRRLYRKGNWQGKKYRATMNSWSYAELQRQIEYKARWEGIPIIYVPPHGTSSKCSICGSRMTRIPEENRKLQCPSCGYMIDRDVNAARNILARGLRFGPIASPVEAMVSVFNPPVDGDELTHVEACDPTS

SEQ ID NO: 22191 - protein, 285 aa, Thermoproteus sp.
MENMGSVRRAVAVEVESPPPGLYAVEEAYRRIVEEAAVYVAERGRLEREKYSELYRRFRELYPGLHSQLIQQAVNQGKEVGKSFLEARRDGRVRKPRPEVRRVSMRFAEQSWSYRKTAASAAPVRLALSLSGGRREVWIKPHRRFWLYWWKALRREAELASTLMLKRRRGRFYAIFMFDVTPKRKPSAEAAAFDVNENSVAVARMPLLSTVDAVVRWNRRYVDPAVYSVRTDFGRLAKRYEAVRSAKLEELKGKYPFAGSDGEEKVQNVTDASEEGLPHPYPPQT

SEQ ID NO: 22192 - protein, 570 aa, Bacillus sp.
MPIQNVKARKRNPPSEFAKELKKIREHHTPLHTVEIEIKVLPFQQWKLIRINEQLRVIRNTVLGQLYKNYSQMIRTKEFKKVLKKYRLISNTLNKSKDEKEKKILEKEQKDLTKRFEELRNKHNITFEYARNYGASLRTRKYKLPDAVTVWNVCEIAWRSMERLIFGEAMKPRFHKRGEFVPIQGKQAERCVILKHNSDEGTIYITHNGMSFPLDIKEKDLFIEETLSHIAHYMRNTFSIDKENVERYLAGKSIVPTYRIRNNRIVLKEIRGKLRFFVQIVLEGLPVVKRKKDGSFRHSYGSGKIGGDIGTQTLAVVSQNDVDLFNLAERSKNTFYYERVIYLIQRYLARSRKSTNPQNYNSDGTIKKGKKEWVYSKRYLKAKGKLKNLHRKAALSRKYAHNEDINRLRTLGDQFIIETMNIKALQRKAKEITKNEKTGKFNRRKRFGKSIGKRSPGYFINQVKYRFAMTGGTVHEVNTWTYKASQYDHELDDTNKKQLSKRWHTLPDGRKIQRDIYSAFLLFCSKKDLQKPDRDQCLKHFENFYEKHQLCVQEIKENRKFVLNSGIKIS

SEQ ID NO: 22193 - protein, 361 aa, Vibrio sp.
MKRAFKYRFYPTQQQAELLAKSFGCCRFVWNNSLKHRTDAYYERSESIAHSALEKRLVPLKVEFEWLKEVSSVIFQQALRDQQEAFKNFWDKRAKYPKFKSKHDKQSIRLTKVAFKYRDGQLFIAKSKQPLDVRWSRELPSEPSSITISKDKAGRYFVSMLCEFESKPMPVTAKTVGIDLGLNNLFITDSGEKVDNPRHTKRYEKKLAYLQRKLAKKQKGSKNRNKARQKVARLHAKIADSRLDNLHKLSRKLINDNQVVCVESLAVKNMIRNPKLAKHIADASWGEFVRQLKYKAEWAGRTIAEIDRFFPSSKRCNGCGFVHESMPLDIREWDCPDCGRTNDRDINAAMNIKTVGLAVLA

SEQ ID NO: 22194 - protein, 403 aa, unknown
  TnpB Polypeptide
MTGVKGYYAITTKRFVLRTSHGTWLRDTQELYNEILHFYYRLFLGHPELHSLGNQKLLRALEQLSIVGRDKRPVEQPLPFKGVPLYFRRAAINTALAAGKSYLARDGQERPTEVFEAGVTLYKGTYKNLDSHSIQMKVWDGGKWRWIRCRLSGNVLLEGAVCLSPRLVFCDGKIELHVPVRQPVSDGRTLRERMEKDMKICSVQFTNGDAIAVCCVVDGPGCLRAVRFLKGGRDYAHRCRRIQEKILLSQKSVGGRRGGNDNKRYWKKLKQISDDMAHQVSRQIVDFCVETGAGVIALPKYSEAFTKYVMAAVGNWSPLHLNYQIRSQLKYKAWQAGILVLESEVSDIKRYCATCGGAVHSRGEQFVCENGHQGNRRVNAGVNLGRKTWKSLGEHLSCYKQKG

SEQ ID NO: 22195 - protein, 383 aa, unknown
  TnpB Polypeptide
MEIIRAYKTELNPNNWQRSRFEQCAEVRRFVFNIGLREWQRQYKNGDKPSQYGLRKQFNAAKRGFFPYVVQVPYAVTEKAFADLDAAFKHFFRRVKNAETPGYPKFSHDATRFSLKNTRIDSNQIRLTGIGWVRLKERGYIPTDPVKYGTYVTISKRAGRWFISVPVYEEIDGPQNDSTLVVGVDFGVKTLAVCSDGTEYENPKLLRTAQRQLKRLQRELSRRKKGGQNWQKTKARLAAQHAKVANIRKHTLHQISHDIVVNKHPAVVVIEDLNVSGMVKNHCLAQAISDVGFAELRRQIEYKAGWYKVDVVTVSQWFPSSKTCSACGCIKSDLTLGDRTFHCDDCGFEIDRDLNAARNLAAMGKGLNRPGLPVELECSEALL

SEQ ID NO: 22196 - protein, 382 aa, unknown
  TnpB Polypeptide
MYKGIKLRIYPNLEQQKQIIENFGACRFVWNQMLAMQIERYKNNKEAKFLNGFAMNNLLKPLKEEYPWLKYSNAQSLQDTCQTLGETFTRFFKHTSKYPIFKSRKYPKQSYKIKQGISILSNHYLRLPKLGYIKYRGHHYNKGKIKSATIKLSPAGKFYCVLLIECENQAQFDKTNKNVGLDMGVADLAITSDGIKYPTINFDKQLAKKKRVWERKLARRRSQAKNIIATEKHMKLLNPHTELTDFKNYIKAKQMVAKYSEKVANQRKDYLQKITTKLVKQYDTIVIEDLKASNMLKNHKLARSIANQSWRELRTMLEYKCGWYGKELKVVNPYKTSQICSNCGYDDGKHTLDVREWKCPQCHSVLDRDINASKNIMKLGLG

SEQ ID NO: 22197 - protein, 421 aa, Xylanimicrobium sp.
LLYTALIAQNNEFYAANGRAPSQGEALGSVTDPDVLRMHAHTKIGVYTRLMENIGTALSNMSGDKVEGARLPWRAKQYMPVTFTAGYGWRITPAGRLSLSLGRADGRLLLPVPSVVDARTGQPVPCDAWGEIELCWDRDNRRWALHISYPTEWAVPVLDPAIVVGVDEGIINPMTLAVKTDDGYAVTVINGRAARAVKHRRNTSVAKVVRAKSRCRKGSRRWKKLDRAERRAKGKATTALRNIDHQVTRKAAKFVQAAGAGTITVGDVRGIEKNTRHTERKRAGRHQRRRLSQWSRGRQERYLGEKTSVALTHVDESYSSRTCPACLTRNHPTGRNYQCRACGFTCHRDAVGAINILNRATYGSYTRIDPTTRVRVTYLRATPLPQHSEAALSTAQMRATTATTGRVSQESEVPYPDQAAA

SEQ ID NO: 22198 - protein, 558 aa, Arthrobacter sp.
MDNNIHASEAPAGQGPARKAGGLRRIAAPFVVATPSGVRIRTRLRPTDTEAQALRMIGEHLGHLYRTDVAGRVTLGRVPAAERGRTERKRNLTAASSSRWAGSITRSAEDQYQLGLRCLVAEVSHLRAATEALHRRIANTVGEDSGNGRGYRTEAERFQKTRRLAQLQERLETAQAALAVGRPSITLGGRRLWKTRNRLADANLTREQWEKRWSASRMFLTADGESGRIGGNQTIRLTAAGTGLPGNLSVKVPTPLVPALGDRLVLSVPVAFAHRGDEWADRVVSRRCIRYDIGFDPGKGRWYLDASWGHGDVQAPPLEVLQASGVVGVDLNADHLAVARLDASGNPVGTPISIALGLAGLNAGTRDGRLRAAITALLDFARDTGATAIAIENLDFKDARDTGRETMGRGARGKRFRRTVHEIPTGKFRDRLVGMAANRGLSVIAVDPAYTSRWGGQHWHKPLQEASGGTVTRHHAASVAIGRRALGCPIRRREDGPRTRQWTGAGKPSPRPGRAPGGAATGTGPVRPAATSRTGPPGTGRRQPPKTVRGAHASLKRI

SEQ ID NO: 22199 - protein, 481 aa, unknown
  TnpB Polypeptide
MDAQHTKHVTYKLAYHFVWCPKYRNSKANDMQQIITAKLKLITTPDQFAALRTTQLAYRDALNVVSSYAFEQGKTSSTVALHRGMYSELRTRYHLPSQLACSVERQVAATYKGLWTKLKKNAEHCRKKITRKRFQGLDKPPKYSSPTVQYTYERDYTFGRNQQISLGTLNGRTSIPYQGYDEHIALIRHGASIGDAKLWYDKPKKAFYLLVSLEIDVPEPTDEQLSEVVGVDVGIRYLAVTSTSTGKATFHSGKRVRHKANHYARLRKRLQKKGTRGAKRRLKRIEQRERRLKAQANHQISKQIIKEHPHALIGLEQLTDIRERTKRRKRRRKKNGKGYEQVSPKARKANRVYSQWSFAQLHDLITYKAALCGGLSIKVDADYTSKACPVCGHTADENRPRKGLLFACQNPRCRYTLHADLIGARNVTMRALLVRHDWIRTGCLSITPDPSDKEAKAARLQRYAELRWSPDASLRLLAGGH

SEQ ID NO: 22200 - protein, 331 aa, Microcoleus sp.
MLLGFKTELKLNDRQRTQLIKHCGVARHAWNWGLWLTKNILAHNKANPDEKLKFPTAIDLHKLLVVLVKSASSWYYECSKSTPQQALIALRKSWQRCFNKTAGVPQFKKKRQRDSFTLEGTVKILGDNKIQVPVIGILKTYELLPQVVTKSCTISRSARRWFISFRFDVEQKKPCQTSILGVDLGIKALATLSTGEVFLGAKSYKNYATKLSRMQHLNRHKVIGSSNWKKAQNKIARLHRKIANIRSDTLHKLTTILAKNHGVIVIEDLNVSGMMKNRNLAASIADMGFYEFRRQLTYKCKFYGSSLIVADRWFPSSKTCSNCGSKKKHSP

SEQ ID NO: 22201 - protein, 414 aa, Clostridiales sp.
MRLSFKYYPKLNTKQLAIIEELSFHTTKLYNIANYECITNGYKNYYDMESLLKTNWHKGFLHSHTYQQCLKVLEQNWKSYFTASKDYKKNPSKYLGQPRQPKYKHKNLKNQVIFTNLAIRVHERTLKLSLSKAMRSTFDVNSLNLTLPKWVLKHLNMNAIQQAKWIWDTVRGQWYLLVIYKQVEASKPQSWHNIMAIDLGLDNLCAISFSDSEKQVLINGKTLKSKNAYYNKEIARLTRIQMKATGNKKFKRTKRIQKLNRKRGYYMHDALHQVSRRVINLAKEQKCSTIVIGDIKGIKQQSPIKGFVQIPVQKLVEFIKYKAQLTGIDVVMVKEAYTSGVSAYDLEPLTKQYYNKKRRIQRGLFKTNDGLLVNSDINGSLNIMRKHDSNVLPILIKRLRDNGCLNHPARITVA

SEQ ID NO: 22202 - protein, 374 aa, Escherichia sp.
  misc_feature (3)..(97): Xaa can be any naturally occurring amino acid
VKXXXXXXXXXXXXXXXXXXXXXXXXXXXXXXXXXXXXXXXXXXXXXXXXXXXXXXXXXXXXXXXXXXXXXXXXXXXXXXXXXXXXXXXXXXXXXXXRIFLPKLGWMRYRNSRQVTGVVKNVTVSQSCGKWYISIQTESEVSTPVHPSASMVGLDAGVAKLATLSDGTVFEPVNSFQKNQKTLARLQRQLSRKVKFSNNWQKQKRKIQRLHSRIANIRRDYLHKVTTTVSKNHAMIVIEDLKVSNMSKSAAGTVSQPGRNVRAKSGLNRSILDQGWYEMRRQLEYKQLWRGGQVLAVSPAYTSQRCTCCGHTAKENRLSQSKFRCQVCGYTANADVNGARNILAAGHAVLACGGMVQSGRPLKQEPTEMIQATA

SEQ ID NO: 22203 - protein, 242 aa, unknown
  TnpB Polypeptide
LELIYKIENIPTNVYPAKCLAIDHGIDNWLTCISNTGTSFIIDDKHLKSINQGYNKLVAFLRSRKANGYWSKRLAGLTERRNRQRRDAINKAAKQVIQDCLENQIGTVIFGWNKGQKECANMGKKTNQKFVQIPTGRLKNRIAQLCDRYGIKFIETEESYSSKASFVDHDFLPTLGEKPEGWKASGKRVKRGLYSSAQGWLINADGNGAANIARKVAIMLGLDLSGISRGDLSAPLRLKLWS

SEQ ID NO: 22204 - protein, 207 aa, unknown
  TnpB Polypeptide
VALTSNQPGFVPLLINGRPLKSINQFYNKRKAQLQSRLKESRKTSRRIQRLTRCRNQKIENYLHQASRSIINLLRSGKIGTLVIGKNVQGQNQINLGKQTNQNFVTVPHARFIEMLEYKAALVGIRVMVQEESYTSQSSFLNLDPIPVYGSIGALDVTFSGQRIKRGLYKTSCGQLINADVNGSYNILRKAIPNVFNNGIGSCVVQL

SEQ ID NO: 22205 - protein, 352 aa, unknown
  TnpB Polypeptide
MFITKAIKCKVLDLTQHKHELLQGEYQKFQIYAKRQKDFGVYSYTKTTFDFKERKKARYFPQPMPLGKQVCKFKKTDNKLTNYWFRVPVKAKRGGIWLPIFAYFDFTKEWEIRDSKLIKKDNQFIIILSLRKEVSLKKSYSNVLAIDLGEKVMATVCGSMENSSPQFFGRNIRGIRRHYAWLRKRLGNLKLLKKIRQMNDKESRVVDNILHNVTRKILRLAIKTDSIIVLGNLKNIRKSARGKRFKRIVSNWSYYKFTQYLTYKANEQGIQVIKINEHYTSKTCSRCGEFGNRKSQGLFKCPNCSYEINADVNGARNILKRTLDYMSNVGAVAFCLKNGNDNWLCQSESFKH

SEQ ID NO: 22206 - protein, 429 aa, Natrialba sp.
MRYNYRYRLNPTDELHEQLAWTVDTCRQVYNHFLHRLNRENGTSAYSEQSVLPDLKNWWTDLNQVHSKVLQKVVQRLYDNRSTLKGRKDNGYRVGELKWKAPKEYRSITYSQTGFELNNTSGRTVLSLSKIGDIPIVYHRDVPDDATIKEVVVKQEPTGEWFAVLGIETEGDAPPKPKKLEDCVGIDVGILKYAHDTDGTAVERPDLSDERERLEREQRKLSHKDHGSANYRKQQRVVAKRHADLKRKRRDFLHKLSNHYAREYDLVAVEDLDVKGLMELPSNSRNRAGAAWGTFLRMLEYKCEREGTHFVAVDPAGTTKECAACGVETDKPLWVREHSCPSCGFTADRDWNAAYNILVRGLKQVGTGCPESTSSESLCDSDGLRKSHCDFRTPAETALPTETTSVPAKRVVETGSPTLKERTASAVSE

SEQ ID NO: 22207 - protein, 402 aa, Escherichia sp.
VKRLQAFKFQLRPGDQQECEMRRFAGACRFVFNRALALQNENHEAGNKYIPYGKMASWLVEWKNATETQWLKDSPSQPLQQSLKDLERAYKNFFRKRAAFPRFKKRGQNDAFRYPQGVKLDQENSRIFLPKLGWMRYRNSRQVTGVVKNVTVSQSCGKWYISIQTESEVSTPVHPSASMVGLDAGVAKLATLSDGTVFEPVNSFQKNQKTLARLQRQLSRKVKFSNNWQKQKRKIQRLHSRIANIRRDYLHKVTTTVSKNHAMIVIEDLKVSNMSKSAAGTVSQPGRNVRAKSGLNRSILDQGWYEMRRQLEYKQLWCGGQVLAVPPAYTSQRCACCGHTAKENRLSQSQFRCQVCGYTANADVNGARNILAAGHAVLACGEMVQSGRSLKQEPTEMIQATA

SEQ ID NO: 22208 - protein, 397 aa, Paraliobacillus sp.
  misc_feature (262)..(312): Xaa can be any naturally occurring amino acid
MIVNKAYKFRIYPNKKQTELINKTIGCSRFVFNFFFGKQKEKDAYWYIAREMVQNGHLPANNWKGKCLNKYNTVKSLPELKKHYAFLKEVDSIALQRSVENLANSYNRYYKKQNKYPRFKSKKNPVQSYTTKQTNGNIAVLDKHIKLPKLGLVRYAKSREVKGRILNVTVRRNPSGKYFVSIVTETQVKALPKTGSAIGIDVGLKNFAILSDGTIYSNPKFFRTLEEKLAKAQRIMSRRTKGGANWNKARIKVARIHEKISXXXXXXXXXXXXXXXXXXXXXXXXXXXXXXXXXXXXXXXXXXXXXXXXXXXSEVSWAEFKVMLVYKSEWYGKQVVTVAKHFPSSQLCSCCGYQNKDVKNLGLREWECTKCHTHLDRDINAGINLKNEAVRLLNLRT

SEQ ID NO: 22209 - protein, 451 aa, unknown
  TnpB Polypeptide
LLDIVCYSCVLNERGCGVFEAVKVALDPSPAQERRLLSHAGAARFAYNAALARVKAAIDAGEILDWSYYSLLRWWNANKDSLAVGEDGEPWWKKNSKESYARALESLAKGLSNWSKSRRGDRKGRRVGFPKFKAKGRTAPRFTYGTGCFGLVKGDPKALKLPRIGRVHCMEDVAKRVGGAKVLRMTISQREGRWYASLTVEREDKPVASPPKGGAVGVDLGVKTLATLSDGTVIENHRYLRKSERKLKKAQRALSRKTKGSNRRAKAQAKVARLHAHVANRRSDAMHKLTTRLAETFSDISIEDLHVSGMVKNHHLAKSIMDAAFGEFRRQLEYKITRTGARLHVVDRWYRSSKTCSGCGGVKAKLSLSERTYRCDSCGLAIDRDLNAAINICVAGSAPETLNAHGGTVRRSTPSVDVARVSVKCEPSVRHSGAVSLGADSQKTVLQTASR

SEQ ID NO: 22210 - protein, 366 aa, Clostridium sp.
VEKAYKFRMYPNKQQEELINKTFGCCRFIYNRYLAKRIELYENNKETYSYKQCSSDLTNLKKELVWLKEPDKFSLQNSLKDLESAYKKFFKEKIGFPKFKSKKTNRFSYRTNFTNGNIRYCRGYIKLPKLGMVKIRDKQVPKGRILNATISKEPSGKYYVSLCCTDVEIKKLENANSNIGLDLGIKEFCITSNGQTIENPKYLKKSLNKLVKLQRELSRKSKGSSNRNKARLKVARLQEYISNQRNDFLQKLSTKLIKENDIICIEDLQVKNMVKNHKLAQSISDVSWSEFIKQLEYKASWYGRKVIKVDKFFASSQLCNKCEYKNEEVKDLNIREWICPKCGTNHNRDINAAINILNEGLRRITI

SEQ ID NO: 22211 - protein, 384 aa, unknown
  TnpB Polypeptide
MLRNEHLINIGTQEVYAHLKVNDQHLHDAMMQYYTAYTAVCNIISEAVYSHNTVDLNQILPLITDKADTYTKRQPGVLERAFKAVTNDYANHESGEGKRTAPHKYTLENIPLLKDDDYTFIFYGNKQYGFKLRLAPRMGVFVNTPQIPAEWLNQPAGYDYATIAPTASLSYTSDIGWLLKYELPVVLNNVVGIDIGTRIFAVTYDGASTKFMHGADTPLQHEMGVYSNLRAKLKAKDTRSARKRLKTLSDRWHKQIDTRIRQTVQNILRDTEPNTVFVLERLCKPGNTDVLLTRGDVGKHHSIIFGKLISTLSDEATKRGHAIVAVSPDKTSVRCPACGIFRKRNRRQSRHVYRCQCGFRSNDDRVAAMNIRERGIALLTGHQA

SEQ ID NO: 22212 - protein, 413 aa, unknown
  TnpB Polypeptide
MNTKETRTIRIQLTPTPEQVDVLLQTMQEYTDCFNEVCSFADAKHIFNGVELHKETYLSHRLNTHLPSQLICAARVKETEAIKSVVTRRKKQHVKYQNYLKQVIKKGFPPKPLKLAKTPHSLLCAIRYDARSFTFDREQRTASLVHVQQEGKGRNRTVMGVRVPAYYEQYLTPQWEQESADLIYKKGTFWLHLVVSAHIPVVAPTGNVVSVDLGINRLAVTSQPRFFGSKQVKETNNRYFRLRRSLQSKGTKSAKRHLKKLSGRVARFQKDVNHVVAKQLVATVNPGDTIAMENLTDIRERTKQRHEKRQQRRTHANWSFAQLQSFVAYKAAWKGATVEFVDPRYTSQGCSKCGYVSRANRPCQSEFSCKKCGYQNNADYNAALNIRTKHLASRAMRATSGLSSTSLSSQASA

SEQ ID NO: 22213 - protein, 271 aa, unknown
  TnpB Polypeptide
LPKIGWVGYRKSRDIIGRIKNVTVSRRGEKWDVSIQTEYEVVSSAPNPSEIGIDMGVKRFVTMSNGDFVEPLNAFKQEQEKLAKLQRKLARQKKGSRNSRKTKRKIARLHRYIADSRRDFLHKTSTKIAKNHSIIYVEDLKVSNMSASASGTKESPGKNVRQKSGLNRSILDQGWYGFFQMLSYKLEQRGGKLIKVDPRNTSRTCPRCGLVSAENRKSQATFACIGCGFRSNADEVGAINVLRAGRARLACGMSGAVRLLSAGTRGDLLQH

SEQ ID NO: 22214 - protein, 372 aa, Bacillus sp.
MMVNKAYKFRIYPNKEQEILIAKTIGCSRFVFNHFLANWDNTYKETGKGLTYNSCSAQLTQLKKELTWLKEVDSIAIQSSLKNLADAYSRFFKKQNDRPRFKSKKNPVQSYTTKHTNGNIAINGNKIKLPKLGWIRFAKSREVDGRILNATIRRNPSGKYFVSILVETEVQELPKTESSVGVDVGLKTFATLSDGTPYENPKWFRKLEEKLANAQRILSRRKNGSSNWNKQRIKVARIHEKITNARNDYLHKISTEIIKNHDVIGIEDLQVSNMLKNHKLAKAISEVSWSQFRTMLEYKAKWYGKQVVTVAKNFPSSQLCSYCGCKNKDVKNLALRKWVCPNCHTHHDRDINASLNLRKEALRLTVGTTGIA

SEQ ID NO: 22215 - protein, 237 aa, unknown
  TnpB Polypeptide
MKEQIICSVDLGINTDAVCTIMRADGTVLGRRFIDHPSEKDRMYRTLGRIRRFQREHGSAQTQGRWAYTKRLNTELGKKIAGAIVRYAEENHADVIVFEYLEMQGKISGKKKQKLHLWRKRDIQKCCEHQAHRKGMRVSRICAWNTSRLAYDGSGAVTRDWENHSLCTFQTGKRYNCDLSASYNIGARYFIRELLKPLPATERSLLEAKVPPVKRRTSCVYADLRKLHSEMELLKAA

SEQ ID NO: 22216 - protein, 178 aa, unknown
  TnpB Polypeptide
VVWAAVRKGSKASGHIKHIRKLYKRKQDSVTDYLHKITRYLAEYCREQGITCVVAGDIRNIRREKDLGHRTNQKFHSLPYNRIYIMLEYKLKRYGIRFTKQEVSYTSQCSPLSPEVEIRYAEPSKRKERGLYRDGNRTYNADAVGAYNILRKYHSVSGVKRELSVTGLKTPEIIKVAV

SEQ ID NO: 22217 - protein, 405 aa, unknown
  TnpB Polypeptide
VYRVLRIVLRNLSKQQYQTLERLTYFSKNTYNNMLYALRNDLLDNKGSLETKLYRYARSRDDGRMLYSQSVQKMAKDIIITLKNNGKHALKYHPKDGHRSVVWKNQSLKLKNNVLRLPLTKDFVQRYSLFSKWLEFKVPTWLKGYKIVEAIIIPKLNAKYFELHVIYKVSQTHVQTSSSKIMGIDLGVDNFATVVISDGTAVIIDGRKAKSINRWYNKEKARLQSIYTKQGIKTGKKFIVLSKRRYNWMFNFVHQAAAQVIKIAIKHNVSKIAIGTNKNWKKKVNIGKQNNQNFVMLPHSWFKNVLKHKAALCGIEVIETDEAYTSKADALALEPIRKQETYLGKRKHRGLYISSTGVAINADVNGAINIARKAFGDESWKSIPESLLGIGGRGRLTRPLRIRVV

SEQ ID NO: 22218 - protein, 414 aa, Symploca sp.
LYRAIKVRIYPTSEQSQKLSQVMGCARWWWNYALNLCNDTYQHTGKGLSQIALNRVLPQLKKAPETVWLSECYSQVLQSTTLNLTKAFKNFFEKRAAYPRFKSYHGRQSAQYPQNCQILDKGVKIPQVGVIKASIHRLFEGQLKTVTITKTATGKYYASLLFDTKQEKPLVVVTGKVVGIDLGLKDFCITHDGEKTSKYANPKHLKKQERNLARKQAKLSRKKKGSKSRERARKLVARVHERISNARQDFLHKLSRKIVNDNQVVVVENLQIKGMVCASPMLRKRNHNLAKAISDVGWGIFVNFLDYKLQDKGGLLVEIERFFPSSKTCSSCLYQMSAMPLDMREWTCPSCGTHHDRDENASKNIRAEGIRQLSVLGTRTAAEGGDVRSKGGRKSVLRHSPVNSEAYAVPKGSA

SEQ ID NO: 22219 - protein, 391 aa, Symploca sp.
MEKAYSYRFYPTPEQESLLRRTLGCVRLVYNKALHARTQAWYDRQERIGYTLTSNMLTSWKKLEELGFLNEVSCVPLQQGLRHLQTAFSNFFAGRAKYPNFKKKHQGGSAEFTKSAFKFKNGQIYLAKCRDPLPIRWSRHIPADCQPSTVTVRLNPDGRWQISIRFDDPTIKPLPVTDKSIGIDLGISSLVITSDGDKVANPQHFKKDYRRLRQAQKSLSRKQPRSKNREKARIKIAKIHRKITDSRKDHLHKLTTQLVRENQTIVVEDLAVKNLVKNPKLAPAISDVSWGEITRQLAYKCRWYGRTYIEIDRWFPSSKRCSNCGYIVEKLPLSVREWCCPDCGEHHDRDINASKNILAAGLAVSVCGATVRPEQQFSVKAGAMKQKPKSC

SEQ ID NO: 22220 - protein, 382 aa, unknown
  TnpB Polypeptide
VLKAVKVRLYPNKEQQQIISSQIGGARYVYNRALALRKYAYSKFGIRIGKFALINHITKLKKREKTSWLKEMDSQALQQSISNMDKAYQHFFKGGGYPKFRSRHHSRQSYQYPQRVKIEGNKVFLPKVGWVKCKGLRKEFVGKIKTVTVSFEAYQYHASILIDIEDQNIIPNTNGKFVGIDVGVSLVVADSNGRREEPLDLVRELSKLRIKAQQLSRKKKGSNNRAKAKAKIAKQNLRIANMRKDFLHKLSRSYSENQTVIVEDLKIKNMTSKTKGTVEKPSKNAKAKRGLNRVITQQSWGLFFELLEYKLQEKGGQLIKVDPKYTSQECNECHHVSKENRQSQSKFVCTSCGHSANADINASKNILDRGIHGNNASLKIAV

SEQ ID NO: 22221 - protein, 595 aa, unknown
  TnpB Polypeptide
MYHKLLLCDVARTFKDISAIELFKAFPQLIQYYAGCGILWSRGYFVSTVIKSILRSRKMITDEEYKRILKRFHKLSDRHILAAETDMSYPDVLKVVALSDKMRKAGNELVGLMRKNYDQLMRTKRYRKLLFLYGDSKDKDKRKTYAEQLNEMQKAYNITWEYCRTSMIPIGKKYGVDAVFALTKAEDIWRGIEKCLYGNGNAIHFSKYGDLPCIRAKQMNRGIPIFVKDNKLQFKLGRTVFGIKINDRFQTDEVNAVLDYLAEPEIMNNKAVQTLMDEAYCIDTYRPCYAVLVPKLIRGKYRVYLHLTIEGKAKPKYDRFGNPRHKYGRGMIGADIGTQTVAYTSDTVVGLKNLSERGRSTQKSERLERLYYRAMDRSRRATNPQNYNEDGTIKKGHKTWRYSNHYKKLKEKHSELCRINAINRQLAINEDANHLRSLGDIFITEPKNASKLMRRAKETTVNSKGKFNRKKRFGRSVKNRCPSGFQAAVEQKFKVSGGTYIEVSNDYRASQYDHTVDDYIKKKLSDRMYKLQDGTEVQRDWYSSFLLYCYDYRTKDIDKNKCISEFDKCYSKEKALIEWIKVNEIKVLNSGIKIA

SEQ ID NO: 22222 - protein, 178 aa, Cyanobacteria sp.
MGVMFFGKRASAAQIGMKRLSGKERRYQQWLNHNISTEIVRSAQQERASIAIEDLAGIRERTNQAPRSKTERRRSNHWAFHQLRLFLAYKAALSGVKLVAVRPQYTSQTCHHCLHVHPEGGKSYRSGKSFKCGHCGWRGDADLNGALTISLLGAAVNRPRGPGVCCNLRAAESRLSIA

SEQ ID NO: 22223 - protein, 166 aa, Fusobacterium sp.
LTKNQNLSKRFLNAKKSKKKLSEAKNYQKQRIKVAKIHENIMNRRTDFLNKLSTYIIKSHDIICMEDFNTKGLLHNHQLAKSITDVSWASFVNKLEYKAKWYGKELIKVDRQYPSSQLCSVCGHRDGKKTLAIREWTCLICHSYHDRDINASKNILAEGLRMRETA

SEQ ID NO: 22224 - protein, 274 aa, unknown
  TnpB Polypeptide
MAHTEGYRLTYTDTDTNEDEDDRVQFRVSPKPYKKVKGHLRGRPEDLNLIESAFTEDEWSLGQAELLYRDGVYYLHVTVKTEVEVPEPEDADTVVGVDINERNIAFTAVNRETMDTLGTLVVDYGSVKAERQRYHTITKRCQEHGQHSIHDQLGVKEERYTEWILHRMSRVVVEFAKQFLNPVIVFEDLSEIRDAINYGTYMNRRLHKLPFNKFEQQVRYKATWNRFRVRWLSRRTIRSRARVVVIGDIVRVGGSGVRMIRVKFSKTMLTGTQV

SEQ ID NO: 22225 - protein, 259 aa, unknown
  TnpB Polypeptide
MNSAATDVGVNNTLAIVTSEGETAVYHARLEFKRFQFYSRLIAILQSKLPEDEYSNERIRRSYSEQSEKRDHSRDAAVKHATDWLFEKNVETVHVGDLSDVLESHWSSTVNEKTHSFWSHGQLIDRVKLTMDDVGIDVEEVSEQDSTSKCPECGFENVHRSGDEFGCQDCSLEAHSDVAGAWNMLQDKEVGSMAQPVVLRAGRRRNASQTANLTEGVYWEWDEHDWRLGSFEERSSSTFVIKNNDNQTSISEHASSQLG

SEQ ID NO: 22226 - protein, 455 aa, unknown
  TnpB Polypeptide
MGSVNGGGQGGAGARVVQAYRFALDPSPAQERALRSHVGAARFAWNWGLARCQERYSAEGRWFSAIDLHKLWNAAKKADPALAWWCENSKCAYQEAFRDLDRALRALSASKNGDRRGRRLGFPRFKKRGKCRDSFRFGAGVMRCAGSTVTLPRLGIIRTHESTRKLARRLANDTARILSATVSRAAQRWFVSFTVEVERAIPNHHAQPGSAIGIDMGIRTLLTGADDTGHVLTIIGPKPLAAALRALKRASRAQSRAARGGANRRKRTARLARIHARVANIRADALHKATTDLARRYETVVAEDLNVAGMTRNRRLARAIADQGLGQARRMLGYKTAWQGGRLILAGRWYPSSKTCSGCGAAKAKLPLSERTYRCDHCGLVLGRDINAARNLLDLAASGAESVNACRAQARPGAAGHWAKPPPGKKQEPGTAQAGKTGTVRARAQTTDHGLTLAH

SEQ ID NO: 22227 - protein, 466 aa, Streptomyces sp.
MTDTADRPTQVTGDEAKRIKRETLGIADRTKHRGRASTAMRSRAKEPGTQQRVYRYRCYPTQSQAEQLEKTFGACRWVYNEGLALRADAWERHRVSVGFAESCRALTGWRQASGTSWLREVSSTVLQQSLRHLDGAFTRFFRQNAKYPQRKRKHRSRDSATYVRTGFRWTEDPERPGTGLVTLAKQTVPLDVRWSRPLPAGAAPVKLSVTRDRAGRYFVAVLVEERIEPLPAAFVADGREPRAVGIDLGLAALVTLDDGTKVDHPRLLKKHGKELARLQRGLHRKKKGSKNRAKARERIARLYALISDVRGDTLDQLTTRLVRENQVLVVEDLAIMNLLRPAVGRGRRRKARLSRSIIDAAWGELIRQLRYKCAWYGRTLVIVDRFFPSTRRCSGCHAKGPSLDMAVREWTCAECGAVHDRDVNAAQNLREEGMRLYWLVASALPPGRTPPSAIKASEPADVLLAA

SEQ ID NO: 22228 - protein, 425 aa, Anaerolineae sp.
MTKAERIKNTIRETKERRKALRPTVFQLKLQNLSGKKEELLERAFLEAKWLYNWLVSDLERLNMPANKAGVVEVKVGQTFEERTLTVLGSQVKQEIASRLKKLKENGHKVGALKPRRFINSIPLKQYGVTYKLDFTRNRVRIQKLGEFRILGLHQIPSGAEIASAVLVRKPSGYYLHVTCYLPREHFRREPVAEAVGIDFGVGSKLTLSNGLKIDFEVNETTRLKRLQRKLARAEKGSKNRGKLRLLLRREYEKLNNRRKDAQNKVLAFLRLYEKVVFQDDCVKGWEVLFGRQVHSSGIGGMKTRLRDSLGTPIVVERTELTTQECYACGERHELSLSDRVIECGCGWKCDRDVNAALVILRKGLGLSPDQAVGLDRPELKPLEREAAARILGSNPYIRVSFPQRGSPPFQARVGGGHPGKTGSG

SEQ ID NO: 22229 - protein, 402 aa, unknown
  TnpB Polypeptide
MKVINKSYKVRIYPNKEQKVLLEKHFGCIRFVYNHFLNVRNLEYKENKINLNYVVTANKLSEMKNLENFNFLNEVNSQSLQWSLKYLDNSFRNFFRGQTKFPNFKKKSNNQSFKVPVNSTFKIEKNKIIIPKFREGIHFRGKLELKNLIKFNSINISKTASGKYYASLQGEFNYTPKVQNDNKVGIDLGLKKFLITDTGVKFDNPKFLKKQLKKLKYKQKQLSKKNKGSNNRQKQRILVSLIHEKISNKRNDFLHKLSQKIVNENQIICLENLSVKNMIKNHKLAQSISDVSWSKFVDMLKYKSDWNDRQLVQIDRFYPSSKSCSACHYINEGLTLKDGEWTCPSCNTHHDRDVNAAKNILIQGINILSGSGTESDIKQKPVEALRLRKSKKQESHSSLVIG

SEQ ID NO: 22230 - protein, 411 aa, unknown
  TnpB Polypeptide
MTATATKTLEATLAPPTAHKEQRLQRTVATYRRALSESFDSGADTQTAVNDVVTGYTLTSYAKDALKNYVPQLRETYNALELDDDHPVRFTNRGWRLDHSEEREHEFCWRVPQAGRGNAFWIPLRINPAQRELWDDLLDGDVTVGEFRLQEHRTNWVLHVTVEYEVAEPEEPDDPTPVGFDIGESKLLTGCACRDGTPTQPHIYDGGRARQLRKEMFTTLRRLQERDAAEWRVDERFDHYQNALTDVVEKASREAVKYARSFENPVIALEDLSYIREHLDYGKWTNRRLHNWAFARLTRRIEHKARDAGIPVRFVNPSYTSQTCHACGHVGQRSEQAEFTCTNGGCWVSEYQADINAAANIAGRLNPWGERCALKPHTSDSPRDGSACDSTTGHRTPSPNPGQTTLAAFQS

SEQ ID NO: 22231 - protein, 499 aa, Streptomyces sp.
LVAPTRRSRISNQPRAPSRALLPLPARHPQHVPDLLVRRPREDEQEVGQAVEVGRRQGVHHLGVHLQRRPRRAFGPAYDRAGLVEQGRAGGAAGEDEGAELLQLLVEAVAVRLQLVDVELLDPQGRELRVLHHRRRQVRAHVEEVVLDAGEDRDDLLVQAAQRDGRADRRVRLVGVGVRGDPQVGLGDPAHVAEGGGALVAGPRVDARQIDHVANLDVRVMDARPHLLSRTSAPDSHPCPGGGEWVLTAECRCWPRPATAGSSAGVSSPLARPSDTGRLQQQHARTKKGSNRRKACRERIRVMLRRVRDRRRDFHAQTARHVVDGNGLIVLEDLNAAGMTATARGTSAEPGSHVGQKAGLNRAILDKGWHSFELAVRNRARHTGTAVRTVNPALSSTTCPAGGYVHPDNRESQAKFVCTSYGHREHADTVGAKNVLARGHTGHRAWRPRRQPVCEAPTSAKPQGISAPTAEVGILSASADGRIAKSVMWDVTRVSLHET

SEQ ID NO: 22232 - protein, 369 aa, unknown
  TnpB Polypeptide
MHINRTYKYRIYPNKEQKKLLAKTFGSARFVYNYFLNMRIQEYRMEYKSVSYSCGSEELTKLKQDEDFSWLNEVDSTALQSAIKNLDTAYKNFFSKRAKFPKFKSKKKHKYSYTSKNNNNSISVLEKFVKLPKLGYVKTKISRPCNGKILSATVSQTPSEKYYVSILCEEEIHHLPENNITVGIDLGIKDYAVLSNKIKIHNPKCLKQMLKRLSKEQRILSRKTIGSRRYEKQRLLVSRLHEKVANLRKDFLNKLTTWLIQTYGTFCIEDLNIKGMLKNHKLSKEIQDAAFGTFQRMLSYKSDWYGRTVVKVGRFFSSSQLCSTCGYKNTEVKDLSVRQWTCPECGALHDRDINAALNIQKEGLRILSI

SEQ ID NO: 22233 - protein, 400 aa, Streptomyces sp.
VSTKHVKRAFKYRFYPTDAQAAELSRTFGCVRKVYNMALAARTEAWTLRQERVNYNATSAMLTAWKKTGDLAFLCDVSSVPLQQCLRHLQSAFTHFFAKRAQYPRFKSKKKSRKSAEYTTSGFRFRDGALTLAKMAEPLDIVWSRPLPEGAGPSTVTVSQDAAGRWFVSLLCEDPSVGALPATDAAVGVDAGLDHLLTLSTGEKVTNPRHERKDRARLALAQRRLAKKAKGDGANRAKARRKVARIHARIADRRRDALHKITTRLVRENQTIVIEDLTVRNMLKNGRLARAISDAAWSEFRSLLEYKADWYDREVVAVDRWFPSSKLCSTCGTLQHKMPLNIRTWTCGSCGTTHDRDVNAAKNLLAAGRAVTACGAGVRPQRSSPGGQSAMKQETLQREL

SEQ ID NO: 22234 - protein, 446 aa, unknown
  TnpB Polypeptide
MSKPSKSRNTITFIAKLKLNLTPEQKVSLDQTTLAYRNALNYASEVAFENGKTSNAAKLQKLIYTDLRERFGLPAQMACSVPRTVGTTYKTRWTNLRNCQAAKASGRKVKRYKGLDKAPRFVSRTLTYVYGRDMTLKSGQKISIGTLKGRIVVPYEGYSKHLAWIQAGVNIGEAKLYYQKSSKQYYLLVSLKVDLGEPKPDQYAQAVGVDVGQRYLMTAGNTSDAALFVSGKQVRQRKDQYARRRRELQQKGTRSAKRRLMALAGRERRFTADVNHRFSKQVLMRFPQSIVGVEALDHIRDRTERRSSSKASRKQKRANRRRSQWSFAQLHAMLGYKAPLYGSLLVKVDADYTSQQCLKCGHRSRANRPQAGQMFNCEECAYKLHADLIGSRNVCMRTLLVWQDWISTGRLSDVPDVSSDEAKAARLKRYAELRWSPDTSPAWTSD

SEQ ID NO: 22235 - protein, 499 aa, Mycobacterium sp.
MVGGSPASSLASRLSVGAAILTGEMTRHTTFKFCLDPTVEQQDVLARHAGAARFAFNQCLRMVTTALSDRKTDPGVAVPWTGFDLINSFNGWKKTEAAGRVFAVNNDGVTDVVVTGLAWRGEVCQQVFEEGAINLGKGLKAWSDSRLGRCKGKRVGFPRFKKKGRALPSFRLRNKHPKNGKPAIRVGDNNRRRSVTLPVIGPIAVHDDTRQLRRMLGKGRATILFATVTQQAGRWWVSLNVEAADLHPTHQHPTRAESDAGGWVGVDRGLSAFMVAATSDGTEVARITEAPKALRAGLARQRRLAKNVSRKKEGSHNRQHAARRLGQHHHRIANIRRHFLHQISGALVKTHDRLVIEDLNVAGMLANHRLAQAISDAGWAEFARLLRYKQAWRGGEVVVADRWFPSSRLCPACGLRRELTLADRMFTCGCGHSADRDTNAAANLARWGQAHHANQSPDPQAGGRVTNARRRDGADQHSACAGETSPNDAGTDVHTAPAA

SEQ ID NO: 22236 - protein, 481 aa, Natrialba sp.
MADIQTRSGRIQEWLMKRTNTFAVRPLSDDDEQVLRDLLDASAALWNEVNFQRLMRYNDENGFEGDVFEADTGRLEGKYKGVLGASTAQQVIGKNTEAWKSFFTLKDQYHDESNTSVTEHPEPPGFRGNEDDGRVLKGVIRKDAYTVEWGARSRLETVVGEQLRDRHNSPKSRLRLEVVGDPNWPDYEDQSRLDLWYDETDSTFRASQPVTVSDDSRGTPLADHKAALDIGANNLVACTTTTGDQYLYEGRELFQRFRDTTREIARLQSKLPERRSLSESRKTSSSERLEEGRYSSERIRRLYRKRTRRRDHAQEALCRDLLERLYAEGVDTVYIGGLTDVLDTHWSVETNAKTHNFWSFKKFTERLACTAEEYGISVEVRSEAWTSQECPQCGSTDRTTRHQDTLTCPCGFEGHADLTASETFLRRHTEKAVRPMARPVRFEWDDHNWSESPRSHESPNEQRTDPSTVHRDGNVVSGESA

SEQ ID NO: 22237 - protein, 389 aa, Lactobacillus sp.
MTLKGIKLRIYPTEFQIQHIERNFGCVRKVWNLMLAMQKDRYENNHDCKFVSNFDMNILLPLLKKEYPYLKQVESTSLQCTNKDLSEAFKKFFKEHTGYPKFKSRKYPRQSYQSKNVNHNIQQVSDSYIKLPKLGEMKFKCGRDIPEVIKSVTIRRSPAGKYYAVLLVEDEKQVFDKTQAQVGLDMGIADLIITSDSVKYQTVRFDKILAKKKLNWERKLARRRLLAIKDIAKTKKIGLVEPKSLESYKNVQKAKRMVAKYSEKIVNQRKDYIQKITTQLVKDYDVITIEDLKSSNMIKNHKLARAIANQSWRMIRTMLEYKCDWYGKKLIIVNPFKTSQYCAECGYDDGKHELNIRQWVCPNCHSNNDRDINASKNILNKGLEQALVI

SEQ ID NO: 22238 - protein, 387 aa, Acidithiobacillus sp.
MIIHKAVRYRLETTQEQENLLARAVGCVRFVWNRALSVQKSYLDHQCGTLNYAGLCDLLTSWRNTEAFGFLAESPSMPQQQTLKNLTRALKDAFDRKSAKQFPKFKKKFVHDSMRYPEPDHIQFDLKPVDQDGRKVLPRIYLPKIGWVKFRKSCIIGGEIRNVTVSRSGGHWYAAIQIEKTVADPVHPATSAVGGVRNVTANILALSDGTIFQPITVYRDMQKKLAREQKKLAHKVKFSANWKKQKAKITRLLQRILELRRTVLHQISTIISKNHAVVVLEDLKVQHMTAFATGTVDQPGRNVRQKSWLNKSILNQGWGMLKRMLGYKLQWSGGMLLLVNPAHASQACGHEAHADVNAAKNILARGLATPHGVALTAGLAGVVCSPE

SEQ ID NO: 22239 - protein, 473 aa, Acidimicrobiaceae sp.
VSHSWTKVTLVSTTEKPAPISNTGEVLSRIVTFQFALNPNFKQKVEFDKCAGARRFTMNHHLARVKANLDSRSSERRTADDLKIPDETITQTLSWSAFSFIKEFNAWKNGESDDSLLNEDGSRGLSWRHELPYDVFESASVDAARALENFASSRNGKRDGPTVGFPHFQSKGKVTPTFRLRNRLSPAHSSSSQSIRFCDPSHLRLPKLGPVKICGPTRKVRRMMEAGRFHVYSATLKQRAGRWTVSLNGVASEFHQAVRSRSTRHLVPVGVDRGIASLCVAADANGASLETFEGVKILRESQRKLKAACRALARTTPGSHGRQQARIRLAKIHRKIANKRSHLVHQVSNSLVTQYQILVIEDLNVSGMMKNRRLSLAVSDAAMGELSRQITYKAKWHGVEVRVVDRYFPSSKTCSGCGVVKSELNLSIRSYCCLTCGLTIDRDLNAAINLARWKEVADVPTVKNFACFSSFET

SEQ ID NO: 22240 - protein, 294 aa, Euryarchaeota sp.
LACRDLEDGPSEGIRRSRYSLQEPLREPLRFPEVQEQEVVKEILSAPGELPHYAKGHRRPKTAGSAPLLRLDSGKARSGRLPPDHAERPSATVSDGSVIENPKPLRRMERSLKHLQRVVSRRRKGSSNRHKAVLRAQHLYLRITNVRKDALHKATTMLAKTKSVVVVEDLAARGLLKNHRLAKSVADASWSEFVRQLGYKTRWYGSKLVKADRFFPSTKTCSKCGTVKLEMSLAQRTFHCECGLVMDRDLNAAINLSRWPAVGRTHETPVRDERSQVENRCSSMKQEPRFQVAL

SEQ ID NO: 22241 - protein, 436 aa, Thermococcus sp.
MKRTVTLKLQPSKEQEKTLFELAQATAVIWNKLNYERLKQFKEFGKIDFGTTEKEAYYTFKGWVGGSTVQQLARKNAEAWRSFFSLLKKKKNGELPDWFKPQPPKFVKEGNERKLFIIPLRNDQYKIEGNTIELRRLGKFGRLKIQFKGRIHLKGKQGRLEIIYDAVKRKWYAHVSYTVEEKLTNGDWVKVPRESRGNLSAGIDLGVNNLIAVYVESGESFLVNGRPLKSIAFYWQKRIAEYQSKLNKSGCKTSRKLKRMHQKAKLQAKHYINTAVRQTVEKLYEMGVSKIIVGYPKDISRNSDKGKKQNFVLSYVWRFNYVIQRLKEVSEEFGISVIVVDEAFTSKLCPLCGQRHSNGRIFRGLFKCRREGVVMNADLVGAFNILRKAVKTITLSFPALSGGRGNGGKTLPEGLKSLPLLGFNETPQTSLSMARG

SEQ ID NO: 22242 - protein, 410 aa, unknown
  TnpB Polypeptide
LAHKIRLFPTAEQETYFHKATGTARFAYNWGLAQVKQALDAKSKAPDWRSLKKQLNAIKRTEFPWMYEVTKCSPEAALSDLGTALANFWAGKRKGRKVGFPHFKKKGQAKDKFYVSNDQFALLGNVIRLPHIGAVAMSEPLRFTGKIMGAAVSRTAHHWFVSIQVEVEHTSVAHKSHVRAGGDLGLKTPITLSTGKTMDAPTPLKQSLKALARANRRLHRRQKGSKNRRKAAQEVARRHERIANIRKDWLHKATTLLARRYSLIAIEDLNVAGMLRSRRLARAVSDIGFGELRRQLAYKVPARGGLLVVVDRFYPSSRTCRKCKRVKDMPLSERIYVCDCGHVECRDLNAAKNLLCEATRTVGRTGTKACGPFTSTPKRRRFGASGRNEAGSPDSDTGHSNNSINLYPVC

SEQ ID NO: 22243 - protein, 537 aa, unknown
  TnpB Polypeptide
MTDKEYKDALKKLHKATHRHILVVETNIPQDKARQILSLSDKVRKAGNELVAVMRNKYTQLCRTKRYRKLLLLYGKEKDETKRKKYGTQLKAMQKQYDVTWDFCRTTMIPIGKKYSVDAIFALTKAEDVWTGIEKCLYRNGRTLHFSKYGDFPCIRAKQTNRGIPISRKDDRLVGKIGKTKFGLKIKDDFQQEEINAVMNYLRQPEVEDMYALKDYLDEGKLTDTFRPCYATLVLREIRGKYRVFLHLCIEGRALPKHRKDGKPRHKLGNGIIGADIGTQTVAYTSRIKVGLKNLAERGQSIQKSERQERLLYRAMDRSRRAMNPQNYNPDGTIKKGPKKWNYSKRYKRLRYRHANLCRKNAINRKLAIHEDANNLRGLGNIFITEPKNAAKLMRRAKETTVNKKGKFNRKKRFGKSIRNRCPGTFQSVVQQKFESTGGLYIEVPITYRASQYDHTADDYIKKKLSQRMFNLTDGTRVQRDWYSSFLLYCCDRHTLNIDKFRCRHEFSECLEKEKAMIAWIKANKIKVLNSGIKIAA

SEQ ID NO: 22244 - protein, 397 aa, unknown
  TnpB Polypeptide
MIPVKMRYQFRLYPTADQRRILARTFGACRFVYNWALRARTDAYHNGSRMNYEASSSALTQLKKQPKTAWLYEISSVPTQQALRHLQTAFVNFFERRTSYPSFKRKHGPQSAEYTASAFDWNATHCHLTVAKLGRLDVRWSRPFTSAPTTVTIAKHSDGRYFVTLVLDATIQPLPKTGDAVGIDMGINRLATLSNGEHIVNPRLLKQKLRKLAKEQKALARKQKGSHRRERQRVKVARSHSSIADTRLDHMQKVTTSLVRRFDVICVEDLNVRGMVRNHCLAQALSDASMSKFVGLLEYKCAWYGKEMVKIDRFFPSSKRCHDCGHVVAALPLSVREWTCPVCGVVHDRDNNAALNILAVGQTDRINAQGDRRRRSKVLAKPRGGRRTVNQPEVQSA

SEQ ID NO: 22245 - protein, 232 aa, unknown
  TnpB Polypeptide
MMMPVLLLKSSVQGVSYVSRMADRWFVSITVDTEDRRQQHNENQEAVGVDLGVSALATLSTGEVVQGPKAYSKLVKRLVRLSRSLSRKARGSNNREKARRKLARLHARIANIRQEGLHQLTTSLARRFSIIGIEDLNVRGMLRNRRLSRSIADGAFYAFRRQLEYKSGIYGGTVVVADRWFASSKTCSDCGHRLEALPLSVRHWVCPECGAYHDRDVNAAIDLRNNAVSSTV

SEQ ID NO: 22246 - protein, 453 aa, unknown
  TnpB Polypeptide
MKSIDVREGSLLTLELKRAYYVPISDPRVSDLITWYVETLQKAIDIIWGNIRWELRKPKLVRRNGTLQTLMGFKLHNPIIPRGEKFNRMLRDILMKDNPYAKHWVDAIIRKAYSTIKSWRKRYLKGKARKAKPRIKRRFAKCKITLMKVDYKEKTIRITMKPHEYLEITWRGTWFEKRVEGWLVGEVTLKDDKIIIPFKNHKMVKIMDIIGWDSNELELTGYTPTTGFIHLDLRPLQSMKIVYERKKAIAQSKGKRGLYEKYVRREKNRVKDFINKLASQLPRTFPNTLHIFEDLEKEDMIGKGRVGKERRKRNARTPWKTIHRRIAEKALVARVPARNTSKTCSQCRFKVRDLRGQEFECPRCGFRMNRQKNAAVNIRRRYLEGGRKKRRNRMRGFPHRDELEETMKVDLWAGVTQSGQRLMTWWGDDRKPHLKPMKPRASRRPHIKRYKPP

SEQ ID NO: 22247 - protein, 441 aa, Streptomyces sp.
VRKRSSGSEPRCGEVPQREAVTCACVRIVTDRSLQGVGFPSVKRSFKYRFYPTDAQAVELSRTFGCVRKVYNLALAARAEAWKAGGERMGYGQTSAMLTAWKKTEELAFLATVSSVPLQQALRHLQSAFVAFREKRSQYPRFKSKRKSRASAEYTRSGFRYAQGRVRLAKMDEPLDIVWSRPLPEGAAPSTVTVSCDSAGRWYVSLLCEDTPAPMPATTNAVGIDAGLTALITLSTGEKIPNPRHERKDRDRLTRAQRALSRKEKGSRNRIKARTRVARIHARIADRRRDFLHQLTTRLVRENQTLVIEDLMVANMLRNHKVARSISDAAWRELRSMLEYKAAWYGRELIAVDRWFPSSKLCSACGAIADAMPLNIREWTCESCGTAHDRDGNAAVNLLAAGPAAAACGADVRPHRESSSRSGRSVAKQESPHVSVGIPSC

SEQ ID NO: 22248 - protein, 414 aa, Streptomyces sp.
VIVKLVVQVRLLPTPVQAAALEATLRACNEAATWVSEVAFERGEFKNFALRRLTYYQVRLRWDLGAQAAQHTIKKTCDAYATLRANLTAGCFGPPGSARHRRATQKPVVFRPLGAQPFDDRMLSWQLAGRTVSVWTTGGRMKDVAFTAAPEQLATLARYRRGESDLICRDGRWFLNATCEVPEAPLNTDPVDFLGIDLGIVNIATTSDGKIMAGRELNRIRARERGLRTKLQQKNTPSARRRLKRRRRKEARRARDINHKIAKHVVAEAERTSRGIALEDLTGIRQRVRLRKPQRATHSSWSFAQLGQFIAYKARRAGVPVVYVDPAYTSRTCAECGHIDQANRVCQARFVCRSCGFVDHADRNSSRNIRARARELWRCGVTSTAPAPPPRPRGGAGRKRSITASGARCASPGL

SEQ ID NO: 22249 - protein, 362 aa, unknown
  TnpB Polypeptide
MKLTLQLQLLPTASQKDDLLDTMDRFNQAATFAARVGFDAGVFGQVNIHRLAYKAIREKFGLSSQLAVRAIAKAVECFRRDKTVCPVFKSRSAICYDQRVLSFKGLTTVSIWSFSGRLLIPFVCGDYQQERHGRIKGQADLVYRQGKFYLLCAIDFPEGTPVKPEDVIGVDMGLVNIATDSTGETFSGEQVDKTRRHYAKHRAGLNRVGTKSARRRLSKVRKQEANFRRNENHRISKQIVAKAKATGSAIALEDLKGIRDRVSVKKPQRNRHAGWSFLQLRSFVIYKAALAGVLVVTVDPRNTSRTCNACEYCDKSNRKSQAEFECRQCGHSANADVNAARNIRAKGLVKVPMVGLVEAKAG

SEQ ID NO: 22250 - protein, 281 aa, Okeania sp.
VAGDLFTVSLSLYRGQRKRIPLTVHSASHQETLEKIINGDAALGSLKISKSRKGIWYALISVSMDVPEPELVNGWIGVDRGQNNIAVAALPHSFGKFWSGKQVKSLRRKFQLLRRQLQEAKKLKKIKDIERRERRIMTHINHVISKQLVQFAQDYNMGLRFEDLSGIRQSSKQRQKTKSDASKNRDHWAFYQLELFTRYKAIFAGVPVESVPAAYTSKSDHRHGVIGKRVKHTFTGVDGYTCNADWNASQNIGQWLGFSCPMNLCLRQASPTESCICNGYR

SEQ ID NO: 22251 - protein, 371 aa, unknown
  TnpB Polypeptide
MLVRSIPIKLKVNDLIIKTIELYKQGLQHCVDIAWGMKIRNNIKLHPFVYKDLRKMGLPSQLSIACIKQSCGMVKKAKTKPFIKRTSIRYNTPRSFSFKNNVLSISTIMGRVKIPVKIPDYALKYFDWEIRESLLTKSREKYYFTFTFSRESSINPNQHCRILGVDLGVNKLAVTSNNKFYGKNIKKLRIKHDKMVSTLQSKGTKSAKRKLKKLSGGWRRFMTWSNHNISKRIVESLNSGDVVVMEDLKGIRKTAKYNKWVHKWAFFQMQKFIEYKALAKGIRVVYINPKYTSKTCNRCGSLNTSRHSGFFECLCCGFHCDCDLQASRNISKRYTRNLGLAYITKPDISTDEHESSSRAIECEVRDKYPCL

SEQ ID NO: 22252 - protein, 406 aa, unknown
  TnpB Polypeptide
MKKSYKFRIYPIRKQEKRLETALDQACFLYNQLLEIHQQIYLGMGETLSEFDMNNLLKDFETKQLFAQTKQNIAKRISDAFNHFFRRIKNGEKAGFPKFHKRVFYKSITFPQYKQEIYPNNRLYVSKVGMLKIKKHREIEGQIKTLTIKKENNEWYATFSCENVPIEKVDNNFKSEVEGLDVGINKFLVCSDEREFDNPKFLKRSEKKLKRLSRRHSKKKKGSKNRKKSIIKLARQHTKIKRQREDFHKKLARQLASEIKYIGIEDLNIKGMVRNHCLAKSISDVSWGQFFSYLKYYKTIFEGEIIEVGRFEPTSQTCSNCKHKQNMSLDKRIFECEDCGLILDRDLNASLNIKKLTKNILNNTVGQTEFQACGDTIRPCFEFEKIQDKASVVKAGNYREISRRSP

SEQ ID NO: 22253 - protein, 336 aa, unknown
  TnpB Polypeptide
VPATCFTQCLRDQDTAFRNFFAGRAQYPKFKRKKSAGSLRFQGAGAAWKRGTLTLPKLGVLKLAESLPSVDRPDLVTLTLDATGRYFVSFCAEVEKAPPSFSYRAPAVGVDLGLKHLATLSTGEKVDNPKHYQARLRYLRQQQRCLSRRQTGSRRSERQKLRVARAHDKVRQARQYALHDFTTRLTQKYDLIFIEDLNVKALSRGRNARSINDAAFGEIRRQLTYKTEWRDKILIAVDRWYPSSKTCSNCRHVLDELRLDVRYWTCPKCRVSHDRDVNAARNLLMEGLRQLAARDERDLRVDAGVACPEEILVQVLAEEARSGQFNRACLEQERLH

SEQ ID NO: 22254 - protein, 484 aa, Bifidobacterium sp.
MNRMSQKVVIERVELRGAAPFLGMGTLPSGEQAPTYSANPDIVMDWLCDAWRCRFNQLRSRRKKWDRYKEQLVPIGYAVNEWTDRQARMECSWLAAVPAMVLQSPNRIENTEWWAANKRRKTLKKQGKNPGSMPRFKKKHERKYFVCWHNKGANANYHQFNRHHGEVVIAGQNPSQYRLGGQGCRWSLHIRIRVSQPIRDYTSVGVDWEARTLVFINTPQPVERAMTGAMVGIDRGVKHTLALSDGAFQDLPKGKLEKIDREIRRRQKAQARRVKLSGQTGKEYRKHPSNMYRKTRQEIKDLHAKAHNIIADWQHKATTRLVRDYDIIVLEDLKLDNMSRKAKAKPDPDNPGKWLPNGQAAKRGLNHGLRIAALGGITQKLAYKTSLTGTNRLILVNPAYTSQTCSQCAHCSTGNRKSQADFQCQQCHMRMNADHNAAINILKRGYDHLLGLDEAERANTEQDPPEANRNHQASVRARKTSATQ

SEQ ID NO: 22255 - protein, 402 aa, Escherichia sp.
  misc_feature (14)..(14): Xaa can be any naturally occurring amino acid
  misc_feature (38)..(38): Xaa can be any naturally occurring amino acid
  misc_feature (74)..(74): Xaa can be any naturally occurring amino acid
  misc_feature (95)..(95): Xaa can be any naturally occurring amino acid
  misc_feature (139)..(139): Xaa can be any naturally occurring amino acid
  misc_feature (156)..(156): Xaa can be any naturally occurring amino acid
  misc_feature (167)..(167): Xaa can be any naturally occurring amino acid
  misc_feature (178)..(178): Xaa can be any naturally occurring amino acid
  misc_feature (199)..(199): Xaa can be any naturally occurring amino acid
  misc_feature (210)..(210): Xaa can be any naturally occurring amino acid
  misc_feature (226)..(226): Xaa can be any naturally occurring amino acid
  misc_feature (242)..(242): Xaa can be any naturally occurring amino acid
  misc_feature (247)..(247): Xaa can be any naturally occurring amino acid
  misc_feature (298)..(298): Xaa can be any naturally occurring amino acid
  misc_feature (354)..(355): Xaa can be any naturally occurring amino acid
  misc_feature (365)..(365): Xaa can be any naturally occurring amino acid
VKRLQAFKFQLRPXGQQEREMRRFAGACRFVFNRALAXQNENHEAGNKYIPYGKMASWLVEWKNATETQWLKDXPSQPLQQSLKDLERAYKNFFXKRAAFPRFKKRGQNDAFRYPQGVKLDQENSRIFLPKLGWMRYRXSRQVTGVVKNVTVSQSXGKWYISIQTEXEVSTPVHPSAXMVGLDAGVAKLATLSDGTVFXPVNSFQKNQKXLARLQRQLSRKVKFSXNWQKQKRKIQRLHSCXANIRXDYLHKVTTTVSKNHAMIVIEDLKVSNMSKSAAGTVSQPGRNVRAKSGLNRXILDQGWYEMRRQLEYKQLWRGGQVLAVPPAYTSQRCACCGHTAKENRLSQSKFRCXXCGYTANADVXGARNILAAGHAVLACGEMVQSGRPLKQEPTEMIQATA

SEQ ID NO: 22256 - protein, 262 aa, Salmonella sp.
LTWLELPILAGSLLTGARDRVHRPFRPAQHQNQRLRGQNDVFHYPQGVKAGQASNRLYLPKPGWMRYRNSREVTGEVKNVTPSQPCGKWYVNLRTEYEVADPVHNTGTMVGLDTGVTKLATLSDGTVYQPVNRFKQASASWQKQKRKIRRPHTHMANIRRNHLHKVTSVISKNHAMIVTEDLKVSNMSKSAKGTAEPPGRNVRAKSGLKRSILGQDWYEMRRQPEYKQHWRGGQVLAIPSGIHQPAVCLLWSYSERKPPVTK

SEQ ID NO: 22257 - protein, 124 aa, Salmonella sp.
MRYRNSREVTGEVKNVTPSQPCGKWYVNLRTEYEVADPVHNTGTMVGLDTGVTKLATLSDGTVYQPVNRFKQASASWQKQKRKIRRPHTHMANIRRNHLHKVTSVISKNHAMIVTEDLKVSNMS

SEQ ID NO: 22258 - protein, 361 aa, Paenibacillus sp.
LLVAYKYRIYPTKEQKQKIQFTLKRCRLLYNRLLEERILAYKQEGKTPNYYDQANTFNERKQHIPALKQVHSQVLQDVAKRLDKAYQAFFRRVKQAETPGFPRFKPQSRYDSFTYPQGGYTIHGNKIKLSKIGEVKIKLHRELQGKMKTCSIIIKNGKYYACFSCEVEAKPLPITNMKVGIDLGLKHLAIPSEGEPIESPKYLRLSEQRLKHLQRAVSKKKKGSKRRSKAVHQLAKLHEHVANQRKDHAHKVSRKLVNQYQLIAFEDLNVLGLVKNHHLAKSIVDAGWQQLVQFVMYKAESAGRQVVQVNPYNTSQQCSNCGEIVKKTLSERTHQCSCGYVADRDVNAAINILNLALKNVS

SEQ ID NO: 22259 - protein, 417 aa, Haloterrigena sp.
MVTLFVKYVKVRRTVPVKLDVTDEQADLLHETIDEFLWAANYVVDAAWDGEWAETRKSVLHEETYDEVREQTRLHSNHVQSARDRAVDALDSVVAKWSKGEYASLPTFTTPFCEYNQRNATFHDDYASLSTVNGRVTVEYVLPDKTRDTPHSKYLRSERWETTGATLHYRRGDFYLHVRTKADVDVPEPAENGTVLGVDLGVENIAVTSTGAFWSADELNHWRTEYVQRHKSLQECGSRWAHKNVQAVGRKETGRFKQYLHRVANELLEQAIKNGCTVIAFENLTDIRDRIPNVRKFHEWAFRRLYEYVSYKAEERGIHVEQVNPKNTSRRCSSCGFTHEGNRPSQETFCCQSCGYENHADYNAAKNIGYRLLRNQTGGEGGAPVGVRLNSGMLNANGVKSVPDSVRAGVHAESPPP

SEQ ID NO: 22260 - protein, 426 aa, Haloterrigena sp.
MTTEEPTLVKTLDFQLDIQSDNESLLKDATLEARWVYNETIRLAKEGVDWDDISPRLEDEADLIKNTTQRIVAKALEAMENYYDYDDYNIPSHTKDGAYPLRANYEEGYNLSLTDDGEVAFRISAKPYNHVKGILKGSDAHLDLLKNALTSDEWKVTTSEALWRGGEPELHVNIRNTERTVRDKQDSRTVIGVDVNEDNIALTSLSEDGVEDTLVIDFPEIKFERHRYFTMRKRVQNAGKSSIHDTLEGREERFVRDRLHKVSRHIVEWSQQFEKPCIVFEDLKEMRDSIDYGTRMNRRLHYLPFRALQFYTSYKAAFEGIPSESIDPYKTSQRCPLCGHAERANRRKKRFKCKSCDHQDHSDRSASVNIAVKGIEKYMDWNVPALNSLPVVRKVRRQASGLVDSPTVTHPTVRGYPADGQVEVSD

SEQ ID NO: 22261 - protein, 426 aa, Haloterrigena sp.
MAKQVVARTYTASIKNQQQVQDDLDALGFAASKLWNVGRWTISRVWDEIDYIPEHDELTAYLKSHERYDDLHSQSSQRVLQERAEAFNGWYGKRRNGDQRANPPGYRKHVDDHPRSTVTFKNKGFKLDTEYNRVRLSKGSNLKEYWSDFVLCEYQTRPDVDLSTVESVQQVRAVWTGEEWELHIVCKVEVEVSEVPGEKTVSVDLGINNFAALAYEDGHSELYPLNCLKQDDYYFSKRLARCDDSDSEQANRLNQKKSARRTHYFHTLSKHIVQRCVDEGVGTIVVGDLSGIRDDEENGKAKNWGKHGNLDLHSWAFDRFTDLLTYKAEMEGISVEEVSERDTSKTCSCCGRKRDANRVERGLYVCDDCETVANADVNGAENIRQKVSPNSPSLSANRSNGWLAQPSTFLFDKETGAFAPQKQVTS

SEQ ID NO: 22262 - protein, 359 aa, unknown
  TnpB Polypeptide
MGAQFQCYNLLVILTYRYRIKTTSGARLALDAMARAANLVWNFCGETQEAARRWNRRWPTGFDLIGLTNGSSRALGLHSDTVQAVCKQFAVSRDEAERRPRWRGKKSLGWVPFQAARAIRLDGDAIVFLKRRYRLWLHRPIDGEIKSGSFCADARGRWYVNLQVEVETDTACGSGEVGIDLGLKTLAAISTGDRIENPRHLDRYAQKLATAHRAGNAKRARAIHAKIVNCRRHFLHERSSQLVRDNRRIVVGNVNASGLARTSMAKSVLDASWSQFRFQLRYKAIRHGAEYIEADERFTTQVCSGCGAVSGPKGIEHLGVRDWVCCECGACHDRDINSAINILVSGRKVGLRLTGNDRL

SEQ ID NO: 22263 - protein, 489 aa, unknown
  TnpB Polypeptide
MSRRKKSKQPTQTSRSSLTLDLGSISNDETLSRYWNAACGDLQSRLWCPIEIDWQEPGSDSSDSSLSLTEGQSSRLIKAVMNPNPLTQKISLASSLASVTPTTANEVVAVRKIRIYPDNERLYWRTLHAARRAYNLAIDAHKRRDGRSQTIVRREIVNAVRDIFQDVPAVALDEAVNESYRTKSSIIRRRTSGEKCDYRFRCRKDTKHSFTVQKLSKSGTPYPTLLGGVRLTEEISDRAVGSLADVIYEDGRWFLCAKISVTTGGAESQGLSVAAIDPGVRTFATVFSFDSLAKIGEDFSKNEIYPMAVRLDRLYSERQKLRNICPRRFVDWKQWHWDRWRGVEKRIHRIKNRIKDLTDDLHRRAADWLTDKYDVLLLPTFGVKGMTKRAGRKIRRKTVRAMLMLSHFRFKQYLKWIALKKGKWVVDVNEAYTSKTDSRTGDVKNIGGATKINGLDRDVNGARGILLRALTRQLEPEIITTPAVADVAV

SEQ ID NO: 22264 - protein, 378 aa, Bacillus sp.
MEVNQMIINKSFKFRIYPNQAQAILINKTIGCSRFVFNHFRSLWDHTYKETGKGLTYGTCSAKLPAMKKEFVWLKEVDSIAIQSSVRNLADAYTRFFKKQNSVPRFKSKKNNVQSYTTKQTNENIAVVGNKIKLPKLGLVRFAKSREITGRIVNATVRRNPSGRYFVSLLVETEVQELPKTHSYIGIDVGLKDFAILLDGTPYENSKFFQSLEDKLAKAQRVLSRRMKGSSRWNKQRVKIARIHEYISNARKDYLDKISTEIIKNHDVIGIEDLQVSNMLTNRKLAKAISEVSWSQFRTMLEYKAKWYGKQVIVVSKTFASSQLCSCCGYQNKDVKNLNLRKWDCPSCRTHHDRDINASINIKNEAIRLLTAGTVGLA

SEQ ID NO: 22265 - protein, 359 aa, Bacillus sp.
  misc_feature (306)..(339): Xaa can be any naturally occurring amino acid
VKLVPQTITVKVKLLPTKQQIMLLEQSSHEYIKIINALVSEMVEAKKSTKKSTKDIEANIPSAVKNQAIKDAKSVFSTKVKKSKYKIVPILKRPVCVWNNQNYSFDFTHISIPFMVNGKSTRLKVRALLNDKYNRNFELLKHKLGTLRITKKSAKWIAQISVTIPTNEKTGTKILGVDLGLKVPAVAITDDDKVRFFGNGRQNKFMKRKFRSVRKKLGEAKKLNALRQLDDKEQRWMKDQDHKVSRAIVDFATDNNISVIRLEQLTNIRQTARTSRKNEKNLHTWSFHRLAQFIEYKATLVGIKVXXXXXXXXXXXXXXXXXXXXXXXXXXXXXXXXXXLSFDSPPFRYMTIIYQTYIR

SEQ ID NO: 22266 - protein, 403 aa, Bacillus sp.
  misc_feature (293)..(326): Xaa can be any naturally occurring amino acid
LLPTKEQIRLLEQSSSDYIKLINTLVSEMVEAKKSTRKSTKDIKANLPSAVKNQAIKDAKSVFSTKVKKSKYKIVPILKRPVCVWNNQNYSFDFTHISMPFMVNGKSTRFKIRALLTDKYNRNFELLKHKLGTLRITKKSAKWIAQMSVTIPTNEKMGTKILGVDLGLKVPAVAITSDDKVRFFGNGRQNKYMKRKFRSIRKKLGEAKKLNALRQLDDKEQRWMQDQDHKVSREIVDFATNNNISVIRLEQLTNIRQTARTSRKNERNLHTWSFFRLAKFIEYKAKLVGIKTXXXXXXXXXXXXXXXXXXXXXXXXXXXXXXXXXXRNLLLFFHIPLFLHQNRHERYPYIVFLHSNSFEFRTVKSHAKIRQLDSRHFPQHRMCANHSNNQSLKLIVIMLHEHL

SEQ ID NO: 22267 - protein, 459 aa, Mycobacterium sp.
MAKFEVPDGWCVQAFRFTLDPTEEQARSLARHFGARRKAFNWTVATLKADIQAWRETGVETEKPSLAGLRKRWNTVKDEVCVNPETGAVWWPECSKEAYADGIRGAVEAYWNWQTSRAGKRAGKRAGLPRFKRKGRDADRVCFTTGAMRVEPDRRHLTLPVVGCVRTHENTRRIERLIRAGRARVLAITVRRNGARLDASVRVLVGRPQQPGVALPDSRVGVDVGVRRLATVATVDGTVIEQVENPRPLDAALRELRHVCRARSRCTKGSRRYRERTTEMSRLHRRVNDVRTHHLHVLTTRLAKTHGRIVVEGLDAAGMLRQKGLPGARARRRGLSDAALGAQRRQLSYKTRWYGSHLVVADRWFPSSKTCHLCRHLQDIGWDEHWVCDACTARHQRDDNAAVNLARYEETLSAVGPVGAAVKRGADRKTRQSRAGGCEARKGTGHPAGEQPRDGVQVA

SEQ ID NO: 22268 - protein, 462 aa, Streptomyces sp.
MDGQAHSARTLWNLLHDWWTMLPRGKRSLAAADAAIRQARKEIDWIAHLPAQAAQAVLKTYFQAWKNCWEGRAAAPDFKARFRTVMSVDIPQGRDLCITRAHRRWGMVNIPKVGRVRFRWTKGLPVGKRANADNRITGARLVKDALGWHIAFRVQTLEPTPEPHTGPEVGIDMGVTVPLALSDGKTYDHDAWLTSEEQVKLLQMERRAAHRKSFCKRGERTSRRLRATYDQIAGIRARAKRRRLDWQHKATTAIAAKYSVVVVEDLNVTNMVRSAKGTVEAPGKNVAQKSGLNRAISGEAWGRTVGLVMYKTARNGGTLHKVPAPGTSQRCSMCGFTTPGSRESQAVFVCKNSPPTVSATTRTCSATPTSPNSPTSPSACAPRAPLRHRRGRPRRAVHGPRRHPVDHHGRPGPYRRAPGPLRPSPLRVSAARGLREATGGWSRHSRRRRARPRPWWPTRRKS

SEQ ID NO: 22269 - protein, 383 aa, unknown
  TnpB Polypeptide
MIDLLLQDIKEGVLMQNRAIKYRIYPSAEQKVLFAKTFGCCRKIWNLMLADKITYYQQTQKMLQTTPAQYKKTYPYLKEVDSLALANVQLHLQTAYKNFFRDKKIGFPRFKTAKRCRKSYTTNCQNGSIRIENDRIRIAKAGSVKAVLHRLPEKDWKIKSATISQYGDGTYYISILFEYENFPVSPAPVTEEQAVGLDYKSAGLYVDSNGKCQNMPGYYRMAQMKLAKKQRKLRHKVSGSRNYQKQQKRTARVYRHISNQRKDYLHKLSTAIAKQYAYVCVEDLNMRSLSNKGFGNGKATLDNGYGMFLSMLDYKLAEHGGKLVKVDKFFPSSQICHCCGCRNPEVRDLRIREWICPDCGAVHDRDTNAAINIRTEGMRLLAA

SEQ ID NO: 22270 - protein, 373 aa, unknown
  TnpB Polypeptide
MVANRAYKFRIYPNDEQKILFAKTFGCVRMVYNHWLDRKIKQYEENKINETYTICAKEMAAMKKTEEYGFLKEADSIALQQSLRHLDTAFQNFFKQPKTGFPRFKSKKRNKNSYSTVCINGNITLSNGYLKLPKIGQVRLKQHRIIPEEYRLKSVTVSQTPSGKYYASILFEYEDQVQEKEMQKFLGLDFSMHELYRDSNGKEPAYPGYYRNAEKKLAREQRKLSRMQKGSNNRNKQRLKVAKLHEKVSNQRKDFLHKQSRQITNAYDCVCIEDLDMKAMSRSLKFGKSVSDNGWGMFTTFLRYKLEEQGKKLVKVDRFFASSQTCSVCGYKNAKTKNLALREWDCPQCGTHHDRDVNAAVNIRNEGMRLVNA

SEQ ID NO: 22271 - protein, 421 aa, Cyanobacteria sp.
MSLTYEFKAIPTTEQVQLIEHTLTVCRKVWNFALRERKDWLNSRKCQINACSIESEYIITADAPYPNYATQCKSLTEAKSKFPELASVNAQVLQQVLRKLETAFVDMKRKGMGFPRFKNRYRMRSFVYPQMGKGQLLKGNQIKLPQLGWMEYVKSREIPDGFAIKQARIVRKASGYFVQLTLECDISVPDIMPDGHPVGIDLGLDKFVATSDGDVIDRPRFLNLLHRKLKLLQRRLKHKKKGSNNRHQLNRKIARLHQRISDTRKDWHFKLAHKLCDGAGMIFVEDIDFRVWAKGMFSKHTLDAGFGQFLSILKFVCWKRGVYFDKVDKNYTSQVCPQCDAYTGKKELKDRVHVCPECGYTTHRDVAAAQIVRNRGRSGVGRILDNKEIACGDGLAGTGNRLVKSLRSRKKSEEACLGTAS

SEQ ID NO: 22272 - protein, 432 aa, unknown
  TnpB Polypeptide
MKQLLAFKYRIYPTEDQEVLLSKTFGCKRVIFNHYLEIQETRYKNKEPRLRHFDINKDITKLKDEKEWLREVDSIALQSSAEDLCSAYDNFFKSVTGKRKGPKIAVPKFKNKHSRQSYRTRNVRINEDGSLQIPKLKTVKAAIHRKIPEGSVIKTTTISRNPDGRYYASILVETEVALQPMIFRKIGCEAGLREVGCDLGLKDLLIMSNGMKFKRPDELPNIARTKQLLKLKQKQFARTKKSSKNHDALRRQVARLYSKVTRQRNEYYHLVSRYLVDNYDSIYVEDLSSKNMLQNRKLSRAIHEVAWTTLSGMIQYKSSWAGRTYHRIDRWYPSSKTCSSCGHKLEKLDLGTREWICPDCGTHHDRDLNAAMNILQVGQSDCYGEAIKSHAIGDLGLEIPVALQKMIVKIERSNVDTLVGHGSGQAASFRSW

SEQ ID NO: 22273 - protein, 460 aa, unknown
  TnpB Polypeptide
MLRHAGARRWAFNHAVAVYRHQRVEYLSEQAAAAEACRPAVAVRQPGFQDVNSAYNQWKAGRVAELPRWWIATHSDPAPAWVYEISSMVSLWAFREANEALNRYFDSATGRQGGPATGFPQLATRKSSPTRFKVSGGRSGARPSGSRHIALPIIGRVRTHESTRKLLRRIANGTVVVKNATISQRAGRWYVAFNCEVLATAKVRPGPSRRQRAGGIIGVDVGVKVLAALSTGELVPNPRAANRYRARLTRAQRAAARCERGSRRQQDLYRRLARLKHDEANLRRARLHELTTRLVQSHDHVVLEDLAIKTMTVTGRGGVAHPGLRVQQKAGDSGRGVRGAAPPIHIQNRVVWGSALDSEPLVSLQQDLLGVRVATSKPHARRSAFSLPGVRSRDQSGPQRRDQPASARRGWRTPHWEPTLAVASTAGETKSARFGEKPAPGQTAGVRRAAHDRKVTASIC

SEQ ID NO: 22274 - protein, 230 aa, Methylacidiphilales sp.
MSYGCQQILISPDKDTGALLEYVCREANNLINCGIYYSRQYYFKTGKFPSRADLHKQIGTIQKNKHYQALYSDTAQQILTGVAESFKSYVGLLKGLKKGAVNQKPRLPNYRTPGGLALATFTGRSIKLKNGILRFPLGSLVKTWFGVDSFYLPMPTNLDFKSIREVRILPRNRCFYAEFVYQTTDVAIEVDKSKVLGIDHGLNNLLTCVSNIGTSFMLKIIFLPERKMYY

SEQ ID NO: 22275 - protein, 569 aa, unknown
  TnpB Polypeptide
MSRWPSSPSFVSSSSPSVSASSRPTWNSRPARLISSARSMTRSPTQERPWSSDMVESIPNGLFNARCTTSSRSTTRPPSTCTTAVSGSTRRPISRTTLPSTVTRPAAMSSSAARREATPAWASTFCSRTPSGCSCERFIVTWPGYCVVRDGEKWPCSTRLPSKFHQVRTAYKVRAYPDAEQAALLRRTFGCVRLVWNRTLADRQRRYTTQQRSTSYRETDAALTSWKSGELSFLSEVSSVPLQQALRHQHNAFQAFFAGRGRYPRFKSRRGRQSAHFTRSAFRMKSDGLRLAKTSAPLRVAWSWPNVDLPSLDPTMVIVSCESDGRWFVTFAVDVDEPAPLPTTGQTVGVDLGVTDFAVLSTGQRIANPRMMARRERGLRRQQRRLARCQRGSKNQRKQTRRVARAHSRVRDARRDFLHQTSTQLVRRFDRIAVEDLNVRGMIRNRRLAKSIGECGWGEFRSMVEYKAQRAGRVVVVVDRWYPSSKTCSACGHLLAALSLGTRQWTCPGCRTRHDRDVNAAKNIDHAGELPVAACGGDVRHCGTSRVQSPTKQEPSRATARIPIHKGGE

SEQ ID NO: 22276 - protein, 303 aa, unknown
  TnpB Polypeptide
MASGDEGALTISIGVRVSPEPGAIELLSRYNVALNYAINKILRLNLKKIGEIHNALYRELREWFGLPSRIALDCYRDALANAKAWRNNPKKGKRPKVKKLSMLLHQGSSYRIEDGYVEIIGGIRLKIIGWDRRYDEYENREARLVYREGRMILWISKRIPRPKQYKPRDAIAVDINERKIVYGDDKINKDIGTAVNRAYKWKILAENLQRKYPSPRYPAWRRRKAIHNRIRSYHRKARNILEDWARKAPLKMVRLALKLQHAVAREDLTGLINSLRKIKNKDHRTKLIIMGYSRLVKWIDWQL

SEQ ID NO: 22277 - protein, 170 aa, unknown
  TnpB Polypeptide
LRQKKQDFSEKNEKRLAREQRKLSRCVRGSHNYELQKKKVARCHEKIRNQRRDHLHKLSRKIADGYDAAAVEDIDMKAMGQCLHFGKSVQDNGYGMFREMLDYKLAWKGKKMVKVDRFFPSSKKCCKCGRVKKELKLSERVYHCVCGNEMDRDRNAAINIREEARRMLTA

SEQ ID NO: 22278 - protein, 225 aa, Microcystis sp.
MLHKLFSLLVPLSDTDHNGDKVDNPQFLRKSEKRLKRLQRRLSKKKKGSKNRQKARQRLAKAHLKVSRQRKDFAVKLARCVVHSNDVIAYEDLRVKNLVKNHCLAKSINDAAWYQFREWIEYFGVKFGKITIAVSPNYTSQNCSNCGETVKKSLSTRTHQCKCGCVLDRDENAAINILKRGLSTVGHTGTFGLDPINAWGENTSTFSEAILSKQVISVNQESPSL

SEQ ID NO: 22279 - protein, 208 aa, Bacillus sp.
MAKRNKAYKFRLYPTDEQALFIRKTFGCVRFVYNKMLAERKETYKLLKGDKDALKKAKPPTPAKYKKEYEWLKEVDSLALANAQLNLDKAYKAFFKGKAKFPTFKKKRHKQSYTTNVVNGNIQLLDGHIKLPKVKMVKIRQHRDIPSEHKIKSCTISMTSSGKYYISILTEYEKKIESKKIEEVIGVDFAMDGLFVDSEGKKANYPKF

SEQ ID NO: 22280 - protein, 443 aa, Candidate divison MSBL1 archaeon
MQTTIRGKIFPSKDQAEKLDELMRIQSSCMRYSYSRLCEGKSKSEIEDDLKGKFSEINSRYRRGGYFRAKFNYESALELVESGELESPEKVVFGGRKNLKKRERGKISNEEWKRLRNNQLYSRGDKTKRGNLNLRLVEQDGGLHLRVNVGNREWIHVSACLPREKGRFLAGEKPYGVRIIRKGGEYEVRVSFEEEREPEISFEKGAVGVDFNHQTIDMEVANEQGQLKDGKTIECSEITTSRKSKRENLIGNYAKKVVNYAKYWRRGLVLERLEDVARGRRNQHEFTHKKLLEAVKRRAEKEGVEIREVNPAYTSVIGRHKYASYYHITIHQAAALVVARRGQGFSEHLRGLKTPLFEALEAGEEGENVPDRRVHSWSLWSLTRGLPSRKGASRKHSSQSPETIGVESSGTIGSTERSPGEGDSSEGKTVSPGSGPPVREAVA

SEQ ID NO: 22281 - protein, 379 aa, Homo sp.
MIRCQKTRIYPTPEQVQLLDKSFDVARFAWNTALQESLGTKVYSGYTLRNQFVKLVKPKRDWLAEVSKEAYANSILDLGKAWKEVFDSARGTRKGKRVGQPNFKAKKNAKQSFRVESIKKNNLTWIGKELKAPKFTGKGKSLPKIKTAEAPRWSNGEVKAITFSRNGDKYFISVRFDVPNPKNTRKPHTLNGGTVGIDWGVKTLLTLSDGTVFTSPDYRKIDRQIRKAQRNVSRKQVGSKNREKAKVKFLRKTNHKVNMIEDVLHKATTFIVQKYNLIKIEDLRSSNMMKNHSLARKIAEGSFYKFKTMLIYKAEQLQKEYGGNVAVELVNPRNTSQICSHCETKAEVKLELKDRVFTCNHCGMSKDRDLNAAINISRR

SEQ ID NO: 22282 - protein, 397 aa, unknown
  TnpB Polypeptide
MLRAHKIKLTPTIEQVEYFNQACGVARHAYNWALNEWQKQHSAGLKPSEAALRRQYNAIKPIEFPWSMEVTKCASQQAIKNLGTAYKNAFRRIKEGKKGAKIGFPTPKKKGIHDSFRADNGSTTKPDENDVTKKIRVSAVEIDGKTVKLPKIGWIKMRENVRFDGVVVSTSVSKQADGWYISLQIETDDRLVRKDYGSVGVDLGVKTLAVMSTGEVVPGTKSHKVNLKRLKRLNQSLSRKKIGSANRAKAKTKLGNLHKRIADIRKNDLHKLTHKLSTEFDIIGIENLNVKGMVANGKLARAVSDQGFFEFRRQLEYKALMTGSNVVVADRFYPSTKTCCECGQIHDMPLKKRVMDCDCGNVIDRDLNAAKNLEKLAVSSTVIACGESSSGADKLAV

SEQ ID NO: 22283 - protein, 403 aa, unknown
  TnpB Polypeptide
MIIQRGFKTELELNNRQRTLYRKHAGCARFAYNWGLRRKIETYKLTGKAPNAMELHRELNQLKLGEFSWMYEVSKCAPQESLRNLDKAFEHFYRRLKNGQKPGFPKFKSKKQGLGSFRLTGKIRVFEHFIQLPRLGRIKLKEQGYLPSKSNRVHILSATISEKAGRWFVSLQVREEISVPKNVGPIVGVDLGINRLATISDGSVIENPKALKRYGRKLKRFQRYLARKQKGSRNWEKAKRRLQRLHVQVTNIRRDVLHKTTTMLAKTKSIIVIEELNMSGMLKNHRLARSLADVAFFIFRSQLEYKTKWYGSQLIIAPRFYPSSRCCSKCGNIKEKFSLSTRIFRCEKCGLLIDRGMNASYNLETVTTSSMETENAWSETGGNSLLAVPVDETGTEQRIIQFS

SEQ ID NO: 22284 - protein, 284 aa, unknown
  TnpB Polypeptide
VPLTGEVERPDPEPREVQGPEDGVGIDGGLEAFAVLSDGTRIEAPKPLARALRLLKRRSKPLSRKQKRTVVDRDPETGEERKRTVFSRHYEKAALRLARLHRRIQNIRRDFLHKVTTELAKAKPVRVVEDLNIRGLGRNGSLSRSIRDGGWGTFRRMRECKCAGYGARLIVAPRGFPSTKRCSRCGWVAPALPLSRRVFRCGACGLEVDRDLHAALHLRDYGLAALKGPTGSSPGRDACCGVPSRSKTGWGAPDPSGGGTARSRSTSHGSRKQEAAGHGFRPSG

SEQ ID NO: 22285 - protein, 251 aa, unknown
  TnpB Polypeptide
LSLCIARDVVTVECASTVGVDRNLRNLTVGNDQETRHHDLSETVRIVKTTLRIIASLRREDTRIRTGITSKYGERRTSRTSHLLHSATKTIVAVAAQRRQAIVLENSQGIRCLYRKGNGQNRKYRGRMNSWSFSEAQRQLEYKARWIGLPVIRLSRRETGGSSVSCPRCGERLQSDRRLGRKLWCGKCRIVMDRDMVAAVNLSRQGRVRFARSRPPIIEAQGGAVEAVKGNPTPAVIPGVDAPKLTQLTKS

SEQ ID NO: 22286 - protein, 414 aa, unknown
  TnpB Polypeptide
MTTLTRTVIVPSVTLSQRKFTTLKELEGIYKNIVAELVDFGFRNGIKSFTGLKKQKYRELRDRYPSLPSHYIHTACQDASTRIKSFLKLKRKGVAKTEKPEVNKVSIWLDDHLWKLIGRTMIRVATHRGFIYIPLEPHKLYWKYLNSGWRLRTQPKIKLDYEKRRILVYFVFEKDVQQEIGSSLMLPVDINEGNVTIKLGNKVFVLLTDIRKVTVGYSRYREVAQSINGNGELRRTLSNNEGNKKRDRRLKLANIVVNTAKQAGAVVVLEKLPKKCPENMIRNIHDKRLRHRIYQAGFRMLLKTIIEKCEEKRVPYTLVNPKGTSSICPFCGSKLMRGDAPRQLYCKKCKKIFGRDVVAVLNLEKKATSQGRVPFASMPNDSSLEVAVLPMKDWMRRRSLPLIPNETILTEMMR

SEQ ID NO: 22287 - protein, 378 aa, Bacillus sp.
MEVNQIMMNKAYKFRIYPNQAQAILINKTIGCSRFVFNHFLSLWDQAYKETGKGLTYGTCSAKLPAMKKELVWLKEVDSIAIQSSIRNLADAYTRFFKKQNSAPRFKSKKNNVQSYTTKQTNENIAVVGNKIKLPKLGLVRFAKSREVEGRIVNATVRRNPSGRYFVSLLVEIEVQELPKTHSYIGIDVGLKDFAILSDGTHYENPKFFRSLEDKLAKAQRVLSRRMKGSSRWNKQRVKVARIHEYISNTRKDYLDKISTEIIKNHDVIGIEDLQVSNMLKNHKLAKVISEVSWSQFRSMLEYKAKWYGKQVIVVSKTFASSQLCSCCGYQNKDVKNLNLREWDCPSCCTHHDRDINASINLKNKAIKLLTARTAGLA

SEQ ID NO: 22288 - protein, 342 aa, unknown
  TnpB Polypeptide
MLAERIEIYEQFKDDEIELKKHKSPTPAKYKTEFVWLKEVDSLALANAQMNLQTAYNNFFRDTKIGFPKFKAKHRDKDSYTTNNVNNNIRIEDNKIKLPKLGYTKMNQHRAMPSNQIIKSCTISKSPTGKYFVSILVEFLQDVQPILSTMENVLGLDFDMKNLYTDSQCVRADYPRFYRKALEKLAKEQRKLAKCSKGSNNRRKQKIKVAKVHEKVANCRKDFLHKKSREMANSYDAVVIEDLNMKAMSQCLNFGKSVGDNAWGMFTTFVKYKLENEGKLLVKINKWFPSSKTCHYCGELNKELQLSDREWTCNFCGCTIDRDYNAAKNIRDEGLRLLGLIA

SEQ ID NO: 22289 - protein, 179 aa, unknown
  TnpB Polypeptide
VPRKFIKPKKTGELVRQSNNYRKSCQRLGRRHLTVQRRRRDFVVKTAKALVESSDFIAYEMLFVKNLVKNRKLSKSISDASWTQFLSWVERYGMLYKRPVVAVPAQYTSLDCSGCGTRVKKALSIRTHICPKCYLVIDRDENAAINILVRGLNIAGIVLNSSTALLIRELTLGERTTSV

SEQ ID NO: 22290 - protein, 438 aa, Moorea sp.
MVKEQSYWGCQQNLISPEKELLAILKYICTESNKIYNCAVYYARQIWFKTKRIVGRAEICAQMKHNRHFTAMYVSASQQVCNGVAESFRSFQKLNKLFWTGFLDQRPKPPSYRKAGLFTVSYPKRWLKLVGEKIRLPLGRQVKTWFGLAEFFIDMPSNLDWASIKEVRILPRNGAFYAEFVYKMEPQKIDVNLTKALGVDHGIDNWLTCVDTLGNSFIVDGKHIKSMNQWYNKRVATLKEGHNETYWTKLLATITEKRNRQMREGINKAARIVINHCLEHRIGTIVFGWNEGQKIGANMGRKTNQKFVQIPTARLKKRIAQLCDLYGIQFIETEESYTSKASALDNDDIPVFGEKPDSWKPSGKRLKRGLYRTAQNWYVNADCNGAMNIIRKVAGTMGIDLMELSRGALTTPVRLRLWNSHESPRLKTRGVSNFVLFY

SEQ ID NO: 22291 - protein, 569 aa, unknown
  TnpB Polypeptide
MLILSDSLRMLAREASFAHREAIDVMTLKRLFKAKPKHNPNQLHCLPYATVSASVRESNVLPSKGKSPPCANSIRFPLRVSETLVQDATISEKDSEPWWTDAAAVISSNLSSPIGIDCGDSASSACNTWWNRTVANSWFSTRLFTHLPKNSRPICSTFSTSSVAACTASAAIVPKSRKIKVSPTKEQRQTLRFWLAGKRYAFNATLKVLRKHQKSPHWKSIKTKVLKSMPRRYKAVPQQIKADAVREAWQALRNAKLKAKQTGDKQEVSFQHRHLQQQSMFIPSSAIKAEGVYVTLLGDLHLTEPLPARVARRFGKPTDSPRDPEKRYAGEPKPTDEIRDSRLSYERGEWFLCIAYHAPQEPPAQLARIVALDPGVRTFLTLFSETSFGWLGHHDIGRIQRLCTHLDALIADTAKAPRRKKSSMRRAANKIRRRIRNIVKELHCKLAHFLCTNFDIILLPTFETKNMSARAGRKIRKKSVRHMLTLSHFKFQQRLLDKARQLGKQVVLVSESYTSKTCSWTGDVIAKLGGRKVITAPDGTRMDRDLNGARGILIRFLTKCVTLLDGASA

SEQ ID NO: 22292 - protein, 382 aa, unknown
  TnpB Polypeptide
MRTYEYKARPNKKQEAQLMAVLMASRRLYNDALQELVEHYKATGKHMNLFEQDKRHGAKEHPDLPAIVVDTTLKRLHRSFASFFRGRKDGKCVGFPRFKSADAWNTIQFRDAANCLDGNYLKTPKISGGKIRVNVHRPLDSTFKFARLVLRPSGWYVQCVTDYDGEWLEPNAKAIGLDFGITYLVADSDGGFVRNPKSFRASAAKLALAQKQLAKCKRGSHRRRKAKQQVARVHERIANQRKDRLHKVSRTYVNGYGTIAVEDLKPANMVRNHSLALSVSDASWGQLRFFLAYKAESAERRLVTVPPHYTSQRCSRCKEIVQKSLSVRTHVCPFCGYVADRDTNAAQNILRVGLDETFAEGARGAGFASESPRPLKQEAPGL

SEQ ID NO: 22293 - protein, 465 aa, Microbacteriaceae sp.
MQGICLRAYPTSAQKNILSQWMGCARTVWNAKCDDERYMTRFALKSCPLGTYAPVDQTYAQYKNKELTPWLFECPSQVLRNAAAHWYQTYRNFITGLCGKPKRKKKTDKGSVLLTAELFEFKENAYGQLELWIGTKKHPVGLLRLKQHRSFKRPRSLRIKRELGVYFVSFCYQEQEALVQDQSTSLEQLAFLKQQSLEYLQAHTVAIDRGVVIAAQTSTTSYDLTPRQLAKKLAKQSYLKQQQRKLAKQPKGSNRRKTTVHNIGKAHQKIRNIRDNFCHQTSHAIVSNPETKVIIIEDLKTRNMTQSAKGDNEKPGKNVSAKAGLNSAIVDKGWHRLETYLGYKAKKYGKSLFKVSAAYTSQECADCGHIHPENRKTQAEFVCVHCGYTAHADRNAADVIKKRAITFILHSGTELSAKGVLVPPRPQVDTGRGERSKTSLGQAQSAVLNETSKKKVKRQHTVAVA

SEQ ID NO: 22294 - protein, 429 aa, unknown
  TnpB Polypeptide
MLVQHRVVTEFRSWQERDKAANGESAKYVSQGWKRTVDASAPGYGEDYVNLGAVNKQYAAIENDPFADGEIILRLVIQGAWYRLIFNFDNKRFREGKVTLPVIKVENGQPVFIFTVVTDNPVVQFSGDHVIGVDVGINNYATVVVREVKTGRIVYETTLSQRVHSLWNSVRTSQRQVRALRRKAATLLHDRQARMSALDEAQFHREAASRKKRELAILAAQEIAYLSHVWGNAVVAVEDLSWVVNTMQNGRWNRGAFVQWLTHYVSQNGGWVVSVNSAHTSQQCYKCGSRVSHPTHEVSVCAEHGTMDRDVNAAANIAARAVSRVVKARATRAKNKKLRLQPPLRTPVTRNSLRYPGRDRTKNEPTPKRKNHRLVSREVILPSCPARAQAQRLEVTVLADQGACSALGTSTAALKQGNMAYKCRLCSLI

SEQ ID NO: 22295 - protein, 415 aa, unknown
  TnpB Polypeptide
MNEEQEKGQENMLLSKKIRLEVSDQDAATLEWMQGKCRALYNWWVMKLRDGERWPGWRAAKKTLQASKEYDPELRWVYGKCLAEVYFRLDGAMQAFFRRVKDGEKPGFPRVRPRHCFFTLIYPAMYIQVEGRHVTLPTGGKGKNKRFPAVVAKLTEEAPTDYKDVAISRDGQGHYYASFVHEEQEETHEHGGVLAIDLGIKTLATGVNEQGRFYHIGGFKGSRWYTKQLDKIRSKRDKCKKKSRRYRHLSRVYKRVSQQKRNKQRDSLHKASHLIAHKTVERTIVIGDLSQRQMVMKEHKERNKHLNRAVFNDWGLYAFVQMLVYKCQLYGKDLQIVDERNTSKQCSGCGHLQAMPLWKRTYCCVECGRVMDRDENSAVNILMRFLARLGPHTGDPVRCAVVFTAIEGVNTCEHI

SEQ ID NO: 22296 - protein, 267 aa, Synechococcales sp.
VKGKKFGYPSFQKNCRSVEYKTDSWKLSEDRKAITFTDKCGIGKLKLKGTRDLSVYGVEQIKRVRLVKRADGYYVQFCVQAERLGVLSGTGKTIGLDMGLKEFYTDSNGVTIENPRFLRKGEARLKLAQRLVSRKVKGSSNRQKARVVLGKRYLKISRQRKDHAVKLARCVITSNDVVVYEDLRVSNMVKNHCLARSISDASWYQFRVFLEYFDKVFGRVTIAVNPAYTSQECSSCGAMVKNLYQPDLIFANVAVRWIETITPRSTS

SEQ ID NO: 22297 - protein, 269 aa, Limnoraphis sp.
  misc_feature (11)..(14): Xaa can be any naturally occurring amino acid
VEAFREQETYXXXXLHFYQLEDIKRVRLVKRADGYYVQFCISVDVRIETEPTGKAIGLDVGIRYFLADSFGNTIENPQFYRKAEKQLNRANRRKSKKYIRGVKPQSKNYHKALCRYARKHLKVSRQRKEYAKRIAYCVIHSNDVVAYEDLNVLGMIKNRHLAKSISDVAWSTFRHWLEYFGIKYGKLTIPVAPHNTSQNCSNCGKKVTKSLSTRTHVCSCGYCEDRDVNAAKNILKKALSTVGQTGSLKLGEFAPLLMLDDSCVGKCDP

SEQ ID NO: 22298 - protein, 475 aa, unknown
  TnpB Polypeptide
MIQKMIVSKSFTIETRLNQKDNAEIIEYAKEYSVLYGQMIRFTWHRIKDGGQLPMKKSDFNALLQKTFGVSKRVANSVIYEVVGIYKSLYQLKWAEFFQLKAKIAKTHKKYEKLQQKVYVLKEKAKSNSLSDGQLSYYRKLKADLFHVKQKLNCMNRSLKNRLAVLNSRKLEVCFGSKKLFLAQYHLAENHMTSHKIWYEAFCKRRDNRALYIGSKDEQRGNQLVQLVPMVNVGKGNSYAIQIRKNTKEREYVRGTCNFKYMGGQLAKLIIDKTHGITYRIKFRGKKCYLQAMIIIDRNSSDCVTRSTYGTIGLDYNDGFIEMAETNETGNLVKLKHIDLKYHGTGTKAESEIRQVVSDIVNYAISVGKDIVIEDLDFKKTKAETEKAKSDRGKAYNKMIHLFDYSRYKSTFESCCYLRNVGLIKVNPAYTSKIAGQKYCNQRKLVIHQGASFVIARKGQGFVDEYIKSKKKKTA

SEQ ID NO: 22299 - protein, 361 aa, unknown
  TnpB Polypeptide
MDLHKEMYSTCKKDTPFNSQVICDIERNVVRSKGKTIRAITIKFNVPRNCKTFSTKSRFFLELGLYPRRHIAIPIRANRSFQRYTDLIRSGWKCKTYGLTCDGQIAAFLSKEGTPEGKRNVVGVDVNSKCFAVSVLSPDGRVLKQLYYGKDIWTKRKRIMGRRTKLQSLADKGGHRARRSLKRLKIREHNFVKNRIGEVVRDITNLAIKYDADIAIENLKRFNPKGKRFNREVLRIPFYQFRKNLESRCLDRNIKLTVVDAYHTSKWCSHCGAVAKSGHSTNYALFKCSNCGQVVNSDRKASLAIAVKSLLVRNEHAPNQSIFFQSTNRPVSVNGLLRSDAVGSSFAVHELDQPMESHLFQ

SEQ ID NO: 22300 - protein, 466 aa, unknown
  TnpB Polypeptide
VSDRPQRTNTYTAEPVTDRYRKCLFDWLAAHAPLWNQITYRRRQQYFAEDGDVWDAEYTDLYEQYAPILGKATCQQLVRKNSEAWRSHFELLSLYHNESNPSVTEKPSPPGYWGSRNNGYKLHGLVRNDLYTFDWDEQRSTLEFGVGDVLEDRYGFEHNERITLEIRGNPYWRGDDSRVELIYDEHADRLRVQHPVRIQSDDIRQQRQAAFTHTLDSENTTQSAAIDVGANNTLTIVTEDGAAAVYHARPEFERFQTQSTRIATLQSQLPEGQWTSTRIKRIYANRSRKRDHSRDAAVKHAAEWLLDRNVDTVYIGDLTDVLETHWSTAVNEKTHAFWSHGELTDRIALTLGDVGITVTEVDEYDTSSQCPACASKTVTRDCDSFRCEDCGLKGHSDIVGAWNILQSEVGPMARPAALSAERDRDAPTDGAYWQWNDHDWTPTKCGEHSWSLDQPSVSKPVSSQPG

SEQ ID NO: 22301 - protein, 451 aa, Epulopiscium sp.
MAKKKKMKVLRKQKKMEDIQRFTQKQNLGRGSLTVKEFRLLQRMTHSSKALRNVGLYTIKQSYLKTKKIAGTKEIDAAMKADVNYWGIQSNSVQAIRRTLLEEVKSFFKALEEWKKRPEKFTGRPKFPKYSRSTEKRIIEIYQVPKVDKDGYWMIPMNNEFRKRFGSIKIRMPKNLLHEKISYIEIVPKQKGRFFEVHYTYEVQKAQMKKQPTTTKNALVIDLGVDNLMSCATNHGDTFLIDGKRLKSINRYFNKEIGKQQEKNIANGLSKRIITYKQANLWMKRERQINGYFSQAIGILFKKVRELKVDTIVVGYNASWKQGVDMGKKNNQNFAQIPFNKLISAIENKCVKEGVRFLKQEESYTSQASFLDRDPLPIWSERDTAAYSFSGKRITRGLYRSKSGKCIHADINAAFNILRKSGVAAIEETIDVKTPVRLHVQKRKAVASRIA

SEQ ID NO: 22302 - protein, 452 aa, unknown
  TnpB Polypeptide
MHKRKFTVFTQLHEENNADLIEYVEDRRKRQSKIMRKTFHLIKNIDKFDKSSYNTHLQNKYGITKRTANSIISDAQGRLNALKELKAFEKRQIEQKIEHLEKKVLPKLIQKRDDCIAQLKANPKGSVVRLRNVRYKIVSKKNKLNKLKQKLNNVIYQIESGRLKLCFGTKYLLKRDYKSFVAQRDSQMSFVGSKSEFAQNQMLQLSYNPKNNQFDIKLRKDFDDFKNASKEDKYVYGRVYFRHHKSELVSILRQGYSPLSYRIIKKSNRFYLYCTFEIHVEDDDFLTRSSHGTIGLDFNKGFVALSETNKYGHLLRTQVLLYHFKAGSKTTTDLQKLVNEVVNIALQTGKDICIEDLNFKKKKAKTESRQGHKYNEMLHSLAYRQFSNFIENIAFRNLVYVRKVNPAWTSWLAEKLYCPRMKLNVHVGASFVIARRGQGFTFLKTVMNLHLI

SEQ ID NO: 22303 - protein, 385 aa, unknown
  TnpB Polypeptide
MALQEMSPEAYMRLLFEVYSNAFKLAYAGCSYRKLRSVHAEYNSQIDANAIYDARKFMKTVLKTHNYPKKLNPKPLLRKIDFKIVDNQLNIIYKPRTRLKLLVFPSGKQLKLMLEATPKGARLIERDGKLFLNLILEKEVFLIPLEICRTIMGVDIGINYIAVASALTEDGKFTNPVFFKGGEWRHLCDRKRKITRVKEYEHLTRRQREILHTVSKRIVEYAKQFPKPIIVIEKLGHFKNNSWNKRFNFLLGNWARKKLQQMIEYKAKWEGIPVAYVNPAYTSLYCHCCGSKGIREGLTFKCQNCGRQYNADANAAMNLAKRFRQLLDDAAKRMTGERSARDMRSLAEGETCLPRQTHAQPGNGKQMNRMMVTRTVSLPLAVGGD

SEQ ID NO: 22304 - protein, 295 aa, Clostridioides sp.
  misc_feature (170)..(170): Xaa can be any naturally occurring amino acid
VEKAYKFRMYPNKKQQELINKTFGCCRFVYNKYLAKRIDVYKNNKETFTYKQCSSDLNNLKKELKWLKEPDKFSLQNALKDLDNAYKKFFKEKVGFPKFKSKKINRFSYKTNFTNGNIMYCGQHIKLPKLGMVKVRDKQVPKGRILNATISKEPSGRYYVSLCCTDVDIXVVEKAYKFRMYPNKKQQELINKTFGCCRFVYNKYLAKRIEVYKNDKETFTYKQCSSDLTNLKKELKWLKEPDKFSLQNALKDLENAYEKFFKKRHDFLNLNQRKLIDFHIKLTLQMETLCIVVNI

SEQ ID NO: 22305 - protein, 427 aa, Lyngbya sp.
MRHQAIKVRLYPTTEQKQILAQHFGCSRFWWNYALNLCIETYKATGKSLNQSALNSMLPKLKKEEGITWLSECYSQVLQATTLNLVTADQNFFEGRARYPRFKAKKNKQSIQYPQSTKIVDGCLKFPGRVGIIKAKLHRPIEGKIKAVTVSMTPSEKYYASILVEIEGDNQSPNSSGKVAGIDLGLKDFAIVNDGLKTSKFVNPRHLAKHERNLKRKQQKLARKQKGSKSREKARKLVARVHERISNVRQDYLHKLSRKLVDDNQVIVVESLNTKGMVSQRVGRVPRLEATGSPARVRNHKLAKAISDVGWGMFVNFLSYKLEKEGKVLVVIDRWFPSSKLCSNCHDQIGEMPLEVRSWTCPNCGTHHDRDENAAINIRAEGIRILSVSGTGTAAEVGEVRPKPGRKSKLRRSPVKSEAHTKSVHRL

SEQ ID NO: 22306 - protein, 384 aa, unknown
  TnpB Polypeptide
LKTYTWKLKPTKPQLAAMEQTLEVCRHLYNGALAERKDAWENERRSVNFTQQCASLPALKEKSECLPNIHSQVLQDVMHRVNRSFENFFRRVKAGDKKIERTPGYPRFKGENWYDSFCYRQFGDGRGAKFDSLGRLSLSKIGAVRVCKDRPLTGTPKTVTLTRRADGWYACIACDTEPEPLPRTGESVGIDVGLESFATLSNGETIANPRLLRRAERQLKTAQRRVSRRKKGSERRKKARVLLAKAHLKVRRARLDFCHKVAHGLVARFDTIAVEKLNIKGMVKNHHLAKSISDAGWGLFVSVLTHKAESAARRVIAVNPAYTSQNCFNCGIRVPKKLSVRLHSCPHCGFEAHRDVNAALNILNKISQSGGDTAFGETATLVAV

SEQ ID NO: 22307 - protein, 413 aa, unknown
  TnpB Polypeptide
MLVKGVAFHLASNPPPEVILLLQDFRLAVNKAIRASLDARVSSRNGIAKLLYRTFREEHPGMYAKHLVSSFEVAAGVLKTYRKRLRNGRPCGMPFVKRLMMKAENQAYKLDRTEGMIDLPIRAGCHVILRLVVSRYHRRYLNDETLSLGSLTVLPDRVIVAFRKEAPRPNVTSSVLSLDTNERSLDGIFVERGRKGDTSCVQVKAAFPEVAMIQQRHYERRRRLQKKKAHDRRLTRILCSREGAREHHRIDHQLHHVANAVLGFAEDHESAIVLEDLRGMMPSKSKELNRRLSLWPRRKLHQIIEYKAAWKGIPVIKVDPRYSSRKCPICGRISDSRMGTWSEFACECGWRMDRHINASMNLLQTAISKGLEVAGGLRFSPGAFQHDVVMTLCEPVMAARSEPNGTSHIGVTS

SEQ ID NO: 22308 - protein, 373 aa, Nitriliruptoraceae sp.
LGQPGHPRACASDAASSCRQRHLGTPPHPPEGRAAGGRDRRSELAWLHTHQSDAVREVWRLCDTGRARVQALTIKFEGGQWKAVFRLRILDGSTRLRNPGEPVRHLGGAIGVDLGLKHLVTLDRPIEGLTDEHGHVPNPRVLDKHLVRLRRLDRAIARCQKGSKNRAKLLRRRATLHGKIAATRKLYLHELSRRLAGGFDVVCIEDLNIAGMARHKGLRNGRSVSEAAMGELVRQLDYKTTDRPASLVRVGRHYPSTQTCSQCAARTKLALWQRVYDCGSCDLVLDRDINAARNIRADGTRLARERQHEQQKHEQHQQHVASIRGETQNGEPRSGETEPAQQHRAGGHGSSEAATVPASPPRAGSHDVTVVVV

SEQ ID NO: 22309 - protein, 358 aa, unknown
  TnpB Polypeptide
MPAGFISTKHHNEIIMQKVIRASIPSLTMQKRELLDSDYNNYQWWIIFGMDKGLLSAFKSYKGYKQKRITYKDYPLPIQARFIGQWIRKKDTKIASHWIKIPNSKRKGQGIWLPLHFHQNLPDNYKVNDSFIIKKNGKYYFHLCIEIPEPMPYKPKTAIGIDLGIKNPVTLTNLKTRKTIFLGKELKQNKGRYYYLRKKLGKLKKLNIIRKIKNKEKNKSNSIIHKMTKDIVKQALKEKAMLVVGDVKNLAKNKGKRFNRKLGTFQTFKIKNYLKYKAKEYGVPIKIVNESYTSKTCSACGIRGTRTKNWFHCNCGHEDNADRNASINIAKRGFSYKLNSGAAASARSPSLMNGQALI

SEQ ID NO: 22310 - protein, 584 aa, unknown
  TnpB Polypeptide
MIMCYNFFVGMCSRCSELIQQLLFSVKKCKIINGQEMITLECLLEFETKEDINAILDLMRRFSSAMRYAYKRLLENEKRKDLKRHLSKLFNINTRYSDDVIFLAQSIISSCKEREQNPKKLIFGSRKLFEQLSRNHLTGKIKEKLKVKWKESRQGNLYSRGDKSKQGNLNLRLQWIGDKLYLRINTGDRQYIYAKVIRSVKREKDKWIEFMFMLKNAYKYGAWFPYSVRLKVKNGNVYAFISVEEKLPPITIKKDSGVIGIDINAYPFHLALATVSKDGNLENYQAISLHELLDVSSEKRQYLEWQIAHKIIEIAKEENKAIAIENLDKLPKGKRGDGFAKLRQKLQKWIYKRLLNKIEITARRNGIEIRKVNPAYTSLIGKLKYAPQFNIDKDIAAAFVIARRGLRFKESLPKNYKGLLNDKDFLLFSEASIEDKIAKLKKEIKEEKNQYKRNKLKSKLSKLRKEIKALQKHLSFVIESEKSKSVSQQPVNQRKEQVRGLPVGRYKSWQVLFTALAFCCLEKSYRDFSPLKQLIVSKDWIAVANRLVPVLGAGSMILPKYRLLGLEVSEMAEYKYPNSSCTEQ

SEQ ID NO: 22311 - protein, 540 aa, Bacillus sp.
MAKAKTPSFIIDIELKGNIRDFLMIESELEINRVIYNTSLGEYLKREKQMKRTKRYKKLVRISRAIKSHLAKNSNKETIEYFQNEQKNLSKEFKKLREEFGLTEYSMHEYIKEVRNHFNGKINSIIAQKTVTRAWNTFKKKLFGQAKKVVFVKRGDMDSFEGKNNDTGWRFKEGKVISNDRVFALKVKEMDMYLKEAFHLLNSQQIFQYKNKDGETVTDFFRVKYVRILKRVIRGTVRYYAQLVCAGYPPVKRDRKTGQVNYPLGKGPVGTDIGTSSIAVSSTTKVLLKNLAENIKKVNHVQRKIRLYNRKLDRSKRATNPLNFDEVGQIRKGKKQWEFSKNYKKLKARLKEQYRKLALYRKFSHQYEVNRMVMLGDRFYIEEMNFKALQKRANKTEVSEKTGKYKKKKRFGKTIARRSPATFVSILSKKVTALGGTFTKVKTSSFKASQYDHKADKCQKKELNERWHRFDDDTKAQRDLYSAFLLMNSDLLGLKSDRISCLNSFEKFIKYHEEEIKKIENDNEVILNSGIKLRVKKTAG

SEQ ID NO: 22312 - protein, 367 aa, Clostridiales sp.
MEYSYKFRIYPNAEQQTLIQKTFGCSRFVYNYFLAQRISEYKATGKSSTRFQQDKSLTALKQEIEWLREPDKCALQNALKDLDSAYKNFFRAVKSGGKAGFPRFKSKRNMRKSYKTNSNIAISDSRVRLPKLGLVKCRVSKEVRGRILSATISQNPSGKYFVSICCTDVEIKPMPPTDAAVGIDVGIKAFAVTSDGVSYPNHKYLAKSEKKLARLQRQLSRKSKGSRRREKARIKVAMLHEHIANQRQDAAHKLSTQLIRENDIICIEDLAPKNMVRNHRLAKSISDAGWGEFRRQLQYKAEWYGKTVVAIDRFYPSSQICSCCGAQWSGTKDLSVRGWTCPECGAQHDRDINAAKNILHEGLRLLA

SEQ ID NO: 22313 - protein, 413 aa, unknown
  TnpB Polypeptide
VEVEHVEITSTGQIAQQEKVHSSTMILSMKIKLNPTTQQELLFWKSAGTARWAYNFFLAESERHYAEYLEGKHEKNTIKEGDVRKYINNVLKPTTHSWLKEVSSNVMKQAVKDADAARKRWFEDLSDKPKFKSKRRCKISFYVNYESLKRTKEGFRGEKLGVVKTYQPLPKLPKGETYSNPRISYDGRNWFLSIGYEVACENVELTGEYLGIDVGIKELAVCSDGAVKKNINKTKEVKRLERKLKREQRKLTRKIEANIIGHTKNRKPLYQKPLKSLKNVQKQNAKIRMINKKLMDIRTNHLHQVSNEIVKTKPSRIVMETLNIKGMMKNRHLSKAIAKQCLFEFKRQIQYKCLKYGIEFVEADKWYPSSKMCSCCGSIKKDLKLSDRIFNCSCGHKMDRDLNASINLANYPI

SEQ ID NO: 22314 - protein, 406 aa, unknown
  TnpB Polypeptide
MAELVKNLELSLLEPTKCKSEQLDKLYSEYLACAKEIFSFWQSHKGITQNILHHSTYKDCREKFTLLGADTIISSRVVIWNRRKITDKIKRLPINFSSKMFRYGKTKRNTPFFAFSGIVKSKRIILLVAKNRLFQRFESHISDSWIFKSCRLIKRDKWILQVCVKKDFICKDKGNIMGIDLNAGNFALTIMNKDKKILRQLYLGQDIPHKRRKIELRKDKLRSIYDKTFSNRSLRSLRKIRRFEYNFIRTRCFQISNQIVKLANQFNVSHIIIEDLKFLRTGRKLGNSKGRRVNKIINKIPYFKFRQSLTIIATQQQINVVAANPYHTSKTCSRCSHVNQIGTKRELKCKSCGFTINRDSNASRNLIINFLLGRDITNSAKISSSQIPDRQVPVTEPLPLRDVCIV

SEQ ID NO: 22315 - protein, 362 aa, Paenibacillus sp.
MLRTYKYRFYPTTEQQEKIQFTLERCRLLYNRLLEERIQAYKTEGRTLTYGQQANTFSERKLYIPALKEVHSQVLQDVARRLDKTYQSFFRRVKNGEKAGFPRFKSQSRYDSFTYPQSGFFLRETRLELSKIGGVRIKLHRQPQGTMKTCTITVKNGRYYACLSCEVEAEPLAKTNRQVGVDLGIKQLAATSDGQIFEAPNHLRTSEAKIKRQQRAVSRKRRGSGRRRKAIMALARQHERVANRRKDYAHKVSRTLVNSYDLIAFEDLNVQGMVKNHQLAKSIADAGWNGLVQFVMYKAERAGRQVVRVDPSHTSQLCSTCNEIVKKPLAERIHRCPHCGTTLDRDVNAAINILSRAMRQVS

SEQ ID NO: 22316 - protein, 506 aa, Thaumarchaeota sp.
MRGREPIPPAIPEGGIYEVKYTGRRTNVVRLLPSGSQGRKLRRLASTSAKLFNEVNYERRQQFFRGEKVDLEGTWDRYYERYKGALGVNAQAVLQKNNEAWSSFFSLLKRKKEGKLPPHMKRVGPPKYWKDREGKERKLILVVRQDRYVVDEQNHRLILKDFDMGIDFAGGLRWHGKQGRLEIRHDEARGAWYASIPVEVGVETTKNGNESKHIVRGERKSIRIAGPRGDGAAAVDLGINILASAVTSGGAWLLYRGSRAKEDFFYLTRKIAEVQSKADIARNSGDIEGFRRLDRRRRRLFRKLAGRMAHLYWNLANHLVRNLWELGVSKIYLGYPHDIARERGNKLTSNLWTYRRLMDAIELKAQEYGIRVYEVLEYNTSNHCAIHGTEVARGPRGVVRCPLGHRLHSDLNGALNILRRGAGSMPATLKGPLSFLVDHGGVAPVKGGVTDETPPRGSRGTLALLGRGGGQRRGWSGRIQVSGRRPRLCPSWRARRRSSPGDTRDS

SEQ ID NO: 22317 - protein, 409 aa, Mycobacterium sp.
  misc_feature (231)..(303): Xaa can be any naturally occurring amino acid
VKQVVQVRLQANVAQLDVLARTVSACNETANLVSTIAHAERVFRGRDLRAITYAQAREHAGLGSQVAQSCIRKVTDSYTALRANLRAGRYGKPGSARRAKVEANPIRFRALAAQPFDDRCLSWVHDTDTDDGGVVSIWTVDGRVKDLRFVGEAGQVALLRQYRSGETDLVIRRRRGGSLVAYLIATVDLPGPPVRTGAHLDRPDGWIGVDLGIENIAVTSDRTLAAELMGXXXXXXXXXXXXXXXXXXXXXXXXXXXXXXXXXXXXXXXXXXXXXXXXXXXXXXXXXXXXXXXXXXXXXXXXXSANGYGSASPNAPHTPVGRSPSSECSSPTKQPERVCRSSLSIRPTPANVAPRVAIPTDVTGPARPNSFVETADTLQNMRTSSVPTTSRTEHQPPGPSQRSPARREA

SEQ ID NO: 22318 - protein, 402 aa, Escherichia sp.
VKRLQAFKFQLRPGGQQEREMRRFAGACRFVFNRALARQNENHEAGNKYIPYGKMASWLVEWKNATETQWLKDAPSQPLQQSLKDLERAYKNFFQKRAAFPRFKKRGQNDAFRYPQGVKLDQENSRIFLPKLGWMRYRNSRQVTGVVKNVTVSQSCGKWHISIQTESEVSTPVHPSASMVGLDAGVAKLATLSDGTVFEPVNSFQKNQKKLARLQRQLSRKVKFSNNWQKQERKIQRLHSRIANIRRDYLHKVTTTVSKNHAMIVIEDLKVSNMSKSAAGTVSQPGRNVRAKSGLNRTILDQGWYEMRRQLEYKQLWRGGQVLAVPPAYTSQRCACCGHTAKENRLSQSKFRCQACGYTANADVNGARNILAAGHAVLACGEMVQSGRSLKQEPTEMIQATA

SEQ ID NO: 22319 - protein, 409 aa, Halorubrum sp.
MNFAYRFRLNPTPSQQEQLAWTLDTCRQVRNHFLHRMNRVENPTYTSEQNRLPDLKERWTELQDINSKVLQMVVRRLYTDRSNLRKKKEKGHTVGQLKWKGKGDYYSFEYNQSGFELKKTSGQDRLYLNKIGDVPVVAHREFPDNAQVKGVVVKREPTGNWYASLQLETPDDPPKKPDELTETVGIDVGILNYATDTDGTAVESLDLSDERERLERAQRDLSRKEHGSNNWEEQRKTVSRRHADLKRKRRDFLHKLSNHYASEYDLVAVEDLDTKVLIELPGNSRNRAGAAWSMFLRMLEYKCEREGTYFVAVDPAGTTKECAACGAETDKPLWVREHSCPSCGFTADRDWNAAWNILSRGIKQLGVGCSETTPAETALPTETDSVSAKCVVETGSPEPPERAVPAASK

SEQ ID NO: 22320 - protein, 629 aa, unknown
  TnpB Polypeptide
MKKHKKTVKLKTIKIISHNNFKNVFDIMTSISKNIYNCCVFTNNIFYIYQNIVYKEIYDYLFDNTNSKLTNEQKQYINDKNYMPLIISIFKGYYDMYSNNFQLMKDNNDLIYKHIKDKINKDNIILNNLNINTIRKTVIDELKYINYTLENKQIVFDDIIDRIIRSFYDKKYFLTRYQMLNHIKFTFNDEILIENIKNNEYYYDEKNISYKTKILKELNIKLKSNQYIFKKFVYENSLNNNADKLPADIILNIIDKYHEMITSYYGLLNRKIKANKPKYLHKNDKFNLFYYPSSFKLFDEKVRLTLGKHIAENIISNNNKITKINNRKYCYTNMIVDNKKFKHEKNKENYVKIKNGYINKRQIIDAYYINITLPKTLHNKNIKLIQIKPYGNKYFIYFTYETTQNMQQTKHKITTKNSISIDTGIKNLMTIYDPTGEQHIIKGSNIKSINEFYNKKIAGLQSYNKTKLDKNTFNRKYSLLIERKNKLDGEINRIIDLLLNTYMNKENIIIGYNEGWKTKVNLGSHTNRNFYSIPYSRIIYKLKEKLESNGKNLIIHEESYTSKCDSLTLENLTKRDNFNGDRIYRGLFISKIGKAINADLNGAINIMRKVINIKKITGEKIYNPTVIRA

SEQ ID NO: 22321 - protein, 307 aa, Actinomadura sp.
RPTVQEAGVHEGFRVVGVRGRAWEVRRLSRRMGEVRVPKVGWVRLRWSRPVPPDVKSFRVTRDRAGRWHVAFAAVPDPVPAPGNGAVVGVDRGVAVSAALSTGQTSSVLGLTPGEAERLGRLLRRLARADRGSNRRAWVKAAIARLNAREADRRRDWVEKTSTDLARRFDVIAVEDLNVRGMTRSARGTVEAPGVGVRQKAGLNRGILANGWGRLVTRLEDKAPGRVVKVDPAYTSQTCNACGYRAPENRESQAVFGCTACGHRANADVNAARNIKDTAVGRTVAARGGTPSGGPVNHEPQPALLPA

SEQ ID NO: 22322 - protein, 511 aa, Acidiphilium sp.
VSLAGTAGCPSEFPALRSTHLHGPLTVNQELGNARLLARSDTGMMLTFRVRACPTRQQHAWFTACLDHTRDLYNAALEERLGAWRKARKRITLGEQGKALTELRRDAEYAAFPRRMQRWTLDRVDVAYREHVKRLADPARPRGDIRFRGKPFWRTIGFDSPIDFEMRDRGLYQRKALGGTLRLKRDRDLPPWENCKAITLTREDRRWFVNLTYEMPAPAHSPRLVPMRPVGLDLGLKTSVVRSDGAEIDAVGSLRAALPELRRLGRALARCKKRSRRRHKVKARLARLHAKISRRRGARLHEISARLVHHWDAVAVEDLNLAGLMRAGDRRAQGRGMRRKWRDFSPGRLVSLIEWKCQREGRAFARVDPRGTSQECAGCGSFVPKTLRDRMHRCENCGIVLDRDHNAALNVLNRAGWGPGGANPDGKVGNPADLVRDCPGNTAGDDPAGPRRGGLATSLHPTTCNRWNGAYGNSCSISYGYRKTVPRARGDEPRLGQYVIAAIVRSPRTRG

SEQ ID NO: 22323 - protein, 409 aa, Halalkalicoccus sp.
MRYNYRYRLKPTDELHERLAWTVDTCRQVYNHFLHRLNRVDGTSAYSEQSLLPGLKREWGELKDVHSKVLQKVVQRLYDNLSTLKGRKDSGYHVGELKWKAPQEYRSITYSQTGFKLNNTSGRPVLSLSKIGDIPIIHHREIPDDATIKEVVVKQEPTGEWFAILGIETENDALPKPETPEKCVGIDVGILKYAHDSDGTSVKGPNLSKERERLEREQRKLSRKQHGSANYRKQQQTVARRYADLKRKRRDFLHKLSNYYAREYDLVAVEDLDAKGLIELPSNSHNRARAAWGTFLQMLEYKCERGGTHFVVVDPRGTTKECSNCGVSTEKPLWDRKHSCPSCGFEADRDLNAAYNILSRGLSEVGVVHSELTPAETALPTGTDSVPAKRVIETGSPVSSEAIRPSRAG

SEQ ID NO: 22324 - protein, 393 aa, Proteobacteria sp.
MRSSTKSFVQEFELRSPGDSYSSLLKSEAHSKKLYNAVLGKLLKSLSAMRTSKPFQDARLLPKSSIERIASLSLARIEFGLTEYAAISLSSKLRTGSKDFDLYVPSKVAQEIGKRAYRALEKKMFGKAKRCRFKSKREAFSMRGSSNAEAPQIKVDTTKMTANMIFRKKIYPLVVDAESAFHTHALSSRIKLSTILKREMGKKVRFFVQVSLEGSTYRDLHKEIKHRNLLREKFGEGVAAECVSVDFGPSKIAVSNGDISFERVIVRDSLDEKIRQSKRLQKKMSRAIRLNNPSAFKEGSLKKGVRLKKTKNYQKLADARKDLERRIASHRKTIHGNLSQEIMQLGSTVKLENISYKALQKRYGKSVGKSAPSSLKASLFRTAEKLGGQGAAY

SEQ ID NO: 22325 - protein, 451 aa, unknown
  TnpB Polypeptide
MSSYTIKLKGDLTALDDSISVYREALHFVIPIVDAHWDEMKDFEHSKERMNYSEKLIHSTKVNHALYNFDVEFPKFPSYLRRAVIMKSVGIVSSYRSNLANWEEKKVELEDKGKKLPQPPRLGTHHFDYPAYYKQNLFRNFNPVTKTIDLKVFKNGDWVYETYTLKTSDCTYYQKNLVNKKQNVPVIKKKGRRFYATFSYEENVPLIDAENIEKICAVDLGMGTDATCCIMGADGTVYARKFIHFSEEHDRLDTQLGRIKRNQRRGNKKNTRLWKRVSGLSQDIADKTAHAIFEFGNAHGVDAFVLEFLEFKGKQAVKRAHFWRYKRIFSVLGMKAHRHGLRISKVCAYNTSRLAFDGSGTVKRGWKISAETPYSTIQFTSGKFYNADLNAAYNIGARYWIRHHLKPIPETERLVLEAKVPQVTKRSTCTVSHLISLRSELIALNVKRTQA

SEQ ID NO: 22326 - protein, 372 aa, unknown
  TnpB Polypeptide
MANKAYQFRIYPTEEQKFLFAKTFGCVRLVYNYYLEQKIKLYQKEKKNFSYTKCSNDMTALKKTEDYLFLSDVDSIALQQSLRHLEDAFQNFFSRPASGFPKFKSRRKSRKCYTTVSVNGNISLENGYLKLPKAGLVKVRQHRQIPDNWKLKSVTISQSASGKYDASILFEYENQVQEQELHTFLGLDFSMHELYKDSNGNEPAYPRYYRQAEKKLQKEQRKLSLMTNGSANYEKQRVRVAILHEKVANQRKDFLHKLSRKLANAWDCICIENLNMQAMAQALHFGKSVCDNGWGMFTRFLQYKLEEIGKILVKVDRFFASSQTCSCCGYKNPETKDLSVRAWDCPKCGTHHDRDVNAAINIRNEGMRLVFA

SEQ ID NO: 22327 - protein, 419 aa, Symploca sp.
MLTFNYRYRIYPDAPQEQQLIEWMDICRGAYNYALREIKDWCDSRKCLIDRCSLDKEYIIPADTKFPNEIYQLNNLPKAKKQFLRLKEVPSQVLQQAIKQLHKGWDYFTKRGFGFPRFKKYGQFKSLLFPQFKGNPVTDLHLLLPKIGAIPINLHRPIPSGFVVKQVRIIRKADRWYTSILIQCDVSIPDPAPHGHPIGVDIGLSKFLATSEGVLVKPPKFLKKLQHKLKLLQRRLSRKKKRSKNYSKARLQVARLHHKIDNSRKNFHYKQAHALCDQGDMVFMENLDYRVSAKGFLGKQMLDAGFGQFRTIVKYVSSKRGKFFAQVDARGTSQRCPSCGGEVKKDLSVRVHSCPHCNYQTDRDVASGMVIRNRGLELISTPGLGGKETACAVGLPGAGEISSRSETKPRKEITRKSSK

SEQ ID NO: 22328 - protein, 363 aa, unknown
  TnpB Polypeptide
MKARKTIKAKILELRKGKEELLTQEYENWQRYLRGDKNVKLYSATKQQADRLLKRLGDRLNPDKEYPLILRHDVYRTYTKLTQYWLKIPIYGVRGGINIPIRPHEPITKDMICKEAKIIRKDNEWFVYITVEKEVAKREPRSFLAIDLGIRWIATTVNSNDQKPKFYGKELRRVKGYYFWLRRSLSLKKAYKAIKRIGQKERRVVNYILHKISRAIVNEALTSNSIIVLGNLKRMRCNCKGKSKALKRRLNNGFPYYRLSQYIEYKARWHGIKVIRISEKNTSKACHKCGSEGLRVGSSFRCLNCNYTCHADYNGAMNILKRAMGYMSIAGAPLTEPELGRMSPLGQRTENLPTLVVESVNYA

SEQ ID NO: 22329 - protein, 313 aa, Paenibacillus sp.
VAAIRNSLSRETFEGLCIQSVSDGLWLLRLKKKGVIEMHRAYKFRLYPNKEQAALINKTIGCSRFVFNHFLAKRKDAYEQEKKTLNYHECSAMLTQLKREIEWLKEVDSTALQSALKDLDSSFKKFFKEKKGYPKFKSKKNPKQSYTCKMNIKVEGNRIKLPKLGWVAFAKSREVEGRILSATIRRNPSGKYVVSVLCEAEIQPHPQIEQTVGIDLGIKDFATLSTGEKVANPKYYRKYEKQLAKWQRIHSRRQKGGKNRYKSRIQVARLHEKIANTRNDFLHKLSTKLINENQVICLEDLQVENMVRNHKLA

SEQ ID NO: 22330 - protein, 391 aa, unknown
  TnpB Polypeptide
MLKFRLYPNKSQRLRLEETLGTCRHVYNHLLAAQKATYRETGKLISQYDQNLKLMQLKGENPTLPKVHSQVLQNISKRIKDAYNNFFVRKKLGLKAGLPRFKKHGRYKSITYPQSGFKVEGKKLLLSKIGAVNIKLHRPIRGVVKTLTVKRMPSGKWFAIFSCVFKEQPVTKPFKDIGIDVGLNFFAVLSDGSRVENPRFYRSREKQLRRAQQRLSRTKKDSKNRGKNRLKVARLHEKIENCRNDFLHKTSRRIANRYQTVYAEDLKIRNLVQDHHFAKSISDASWGTFIRMIAYKEAESGGQLVKVNPNGTTQLCSRCGLKVEKNLSDRIHECPFCGLVLDRDLNASRNILRIGRESPESKPEREEASTQHFEVEQVSPMKQEAFLLVGR

SEQ ID NO: 22331 - protein, 389 aa, unknown
  TnpB Polypeptide
MRFRLYPTSTQESLLLEACGQARFVWNLGLEQRLMWARWKGPTPGYNAQSAQLTQARAASPWLAAGSQTVQQQALRDLDQAWRNFFAGTHRRPTWRKQGRHEGLRVVGAQALRARADNHRWSSVLVPKVGWVRFRRSRALPAWKSYRITRDRAGRWHLGLAAIPAPVPGPGTGQVVGVDRGVAVAVALSTGELTSPAGLRPGEAGRLLRLQRRLARSRRRSNRRTVLKAQVAGLKARQADRRKDWVEKTSTDLARRFDVIRVEDLKVASMTRTARGTLAKAGPQGRPEGGVEPGHPGRRLGRAGDPAGAQGPRSGGEGQSCVHVPDLLRLWVLRSGEPQEPSGLRLRLLRASGQCGCERGTQYCSWQDRRWTIGGSAWRHGCTGPVGEA

SEQ ID NO: 22332 - protein, 196 aa, Ralstonia sp.
MKVALWRQGCRGGRAVLIAHKIALDPNNAQATYFKKACGVARFAYNWALAEWTRQYEAHQANPMLPRPSEAALRRQLNAIKREQFPWMLEVTKCAPQMAIIQLGQAFQNFFAGRARYPQFRKKDVHDRFTLTNDQFSIDGSRIRIPSLGWVRMRESLRFSGKLMSATISRVADRWFVGITVDTPDTPHLDTACRRA

SEQ ID NO: 22333 - protein, 542 aa, Streptomyces sp.
MGGLRTLAAPLVVPGPSGVTVRTRLGQLTGADEEVLRRVGAHLGALAGRDLKARCRDGLEHDTGAWAVRKRELTPHSSARWAGSVTKATHDQWALARRCALAHIRSLEAGIRMITHRLSLPAGEKGAKRAPGGYRSRREWHAKARRLRVLEDRLARERADWEAGRVHVVRGGKRLARTRHHLPAAQLTESQWRERWEAQRWFLQADGESGKRYGNETLRISPDGEVSIRLPAPLTGLANAPHGRYVLTGRVAFAHRGQEWADRVEANRAIAYRIHYDVARGRWYVTASWQIPVARTVPMAAALAHGVIGVDMNADHLAAWRLDTHGNPTGSPRRFFYDLSGTASHRDAQVRHALTQLLHWAQACGVRAIAVENLDFTAEKTREKHGRKKRFRHLVSGLPTGRLRTRLTSMADRTGIAVIAVDPAYTSKWGAQHWQKPLTSTTRTTTRHDAASIAIGRRAQGYSVRRRTAPPRAHQSDVHGHRTAQAGPDTPGREGPRRRVPGPRTRSVPPDAERTRATRTPRTVRDVRSVQAWVQDSLLLTD

SEQ ID NO: 22334 - protein, 398 aa, unknown
  TnpB Polypeptide
MLITDVFSNIYMKVIRAWKFRLYPTKTQATEMQTHLWLSKELWNDMLEFTKEIYDNHQKFPTKRTLRQMVKNSGLYSQTGQELVDRLTDALHRKIEMKKRGEMSGFPRFKSIDRLKSLMYPQSGFSLKADKKKLKVTPFGEINLRLHRPVNSAIKTLTLKKETTGKWYAILTAETEAKPIPKNNGSQVGIDLGLINFAVLSDGTAIKNPRHLKKHQDNLRAKQKPLSRAKRGSSNRKKAKKRLAIVHERVRNIRRDFLHKLSRKLVRSHSLIALEDLASQKMAENAHGKSINDAGWNAFISMLSYKAESAGSRVMLVNPENTTKECSRCGTLTDKELSERRHDCPSCGLSMDRDLNAAINILNRATAGIAGSNACEDETSTARQVSSMKQEAHALRRG

SEQ ID NO: 22335 - protein, 484 aa, Sutterellaceae sp.
MRITSTYSVKLQTEQKSVLETTAVLYRRAVDYFIGIIQDRWDSHFCDLPNKNFVVRQTELLCWPTAKRPLTILNFGKDIGPQFYKFPSYLRRAAISEAHGCVASYQTRLALWKKHPVGKEPGKPKAGRTFPAMYKGNMFEQVDRYTARVKVFIRNTWDWITVGLRKTDIDYINRHCAHREQCVPTLRRRGKNWFLDFSFEEEVSLSKIDIHRQIIVSVDMGINNACVCSVMRSDGTVIGRRFLSLPREEDCLERALQHIKSAQMHGARKMPRLWAKAKGINDGIAVKTAQFIVDTAILYSADTIVMEKLDVRGRKRGGKKRRLHHWRAQYVQAMVEDKAHRNDMRVSRVCAWNTSKFAYDGSGPVIRDENNRSMCTFTSGKRYHCDLSASYNIGARYFVREIYKSLSATMGQRISAEVPECAHRSTCTWSSLIRMHAALRSLERQYAECIPYRTQAVLPSTNGGSPDREIGEVSRCCGTRSSSP

SEQ ID NO: 22336 - protein, 394 aa, unknown
  TnpB Polypeptide
MKVIKRAYRFRLYPNNAQESLLARHFGCVRFVYNYFLNQRDEQYKANGKSDNYCAQAKALTILKNQESTSWLKDVNSQSLQFALKCLESSYTKFFNRKTKHPRFKSKRSKNSFTVSQHASVTNNRLFICKFKSGIKCRVHREIKGKIGKVTITKTPSGKYFASIFTEEEYDTPLKKTNKSVGVDMGLKDLLVTSEGEVFKNNKYTRKYRNKLKVAQQHLSRKVKGSKGFENQRLKVARLYEKVVNSRNDYLHKCSISLVRRYDTIYIEDLNVKDMEQNHHLAESIADASWSHFVTMLTYKANWNDKKVIKIDRYFPSSQTCSACGYVNPETKNLSVRKWECPHCHTKHNRDVNAAINILRFGLNKTSAGVVDYMDGEGVKSSMKSKSPRTKVHG

SEQ ID NO: 22337 - protein, 562 aa, unknown
  TnpB Polypeptide
LGGSIYQRNLVKNWIITQANNNSKIIILATRLLWLHIVRLLSQDNPLPKINQTYLLTFFRHCSAPSIPKVDVDLQATVNLLGWGGLAKPQWNLQICKYLANEYLVNLKNHAKFNYWQYTIKFLKWKVGLLNIDKKIKKKLLGSIYAIMKHVYSNQPYDINTFSEDIRQYVEQFTTCLQQLVSRSRENQPDFYLEKITFFYLLKRETNDTLDIKIIPQSSFTRKHITIDKKVGEELLKVINLYQKDLSKQQQFSILFNYKPPPNYQVNIYKTDGVSVSITLEKQSTMDVCEESIINNNIIGIIQQHTTENNTNVFQPMDVDEPVRIIGVDLGRKDVFMLINHPEKNQCTVQYWSCKRWQFESGLTRCNRVIEQWKEKDHDISNLEEELTHFVQSSEADRSRMHWQHVYDNIRVIENFYFRQQHYRLRFWMYNRRQQALHKMCRYIGDRTDIIAIGNPEFSSVSRGYAPTPAKTTVRKLQQLFPNKVKLIDEYNTSKLCSNCYLPLKFTKMKMPGGGPNYRVQRCNRCSMYWNRDVNAARNMRALFVYEQENHNQRMLQFERPN

SEQ ID NO: 22338 - protein, 376 aa, unknown
  TnpB Polypeptide
MRKSFQFRLNPTHHQSTLLNQTLETCRWVYNETLATRKYAWEQEQKSVSLYDTNKFLTSWKKDKPELSQVYSQVLQNVQERVDLAFKGFFRRVKLGEKPGYPRFRGYGWYDSFTFKQYGFTLADNGLLLSKIGAMKIIQHRAIEGKIKTLTIRRNRVGNWYACFSCEVEPTQLPTSEKGVGVDVGLESFATLSTGEKIENPSFFRQDENELAKVQRKLSKAEKGTPEWAKRRKAVCHIHQRIANRRKDFAHKLSRQWVNAYGIIALERLSGKGMLQNHYLAKSISDAAWNQLSLFTQYKAENAGRECVLVDPRNTSKKCSRCGTLVEKNLSVRVHDCPVCGLKIDRDENAAINILALGLESLGVNRRSPMALAVGE

SEQ ID NO: 22339 - protein, 398 aa, Streptomyces sp.
VTDPSVKRAFKYRFYPTDAQAAELLRTFGCVRKVYNLALTARTEAWTRQERVTYNQTSAMLTAWKKTGELAYLNDVSSVPLQQALRHLQVAFTHFFAKRARYPRFKSRKKSRKSAEYTASAFRFRGKQLTLAKMAEPLDIAWSRPLPEGASPSTVTVSQDCAGRWFVSLLCEDASVGSMPATERTVGVDVGLGHLLTLSTGEKIANPQHERRDRARLAKAQRNLARKVTGDGANRAKARRKVAKVHARIADRRRDHLHKLTTRLVRENQTIVIEDLTVRNLLKNHNLARAISDVAWSELRSMLEYKARWYGREVIVVDRWFPSSKLCSTCGSLQNRMPLHVRTWTCGCGVTHDRDVNAAKNLLAVGLTASVCGAGVSPQRGTPGGQSAMKQKPLRHEP

SEQ ID NO: 22340 - protein, 418 aa, Lactobacillus sp.
MQTMAKLPYHYGTKFRIFPSRQQKELIKLNSDISRTIYNKLIAIDKEIFQLSKVKIPIIQVKQRIDDLNSRKNMKNLANHYIYMNNKNIDSLAKANASQNYKKAWKMYRKVHSAGTPNFHKKGYSESYQTNCQYSKNSEMNIFSGTIKFLDRKHIVLPKIGKIRVKVSNPIIFDKSNIRIGTVTVKKDSYNKYTISLQLASDTPFVEKLAKTDSQVGIDLNTDNFLTVSDKAHTVIDNPRYYRTIKTKLAKAQRKLSRKQRRAIKEHRNLKLSKNYQKQRLLIARLHEKIRHQRNNFLNIISTRLINNHDLIVAENLKSSNMLKNHALAMSIADVGWRTFLEKMTYKAKLYGRKFILVNPRNTTQQCADCGFVMGKEGTNKLSLKDREWICPKCHTHHVRDYNSSRNILAKGLSTLEK

SEQ ID NO: 22341 - protein, 433 aa, unknown
  TnpB Polypeptide
MKVKRVVKFNIKKSHIDYDYIKIQLIESKEIYNFANYVLRQLYFKNSNKHKYSLGFIEEYPTLKELFLQYIDENKQFTSIFYKIICEFSKLKQYSINLKIVQNIVDKLKNDWASYWALLKMKKDKTYNKEINIPTYKKKYNLVEYNNQVMSKKKLKLGYIGTDKMQQGIKIAKKHQDLNCKCFRIYEKNDKLVCELIYEKEIPKVEKTDKVASIDLGLENLFTIAFNYNKKGISIKGTKLKAINQYFNKLKASSQSMLPHKQYTSKLINQLMYKREEQLRNYIGYYANKLIEILKEEKISKLVVGYNKGWKQEINIGSKNNQNFVGIPFRKILDILKYKLEDNGIEYKEQEESYTSKASYLDNDDIPVYKENDGTNYKFSGKRIKRGIYKSKQGKIINADLNGALNILKKSGEKLIEELDYLQFNPIFTSKLI

SEQ ID NO: 22342 - protein, 458 aa, unknown
  TnpB Polypeptide
MPVVSYGLRLRGKRTALDSTCKIYRSAVNYLINIVLMHYNELAAIESEPDGISASKLRQSALEKLVHTTEKNQAKYKGFDKKFYKFPSYFRRDAITTAIGKVFAYKFWIKNWEIAGCKGKKPFFNRTQDVAPCFYRTVMFDRDGIVVNLKVYDAVRHDWIWEAYLIRDTDNKYVEKNLSDWKSLAPVLVKRYGGYELRPAFISSAENFPAFTKDKDVMAAVGVDLGINTDAVCSAIRKDGTVIGQKFIDSPVEKDRLDGLLNCVKKAQQHGNKKNYRLWRFVNNYNKAVAIRTAVDIVAFARSSGAQIIVFEHFLFKGKIRGSRKQRIALWRKREIQQRVEMLAARSGIRVSYICARNTSKFAFDGSGKVLRGKEAGFSNNKLCKFKNGKIYNCDLSASRNIGARYFTRVLKKSVSVKKLLQAQAKVPGFCRRTSHTLSTLISLYAELYPFKAACDIA

SEQ ID NO: 22343 - protein, 566 aa, unknown
  TnpB Polypeptide
MSKGKVQKVATEKTEEKTVKQYRAAAKRHVLSLEADVTEQQRRELLHMSNLLRIAGNELISQMRKNLEQLKRTKKYRGLMQKYLALKKANDKVKETEEYKREKEALSAELKALREKYNVTWNFCRAKMIEIKKKYNITAVFALTQAENIWHGVERCLYGNGQNLHFKKRGEWASVRAKQFDRGIVAKLKDVNGNVALAFKVGKMEFGLKVKKNDLFAQAELEAIQNYFLHAKEIDEAAFELYKKEEKVSDTFRPCFASLSFKEIRGKVRIWVHITLEGRAKPKLRKDGKPKHTCGQGTIGCDIGTQSIAYTSAEEVGLKNLAERGTSIKKREAWEAELLRRMDESRRATNPENYNTDGTIRKGKKTWKKSKHYKELQKKYKNVSRIAAENRHLAINEEVNHLRSLGDVFITEPQNAKALQKRAQKTTVNPKTGGYNRKKRFGKSIKNRCPGYFQAKVKVKFQSTGGKYIEVAKNFRASQYDHTCNDYIKKELSDRMFNLSDSTRVQRDWYSSFLLYCAVMTGDHINQRKCEKEFQQFYNKYLALENYIKSNHIEVMNSGINGNIAA

SEQ ID NO: 22344 - protein, 413 aa, unknown
  TnpB Polypeptide
MKRQQAFKYELRPSGHQKRQMRRFAGCCRFVFNKALALHKERYEQGEIKLGYAGLCKQLTQWRSAPETTWLADAPVHPLQQALKDLERAYSNFFAKRAELPRFRKKGHSERFRYPDPKQIKLDQGNNRLYLPKLGWVRYRNSRQVLGDVKNVTITQACGKWFVSIQTEREVEKPIPEGDAIGIDVGVARFATFDRALPALEGDDHLQPLNSFKKHQRRLRKAQQAMSRKTKFSNNWKKAKARVQRIHWQIANARRDYLHKTTTTISKNHAMVCIEDLQVRNMSKSATGTSDSPGTNVRAKSGLNRSILDQGWFEFRRQLDYKLQWRGGWLVAVPPQHTSQTCPRCGHLAPENRRSQATFLCQGCGFEDNADRVGAVNILRAGHARFACEVSDATGSPAAGTHRSDSEQAQWLG

SEQ ID NO: 22345 - protein, 230 aa, Nocardiopsis sp.
VKDFATLSTGEKIANPRHLQRKAHNLARYQRRMARKTKGSNNRRKATRKVAAAHRKVRHARQDFLHRTTARLVREHDLIAIEDLNVRGMTASAKGTVQSPGRRVRQKAGLNRAVLDTGFGEFRRQLEYKAARAGRTVVVVDRWFASSKTCSKCHHLLTTLSLGTRWWTCPSCRTRHGRDVNAATNILAAGRVAAREQVRGEACGAGVRRQGTSLPRSATKQETGPVRAEL

SEQ ID NO: 22346 - protein, 488 aa, unknown
  TnpB Polypeptide
VSRIACASDYGQCGTAADRRGGTHDDQTLATCIAVGTAGSSAPSPARLVSAPCGGGRRRELGMPVKAIRPSPGQPPPSWDSPNLARKPLPSGMGRNRVGFSSDLLDLVNDIVYHWNMKLTLQIQLFPAADHAARLKATVERFNQAADWLAGEAFDRKVANKIELQKTHYGQLRERFGLSAQMAVRCIAQVCEAYQRDKAKRPRFRKHAAMPFDQRMMSFKGVDRVSLLALDGRVIVPFVMGKYQTERFTNAKGQADLVLRGDGKWFLLVTVDLPEATPTPSTDFIGVDLGLAVIATDSDGNAHSGEPVEAIRRKHNLQRKRLQKRNTKGAKKKLNRVSGKEAKFRKAENHRISKAIVGLARDTSRGIAVEDLTGIRDRTTGWAKDARNRLGGWGFAQLRSFLEYKARLAGVFVMTVDPRYTSQTCSSCGHCCRENRKSQAKFLCVSCKFGMNADKNAALNIKFKAQAASRTALELAGDSILQPESPRL

SEQ ID NO: 22347 - protein, 506 aa, unknown
  TnpB Polypeptide
MARYNGPNFILEKKLYLQKWQESKLEHLFDCSERMYNETVYYANGCINKLRKDADYITTLELYNNEKDEDTKKQYGKTLATIREKYGLTKSGLQKFINDLRNKSYMGTIESDVAQKLADRVWKAVEKCLFSNGKKIHFKKFRTLDSIEGKKNITAIRFDKNANVVVYQKMVIPVKIRDNDYYVKEALENEIAYCRIVRKPFKNGYEYFVQIVLRGVPPLKPNRMPNFNGGNTAFDMGTSVVNAIGQKDGLMEPLAPKTVKECNKAIILLSRQLDRIRRLNNPNNYNEDGTCKKGHHKWVKTKNYYKTLFALKNMYRLKSIYIREHQARLQNKILSYGDNFATEDINFTSWMRRSKKPTEQTDKEIEVTNKKGENKKVKKCKKKKRFGKTLNNNSPGKFVRDFAKKLEYFGLELEIINTKEFKASQINHDTGEYEKIPLSQRTKIVAGHKVQRDLYSAFAMANRKDLETIDRQKCIDNFEKFLEIQERIINNLKARGDDLPACMGIK

SEQ ID NO: 22348 - protein, 520 aa, unknown
  TnpB Polypeptide
MSTHSKEGDPVKYYDTVTRHRFTTENSVDADLVNADLAQMIFSMAEAEREVLASQEFYNLALQVLEGDRPTGSLNSWGRKRLSRYDFSFQKYNMNEMLTTNVVSTLELYSMSVGLFQVMSTHPKETRPEKILSHYRDTYPDAPQPTSGMVRAHLIRFHKKGECKASLPGVSAKLNLAVCDTYFAPKASRDENNLLNVVFQLRTPQHGLTSIHLRLPENKSRFGNGRVCRPIIRLNNKGQVVFDIAIEHEMQQRDTHNVIGVDLGKVEPFVATVIDPENKHRSSPYHTHYKRRLGSLVKKEQHRRDLVNYLYKKADLCDKYNRTDHADVLRTEAKRVSAKATRIKHEISQCIASQIVSIADQNDAHIAVENLSWLDAQGGRWPHAEIQSRIENTAKRYGLKVVKVSAKDTSRTCSRCGSKVSNNSKTRVGTCTVCGFSLNRDVSASREIALRATSPSSRSCERMRSLLRQRAEMRSSAATRKSKPVTALSGIQGHTGTSGKDPEATLMMVRETLDSRGSPT

SEQ ID NO: 22349 - protein, 318 aa, Hormoscilla sp.
MQLVQQHIVNRNHPYWSYFDQQCFLSKNLFNLANYHMRQHFFGTRRVMSFTALYHLVSKSQAYYLLPNTKVAKQVTRRVHKTWLGYKAAHKDWQKHPEKYIGEPRIPKYKDKTKGRYMLVFPLETVSKPPLRKGIVKLTPCPIQFSSGLLDVAEVRVVPKSGCYVVEIVYEKQEANVVYGDAVAGVDLGLVNLVTLTTNQPGVAPLLIKGGALKAINTYYNKRKAKLQGDLETRHSLKVSSLLDALSMKRNNRVKNYLHTTSRRVIDWCVNHNIKTLIIGKNDGWKNGIQIGRKNNQQFVNIPHAKLVPQLAYKTGWY

SEQ ID NO: 22350 - protein, 372 aa, Melghirimyces sp.
MLKTYKFKLEPTKGQADKITWTLSMCRWLYNSMLEQRKFAYGKRGISLNYNKQANELPALKKEIPEFKQIQSQVLQHVAKRLDFAFQSFFRRLKKGENPGYPRFQGKNRYDSFTYPQSGFKLEGKFLKLSKIGNVRIKLHRQMEGNIKTCTIKRKNGKYYACFSCEMEALKQATTGKQVGIDLGVKHLAITSDGEFFEHPKYLRKSERKIKYLQRMVSRRKKGSNRRQKAVALLAKAWEQISNRRRDTAHKISRFLVNEYDLIVFEDLKITNMVKNHSLAKSIHDASWGMLIQFTTYKAEWAGKSVELVDPRNTSQACSKCGQIVKKTLKERTHRCSCGYVADRDVNAAKNILQKADGYVPEVCGQLELQLF

SEQ ID NO: 22351 - protein, 436 aa, unknown
  TnpB Polypeptide
MQKPLTQTLVFQLKPNEEGKQLLHYGQLEARRVVNEIYRLDNEHYDWNTIEHIVQERSSHVKNTTQRLYDKATDDLELHYNEEDYGHPSQEHQDSYPIRMNYGEGYTLEINKETGDITYRVSALKGKLVRGTLHGSPQNLERLEDAMDTDGWRVGTAEVVNKYGRYELHVTVTHETAEVADKQDATTFIGVDVNEDCVGLAAVTESEVKDTIVIEYPEVKKERHEFFTIRKRMQDAGQSSLENEVQGCEKEFVHDQLHQVSRRVVNWVNKFENPVLVFEDLEDMRDSIDYGARMNRRLHSLPFAQLQDYVSYKAAWDGIPSDKVDPEYTSQECPNCGHTSQSNRHKKRFKCVECAWQDHSDRKAGVLISARGLEKQEKNVPALNNLPVVRTRKVRRRGNGESEPPDRNPFLTIRGNHTDGQTGSVSNQSAGKRHEA

SEQ ID NO: 22352 - protein, 288 aa, unknown
  TnpB Polypeptide
VADVFRVKHPVRIQSDELIEQRLDAFTYTLDSENTTHAAAIDVGANNTLAIVTSTGQTAVYHARPEFETFHSYTVRISWLQSQLPEETYSSERIQGLYDERGEKRDHSRNAAVKHATDWLLAQNVDTVYVGDLTGVLDTHWKSTVNEKTHSFWSHGQLLKRINLTMGDVGMTVEEISEAGSSSTCPECDSENVSRDGDVFGCRECGLEAHSDVVGAWQILMNEDGPMARPAVLRAGRRRDVPDNSVQCDGTYWEWDEHDWILSSFEETSCSFDQTRLSKPASSQLEYS

SEQ ID NO: 22353 - protein, 477 aa, Nocardia sp.
MSRHTTFRYCLDPTVEQQQVLARHAGAARFAFNKCLNLVKTALDQRKTDPELPVPWTGFSLINAFNAWKKSEAAGRAIAVDRGGVAEIEVTGLVWRNEVCQQVFEEAAVDCGRALTAFFNSRSGKRRGKKVGFPRFKKKNIATVSFRLRSKTAKSGRAAIRVGSNGIARSVTLPGLGTIRVREDTRRLRRLLVSGRAKILYTTLIYRAGRWQISVTTQAADLHPAHHHAPRVSDEGGWVGIDRGLSAFLVAATAEGTEVARVDNPPKPLAVGLRKQRRLAKSLSRKQKGSTNRRDAAAALGRHHHRVANIRRHFLHQVTNQLVKTHDRLVIEDLNVAGMLGNRSLARAISDAGWTEFARLLRYKQQWRSGTIVTAGRWYASSRRCSACTAVNTGLTLADRIFACGCGFRADRDHNAAVNLAAWPIIQPEDPPRSPDPQAGGRVTNARRREGADRYPGGVGETGPNDARTDVHAAHTA

SEQ ID NO: 22354 - protein, 295 aa, Microbispora sp.
VVKVLLRGQGRGDAVEWPKNGDGCRWDSQPEHPSAMFVRLQGVGHVRVHQHRPVRGRVKTIGVKREGDRWYVVLACDDVPAEPRPATGAVVGLDMGVACLVTTSGGVHVANPRHLAATADRLAEAQRDLARGRRGSTRRRKKAERVAALHGKVRRQRIDYAHKAALTLVRAYDVIVHEDLRIANMTRSASGTIEAPGRNAAQKSGLNRSILDAGWGVFLTVLAYKAESAGRELIAVNPAGTSRTCARCGHCAKDNRLTQAEFVCTACGHAAHADVNATTNILRAGLALRRAAEAA

SEQ ID NO: 22355 - protein, 395 aa, Leptolyngbya sp.
MKQVTTTLKLKFLDLNRVKALAFADTAEAATELANELVKLPLKERKQLTTAKVVTPLKSALSNQVIRILRGRAGKRVNAFKRFWPEVNNQNWKLCKVGKTYSVSFPTIQGDKRVPLEVADSHYAAQLDSVLAGVGTRGTLKLMQLSGVWYAVLSITWDVPEVESTERIGVDRGQNRLAVAVTGKGRAVFFDGAEVVHRRRRFQRLRMQLQKAGKYRAVKKLERRERRWMREVNHTISRRIVRFAYAVNADVWVEDLSGIRQTSKQRRKNRSDAGTSRHTWAYYDLEQKLGYKLALTGRSMHKRPPNYTSKTDHRNGLIGKRNGHAFTGADGYQCDADWNAGFNLAKWDGFSCALELKEAMPVMGLVASGRGVFDSPLNSMNAFQMQQLTLFPEVS

SEQ ID NO: 22356 - protein, 415 aa, Campylobacter sp.
MKTLQRVERHIIKPYNKNYNSLLLLANKTKNLYNYVNYLLRQDFITKKPQIKEYDLSKKLASEKQFDYKELPSQTAQQTIKLLYKDWKSFFKCLKSYQKDKNKFTSNPKLPKYKRKGEKGHHIAIFTNQQAKIKPYKNFNKIVFPKSVNIKSIITKIDTNISSLKQVRIIPKATCFIVEIVYETNQLAINYVKNSFLSCDLGLNNFVTTIDTQSKQPLIINGKGIKSINQYYNKKKAYLQAIAKKSNNRFITKQLLKLLNFRENKLNDFLHKASNFLVKYCVKHSIETLIIGKNKEWKKEINLGAKNNQSFTSIPYENFISKLAYKCETYGINFVLTEENYTSKCDHLANEKMKHQEKYLGKRIKRGLFKSSTNKILNADVNGAIGIARKVFHNAVQTLVDSGTAFVPIKINLAF

SEQ ID NO: 22357 - protein, 462 aa, unknown
  TnpB Polypeptide
MGQAARTTKLLLDLSTREQGGANAGKRAHLEATVQILNTARRFYLDFFLAHPDKLTERVEIISMKTGEVREGMISAQNLLTWAEFQTVATREHPDPLPGWNFNKSFPDFPNRYRRSVIKDVIGKARGYLTAHLKWQHSRKKKGQPGVPTAPNHPTLYAGTFRLDLDELDLRKSFIRLKVYDGTAWVWVHYPTLYNRYFEQRRADETWERESPKLILSKKQAVIHFLQSKTITAKKIVESKQDPDLVTVAVDLNVKYLAVITVRQHGVIKETRFVSDHGLDQARFKHLKRVANKQWQTGRAVKGEHSNQHLWAHVRRQNVDTAHKTARAIVEVCEKYAGCVLVFERLRVIKPRGGSKSRRLNRKQANQLKGKINQLAKEKAYARGVVSVEVNPHGTSQYCARCGNKGVRFTYQAGQRVTGKGGKLFSCPTCHYECHADFNASVNVHHSFFREYHWQPYKPKSG

SEQ ID NO: 22358 - protein, 360 aa, Clostridiales sp.
MEQVITIKLKLFEPTQAKQEMYRAMADRTTDFANQYLALDKQTRPKTSKEAKQYSEPLLSAVLCQAIRDIEGKKKAKEFKRLWPGFNNQNFRVEKEVSKDGGAVWKVSFPTLEKRVGVPVIVTEYQAKRLEQLMAGKAKQGTAYLVKRGKAWYIHLSLTVTVEEEKKPEKYMGIDLGLIDLAVASVNGQTLFFSGGELAYIRRRYANLRRKLQKKRAHRAIKKLADKEHRWVTAVNHLISRKLIDMAILHGATVIRMEDLRSARWTKSQRKEQRQDSGRSLHNWPFYQLQEFIGYKATLAGVKIERVNPDLTSQTCSRCGERVKSRPKSRWFTCPRCKKSKHIDANAADNIAQAISGLAA

SEQ ID NO: 22359 - protein, 364 aa, Clostridiales sp.
MQFVYRFEIHPIHEQEQKLFYILKLCRKLYNHALNERKTAYKESGQGLTYCQQQNALPIFVEANPEYKKVHSQVLQDVLHRLDFAFQRYFAKEAGYPRFKNRDHYRSFTYPQVDAVKKTFSQPGFIFLSKIGFVKIKAHREFPAGSVSRVNVKYHGGKWYVNLTAEIPETKPVPVYKNVVGIDMGLSHFAALSDGTIVDPPKYFRQSEKKLARAQRRLSRKKKGSNNRGKAKEKVAKIHAKIANQRKDFLHKTSAAIVKQFDVVVMEDLRVKNMVRNHRLAKSIYDAGWGQFQKYVGYKCQRYGKVFVLVDPKGTSQTCLCGENVPKDLSIRIHECPACGLVMDRDLVSAKLILERGLEKIARV

SEQ ID NO: 22360 - protein, 402 aa, Micromonospora sp.
MVSRAVKRAFKYRFHPSDAQAAELTRTFGCVRLVYNMALQARTEAWTLRQERVTYNATSALLTGWKKTDGLAFLNEVSSVPLQQALRHLQAAFTNFFAKRAKYPTFKSRKKSRRSAEYTTSAFRWRDGKLTLAKMDQPLDIVWSRPLPDSATPSTVTVTQDAAGRWFVSLLCDDVIEQTPASGQVGIDAGLDSLLTLSTGEKITNPRHERRDRERLARAQRDLARKEKGSANRAKARLKVARVHARIADRRRDHLHKLTTRLVRETQTIVIEDLTVRNMVKNHSLARAISDAAWRQFRTLLEYKTDWYGRNLVVVDRWFPSSRLCSTCGAHAERIPLNVRSWTCRCGTVHDRDVNAARNILAAGLAVTACGDGVRPQRGNLRSGRPSVKQEHPRATTGIPVL

SEQ ID NO: 22361 - protein, 444 aa, unknown
  TnpB Polypeptide
MKRANQFDVRPRSEKEREVFVRWLDASASLWNETNYARRQAFPEDDASVWDADTGSLEGKYKGILSSSVAQQIIRKNSEAWRSLLSLNEKYHAGEHNEKPSPPGYWGNEEDGRVLRTYVRNDQYTIEYGKFSRLEVPIGSDLKDEYGFGYRERLRLEVAGDPKWSGEQGRLELVYDETADAFRAFQPVTVPDSRLDSPLASHEAALDIGANNLVACTVSTGQQYLYEGRNLFDEFRNTTERIAHYQSLLEDQRKSSKRIERLYRKRTNRRDHAQDSLVRDLVERLHDEGVSTLYVGDIKDVLSTHWKARVNEKTHNFWAFSRFLDRLESVCEEYDITVEEESEAWTSQECPECGEREVTIRHEDSLTCPCGFEGHSDLVASESFLRRQNNAVGSMARPVYLKWNNHTWREDHSLPSLVETTANEEYTNQSTASSGNVAHGDSDD

SEQ ID NO: 22362 - protein, 416 aa, unknown
  TnpB Polypeptide
MDVRRTAVVKLAVSDEQRDALRRTADQYLYCANRTADYCWSNTSYTECKTNKRQVRDALYADLRTETELQAQLVQAAIRRAVEAVKGVVERWKKGQRVSCPTFTAETMDYDTRSATFYRNKVSLATIEGRVEPSFVLPADSPTPYERYVLSEDYEFRESTVRYDATTDEFYLHISTRRIDGDDPKVSADTGHPDQTVLGIDLGVNSLAVSSTGTFWQGDDYDHWCREFETRRGEMQQRGTQAAHNALLRLGKREDAWRKQYIHTVANELVTEAVEHDCDVIAFEDVTDIRERLPQAKWHHIWAFRRLFDYVEYKAPERGVSVEQVEPGHTSQRCSRTDCGFTHKANRHGERFCCQKCGYEVNADYNAAKNIGLRYARKRTHRLRSSPTSGSGDAEVDLRLNGGTLNGKSYRPVAGD

SEQ ID NO: 22363 - protein, 410 aa, unknown
  TnpB Polypeptide
MNKAYEYRIYPTTEQVSIFNKTLGLCRLYYNLVVENKNRNRTFRIEGYKPIFTKFKPEALEWLKEVDSMPLGQMWSDVRGAYTNFYASIKGARKGMPPNPPRFKSKKNTKDSFRYALQGNTAHINSSGLFVTRRLGYIPIHASSQFCKGKWRNITFKRSASGNWYVKICVEIKEEQNKIQNGKAVGIDWNCNSDSFLTLSDGTKIKCPRFLKRKEKQLEKYQQVQSRRFVKERQEQSKRYIKAKLKVARLHEKVANQRKDWLHKVSRELANKYQYVFVEDINLQKMSSELEHGKTVGDQGFGLLRQYLAYKTNLVKVPAEYTSKMCHHCGNINSQVVLDVKKWVCPVCNAKHDRDVNAAQNILYLGVKRTLGRELTDVLKNARITPRMPKAITDNSSCKPGESHASLACG

SEQ ID NO: 22364 - protein, 370 aa, Pantoea sp.
MKRAYKYRFYPTSDQVELLAQTFGCVRFVYNFILRWRTDAYYERQEKVGYIQANARLTALKKEPEFAWLNDVSCVPLQQSLRHQQSAFSNFFAGRAAYPAFKRKRHKQAAELTASAFKYRDGRLYMAKSKTPLDVRWSRPLPCAPSTVTISKDAAGRYFVSCLCESEPASLPVTAKTVGIDVGLKDLFVTDTGFKTGNPRHTAKYAKRLALLQRRLSKKQKGSKNRAKARARVARIHAKISDCRLDGLHKLSRKLINENQVVCVESLKVKNMIRNPKLSRAIADAGWSEFVRQLQYKGEWAGRSVVAIDPFFPSTKRCSACGHTLPKLALNVRLWTCPECAATHDRDVNAAKNIKAAGLAVLACGESVNP

SEQ ID NO: 22365 - protein, 441 aa, unknown
  TnpB Polypeptide
MKVKRTGRFKVKASHPEYEMIKNHTIEAKEIYNYANYIIRQLYFKNSGNHKYSLEFIHEYPELKEDFEAYLKENGQFTSTFYRIVCNFSRIKEHSLNSKMAQNVVDTLKRDWKSYWKLLKLKIEGKYDKNVNIPRYKKKYSTVEYNPQVLSRTKLKNEYVGIAGMKEGFKIPNFYKEYSCKSARALWKSNEMYMEVIYEKEVPETKPNKKVASIDLGGKILMAVAYSFNRRGICVSANMLRSLNHYYNKVIGAMTSVLPKGRKISNAIINLWRKRDGQIRNLFGYYANGLVKELVSLNVSKLIIGKNKEQKQEIDLHSRLENRNFCMIPFNKLIEILRYKCEENGIECTVQEESYTSRASFLDNDFIPVHGEEDRKYEFSGWRNGRIYKIKKKNQRIHADLNGALNIMRKAGHELAEDIPALKKNWIFPIGKYKVKNLKYS

SEQ ID NO: 22366 - protein, 377 aa, unknown
  TnpB Polypeptide
VDIKRAYRFRFYPTPEQELILARTFGCARFAYNHMLRLRTDAWFQRQERIGYHETSAALTKLKREPEFAWLNEVSSVPVQQALRHLQTAFANFFAKRARYPSFKRKDGPQSAEYTTSAFKWDGGALKLAKMDAPLAIRWSRTLPMGAKPTTVTVSRDTAGRYFVSILCDDTVSTKRKAKGRVGIDLGLTHFAILSTGEKIAAPNTFRNNEAKLAKLQRRLAKKTRGSARRAKAKLKVARLHAKIADSRRDFLHKLSTRLINENQVIAVESLSVSNMQKNRRLSKSIGDASWSEFVRQLEYKAHWYGRTLVGIDRWYPSSKRCSDCGHTVAAMPLNVREWTCPECGSIHDRDVNAARNVLAAGLAVSAHGESVSPVCM

SEQ ID NO: 22367 - protein, 196 aa, Microcystis sp.
MYKAYKFRLKPNTEQEIALAKSFGCCRWFWNYSLNLCQETYKTTGKGLTRNYIQGLLPSLKKEYEWLTDAYSQCLQVVALNLSQADQNFFEKRARLPRFKSKHGKQSISYPANVKFEGDYLKLPGKVGLVYSVRHREFAGTIKTVTISKNPDGKYYASILVDDGSELPSQSSDGKAIGIDLGLNHFAITSNGSKYD

SEQ ID NO: 22368 - protein, 532 aa, Brasilonema sp.
VSQLYRTIPVRARFTDEEKVFWVNQCEHANSLINESVYHTRQTHYSKLEQLDDAFTTYWRSDELLTGWKTYKCSTTYPELDKVLKDSPHYKAMAAQSAQQTLKTVGESITSYNGLVNAYYKGEVDKPSLPKYRKRGGLASVTFPRQALNYKGGCFYPSISRETKPHLLIEIALQLPEFIDSDWVKEVTVRPYLGELWIDWVIDDGKEPINSNPNLDYTQAWSFDHGGTNWLTGVSTHGKSLIIDGRKLKAMNQGYCRLVAKYKQGKSDFYWAGVLHEENEPALLQRVPDYADRSTKQRLVHFLGDNASDSNLDRVQRKRNNQMRDAVNKAARFIINQCLNDRVGNLVIGWNDGQNSGSNMGKRNNQNFVVIPTGRLIERLKQLCPEYGIVLTITEEAYTSKASYLDGDSLYKHGEKPAGWKPSGLRVKRGLYKSRDGHVINADCNGAANIARKVATQLGLNLVEVGRASLTVPQRIDLFNRLSKSYRKRCADEPVLREGSHCVGRVSRLEACGVFPPQASGGGLLALGATSV

SEQ ID NO: 22369 - protein, 422 aa, unknown
  TnpB Polypeptide
MLYGVTGVLRSYSLEYDCGEQLEPLLQAYRDAVNSVLKELWGALEWEKEKVKGGKRQWRLLPKYKVDIHSKEYKKKLRDSLLEGWPYAAHWVDSAIKTAYSILKSWRKNYVKGDRRRRRPTARRLFARAKQTLIKLEGERLRVTVKPGEHVYLDLSARYFKLPSEVSSAGLGEPVITLEKVHLPVHYEDTQNSNPSVAWDFNLLSLDGYSPETGWVRIDTSKLASVHTSSFEKRRSVQRKASKSKKTKRILAKYSKRERNRARKHQLEIARVIQSVAGVVGLEELKKQGMYTRSRIWNRRISRSDWRSITRILEGRLGEAGVKELDPYGSSSYCSRCGWENRDLNGADIFVCGGCGLRINRQLNAAINLYMRLRFGYKEKWVGGRKYIKLRMEGASQKAWWDAVVLPSLVGGCVLTRGGGAE

SEQ ID NO: 22370 - protein, 708 aa, Streptomyces sp.
VSSVSDATPARRFRGKNKGPSWKRGEDTELAVISLPLDVHRPEDASRAEQLYTAMGSVKRALQRDARAAVDAYWAGDVRREEDAKAWRAVLGLSREGMEQRGYQHMERSRHLGHHVTKALVMHQADEVWEGTARHLFPDASGRRAGRPKTGPWWDYTRIPGRARSHTTGRKWETFKLHGTLAGHLSAYRHRDLGPHLLTPEQAAELPAGTKVLEQPRRLPAPTRPAGRVSTGETTAKGTPRTRAATWWDHTGPLTLVFAGGADSRRGDLVLPVRLPSGAGRWPRLLHFLNNPSTWHKVDLVRRRDTSAPGGWAYEAHLMVLTSGYASPETRARRQAAAGLDRVGGIDGNVTNLSVISFPGTFDPADGTIQTSRVELTDVELAALEKARRKERGRKRALDRSRRATNPVQYVPSKRQQARTKRRETVGLPARTDQVPGGARSANRAGVPRQAYRRDGLSAGYRLNRARLAEAAATVAAAKDHRARRIAEQIVGTHGARLTVEDCDIRTWYRLWGKALQATTPGRLITAIGRECEKAGGRLLRASTFTTKLSQTCLCGAEVRKTLAERVHRCISCGLTADRDMVSAALASHVRFTDPADPSTAGLDVVQARMTQLLFSEGLQEALSSQPQRGARPTRGRTHAAARTPGTPGPRASARQKTTARYRPTPNETQPANKRHKAHVGTAAPVGNAPPRGGTPEQELDGWHPITG

SEQ ID NO: 22371 - protein, 272 aa, Streptomyces sp.
MKIVTQVKLMPDAVQASALERTLSTVNDAANWVSEVAFEHGVPREYELRKHTYAELKARGLGAQAAQHVTKKVRDSYTTLKASIRAGNLGKEGSRRRRKAESKPIAFRPQAAQPYDDRCLSLQHDQRTVSIWTVDGRVKNVSFVCSPDTLKMLQAHRQGESDLIERDGVFYLVATCDVPEAQQYEPDGFIGVDLGIENIATASTGYLAAGRGLNRYRKRQLALRAKLQKKRTKSAKRRLKARARTEARHAANQNHIISKTIVTEAERTGRGV

SEQ ID NO: 22372 - protein, 485 aa, Streptomyces sp.
VKKFQPQPGFQVQAFRFALDPNTTQEHALRSHCGAARAAYNWAVGWVTASWWQRRAEESYGIAEAGLTQWRPWSLPALRKAFNETKHADPRFAAWWEENSKEAYNTGLANAAAAFDNYTKSKQGKRHGKRMGTPRFKSKRKARLSCRFTTGAIRVDTGGRHVTLPRLGTIRTHEPTVKLLARVEAGTARILSATVRHERGRWYVAFQAEVKRDLERVARPDVAVGIDLGVKTLAVMADSTGEIRTVANPGHYDRARKQLRRASRIVSRRQGPDRRTGQKPSKRWEKANAARNRVHHRVANLRADALHKLTTSVAAEYGTVVIEDLNVAGMLRNRRLARRIADAGFAEIRRQLTYKTRQRHTTHLVAADRWYPSSKTCSGCGAVKAKLPLHVRTYECDTCGLVIDRDDNAALNLAALAAACLTGTGVAGEQDTTEVVSKPRGADQKTRATRTRRKASAGRAGGATLPHQRQEEARDRTHAEALTLW

SEQ ID NO: 22373 - protein, 441 aa, Streptomyces sp.
VSGAEPAGSGKKKRRGFEARPGFHVVGHRLALDPSASALQALASHCGAARVAYNWAVRHVLASWSQRAAEETYGVPEAERVAWRSWSLPSLRKAFNEAKHNDPFLREWWAQNSKEAYNTGLANAAAAFDNYVKSRRGERKGARMGRPRFKPKRKTRPACKFTTGTIRLDDRRHIVLPRLGRIRLHEDVQPLVDAIAEGCRSNQGSKVHEQAVSSAQQASDVGRPLKGSAPIAEGGTRILSVTVRSERGRWFAVLQTEERHTIAPAGRPGTAVGIDLGVKALLVMADSAGEVREVANPKHYDQALTQLRKASRTVSRRRGPNRRTGQAPSRRWEKANAVPRSSSAETSRTGTLCCVLWESAWAEFVPFLSFDVEIRKVICSTNAIESVNARIRKAVLEFQWLSQHRSTTMVPSRPARRAADTQRQPSSGATWVRMLSSTWAL

SEQ ID NO: 22374 - protein, 382 aa, Anaerolineales sp.
MNLIAQVKLMTTPDQVSVLKRTLETANAACDYISDLAWEHHCFKRYELQKRFYQKIRQKFPDLSSQVVIRCIAKVTDAYKLDRKTKRAFKPQGSISYDQRILSWRTKQDEPVVSIWSLEGRLRILAAFGPCQKAMIEHGLRGAADLIYRDGAFYLHQVCEVEEPDPDDPEGWLGIDLGIVNLATTSDGDTFSGKELEARRQWYEKRRAILQSVGTKSAKRALMKLSGRFARFQKHVNHCISKALVGAAKRTSCGIALEDLSGIRKRVRVRRGQRTRHHNWAFHQLGQFVTYKARLAGVAVTLVDPRYTSQLCPLCGHISRSNRKSRDWFACSSCGFAAPADHVAAINIAARADVDRPMDSTEELKGIPMSIAAPSEVRVNAP

SEQ ID NO: 22375 - protein, 406 aa, unknown
  TnpB Polypeptide
MRTHKLKIPCTEQLDVLNEASASVWNECRSLKEVWDYAHGYRTTGRIDTPCELWMDKQLSKSQPLHSQSIQAVRERYFKNRKAYRALRRNGNTTAKPPYKYKRFQTTTWKKSAIRFKETSCGQGVVLSNGRGNLPLQIPLPKLFNLSLTPNIVLVNLVYTHGHYELHFIYNTEKPDTSKADGVVGVDIGEIHPIVSHDGRNTLIFNGRYIRSLYRLRNKVLASMNAKIDRCQRHSRRYWHLVRRKWKRIRKIDNQIKDALHKHTTKFVKHCAETGIGRIAIGDLTGIRENIDYGKRANQKLHQWAFGKVTELITYKAKALGIKVELVDEAYTSQTCPKCGNRKKPTHRNYSCKCGFQYHRDGVGAINIRTKYLGHLGVPVVADTDTQTVKMTPPVGFRLEVKRCSA

SEQ ID NO: 22376 - protein, 242 aa, unknown
  TnpB Polypeptide
VRKINRAVKIRIYPNKEQITQIEKTIGCSRFLYNRMLADKIRHYQEEKKMLKNTPAGYKKEYPWLKEVDSLALANVQLNLEGAFRKFFREPGVGFPHYKSKKHSRKSYTTNMVNGNICLQDRFLKLPKMQPVKIKLHRMIPEGWKLKSVTVSREPSGKYFASLLFDCENQTAEKRQAEKFLGMDFAMHGMCVFSTGERAGYPCSTGMQRKNLPGNRESFPDVKRAAVTIRNRRKRLLYIMKR

SEQ ID NO: 22377 - protein, 419 aa, Methylobacter sp.
MNKTIRKAFKFRLKLTHEADAKLNNYAGGCRFAWNKALALNLDRLNDKQPILWYLELNFWATIWKQSEEYGFLKDVPSQALQQKLKDLDKAFRDCFDKNQPLKRCPVFKKKGLSDSIRFPQGFKIDQENSRIFLPKIGLVKYRNSRRIVGNPKNVTISKKGKHWYASIQVEYDAMDMPHKSTSIVGIDMGVKKFATLSDGVVFEPLNSFKGKAEKSAKLQRKLKHKKKFSSNWKKAKAKITKCHEEIANARKDYLHKVSTEISKSHAVVVVEDLKVRNMSKSAKGSIDKPGKNIAQKSGLNKSILDQGWGVFFQMLEYKQNWNGGMVLKVPAHHTSQTCPCCQHVAKENRLTQAEFVCVECGYTNNADIVGAINVLSRGHRQLACQASGAVMPPATGTSDKRRRKVTSEKSGITASLGR

SEQ ID NO: 22378 - protein, 371 aa, unknown
  TnpB Polypeptide
MANCKQFTTLKVRLYPSLEQAELFEKTFGCCRWLWNRMLSDTEEFYAATDLQYIPTPAHYKKEAPFLREVDSQPLCTVHQNLRQAFLAFFRNPGAFHRPQFKTKKARRDSFTVYCRQYRTGPSVRLIGDGLQMPKLGLINARVYRKPLHWWKLKSVTVTKSRSGKYFASIVFGYEAKTPERPASVPERTLGLNQSLTHFYTDSEGNSPELPALAEEKLVRIQQRLSRMERGSRNYERQLQKLRLQHEHIANQRKDFIHKESRRIANAWDAVCVRDTDLVEMSRKWKGTSPVSAGFGIFRECLKYKLERQGKAYVPVDRFAPAAKTCHCCGYVHEGLRLREKVWTCPACGAVLTREMNTARNLRNFGLKETA

SEQ ID NO: 22379 - protein, 493 aa, Acidilobales sp.
MSGGGNPRDVSAEGSDPLQSFRELVEKRKKSNKRVVRLRLFPEKHEEEMLFNIGLTAVRLWNELNYEKRKLFFKNDLTPEKRIEINRRYYNKYKKILGVNAGQVIDKNEEAWDSFFELLKTKRLRRLSPHISKISPPGYWKDKITGEKKIYMLIRNDRYFLEPTNEGEGRLVLKDFKLSIRYVGRIRWEGKQGRLEIIYEAGRWFAYIPIEVGVDPPKSNPKGYIKPSYKDKKNRIFNPRSIKQRDPIGDKKAFIDIGLNNLFAVVVSDGSALLIKGGVIKSEYYWWKREISTYQAVRDLLKNAGIHRWKDYHEKYLKALYKRNERLRHLYRTAIRFLAEMLWSRGVMKIYVGYPIMLNQDNGNEYNTNIWWYRKIVLWMIDVFIEYGINVEIVSEDYTSMKCSICGEIHRDGRIYRGLYICRKTGKKINADINASLNIARRAGYRIIISKKIESYLVTHNGIKPLTPLQRANTRDPEIRNPALKGGEGSYDT

SEQ ID NO: 22380 - protein, 363 aa, unknown
  TnpB Polypeptide
MSQSIKTLRVRVKDKHAKVLSQWAFEVNQVWNAANELTAEYGWVPIPELGYVNLQTSEFDLNKELRWIRKERDLSIGAATVQSVIAQHAKSRRKSKRNKLRWRCSSGSNRSLGWVPFKEAGVKLVNGQIRFCGEYFGIWDSYDLSKYDLGTGSFSQDARGRWYFNTTVEVEVQPGLGRAAVGIDLGLKTAATGSDGIAKLDRRKITDEFAAQLGRAQRANKSKRVKSIHAKIKNSRRDALHKFSSMLTKQYGGIFVGDVSSKKLVKTRMAKSVLDTGWHMLKTQLKYKANARSVVYLEVPERNTTQTCSSCGIISASSPKGRAGLGIREWMCECGVTHDRDINAAKNILALGLERLAGGIPAL

SEQ ID NO: 22381 - protein, 560 aa, unknown
  TnpB Polypeptide
MRSISEPFVVTPPAGARILTRLRLPAADHAVVRAVGEYLGSLASADVAWRCRLGRATDQRAVRKRTLTGRSSSRWAGAITRTSNDQWQRAMANLTDRRIALCRASRAIRSRLAVPVGQRQSRVRGYATRAERFAKQGRLQHLQAELAEVEGRLAAGRVSVCRGGRRLAKLRHAIVGDATVGDRGGNRGRGRDGSRTEVTEAEWHARWDAERLFLIADGDAEYPLGNGTIVVHPEQRWCEIKLPTPLAQLANRPGGRYRLACPVVFTHRSDEWAAQVTTGAVRYDITLDPAKRRWYLHASWRIPAVTPPSLEELRCDRALGVDLNADHLDAWVLDESGNPVDPPHTIPLDLDGFSASTRDGRLRAAISSILRLAAEGSCRSILVENLDFADARQTGRETLGHGRRGKSFRRIVAGIPTRRFRDLLVGMAANHGLWVIAVDPAWTSVWGRRYWQTPLNQSTKRSVTVSGHHAAAVVIGRRGLGFGARRRPGVPGHDRRIVAGELPAWPDLRRSGRKGPGPPGGQRAGEHPRKTRPAERNRLGDQVVQDRSGPPGQDVRLLVS

SEQ ID NO: 22382 - protein, 386 aa, Halorubrum sp.
MQTTLRFRVSLSDAVASEAWRQIDILRQIRNHAVRDYYNADYNDQPSDYDQQNRLKQWGNRWPTFAVPSQHAAQQAMSQIHTDLDGLEERRNNGHDVGRLHWQGRGECRSVSYNQPCRWNVDHNTGGERFVRFRLDKIGWFRIRANRPVPDADEISEAILNKQKTGEWYLSLVVEVENTPAKPGLDEIGPQDCVGVDLGITNYIHTSDNLPVGTLDLSDEYERLRREQRKLSRKERGSHNWEDQRQQVAKAKREIKRKVLDYQHKLTTWLVTEYDLVAVEDLDVKPMLEDSQNAKNKQDAAWSRFVNLLEYKADLHGTHVMTVNPAGTTKECASCGVATNKPLWVREHSCPACGHTQDRDLNAATNILTRGLKQRGAGGSESTPMQ

SEQ ID NO: 22383 - protein, 369 aa, Lactobacillus sp.
MQKAIDQLCDYRRYCWNQGLALWNDMYDASLILEDKKLRPNERKVRDELVANKADWQYQLSARCLQLAIADLGKAWKNFFNKAQPDWGKPKFKSKKAPRQGFKTDRAKIVDGKLRLDKPHGVEKWYDIRFNGAKSLNGELKVVSIYRENGKYWASLPFERKTEAKTKTAKKTAVDVNVGHFNYTDGQINTLPHNLNNSYERIKHYQRLLARKRAVNGQKATQTNNYVKTRAKLQRDYRRVANIQHDIVQKFTTKLVNDYDQIVIEDLDVKQMQMSHVASKGLQRSLFGYFRQVLTYKCEWYNKHLLLADKFYPSTQRCSQCGFVKTGKDKIGLNGNIKHHTKHNEYICYACGAVMDRDRNAVMNLLALL

SEQ ID NO: 22384 - protein, 385 aa, Methylobacterium sp.
VGVQGEDDVPPGAKLHRPNRLDALCQGRDHPYRPNGSEDLQLPRQGRDERLIALGDAVNTVWNYFNEISMRSAQRGPIWAAKKQLRVLTKGSGKLLGLPSQVVQEMINQYVIKRKAARRPKLRWRASRGPRRALGWVPFTNQDIALDGTTVLLRGQRFRLWLHRAVEGRIKSGNFSQDARGRWYCNLVCEVPRSQGRGRDDIGVDLGLKSVAKCSDGTGLEQAQFYRCLEPKLAEAQRKRRKRQVKSIHAKIANRRKDVLHKFSRALVDRARKITVGDVSASAMTKTRMAKSVLDAGWSTLRGMLRYKCDHAGVAYAEVNEANTTRTCSFCGRLSGPTGLAGLSIRRWTCGECGSEHERDQNAARNIARLGCETPCPSGHGSPGF

SEQ ID NO: 22385 - protein, 514 aa, Curtobacterium sp.
VSGSALREATAPGGAGSHQRAYRFALDPTPAQVRALLSHAGAARVAFNTMLAVVRANLDQRTAERSYGIPDVELTPSLSWSKVSLRNGWVARRDTVAPWWPENAREAYTSGCFALAAALDNWSKSRNGARAGAPVGFPRFKSRTRSKPSVKFEGVTAKLLPTGHTIHLPRIGKVHTHESTRKLGRLVEAGQAKVNSVTVSYDRGRWFAAFQVEQVAIVRPRPLGPKSVVGIDVGVKDLIVVARPDGSEVERLRAPKDLAKAAATLKALQRQAARQVGPYDVVSKRRQQPSAGWLRTQARIRKVHARVANLRADRLHKLTTRLAREFDVVGIEHLNVRGMLARAKPKPHPSRPGVFLPNRRRQKSGLARSVANASFSTLHQQLQYKTSWFGSTLVRADRFYPSSKTCSGCGSVKAKLTLAEREYVCTTCGMVIDRDLNAAVNLARHAAASVAEESGPDEGSSFVSGGGTQKPQPAAAGTGRSQRNRNPTSTTGTPSPQGQGSTQPSETSLTPVEN

SEQ ID NO: 22386 - protein, 328 aa, Curtobacterium sp.
MAPGGAGSRQRAYRFALDPTPAQTRALLSHAGAARVAFNTMLAVVRANLDQRAAERSYGIPDVELTPSLSWSKVSLRNGWVARRDTVAPWWPENAREAYTSGCFALAAALDNWSKSRNGARAGAPVGFPRFKSRTRSKPSVKFEGVTAKLLPTGHTIHLPRIGKVHTHESTRKLGRLVEAGQAKVNSVTVSYDRGRWFAAFQVEQVTIVRPRPLGPKSVVGIDVGVKDLIVIARPDGTEVERLRAPKDLAKAAATLKALQRQAARQVGPVDPVSKRRQQPSAGWLRTQARIRQVHARVANLRADRLHKLTTRLARAMWSASSTSTSGA

SEQ ID NO: 22387 - protein, 295 aa, unknown
  TnpB Polypeptide
MEYSPKYRLFPSAEQRESLDWTRDIVRQVYNHALHEFNKIPEDEGTLRQRVWQVRDDLPRLKQQWTDLKQVYSTVLQKAVERIRTNINNLGKLKAKGYNVGSLNWKAPREYRSFTYRQSGFELDKKSGPRNRATLRLKKVRGETLEIPIRLHRDLPEHDAIKEVTVKKEPTGAWYASFCISTNKPEKSAPEDIDTADAVGLDLGVRNFIHDSDGRSIDRLDLTDGRERLEREQRSLSRKQYESNNWEKQRRRVAKIHARMSNKKRDYKHKLAHFYRKSRPSASGLDPEGEGRKLR

SEQ ID NO: 22388 - protein, 412 aa, unknown
  TnpB Polypeptide
MKTSFKVEIQPTPQQRRSLLQHAGNARWAFNWGLQQKQAAWETRKAAIASGVDAKDAPKVPTAIDLHRELNVLKKTTIPWMYAASKCAPQEALRNLDTAFQNFFRRCKTGEKPGYPRFKSRNRGIGSFRLTGTIRANHNSLRLPRLGRVRIKPGDHGYIPTLKYSQATVSEKAGRWYVSVLGDEVEEAEPNGLPAVGVDLGVTRLATLSNGKVIENPRAFAAHARRLKRAQQSLSRKKKGSSNRSKARAKVARVYAQIKNLRKDALHKATTFLAKNHGVIVIEDLQVKNMVKGGCGKRGLNRVLHDASFGEFRRQLEYKAKLYGAKVVAVPAAYTSQRCSCCGHVEAANRPSQAAFCCLSCGHTANADHNAAINILLAESCSESQNACGADVRREGLTAAAQPAVKQESAVA

SEQ ID NO: 22389 - protein, 366 aa, Ferrimonas sp.
MKRAYRYRFIPTPQQESLLARTFGCVRFVYNSILAWRTDAFSNQGLKVGYTKANAMLSSMKKEPELDWLSDVSCVPLQQSLRHQQTAFKNFFEGRASHPTFKKKTHRQSAEFTRSAFKYRDGQLFMAKSKEPLRIRWSRELPGDPSTITISKDCSGRYFVSCLCEFEPKPMPVVAKTVGIDLGLKDLFITSDGFKSSNPQHLKRYEQRLALLQRRLSKKKKGSANRAKAKLKVAKLHAKIADCRMDATHKASRTLINENQVVCLENLTVKNMVKNPKLAKHIADANWGELGRQLQYKALWAGRTVVKIDRWYPSSKRCSCCGHTLDHLSLSVRSWRCPECSIEHDRDINAAQNIKAAGLAVLACGA

SEQ ID NO: 22390 - protein, 389 aa, unknown
  TnpB Polypeptide
MDIVKGYRFRIKTNSNIQSLLEQFAGANRWLYNWALDQRKQYYKACGKSLNYYDQANQLSSLKAFYPWLKDCPSQSLQQTLKHVDTAFKNFFKGTGMFPQFQKRGIHDSFNYPQGFKLDNRRIFLPKIGWIRFYKSCPILGKVKNVTVSREGEHWYISLCSEVEQALEQAPSSEVAIDLGVKKLLSLSTGEQIEPIDFSKEQRKLKKSQRKLSRMKKGSNNWKKQKNRLNRKHRKIVNKRRDYLHKASTEICKNHAVIYVEDLIIPNMSKSAKGNALEHGRNVKAKSGLNRSILQQGWGEFIRQLSYKSAWRNGSVIKIDHRYTSQKCSECGHTAKENRKTQAVFECVKCGHTENADINASKNILAVGQTVSACGSNPIRDRKQEPLVA

SEQ ID NO: 22391 - protein, 249 aa, unknown
  TnpB Polypeptide
MKDSGSWGAAASPPPIPAPGNGQAVGIDRGVAVSAALATGELLHVPGLNAQEKGRLRGLERKLARARRGSRRRKRVKLALGRLRARERDRRKDWAEKTSTYIARRFDLIRVEDLQIMNMTRSAKGTVQNPGRRVRQKAGLNCGILRSGWGLLVRRLQEKAPGRVEKVSAAFTSQRCSACGHVDARSRESQARFVCTACGYACHADVNAAKNIAAGHPTHLPGPLHARGGCRDTGPVNREPQLLASFTGL

SEQ ID NO: 22392 - protein, 219 aa, Anabaena sp.
LSLEDKTVPSLKTDVTPTPDNTLGVDMGLKSFLVTSDNQTVKIPQYYRQAERRLKRLQRQLSRKKKGSNRRKKSIKRVAKAHLKVANQRKDFHYKTAIWLLHQSQVIAHENLNIKGLAKSMLAKSITDAGWGQFLQILNAKAASAGYLVVAVNPNGTSQECSDCGATVPKVLADRWHSCQCGASYDRDHNAARNIKYRAAGHPVLLQSSVNVRGVARSR

SEQ ID NO: 22393 - protein, 262 aa, unknown
  TnpB Polypeptide
MKTRGVIHLKDFNLTLRFKGKLKWHGKQGRLEVIYNDARRGWYAHIPVEVENVAEAKGGLRAGVDLGIVNLAAVYVEDGTWYIFKSGGVLSQYECYSEEISKVQKVLARHRQRTSRKLRLLYDKRRRFLRHALNSMVRKIMKELKEKRAGEVVVGYPKDITRNHSNKLTMNFWNYGYTIRRFKEVGEELGIKVIDVAEPNTSKSCSLCGEAHESGRVKRGLYKCPRMGKVINADLNGAINILHIPESLGSRSGGCFGLHNRL

SEQ ID NO: 22394 - protein, 390 aa, Chlorogloea sp.
MRISYQYKIKPNKEQAEKIDNTLEMLRYQYNYLLAQRVDWYEMNRCPIDRYPLICYLPELKEQPNYYKQKASLTHLKINRPWYKNIHSQVLQEVPKKVEITFDRWLKGDVNGKKSGRPRFKAKGRYKTFTYPQFKLHQFVGNKIILSKIGDIKVIVHRQIPDGFDIKTASVTKKADGYYVTLSLDDKAVTTINPNFDADNIVGIDVGLIDFYVASDNTRIAAPKYLRKAERKLKSAQRKVSRRKKGSNRRKKAIKQLGIRHKKVGDTRKDFHFKIAKTVLDKYDIVAVEKLNIKGLAKTRLAKSINDAGWGQFISILSNKAENAGLKVIPVNSNGTSQECSNCGHKVKKPLSQRMHNCPVCHTSLCRDLNAAINIRNRGAHGLKAQSMSS

SEQ ID NO: 22395 - protein, 424 aa, unknown
  TnpB Polypeptide
MHEVRLIGVESRNATVVRSLAFPVSDAPPELNWLMSEFRIIVNKSIRIAVSQDIRSRYRLTSAAYRQLSAEHSIHKQYIPSAFEVAMGALKAYRRRLRKGKQGSIPYTTRRMLKAENQSYRLDRETGRLRIPLRRGEMAVILQLTLSDWHRSILSDPSWSLGSLTVVPGRGIIAIRKDAPECYEPESALAFDTNEDSLDGVFAKGEEASLTSVAFSGVRQVQATHFRRRRRLARKKANDRRVQRMLLAREGKRERTRVKQRLHIVSKGIVKEAKGRHAAIVLEDLTLHGSGGRSRRMNRRLSSWPRSEIHRQIGYKAALEGVPVIKVNPRYTSKTCPACGALRRDRVGKVFDCVCGWSMDRQHNAALNILKTALASDEDLTRAVRFQPGALRDDMVIPLYDLQALPEGAREESSGDELRCPDGG

SEQ ID NO: 22396 - protein, 402 aa, unknown
  TnpB Polypeptide
VKRLQAFKFQLRPGGQQEREMRRFAGACRFVFNRALARQNENHEAGNKYIPYGKMASWLVEWKNATETQWLKDSPSQPLQQSLKDLERAYKNFFRKRAAFPRFKKRGQNDAFRYPQGVKLDQENSRIFLPKLGWMRYRNSRQVTGVVKNVTVSQSCGKWYISIQTESEVSTPAHPSASMVRLDAGVAKLATLSDGTVFEPVNSFQKNQKTLARLQRQLSRKVKFSNNWQKQKRKIQRLHSCIANIRRDYLHKVTTAVSKNHAMIVIEDLKVSNMSKSAAGTVSQPGRNVRAKSGLNRSILDQGWYEMHRQLEYKQLWRGGQVLAVPPAYTSQRCAYCGHTAKENRLSQSKFRCQVCGYTANADVNGARNILAAGHAVLACGEMVQSGRPLKQEPTEMIQATA

SEQ ID NO: 22397 - protein, 385 aa, unknown
  TnpB Polypeptide
MLKAYKTEINLTPEQVKLIHQTLGVCRFIYNFYLAHNKEIYQKEKRFISANDFSKWLNNEFIPNNPEYSWIKDVSSKAVKQSMVNGEKASKNFFKGNSKFPKFKKKKRNNVKAYFPKNNKTDWTIERHKIKIPTFGFVKLKEKGYIPTDKKVISGTISMKAGRYFVSVLVDEKIQNNVVNFHSEGIGIDLGLKDFAICSNGDIKKNINKTSKVKKLEKQLKREQRCLSRKYESKKKGEATKSAKNIDKQVLKVQKLHQKLQNIRQDYINKIVNEMVKTKPKYITIEDLNVKGMMKNKHLSKAVAQQNFFYFKIRLESKCKEYGIELRIVSKWYPSSKTCSCCGNIKKDLKLSDRVYMCEECGLEIDRDYNASVNLMNAKEYIIAC

SEQ ID NO: 22398 - protein, 331 aa, Methanobrevibacter sp.
LDLIKAYNKHKKEGAGFPKFKSEKNPNISFRIQANNNNIHLNERKNRIQIPKIGKIKFKTSKEHKQKIQESKINNITIKHENGIYTGIININTNHTPLEHSFEAVGIDIGIRRPLTCSNGLKIEEFDLTREEKNVKYYQREMSKKQLGSKRYRIAQKRYWKALNKKINKKNDQYHKITHHIVKNNQVIALETLNIKGWFKNKHWAPKLQRISLYEILRQLKYKSERNNRKIIQVGRFFPSSQKCSNCGYQYHDLGLSEEEWICPECGKHHDRDLNASINIKNEGLRLIREKIIKTISYWDCHGLRCAGIGSKVLTFHSTRGMLKNRESPTS

SEQ ID NO: 22399 - protein, 414 aa, Coleofasciculus sp.
VLHKAVLVRLYPTKEQEILLAQTFGCSRWWWNYALNKSIETYKETGKGLGRAALNAFLPTLKKAEDTAWLAECYSQVLQATTLNLTTAYKNFFEKRAGFPQFKSKHGKQSVQYPQNVKIVDGNIKLPGNIGIVKAKIHRQIEGRIKTVTVSKTPSGKYFASILTEVAGEKPPTSEGKIYGIDLGLKHFAIVTDGEKVSKYDNPKHLAKHEKNLKRKQQKLAHKRKGSNSRHKYRKVVAKVYERITNSRQDFLHKLSHKLVSDSQAVIVEDLHVKGMVRNHKLAKAISDVGWGTFTNFLAYKLERKGGKLIEIDRWFPSSKLCSNCFYQIGEMSLEVKEWTCPHCNTHHDRDGNAAINIRAEGIRMLKAEGSAVSAVGGEIRPRLGRKSKLRHSPVITEAHADLEFQVSVGSSRA

SEQ ID NO: 22400 - protein, 416 aa, Herbidospora sp.
MGSHVVLLIFSEISIRFADMSRFRLQPTPAQETALLHHCRHARFVWNLAVELHSFWRPGRGPVPGFAEQCRQLTEARADFDWLRAGSVAVQQQALRDFAQAMTNYFRKAHGKPGWRKRGRHEGFRIVNVKSADIRRLSRNVGEIRIPKIGWVRFRWSRAVPDGVRSCRFIRDRAGRWFVALAVIPKPLTAPGNASIVGVDRGVVVSAALSTGQVHKVPVVKSSEHNRLLRLQRKLARAKPGSNRRRRVRSAIAKLYARQTDRRKDWVEKVSTDIARRFDLIAVEDLKITNMIRSARGTIEAPGKNVRQKAGLNRGILASGWAQLVSRLEQKAPGRVIRVDPRFTSQTCNACGHRAAENRENQADFHCRGCGRRGHADVNAAMNIRDIAARHVVNARGGDRVAGPMKREPQPVLHSA

SEQ ID NO: 22401 - protein, 417 aa, unknown
  TnpB Polypeptide
MEVRRTVSVTLDVNSDDAALLEDTVDTFLWCAQYVVDHAFKGEYVTTSKTTLDNETYDDVRDATNNFNGGLVQAARNKAAEACKSVVARWKNGKKASKPRMSSPHVVYDHRTATFHDDYVSLATVDGRIEADYVLPDEDTDTPHADYLFTDEYETTGAELHRKHGEWQLHIHCKKEIESDTSNTATTENGTVLGVDLGVNNLAVTSTGTFWTGDEFDHWRREYEKRRGDLQECGTRWAHENMQAVGRKEEGRFKLTLHRIANELVAEARDYDCSVIAFEDLTDIRDRTGASWGHKWAFNRLYEYVEYKAEEYGIDVEQVAPENTSRRCSTCGFTHPNNREDESFECLKCGYENHADYNASKNIGLRYLRRNQTGGDEGAPLGVRLNSGMMNVNGGYSPADDSARTGVHAESHPFTGG

SEQ ID NO: 22402 - protein, 311 aa, unknown
  TnpB Polypeptide
MSRAAETERVKRNAAIKLRIHPTAAQAELIDKTFDCCRWLWNRMLADEQEFYAATGRHFLPTPASYKREAPFLKEADSLALATVHQNLRRAFQDFFKESRGYPAFKRRNEGREAYTTFCQYFRSGPTVYLTEEGIRLPKLGIVKAVFHRRPLHWWTLKSATVSKSPSGKYFCSLLYEYSEKIQETAPPERVLKLQSSPDHLYTDAGGDAVDFPPWLEAAREKLARQEARLARMQPGSGNYEAQLRKIRLQREHIANQKRDFVHKESRRIADAWDAVEAEGSKGEGGTGFGMLRECVAYKLARRGKPFSSKP

SEQ ID NO: 22403 - protein, 400 aa, unknown
  TnpB Polypeptide
MAVYRKVYRFRMEPTRAQGEALLRMAGARRFVWNWGLARRKEAYAATGKGLTYNQQAAELTALKKQPKMAWLREADSQLLQQALKDLDLAFTAFFEKRAGFPRFKSKKRDEPRFRIPQRVKVEDSKVYVPKVGWVRIRQSQPVDCPIKGATFKRDGEGHWYVTLTAEFEMPDVPLPPANPERVVGIDLGLKDFAVLSDGTRIAPPKFYRRAMKKLRKAQRELSRKQKRSKNRDKARHRLNRVHARVRNQRQDWLHKLTTDLVQKYDGLCIEDLNLKGMAKTKLSLSVLDAALGEFRRQLEYKSIWYRKHLAVIDRYFPSSKLCRECGAINQNLALSDRVWTCECGAVHERDLNAAQNIRAEGIRNIPVAVGHTETLNAWGEGVRPARCRQSSLNQESHAL

SEQ ID NO: 22404 - protein, 422 aa, unknown
  TnpB Polypeptide
MVPRGAYTLTLKAQGLLVEGSTEELREELYLTRRAMQYVVDALCELDKLPTPNQAHQMFYKVLREQSFRAHQAKQIYKYALSLVKSAKVNGGKKLELKKLSARLDKYDASVDLESQVVIIKLRNRVFKIKLLHRRNYIRKFIGRKWYEVIISIDRQGKIWVSIPFRWDYDPYKPRNVISLDINLKKVVVYDGRRVRRIDTRFTEGLHLKRLAEGVQKRHSYAWRRDEKWLEIIRTLHRRSRNIVVDWCRKFAKYIVLRAKRTRSAIVLEDLEKLWYNASQKSSSLANKLSRFGYRKLQLAIITKAIEYNVPIVFVNPKNTSSTCPKCGARLTYTHRLAICSKCRFIADRDVVGAMNIYLRAIQTIAPCLGSWGTHPMTNETRAKGGLRDEPMIVYIHPSLKTYKEVNPKGFRIACSHASTLH

SEQ ID NO: 22405 - protein, 385 aa, Bacillus sp.
MKKAYRIEIKPTNEQTIKINQTIGVCRYVYNLYLSKNKEIYESEGKFLSGYDFSKWLNNIHTKKCDQWIKEVSSKAIKQAIMNGDKAFKKFFNGLSKFPRYKKKKNEDVKCYFPKNNKTDWAVERHKVKIPTIGWMRLKEYGYIPKGAVVKSGTISKKAGKYFVSVLCELKEQKAKPTLHSTGLGIDLGVKDFAVRSDGIAHENINKTIQVKKIKKRLRRAQRSLSRKFENIRKRGEHSVTNKKANIDKNILRVQKLYARLANIRLAYVKSIVTNVVKTKPTFITVEDLNVRGMLKNKHLSKTIAKQSFYTFKTWLLTKCKEYGIELRQVDRFYPSSKLCSYCGQKKADLKLSDRVYECGCGNVMDRDLNAAINLLQAKEYTVLT

SEQ ID NO: 22406 - protein, 385 aa, Acinetobacter sp.
MSRFIRGHVIELMPNNKQASYFAQACGVARLTYNWALKEWQRQYKADKEYRDQCEYYGVEVDRNLLNKPKEAKLRKHLNSFKFEKYPFMKKVTKCSPQLAIKQLGNAFDRFFSGLSKYPKPRKKGKDDRFSLSNDQFSIDNKSIKIPNLGWVRMTEALRYKGKILSAKVFKQGRKWFVSIAVELAQIEKLKPKTGLSIGVDLGVSSLATLSNGEVIPSLAPLKRQLAKLKRLNKSFSRKKKGSQNREKAKTKLSRLHYKIACLRKNNLHQVTTDLVTRFDVIAIEDLNVKGMVKNRKLARAISDMGFYEFKRQLIYKAKQHGKSILSVGRFFPSSKMCSCCGELNQSLTLSIREWKCSVCHTKQSRDINAAINILNHADKDLIAA

SEQ ID NO: 22407 - protein, 545 aa, unknown
  TnpB Polypeptide
VKPVAGPAGAAITTRLRTTPEDERVLELVAENLGGLRRADLAAITRPEPLDRAMDETAKRRARRDRRNIRKKTLTAESSARWANAIIAGNDDQYRLARDAQRRHIIALRAAIAIIEKRLSQPTADTLTPEQHRARRKAKLPKGYPTQAERFQKQRRLQRLRAELGRVSADWDKRRVHVVEGGKRMARTRHNLDAAELTPSAWRERWDCSRDRIEANGSGDEPFGNLTITVTPDGEVSLRLPKPLEHLSNATHGRYVLTDKAVFSYRADEWRERITSGQSMSYAIARRPGRAGRYLTAAWALTPQPIDAQRPDCDVRACGPVVGVDLNDGHLALRRLDEHGNPVGHPERVDLDLTGSSTRRDAQVRHAITRLLHYTQRHGVGTIAVEDLDFADARTAGRETMGRGSRGKRFRKAVAGIPTAVFRNRLAAQTHRHGIRLYAVNPAYTSAWGDQHWRTPYENVTRHEAAATVIGRRAQGHKARRRKGVTRTRPEDRVVRATDQATPDDRQVSTQKPPPARDTGNQIPPAQAGKYAVTGPGNRYPGARQ

SEQ ID NO: 22408 - protein, 441 aa, unknown
  TnpB Polypeptide
MHVMHLTHKIALCPTPEQADYFRRACGTARFVWNWASAEWNKLYKAGHKPSAMALKKQFNAIKYIKYPWIQEIHRDAHAQPFAHLAKAWNRFFADMKAGKPAHEPKFKKKGRCRDSFYVANDKFSLNGNTIRLPKIGEVKMTERLRFSGKILGATVSRTADRWFVAIHVDVSDEQFYRKRTAHNMTGVDLGLKAAATLSNGDVITAPKPLTAALRRLKIRSRRMSRKLEMAKRGAGRDAKSSVPKHARRPKSNNCKKSAAMLARLHARIANIRADFVHKLTTRLCRENQAVAIEDLNVKGMLANERLARAISDVGFGMVRAQLEYKARRYGTRLAVADRWYPSSRLCSVCGWKNEALTLTDREWTCPECDAHHDRDHNAALNLKRLATVTALPVASPSSDGGTALEGVSIVVGKVTPVRYEEGHRDPSGQEENRAHLCARS

SEQ ID NO: 22409 - protein, 209 aa, Nocardia sp.
VEISNEQLPEAESEVGIDLGLTTFAVLSNGKRITSPKFLRQAERRLRRVQQSLSRKEKGSKDRAKACLRVARVHASVADARLDFAHKHSTQIIRDNQAVFVEDLCIRALARTRSAKSVHDAGWGMFIRLLEQKARRYGRAFCKVNRFYPSSQICSTCGVRDGPKPLSVREWTCVCGAVHDRDLNAAKNIHAAGRAEWLNACGEAASLSA

SEQ ID NO: 22410 - protein, 486 aa, Rhodococcus sp.
MSKKENEQPITFTGVILNPPVSESMILDELMRKFQSAKRFIRERIFDGLARKNAVAKAKPLFLNNSRYMRDAFLEAEASISSQRELLPLYVEQYKTAIQKLEKKIEKIQNSRKPNKEELILYKQYRIKKLTKKMNYFHYHIEKGSVPKAVDGTKKRLILLNKHKITKQEWINSRTNALFSRGEASKAGNENIKMHYLQDRSVEMNVLNPLSSKRNDRLHFEVQFSEKHILMILTYLSSEKAYSVRILKENGKYYVHLTFKQQLEFTYDFTNGCAGIDINPDNLAVTIVYPNGNFRVSKVFWMNDVNSVRFEKRNWLIGNIVTSVIDWVKSFGIDIIAIEDLYFKNDLSKNTKFNRMSSNFVYRKIITTLISKSIKEGVTLTQVPAYYSSLIGRVKYQKAIGLSIHQSAALVLARRAMGFKEKIPNQMMSVLFAKEAKKGHPLCGLFTHWKKVQSWFSSLRELAYQNHEPYKHWWVEDFIHYADVYV

SEQ ID NO: 22411 - protein, 316 aa, unknown
  TnpB Polypeptide
MVRQQPFGQPHQNAEGQLREAPRRISGTAIPIRLHRHARRGGSRALMELEPSETPVEPQGVTQEKDHQLRFEGHVPTRQPVVVERHARRERQRILLPDIPGWFDRRYSERKLNAAKLVLDPDGRNASVMLVYRLPQSTPIEHGDVLGVDLGQHSLTMDSRGGETSYSRMQGIRRRYAHNRKTLQEKGTRSARRRLKAMRHREERFIRDVNHRASKRLANTPNVSVIAFEDLAYIRRQARKGTKTGRRRRNMLNQWPFAQLQEFTAYKAARNGVRILMVDPAYTSQKCNRCGYVDARNRNHARFDCLRCGHSDNADL

SEQ ID NO: 22412 - protein, 387 aa, Rhodococcus sp.
LYGAGVQLRYRYRVYPTPGQQDMLVRSFGCARVVFNDALRARQDAYAAGAKISDTAVQKQVVTDAKKTPQREWLAEVASVVLVQACQDARRAYRNWFDSLSGKRKGRRVGAPRFRSRKDTRQSIRLTRNGFGIRDNGKLYIAKVGELKVAWSRELPSEPSSVTVVKDSAGRYFASFVVETTDVPLPECDAEVGIDLGLTTFAVLSDGKVIESPRFFRQAERRLRKAQQNLSRKAKGSRNRAKARTRAAKAHARVADARKDWAHKQSTAIVRENQAVYVEDLCVVGLARTRLAKSVHDAGWGMFTRLLEEKAARYGRVFQRVDRWFPSSRLCSVCGVSDGPKPLSVRVWTCQGCGVVHDRDLNAARNILAAGRAERRNACGETVSLSA

SEQ ID NO: 22413 - protein, 218 aa, Symploca sp.
VTITEQKEQEVKRKSKLRRRKVAPNRNKKIKPSNRWKKARKAVSRLQRKVSNQRLDWQHKVTSDIASRYEIGVTEELRVRNLTRKAKKGSKRNRQKAGLNKSILDVGMSTLNKMIGYKIEAKGGLLLVLDTKKVKPSQRCPNCGKVHKHWAELSNRHHVCDACGFEIERDQGSALVMYQVAINQQPGDGIALVNVDASSSTSKRRNCKDTGSLKQLHF

SEQ ID NO: 22414 - protein, 368 aa, Symploca sp.
LIVPVNIREKVDKTLEGFADACNQILQTAKQENCWNTTKLHHLTYKPVRQSTGLKANHVCQAIRRVINQKKATKQIHKFRPTSISLDARTFKYVESEQKVGVTLKSGRVNFELKIGGYQIALLRGKTPTSATLSKSRNGDYYINIVVEVPTQPKGKTPKVLGVDLGLRDVATTSTGKAWNGEKLRETRNKFVRVRASIQSKRTKSAKRLLRRLSGKESKFQKWVNHNISKQLIEEAQKLNSAIAFEDLSGIRLRTKVRKKIRTEINRWAFYQLRLFTEYKANIAGIDVILVDPRYTSQTCSRCHHIYPKKGKSYRNGKLFKCGFCSFEHDSDINGATNIAQLGAVVNQPGISVYACQLEGQLTLFPDT

SEQ ID NO: 22415 - protein, 399 aa, Streptomyces sp.
VTTHVRRAYRYRFYPTDAQAAELSRTFGCVRKVYNMALAARTDAWTRRQERINYNATSAMLTAWKKTEELAYLSEVSSVPLQQCLRHLQGAFVNFWEKRGKYPRFKSRKKSRRCAEYTSSAFRYRNGTLTLAKMKDPLHIVWSRPLPEGSVPTTVTVSQDPAGRWFVSLLCEDASVKPLPVTDAVVGIDAGITSLVTFSTGEKVTNPRCERRDRVRLAKAQRELSRKTKGDGANRAKARRKVAKIHARIADRRRDHLHKLTTRLVRENQTIVIEDLTVRTMLKNHTLARAISDASWTMMRSMLEYKTAWYGRDLVAVDRWFPSSKLCSICGTLQARMPLSVRTWTCEGCGATHDRDVNAAINLKAAGLAVSVCGAGVRPQRSTPDGQSATKQKTSQREP

SEQ ID NO: 22416 - protein, 368 aa, unknown
  TnpB Polypeptide
MLKNYRYRIQPTKKQTKALENVLEECRWLYNHFLSGRKDSWETKQEGVTYYDQTRSLPNLKKERASLNEVHSQTLQNVAVRVDLAFQAFFRRTKKGEKPGYPRFKGKGRYDSITFPQVPSGCSIKNGRLFVSKIGHIKIVQHRPLGGIPKTATIFRSSTGKWYVTFATAVEPKVLPVRDNPVGIDVGLHTFAALSDGNIVDNPCFFKKEEKRLAKVQRKLSKEAKGTPERFKRRKIVGRVHERIRFKRENFTHQESRKIVDGYGRIFVEDLNVNRMVHDSCLAKSISDAAWSQFFAMTHYKAVEAGRVFTAVNPAYTSQTCSGCGHRQPMPLSKRIFECPCCGLHIDRDLNASLNILRLGIQAVGENP

SEQ ID NO: 22417 - protein, 377 aa, unknown
  TnpB Polypeptide
LKLIAQVKLQTTPEQHKALMDTILRSNECANALSSWAWESQTFRQYDLHKAKYFELKEQFGLGAQVTIRCISKVSDSYKKDKKTKRVFKDTGSIAFDSRILSWKMKDQSVNIWTLVGRLRVPFLAGKKQLELLEHRRGEADLVLSKGIFYLLQVCEIPELPEFEPKGFLGVDLGIVSLATTSDGDTFSGEATDKVREKATELKRALQSRGGKSAKRHLKKFSGKEARFKKNTNHVISKKIVFLAKDTCRAIVIEDLKGFNGRTTVSKAQRERFGRWSFGQLRGYIEYKAKREGVPVIAVNPRNTSRTCSVCGFVSKKNRKSQALFSCTKCGFTTHADLNAAINLSFKGNPVNLPIAVHADSQLLPFLELQASDFSQG

SEQ ID NO: 22418 - protein, 437 aa, unknown
  TnpB Polypeptide
MAKLKKSMGVQQCLIKTDKKTEAILQYLCEQSGKHYNNGVYFARQTFFKTGRLLTGKFDLDYEPSVSKTMVAQSLPSTPAQQTLRSVIEAFKSFRSLRKLHFKGQLHFKPKAPDYLKGSKLFKIAYPNSGGSRLILIDGRLRFYLGLAVKRWFGVSEFFLPMPSNIDIDKVKEFTILPKNGAFYLELSYELSPQVHSLDINQALSIDLGTADNLAACVDTLGNSFLIDSRAMKAMNQLWNKKVSTRKDGKEHAYWDAWLDRATRKRNHQMRDGTNKAAKLIIDHCLKHGIGTIVIGWNEGFKLNANMGRVNNQKFVQMPLGKLKDRLKQLCELHGIRFEETEEAYTSKASFLDGDSLPKYGEKPEGWKASGRRVKRGLYQSADQSVVNADLNGSANILRKVASKLGIDLNQLGRRSLSTVARIRLWVLPKAVLSAES

SEQ ID NO: 22419 - protein, 426 aa, Halophilic sp.
MNYNYRYRLRPSDALEEQLAWTVDTCRQVYNHFLHRLNRTDDTSAYSEQKLLSSLKKWWSDLKSVHSKVLQKVVQRLYDNLSTLRGRKENGYRVGQLKWKAPGEYRSFTYSQSGFKLKNTSGRTKLWLSKLGEIPLTFHRYLPEDAKIKTVTVKQEPTGKWYAILGVETPDDSPAKPENPDRCVGIDVGILKYAHDTDGTAVESLNLSDERERLERAQRDLSRKEHGSANWEKQRRVVAERHADLKRKRRDFLHKLSNYYAREYDLVAVEDLDAKGLVELPGNSRNRAGAAWGMFLRMLEYKCERERTHFVAVNPRGTTKECASCGVSTDKPLWVREHSCPACGFEADRDANAAWNILSRGIEQLGAGRSESTSSESRSDSDGLRKSLCDFRTPVETALPVSSVVDAKRVVETGSPTLRREPSGER

SEQ ID NO: 22420 - protein, 371 aa, unknown
  TnpB Polypeptide
MKLVAQVKLQPTDEQSELLKRTLERVNFAANFVSDTAWHQQSFRQYDLHKLTYYPVRENFGLSAQVAVRLIAKVADAYKLDRKTKRTFKPHGSIAYDDRILTWKMDKRVVSLWALGGRVELPFIAGARQLKLLETRQGEADLVYRDGQFYIFQTCDVDEPEPTDIDGFLGVDLGVTNIAVDSDGAVFQGKTVKNVRYRHRKLRAKLQAKGTKSTRRRLRKLAGKEQRFATWTNHNISKSIVAKAKDTGRGIAIEELGGIRDQVTVRKPQRATLHSWSFFQLRSFIEYKARLNGVLVLAVDPRNTSRTCPSCGHVDKANRKTQSTFLCVNCGHAGLADHIAAINIGGRAAVNPPNVSTTQTTVQRQGQSPRL

SEQ ID NO: 22421 - protein, 195 aa, Bacillus sp.
MTETGKYYVSILTEYEKEIAQKEIERVVGLDFAMAELYVSSEDEKATYPRFYRQILDRLAKAQRVLARRVKDSECWNKQRIRVAKLHEKVANQRKNFLHHKSKELAANFDVVAIEDLHMKGMSRALRFGKSVADNGWRMFTTFLAYKLQEQGKQLVKIDKWFPSTKMCSRCGNKKEMSLCERMYVCVFVWTHNQS

SEQ ID NO: 22422 - protein, 385 aa, Bacteroidales sp.
MAYNKAKKEISEKKIRNIVKPFTILDAYLTQCAILEGITLHKSGENDTVIFGGKSNFVRRCKNLITKEQYRENRLLSIGSQGTESRKGNRKFRLVSPNVIHYLYDKTFIELKLPELHNNYKEILEELYVLSNENKIGITYKLNKEFIWISFDESKLECLKVYKSIKLIENRVLGIDLNPNYIGISINEINEDEIKVISTKIYSLMELNKSRNSDKVNYELSLICKDIINISRKYQCSKIAIEELSVKSKDHGKGVGFNRTVNGWKRNYLINLLKKRCNLANIKLIEVNPIYTSFIGNMLHDYPDMVSSSVEIARRGYFKFIKGKFYPKYDNNILVHRWKEMAGIVCCNWIELYKEIKKSGMRYRHPLPLNGVYEFITKKSLVNCY

SEQ ID NO: 22423 - protein, 438 aa, unknown
  TnpB Polypeptide
MYRTDRVYVNTKHEMFPYFDKLAHKAKNLYNASLFRIRNAFTAHDKTNLTSNEKEVLNELALLKGQKTYHVLGYMMLERVMRVTQNPDFFADLPMQSAQATVRHACSDFQNWLSALGKYKKNPTLFTGKPRMPKYCKGDITTFTLTNQNAIIYDDELKLPKTKQRLKIRKRCNARLQEVKVCPVSGGYDILLVYQVKDPFVKAGTHSAAVDFGVDNTMAVVTDTGDSIIFKGECIKSINQYFNKQKAWRVSVMSKGNVTTARVWSKKLDQLSAYRTNYIRDCFHKMSRLLMEWCKSHEVGCLVLGSNKFWKQESNMGKCNNQNFVSVPFEMLKSMIELKSNEYGITVIRQEESYTSKASFLDLDFIPTYSKEDPDTKYHFSGRRIHRGLYKSKDGTLMNADINGAANILRKAGYDVSNIKIARLLDPAIVRFKTLNCK

SEQ ID NO: 22424 - protein, 420 aa, unknown
  TnpB Polypeptide
MLLSLLVDQPYHRFVKRLQAFKFELRTHGAQRQQMRRFAGSCRFVYNTGLALQKARFEAGEMKLNYAELCKLLTQWRGETETGWLKDAPTHPLQQALKDLERAYTNFFSKRAGLPRFKKKGRHDSFRYPDPKQIKLDQVNSRLFLPKLGWLRYRNSRKVLGVVKNVTVTLSCGKWFVSIQTEREVEQPLPCGGTVGIDLGVVRFATLSDGTFYAPLNSFKRHATALRKGQQAMCRKQKFSHNWNKARGRIQRIHARIGNARRDYLHKTSTTISQNHAMVCLEDLQVRNMSRSAAGSIEAPGKNVRAKAGLNRSILDQGWFEFRRQLQYKLSWNGGELILVPPQNTSRRCPQCDHVSAQNRRTQERFACIECGFEDNADRVGAINILRAGHARCACEVSDAVRSPAAGTRRSDSGAAPCSL

SEQ ID NO: 22425 - protein, 414 aa, Moorea sp.
MIVLEFKAYGKPKQYSAIDEAIRTAKFVRNSCIRYWMDNKGVGKLDLNKYCTVLAKQFPFANELNSMARQACAERAWSSIVRFYDNCKKKVPGKKGFPRFKKHCHSVEYKTTGWKLCPDKKSIVFSDKKGIGKLKLKGTWDLWHFDKKLIKRVRIVRRADGYYVQFCINTDINESVSATGTTIGLDVGLKDFYTDSNGNTVPNPRFYRKGEKRLKFYQRRVYRKNKGSANRKKAINKLGKTHLKISRQREEHAKILARCVVRSNDLVAYENLRINNMVKNHCLAKSINDAGWYQFRKWMEYFGNKFGKVTVAVNPAYTSQNCSNCGEVVKKSLSTRTHVCQCGCSLDRDHNAAINILERALSTAGHVGTLVLNDPNAWGDLASTVAGANLSQQVDSLNQESPSQSERGVSKLSD

SEQ ID NO: 22426 - protein, 421 aa, unknown
  TnpB Polypeptide
VKNVYLTQSNVIRSLSKEEYAMLREMCQYSNNLYNVALYNIRQYYFQEKKFLKYEENYHVCKENENYGLLQAGVSQQILKVADRSFKSFFNLIKKAKSGEYRFKDIKMPHYREKGGMFNLILSTNAINVKDGFLTIPMSRGFSKRHGHKQIKIPFPARLKEKNIKEVRICPVYNGRYFKIQYCYLQEKEPQNVSPDNVLAIDIGLENLATCVTNTGTAFIMDGRKLKSINQYWNKQKAYYQGIADKQRQKKTHMLYALARKRNNRTQDYLRKAARYIINYCIEHRIGTVVCGYNGDFKRSIDLGRITNQQFTQISFGNLRETLEGLCERYGMRYIEQEESYTSQASCLDWDDIPVYNPEQPYTGTFSGKRIHRGLYQFADGRVANADVNGAYNILRKSKQNFDFEGLCKGLLDSPLRIRIS

SEQ ID NO: 22427 - protein, 428 aa, Lyngbya sp.
MVKQFFAQVNRLPEDNELKAVLEYLCTESNKLYNCATYLARQLYFKTGKISNGRWLSTVMKNNPHAKSIYASAAQQTCISVGEAFKGFKVLSKLWIQGSLPEKPKPPKYRKSGLFQISYPKKWLKFTDNGIRVPLGTSCKVWFNLQYIYLPFPSNLIWSRVKELQIVPRAGYFDAVWITSEDIEPIVFDLNPNNFLALDPGLDNWLTAVSNVGTSFIVDGKHLKSLNQWYNKRVATIKEKKSQGFWCKLLDQTTEKRNRQMRDAVNKAARLVIDHCLNNKIGTVIFGWNRGQKQQSSLGRKNNQKFVSVPTAKLKSRIQQLCEQSCLRFVETEESYTSKSDSLALDAIPKYGEKPEKWKPSGKRITRGQYKSKTGLIFNADINGALNIARKVTSSLGIDFNPNDLARGVLTSPKRLRIWDVNFNILSS

SEQ ID NO: 22428 - protein, 299 aa, unknown
  TnpB Polypeptide
VGYPRFKKRYKSFTYPQNGYKLDGNKLTLSKVGIVNVRIGRTQNRIVGQIKTLTIKREPTGKWFACFSCVEEINPTKNKNKEKIGVDVGLKEFATLSNGETIENHRFFVKSEKRLKKAQRILSRRKKGSNRREKARYRVALIHEKISNQRHDFHHQLTRKLVDNYGTIVIEDLKITNMVRHPYLAKHINDASWGQFARFLCYKAESAGCRVEKVDPRGTSQDCSHCGNKVPKTLAQRWHRCTYCGVVMDRDLNASKNILNKDTVGTTEIYARGDGSSPLGYGLEDSPSRKREARLLVVG

SEQ ID NO: 22429 - protein, 419 aa, unknown
  TnpB Polypeptide
MKIEPIYKGFKTELHPNNKQNTLLWKNCGAARFTYNWAISLLQEDYKNKSKQHKINAIYLHKELCKLKKDQFPWMYEVSKCSPQFALRNLVDAYKRFFKKEAIHPPKKKKKSLDNDNKFSVDGSVIVTHTHIQIPKIGKIRLKEHGYIPTGIATKASISRQGNRWFVSLNIPVDMVIEDSKPLNEECLGIDRGIKSFAYTSDNEEFKSPKKFKDKQRKLVRLQRKFNRRKKGSKNRQKALKQIKNVHYKIACDRKDITHKTTSFLTKTKLQDNIVIEKLNTRGMMKNHKIARSTANSNYCEFERQLNYKSKWNNKNIIQVSPFYPSSKTCSCCGNKKDDLTLKNRTYECVKCGNVIDRDYNASLNLKKCGEEFLKQNTVSSTGINACGDITSWSGAIQKKVIPKKQENNKESTVYYLKV

SEQ ID NO: 22430 - protein, 387 aa, Acinetobacter sp.
MSTIMRGHIIELRPNNKQATHFAKASGIARLAYNWALVEWKKQYKAYKDYLELCDYYYCIPEQRIIDKLKPNEGKLRKQLNAIKREKYPSMLEVTKCSPQLAIKQLGVAFKRFFNGEAKYPQFRKKGVQDRFSLSNDQFYVNDKKIRIPNLGLVKMTEKLRYNGKIMAAKIFKQGGKWFASITVELINIEKLNQKTGLSVGIDLGVKDLAILSTGEVVKSVAPLKAQLSRLKRLNQSLSRKKKGSQNRLKAKAKLSKLHYRISCVRKDYLHKLTTSLIKRFDVIAIEDLNTKGMMKNRKLSRAISDMGFYEFKRQLIYKAAEQGKQVKTLGRFFPSSKTCSSCGEINHDLTLKDRVWSCKVCLTTHDRDFNAAINILNHADKILTAA

SEQ ID NO: 22431 - protein, 396 aa, unknown
  TnpB Polypeptide
LTTTAKSIHRTYQMRGYCSRAGYARIREVLHACRWLYNRSLEQRRNIYRVCGKSVTKFTQLKQLTKLRAEQQAWRDLSIQISRGVLARLDRAFQAFFRRVKAGEKPGYPRFQGARRYQCIELAEVTPGMVKGNSIKVKGLPVIRIRSSRPLPDSNQLKALRLVMHGRILAVDLVYAEQTNPLSPNAVAVGIDMGVNERMTLSDGSTVERRVVDRKRERRLQRVISRRKRGSAGRRKAVAAFAREKRRNAISNRNACHRITTDLVRRFGYIAVEGLQIRNMTASGGSYKKGLNREVLGQTWGVIRQQLAYKAEWAGRQLVEVNPAYTSRTCSMCGFENDLAGEYRTFSCSKCGHVQDRDVNAARNVLARGNIAPATERWALSGRAVLPETYTVNQSI

SEQ ID NO: 22432 - protein, 369 aa, unknown
  TnpB Polypeptide
MMQTLKVKLDTSAENNRALLETMHQFNAACNYVGEKAFELHTANKIELQKIVYRDIREMFGISAQMAVRAISKSCEAYKRDKSIKPKFDPNGAVIYDQRIMSWKGLDRVSLLTLDGRIMLPVVICDYHAPRLDRIRGQADLIFQNGTFYLCVVVDVPEPKKFVPQNVLGVDLGIKNIAVDSSGEEFSGEKIEKVRSKIDNLKADLQSCGTDSAKRHLKKLSGKEARFHRDVNHCISKKLVAKAIDTSSAIVLEDLSGIRERITVPKAQRRKQHNWSFYQLRQYIDYKAAIAGVPLICIDPAYTSQECPICHLISRSNRPTRDEFSCVCCGFSGPADTIAARNIAARVSVNMPIVARLFAELQAHPFREG

SEQ ID NO: 22433 - protein, 424 aa, Streptomyces sp.
MYPTTAQEAVMREHCAHARYVWNLAVEQHSYWCKGRRAAPGFAEQCRQLTEARRDNEWLGAGNADVQQQALKDFAQAKNARFTSGFGEPTWRRKYRHEGFRVIGTDRVPEFEVNGSPKVNAKSGRQVMGRSVVVRKLNRRWAQVKVPGCGWVRFRLTRTALPSAKTFRITWRNGQWHAAFAIVPEPIGAPGTGEVIGIDRGVTITAALSDGRKLNCPQLTVRERAQVRKHQRRAARAPKGSEAKTAGYAKVAKLKAREANRRKDWCEKTSTTFARTYDLVRFEKLNIKNMTRSAKGTAEQPGKNVRQKAGLNRAILAQGWGMLRRRTEHKAPGRVEDVPAPYTSLRCSACGWIDKNSRKSQAEFCCSSCGFTCNADTNAANNVAAGQGGIPRPRRTAGAGGTTPPTQRPSVREPQPNRVEIPLF

SEQ ID NO: 22434 - protein, 377 aa, unknown
  TnpB Polypeptide
MIKAYKYKIKPTVKQQKELNMFFGCARYIYNWGLNRKIEEYKQTNKTIGYVELAHNLTELKNNQDTIWLKECANECLQQSLRNLDAAFVRFFREKKGFPKFKSKKKNKDSIKFINSVHFNFEDWFVKIPKIGKVKLCKNKIFDLSKCKIGTLTVSKDKCNEYWVSIVVDDLTPKQSKTKIELDTTVGIDLGIKDYAILSDGTKYGNPKYLEKYSLKLKHLQKTFSRSQKGSKNHEKLRLKLAKLNRKIAYMRSDFTHKLSTDLVRRFNTICLEDLNVEGMLKNHNLANSIQSAAWSEFVRQLNYKSDLYGKNIVFIGRFEPSSKTCSKCGYIKSGLKLNDGEWICPVCGEHHDRDINAAINIRDFALHKQNLIGIEK

SEQ ID NO: 22435 - protein, 479 aa, unknown
  TnpB Polypeptide
VARITTFCFTARPTAEQTTAIARHVGARRFAFNQCLRLVLDAKEQQKTDPSVPVPTSAYSLINAFNAWKRSADAGVRFVVGADAQTTLVPGLAWRRQVCAQVFEEAAVDLARATRAAAKAKGTTGRVGFPGFQKKTQGTQSFRLRSKVSKKAPPSITVGGTELRSITLPVLGPIGVREDTRPLRRLLRAGPAGLPARICQVTVAQRRGGVRLCVTVEAPDLHPARHHPGSDRGFVGVDLGLTQALVAACADGTEVARLTPRRPLEHALRALARANRTAARRQPGSKNRRKAHDRLGVIHAKVARRRMDFLHRSSSALVKTHDHLCLEDLAVANLVRNRHLARGISDAGWAMFRRMVTYKAAWYGTELLVAPRWFPSSKTCSSCGWHWAEMGLKDRVFRCPHCRLVMDRDRNAAVNLAAWANAECSSASQAPDPEARGRVTNACGEIGAGHHLGGGGTGPATVGAAPARKQEPALLAGRG

SEQ ID NO: 22436 - protein, 487 aa, Vulcanisaeta sp.
MLCRAVAVELEVPKGVSKLLYSVESVYLGIVREVVEYAVKNNVLSATQLQGLFYSRYRSEYPDLHAHLIIQAIRQASQIAKSFMERRRKGLANKPYPEVRSVSIRFTEKAWSYDQFVKSIAPVRLELSLPNGRTEVWLRPHKRFWLYWWRVLTGEAELASTLIIKRKANKWYAIFIFKLKPREEELKSIVAFDINENTVAVGKIDLPSTVDKVTDWNRQYLMPQLYMIRTDFGRLARRYEAIRNTIIERLKPHFTLPNGKYVNITDTREFRKRVKHLRERVRKVGRVRHVANELTKTPAIIITEELGDNPQESMIEDVGKSELRHRIKQTPFKAVERAVEDKALEHGSKLFHVSFYRNSRVCPIHFVRLKRTDDWHILKCPVGHYVNRDHASVMNMAWKTTPEAWTKGVWWDLRKNMNWRKYEGKSNPLIPHPIVQYLRAILKTFTASEESPAVLARGKPMNHHRIRNEGGGEETSQKGRRSAKCSY

SEQ ID NO: 22437 - protein, 466 aa, Clostridia sp.
MGQAKRTTKIYFNFAERNQGGANTGKREYLYLTKNILNEARAFYIDFFLAHSSKLEEKVTYYSEKHKKFKERKLTSNELLTWAESLTVSTEDHPTPLEGWNFSEKFPGMPVVYRRSVIKDAIGKARSHLSNYRNWEESGKKKGKPGLPGSNNHPTLYKGTIKLELEKFDRQDNFVSILVYNGRGWEWVNYPVKFSPWQEKRLTKFSWENKSPRLILREKTAELHVTQEKSVEARKVEESKKNPNLITIGIDLNVKNLAVITVRKNGVIIKTVFVTDGGLDYHRYLHMKLVSKHQWLSGKPVKGESSNKLLWGHVRRMNDYYAHMVSRRIVEVCLEIRRIYPGAEIVILFERLRKIKPKGSKSRILNRKQANQLKGKIIKFTRYKAYYLGIVTVEVNPYGTSRYCSRCGHKGERFSLVKGERVKMRGGKLFYCPHCKYLVNADFNASVNTHHSFYGEFHWQPKKKAA

SEQ ID NO: 22438 - protein, 393 aa, unknown
  TnpB Polypeptide
MKTIQLTETHQISRNHPFFDECDRLTFLSKNLWNATNYVVRQYYQKTGKHLSYNKVNKLFTDENQKDYRALPAKVSKGTQRMLEKAYSSFFSKRKKHLAGVEKPGYKHKTNGRQVIHYERGAISTKIKGYVKLSQTNILIKTDKNVDFVRIVPKLDFFVIEIGYKVPLPAPSATTGKGVAAIDLGMGNLLTVTSNVMQPIIISGKTVTHINKYSNRLLTQVKTKTVKSSHLTKAIYRKRRNKLKDYFHKTSRFLVDTWVNNNIKNVVVGYNTNWKFQNKIQNFSKVAYRTFLDILTYKCQLAGISIIEIEESYSSKASFYDLDPLPKVNAKKIPKFSGKRLKRGVYQTKNNLLVNADINGSLNILRKSKLWHSSMWQDCVVHSLEPVLKYHNE

SEQ ID NO: 22439 - protein, 220 aa, Hyella sp.
VGIDVGLKYFYADSRGEIIANPRFYRSAERQLNRANRQKSQKFRKGKPSSQNYRRARQRYALKHLKVSRQREEFAKRVALRLIQSNDLIVCEDLNVFGLVKNHHLAKSISDVAWSKFRHWLEYFGDKYGKVVIAVPPHYTSVKCSSCGNKVKKTLSTRTHVCSCGYTADRDTNAAINILQLGLSRVGRTLTNAWGDLSSSSVGAILSGYDESLNQESPSF

SEQ ID NO: 22440 - protein, 694 aa, Streptomyces sp.
MEGVVGVGRLMATAPCTAFGGVVEGSGERVGQALLYERVGFLAELSCELTRALVASRWDEASLEVLAAGVDGQGEPLPSKGWMALRRLDWAAAVPAAGVYVSDRVRRGAEEYAARTLRLALHRRTLVAAILTTWPADPHRRTQAEWTALRALLPAQVSSAEIRNRTRQVRAYLAEHGKLPAGLCELEEPPEISTQVLLAAMDRQQVTLQRVDEGIARLRVKLPLCAAPASGRDWAWHVIDLRLPGTVGPEAVLHTPTLRPTRSGRIAVDLPHSRPMAVAPAAGHTVAVGFDWGVNTLLTGTVGRLTGRGETARVVTDGRPLLFDATAISAKLHRLRGHREHLAARRDHYRALAEPLGAPLLAWDDLHRRAAVLEVEHERVCARIRHLNDALAWSAARWAVDQSLALGATVIYLEDLATLEARGRRRGNARLSGQVRGTLAEAIRHLAAKAGLAVVTVPARGTSARCPRCLGPLGHHPAPDRLSERGWAWAHCPGCHLSIDRDQAAARRIVSRGLLAQTHITTDRATGIRTVRTTVDGTVTAVRRPKKTTRRLRRARQQAAAPPRPPGPKTTPGKAHPTPVRPSPARRSTTSRRMPEVRTVPATTPTRVVKRPAGHDTQAPAPHGPVSGHGVPALSRPEPAPGGVGRLSRGTCRRRTRAAQRTGFHHLHATEVHPLTPRFGPPGDGTRPRRVRKA

SEQ ID NO: 22441 - protein, 447 aa, Acidimicrobiaceae sp.
MVTSEPERELLVATIAVTQAYRFAIDPTPQQADALRSHIGGTRFAYNALLGLVKANWDENRAKKEVGIEVTIDDYLATRQFDLQKLWYERRDVLAPWWSENGVSTYNYACLNLSKAFANWRSGKCKFPSFKQRGGRASVSFMSGAVRLADSHHVRICRIGEIKTYESMRKLNRHLDRGTGRIMAATLCSNGARFFISFTVEVQRTIPGTRPPERVIGIDVGLTTLYTGATPDGKQVLHVENPRHVVAAERKLAHVQRIASRRQGPRKGVAPPNRWKKANARVQKVHAGVATSRRNLIHETTTMLAKNYDLIVVEDLNVAGMVKNHSLAKHISDAAWREFTRQLDYKTKWYGSTLVKVDRFYPSSKICASCGTAKAKLSLATRTYACEHCGHTIGRDLNAAINLARQGLAGTSSVTGRGAKVRPKHQQLDAKAHPDEASTKALITIGV

SEQ ID NO: 22442 - protein, 311 aa, Halanaerobium sp.
MQLTYVLELLKPTKRKENIFLNNIAEVVKNRQTIAAKLKAGETKLSSADFKEINLPAAVKNQNIREVKALHKLFLKSGSDKDNIEFKANQPICYNNQNYKIDHHIISIPLYTTKCQRFVFPVKQTERFEKLQQHIDSGCKLGKASLFHKRGKWYFAVTIKIAVKKNTNSNLMGIDIGLRQLAVASVKTPQGKEINRQLINFAVQEQVGTIIMENLDNIRNTAKSLNRANRNIHSWTFYQLQQFIKYKAELAGIKVEYINPKYTSQGCSKCAKVKKSNRKANLYSCECGNHIHADLNAGRNIANKYLEQQSA

SEQ ID NO: 22443 - protein, 420 aa, unknown
  TnpB Polypeptide
MAGRQAVIHRGFRFKLDPTGQEAAIFWQFSGVCRLVYNIALEQRSQWFRHYERQTGSKLNYPAQARQLTALRAEFDWIGAVYVSCQQQALRDLDHAFVNFFARRAAYPTPRRKGVNDGFRFPGREVEVCKLNAKWSAVRLPKIGWVKFRDTRPIRGKVLNATVNHDALGWHISFACEIDQTVPEPLRDSVGIDRGVAVTLALSTGEMLSMPNGLARIELQKRRAQRVLARRKRGSKRRERQRRRVASLQARQARIRRDFHHRATLGIARQFGTAVIEDLNTKGMTASARGTIAEPGRNVRQKAGLNRAILNAGWHQFATILTYKMEERGGQVVTVPARFTSQTCSVCGVVDARSRESQAVFRCVDCGHTANADINAAKVIRRANSALLDVEGLHRRPCEASTSGMVSLLGNPRPLGRGRC

SEQ ID NO: 22444 - protein, 449 aa, unknown
  TnpB Polypeptide
MQQTLTAKLKLVTTSEQSDALRAVCLASRDAMNSASQVAFGLDKTTNALAIHKACYQELRSRFGLPSQLASSAIRYTAAAYKSLWTKAKDHARKEASRCAASPKRRHKPFKGLDMPPKFTARTVTYQEAKDFSFKTGQRVSVMTLGGRVAVPYVGWDRHVAFIQSPNTHIGAAKLVWSVQKKAWFLYVSLTVTVPDPLPSDHTAIVGVDVGQRFLAVATDTTQNSFFASGTQARHKANRYRRARASLQRKDTRSSKRRLRLLSGRERRLQNALNHQIARRIVDRYKSAIIGLEDLTHVRDRTERHSRKKDSKKPRRQTQKRANGNKSRWSFRELQEAIAYKATLVGSFAVKVLAHYSSQSCPFCGYTSKENRLSAGLLFRCVACRRELHADLVGARNLALRTLLIRQDWISTGCLSTSQDVSDAEAKAECLRRYSELRWSPETKVEALS

SEQ ID NO: 22445 - protein, 486 aa, Clostridiales sp.
LVFDVFGDKRQTVFPYGRDKITGGPEIMRYCVSQTTVSENRKSELTAYFDKLSFLSERLYNAALFRLRQQFTMKGKSSLSANEREVHDEIEKTISVYGCGRPGRVLSYTFLEKLMRATGNPDFFSGLPMQSAQQTLKLACRAMKGWLEALRSYRADPSQFTGKPGMPGYRKNGHMLIMFTNQDCVIRDGMLKLPLTKERIRVHIPDGARLREVQCRPYYGNYRVICIFQAASEVVQSTGDRTAAIDFGVSNIASIVVNDENISPITYKGGALKSANRWYNMQRARYVSKIRKSHCPATGQADTAMLRRLGRYRSDFLSDQMHKISSDIVRHLIIAGVSTLVLGRNKGQKQNSAMGKKNNQSFVSLPLWTLQIQIRYKAENAGMVVMDQEESYTSKASFIDRDEIPVYGKERTVPSFSGMRKGRGLYVASDGSVLNADVNAAANILRKAFPEAVSHIRDHGFLQKIRVVRFYDLNQKRNPVKRIAAA

SEQ ID NO: 22446 - protein, 484 aa, Natronomonas sp.
MRRANTFDVRALSHRGRLALIELLDASSACFNEINYDRRQAYFSARYDTDDNHTTSELEDIVGDAASQEEYRNKYIQQLSSSIPQQLERKNRQTWTGFFRLLRKYRDPEDDSVVDEPSPPGYWNDDGNRQLHTVIRNDTYTLALGERSRLEIPLGKALKEKYGYGHNEKLRLEVRGRPHWTGPNGSLELTYDRTAESFTAHQSVGRNDSPAVRRFTHTHALAATPGEEGVVAAVDIGANNLAAVVTSEGDRVVFHGRPCFERFHDLTAAIADLQSRLPDDRYYTERIGQLYRRRDEHRDHAQDALIRFLAGWLLERNVVELYVGKLDDVREEHWSAVVNEKTDLFWAHGRFRDRLHDVLEDEYGIAVHEESEAGTSNRCPACGGGDVHRSGDDLQCLECEFEGHSDVVGAVNFLVEQADEVDRGGPMARPAARGQNSPRDTPVCLEWDDHRWQHRDHTTKEEPADRSTTRSGGNLASGVGSGTA

SEQ ID NO: 22447 - protein, 409 aa, Natronomonas sp.
MHYNYKYRLDPPESLTETLLHHVDTCRQLYNHVLYKLNEADEIPTRYEVQDTLTDLKEWWDTLGDVHSKVLQMVVKRVYDNLSTLKAQKENGRAVGMLKWKPPREYRSLTYNQSGFELKNTSGRPTLWLSKIGDIPIHLHRDIPENATIKQVTVKQEPTGEWYATFGIDVDEDTPEKPENPEKVVGIDVGILKYAHDTDGYAIKSPDFSEERERLERAQRDLSLKEHGSANWEKQRQVVAERHANLKRKRRDFLHKLSNYYARGYDLVAVEDLDAKGLVELPGNSRNRAGAAWGTFLRMLQYKCKREGTHFIAVDPKETTKECAACGVKTDKPLWVREHSCPSCGFEADRDANAAWNLLSRGLEDVGVVHSESTPVETALPVDTPVSAKRVVETGSPTLKERTASAVSE

SEQ ID NO: 22448 - protein, 414 aa, Natronomonas sp.
MEKRRTVPVKLDVDSADAALLEETIDEFLWAANYVTRHAFEGEYVTTSKTTLHDDTYNVVRDKTALHSNHVQAARNKAADACKSVVEKWKQGTNASMPHFTSPHLVYDHRTATFHDDYVSLATVDGRIEADYVLPDDERETPHAEYYFSDEYETTGAELHYSNGNWMLHIHCKREVESDTPDQDATENGTVLGVDLGVRNLAVTSTGTFWTGAEFDHWRREYENRRGDLQAHGTRWAHENIQAVGRKEEGRFKQTLHRISNELVSEAREYGCSVIAFEDLSDIRDRTRASWGHKWAFNRLYEYVEYKAAEYGIDVDQVDPENTSRRCSRCGFTHPDNRESEAFECLKCGYENHADYNAAKNIGLRYLRRNQTGGDGGASVGIALNSGMLNANGGYVPPAEDSARAGVHAESPPL

SEQ ID NO: 22449 - protein, 376 aa, unknown
  TnpB Polypeptide
MIKSIKIRLFPTEEQKVLMDKSCGIARFAYNWALAKWEEEYKLGLKPSKFSLKKEFNNTVKKDRNYNWLYEVSGQITVQAFEDLNSAYENFFKGLSKYPKFKTKKKSKQSFYVRYDAIKFKDGKVNIEKIGKVKYKTNYNIPMLSKYTNPRCSYDGKYWYLTFGYEQGENKAELNKDLSIGIDLGVKDLAVISCLEKPVKNINKSVKLRKLKKKLKRLQRQVSRKYEANKNENSYIKTNNIIKLEKTIKLIHRKLYNIRNNHIHQATSSIIKLKPYRVVMEDLNVMGLMKNKHLAEKIAEQKFYEFIRQMKYKCEFNGIEFVQADRFYPSSKLCSSCGSKKEGLKLKDRIYICDKCGFTIDRDKNASINLGKYKSA

SEQ ID NO: 22450 - protein, 493 aa, Streptomyces sp.
MTCLRGQIAALDARLARPLGAKANKREGLPRGYGSRVEWHAKSRRLYALKARLDRLEADWAAGGVRVVRGGKKLVHLRHHLDEAGLDERGWRERWQASRMFLAADGESGKRLGNETIRITENGQVSIKLPAALTHLANAPHGRYLLDATAAFKHRGEEWLDRISDNRAVVYRIHHDPLSGRWYVTASWQRRPAAVLPLEAALATGVVAVDMNDGHLVAWHLDIHGNPVGEPRRIFYDLSGSTAHRDAQLRHALTRLLHHTRRCGATAIAIEDLDFSDGKTREKHGRNKRFRRLISRFPTAKLKARLVATAAEQNIALVAVDPAYTSRWGAQHWTAPLTTPTRQVSRHDAAGIAIGRRALGYPIRRRTAPPPHDRSDRAGHRTDQARSETPRREETRPRLPGPRSRVVPPGSGAKVGDQRARHRRGHAAEHGFWSQDARPLSRWKRLSSDTGLRRIPPGKVGCRLVRARSSAVERLPYKQDVGGSKPSVPTEVK

SEQ ID NO: 22451 - protein, 460 aa, unknown
  TnpB Polypeptide
MKIISSYKVQIKQPNHLFDDTVRIYRDAVNFLISVCLNHWSEISALNGMLLQKSYVESIIHQTKEHPHPLYDFDVQFYKFPSYLRRDAIACAIGKVSSYSSNLANWKASDPKTRGAEPGLPRVGFEFPCLYKTMMYDRTSDYECRIKVWIRNTWDWVSMSLRKSDIDYIHRYCADRKECAPILQKRGKRWFLRFCFEETQTLSDTDIFHQRIVAVDLGINHCCVCSVMHSDGTIIGRHFLRLPEEYDCLKRKTDHIRRAQSHGSRSVKRFWKFADGVNNDIAVKTAQFIIDVAVLYQADVIVMEHLDVRQPSKKAGKRKRRSKGMKLHLWKSQTVQHIVEGKAHRLGIHIARVCAWGTSRLAFDGSGRVLRGDESAKTNGNYSLCEFQTGKVYHCDLNASYNIGARYFIREFGKSIPATEWQCIAAKVPECMKRSTCTLSTLRSICSVLYESSYNGTAVA

SEQ ID NO: 22452 - protein, 568 aa, unknown
  TnpB Polypeptide
MGCRGLEDGFGLGVVFEAEGLEVRPVDGALLLVRIHEGVEGALCLLEEGVGGDDERFELVALFLVFALGENDAVNGGLGDRPVGVRGLFDVAAHSASLPVGAITGAFALVSLLAIVYYRSVTHREKGKEGRVALEAVKVALDPSPTQERLLLSHAGAARFVYNAGLAHIKEALDAGAKPEWSLYGLRRWWNSNKDALAVSDGGVIWWGENSKEAYSSGLEALAKGLSNWSKSRKGVRKGRRVGFPRFKAKDHATPRFAYTTGRFGLIEGDPKALRLPRIGRVHCLENVTARVGDAKVLRMTVSRHAGRWYAALTVERDTPTATQAPKAGAVGVDLGIKTLATLSDGTIIENPHLLRKSERKLKKAQKALSRKTVGSNRRAKARVKVARLHARVANCRSDAMHKATTWLAGTFSEICIEDLHVAGMVKNHRLAKAVSDASFAEFRRQLEYKTARTGARLHIVDRWYPSSKICSGCGRVKAKLSLSERVYKCDGCGLAMGRDLNAAVNILVAGSAPETLNAHGGTRSRGNQHGCATQVPVKCEPSVGGNVVSDLERVPARTPCKPQQTSL

SEQ ID NO: 22453 - protein, 390 aa, unknown
  TnpB Polypeptide
MVVVTETNVKTRERGDTLSTLTYAVRVDAPPDQYRLLSDTCAAYLDCCNMVSRVAWERKTLGQKALHQLVYRRLRDEYHVGAQMAQSSIIRVIGNYGTIKEMHGSPWATSQPNYSSSGYDLVWNRDYSVLKDGRLSINTLNGLIKLPVDWSHVPEEYRHGKFGTARILNKSGKWLLLIPSTVELPDPARPQQVVGVDMGVRFLATTYDSDGRTVFYDGREVKRKREHYKKLRASLQKKGTRSARRRLRKIGRRENRWMRDVNHQVSKALVSRQSKPTLFALENLEGVRNATEKVRVQDRYVQVSWAFYQLRQMIEYKAKKAGHSVIVVDPRYTSQTCPTCGLVRKANRCKNKHEYYCSNCGYRSNDDRVAAMNIQRLGYQSIVETQSDKL

SEQ ID NO: 22454 - protein, 548 aa, unknown
  TnpB Polypeptide
MAKATTTIRQVLNYETDQGTWFAANQVLFNQVAAFYFDVITAHEKVLDLSKKEALTALEKLTHTTQSNPTPTMPLCEIAEDIPAMFRRAAINAALGLARSFYSNLSKWRKRKEKAEVKGKKFHERPPVPPRSWNKSATLYAGQWKERVGSSIMIKVWTGSVWSWIKVRITGREIPYDIEMGSPQLIRKGNQWWLHTPIEKQFKSPGKIEKQVTTNEQTKICSVDLNINENIAVCTIRTVEGSILATKFIHGGQRVNGFRKKQFGRIACNRSKTGIIAENEQDNVQLWRKIRNVDEQVAHLVSARIVQFAKQHEATVLVFEHLGNLKPAKGKYSHRGNSKQAFWMKGRIFKYAKYKAYNEGIITSRVNPRNTSRECTRCHSMVARYDTSKPAEGYTYGAPLVACAQCGMRGNADRNASLVIGQRLVTRYQKPLKEKPHTPLVAERVEKSTGVVISQEAKSRKEPSILQARHGDHNEHGTAQETGMRMVAPVSDIPCQLRFSFESWPRHIFSGNRLCGSVRSCGVSTPAECHNPLEIYIYRTGIYSRRSL

SEQ ID NO: 22455 - protein, 378 aa, unknown
  TnpB Polypeptide
LKVYKFKIRRPSRRIVREFEQVLDLCRELYNAALQERREAWRISRKSISYFDQDHQLKDIRKERPDVGRLYATVCADALRRVHHTYNAFFRRCRNGQKPGFPRFKGKNQYSSFAYRRQGFKLQGDRLMLSKLGTVRLRLSRPVEGAVKRVAIKRQTDGWFAVLTVEENQCPWFPRTGDSVGIDVGIENLATLSTGEVIDNPQYLRLSERRLKIAQRKVSKRKLRGMNRRKAVRVLGRAHQKIINQRRDFAHKAANGIIREFDEIAVEDLNIKGMVKNHHLAKSISDAAWNTFITILTNKAESAGRRVWKVPPQFTSQDCSQCGDRVKKSLATREHRCIQCGFVSHRDHNAALNILARAEPSVRAGVSRPNDPSISVTC

SEQ ID NO: 22456 - protein, 498 aa, Hydrogenobaculum sp.
MYITLRFKLIENSKEDLEILKNLMKLQSSAVRYAYNRIREGYTDKDIYHLIREKFPSLPTRYIPSAINKAKSINKEHETIVFGNREIFEKLCKSHLQGKQREKLKEQWRQNRKYNLISIGTANNTDKGNRLLRFEKKNDELYLRVNIQPRKWIWLKVKRQISSKNDKWAVFLAMLNDLWENKRYFPYTVELKIRGNDIYGYVTFDFPVPSTYITKNNGVIGIDTNASPLHLALAEISKDGNLISYERHELHNFLLYEKERREYEEWILAHKIVNTAIEKQKAIAIENLNKVNKGYRGDGKAKLRKRLSKWNYKSLLSKIEAIAHQKCVEIIKVNPAYTSVIGALKYAPILNIDKDIAGAYVIARRAMGFKERIPVNYRKLLEDKEYINYAIEKLNNKIQELKESIKQEKNKYKQKPLKQELRKIIGDIKSIQSFQSEPSFCKGANGRNLEQTNKAWQVLRVALVIPILGKPFNREYSSLKTILVSGNVERVASRLVPH

SEQ ID NO: 22457 - protein, 336 aa, unknown
  TnpB Polypeptide
MSYFDMSAQLPQLKNELEWLKEPDKNALQYSLKNLDRAYQNFFREIKKGNKNQGFPKFKSKKNNFKSYRTICLYFKNKIPSIEIKNNKIKLPKLKSVKYVKSREIEGKIISVIINQVPSGKYFIDICFETDNIEKEKLNSKIGIDLGIKNYAILSNGEKIDNPKCYKKYEQKLKKEQRKLSNKQKGSKNRNKQRIKFAKIHEKILNCRNDFLHKLSTKLINENQVICLENLKVIEMLKNRKSKLMNKNMSDVSWYEFKRQLLYKGDWYGRNIILIDQYFPSSQLCSNCGFKNEKLKELDVREWICPNCNSIHDRDINAAINIKNEGLRLLNNMNYI

SEQ ID NO: 22458 - protein, 411 aa, unknown
  TnpB Polypeptide
VERTVKLRVRVDYSTYSALKEVEEEYREVLEDAINYGLSNKTTSFTRIKAGIYRTERENHKDLPSHYVYTACEDASERLSSFEKLKKRGRAYTEKPSVRKVAVHLDDHLWRFSLDKISISTKGGRVSISPAFPKVFWRYYNKGWLIASEARFRLLKGNVVEFYVVFKKDVKPYEPEAFIPIDLNEDSISILLNNKPLLLETNTKKITLGYEYRRKAITIGKSTKVREVRRKLRKLRERDKKADIRRKLAKLIVKEAYESKSVIILEDLPRRAPEHMIKDIKDKQLRLRIYRSAFSSIKNAIVEKAREFGVPVILVNPSHTSSICPVHGAKIVYRPDGGSAPRVGVCEKGKERWHRDVVALYNLKKRAGDVSPVPLGSKESHDPPTIKLGRWLRAKSLHSIMINHKMIEMKV

SEQ ID NO: 22459 - protein, 415 aa, unknown
  TnpB Polypeptide
MKQTICYKLKPTMEQEKHLSNLGFYGTKLYNTDNWQRRTEWEKTGKIPNAYVQKKALKDNVWFKLLPSQTAQEVCFVLQQNYKSWFKLRKTDNTANPPRFRKKQELSTLSFYGHNKQFQIKNNKIIFSVSRKYKQEQNISKIEIEFDAWKFIDGKLKMCQLIYKDNNWYANVVYEIADKQINLNENVRAIDLGIFNLASCIDTKGKSNIYTGRQALAVQHYFNSRKAKVQSKLTKQFPKRHTSKCLNNLTKKQSRQINQILHTISKKIVDDAVKDNISVLVIGDVKNIRRKTDRKTKQVIGETNHGKVNNQKLHSWSFSKITQQIEYKATLSGIRVVRVSEEYTSQTCSCCNAIRKANRKKRGLYVCKFCGRLINADVNGAVNILKKYLQMFSIEHRSIGFVEKPIMYQVKNVIN

SEQ ID NO: 22460 - protein, 377 aa, unknown
  TnpB Polypeptide
MIKGFKIRIYPNKQQKILIEKHFGCCRFIYNYMVEMQTENYKKGNKYIKKYDMIRSLTPLKRQEDYLWLREVSGTSLQIVCADVNESFINFFRKNSGYPKYKSKKASKKIYPVCVNRFYFKDSRHAQIQKLGVVKCKTDFKLPIGKHKFIDVRLSKEINKYFLSFSVECENQARELNDYSLGIDLGIKKLAVVSYGDNSLEFYNINKTKKMKQLNKQLKTLQKSIARKYEQNKQNGKYIKTKNIIKAEKKSYKIYRKISNIRNNYLHQVTHQLVELLPKRIVMEDLNVRGMMKNKHLTKAINEQNFCKFKDYMKYKCKWSGVEFVEVGRFYPSSKMCSCCGEIKKDLKLKDRIYRCKCGLEIDRDLNAAINLKNYIA

SEQ ID NO: 22461 - protein, 410 aa, unknown
  TnpB Polypeptide
MLVRGVAFRLRGELPSEARFLLEDFRLAVNNAIRAGLQARVTSRNALSKLAYKDFRQAHPRMYSQHLVSAFEVAGSVLKNCRRRLRKSGAGRVPYVRRLMMKTENQAYKLDRERGVVDLPIRAGCHVKLELQVSDYHRRYLDDPSLTLGSLTLLPDRVIVTFRKEAPRPYVPESALSLDTNERSLDGVFVKGYQARAVKAEFHDAATIQQRHHDRRKRLQRKKAHDRRTSRRLCRREGAREHHRIEYRLHQVANAVISFAEDQRSAIVLEELKGFKTRWNKELNRRLSLWPRRKLHQIIEYKAQWRGIPVVKVDPRYSSRTCPICGRIQDSRMGAEFVCECGWHLDRHINASLNLLQTAISKGMAGGLRFNPGAFQHDVMMTLYDPVTGARSEPNGTSCISEAASEVTAR

SEQ ID NO: 22462 - protein, 272 aa, unknown
  TnpB Polypeptide
LYVAKVGELKVRWSRPLPSVPSSVTVICEPDRRLYASFVVERAPAPLPPVARSAGVDMGLAVFAAVAASDGTTELVPNPRYLRAAERRLARAQRALSRKRKGSANRAKARHRLAVAHRKVRDRRADHHHKLALRLVRENQAIAVEDLAVAGLARTRLAKSVHDAGWAAFGRRLEDKAAQYGRSVVKVGRWEPTSQTCSGCGHRDGPKPLGVRTWACQACGAVHDRDLNAARNILKLLVAAGPAETVNACGAGVSPPAMAAVGVEAGTHSGAA

SEQ ID NO: 22463 - protein, 403 aa, Oscillatoriales sp.
MLTVTHEYKLRPNKHQVEIFETWLNVCRQVYNYALRERKDWVNSRKSPVNACSIVGEYIISPDTPRPTYASQCKNLARAKKIYSELKVPHSQVLQQTLKVLESAFVAMWDRGHGFPRFKKRLRSFVFPAVKDAAVENGRVNLPKIGWVRLKMSRPVPEGFLLAQIRVVKKASGYFVMLTYRLAVNIPDILPSGHPLGVDIGLDKYLATSDGELVNRPRFFNALHRELKLLQRRLKHKRKGSNNWLKLQRKISQIYQRISDTRKDWHYKLAHRLCDQASMIFVENINFKAWAKGLFGKHTLDAAYGQFFSILSHVCWKRGVYFAQVDKNYTSQTCPNCGTLTGKKSLDVRVHSCPECGYTTHRDVAAAQVIRNRGILAVGQPVSQIASGGVLSGVHRNIGLDKE

SEQ ID NO: 22464 - protein, 290 aa, Veillonellaceae sp.
VKIQFTDTHVKLENIAGSKKKNRQRLNWIKLAEKGRIPTQAKYTSPRISFDGENWWLSVGIKTSRKLKPMRELKFVCKQAGHPYTEGVGIDLGIKDLAIISDTTKVRNINKTRTVRKLKKTRRRLQRQVSRKYQMNKKGDSYCKTSNLIKGEKRLLRINHRLANIRANHVHQATAAIIGRKPSFICLENLNVQGMMKNKHLSEKVQEQNLYEFRRQIEYKAHWAKIAVVIADRWYPSSKTCIECGYVKKDLTLSDRTYVCPHCGNVIDRDFQAALNLKRYGETELSKSAS

SEQ ID NO: 22465 - protein, 387 aa, Bacillus sp.
MKKAYKTEILLTNKQAEKVRKTIGVCRYVYNLYLATNKEHYEKEKKFITGYDFSKWLNNVYTKEKDQWIKEVSSKAVKQSIMNGEKAFKWFFKGLSKFPKFKKKKNQDVKAYFPKNNQTDWTVERHRIKIPTIGWVRLKEFGYIPSNAVVKSGTVSQKAGRYYVSVLCEFEERVSQINTSDGIGADLGIKEFAVCSNHVTFKNINKTFSVKKVEKKLKREQRSLSRKYENLKNGGEKTATDKRANINKNILRIQKLHARLAHIREEYIRYAVSTLAKAKPMFITIEDLHVTGMMKNKHLSDSVRKQKFYRFKEWLTMKCEQYGIELRVVNRFYPSSKICSSCGTKKVDLKLSDRIFKCDHCDLELDRDFNASLNLKYAKEYTIITSR

SEQ ID NO: 22466 - protein, 444 aa, Bacillus sp.
MNAGSGQPKSFWLAELLNLCRKKQRKYFYYILESNIRSLYDGDKGGDLMYRTLKTGLTASQPTLQHLFRIRRICGTIWNDCVQLARYYYRIHGGWIHQSELQSELKGLYPLHSQTIQAVCHKFLRARDGVRKARKTNPSIRYPYKEKFVFHPKWVDQSFVLEGRKLILSLGRWKGKQQTPLVLTLASVPNGVVKEVELVYDGRWHACLSYEDGVQPVPVQDGQTAAIDPGEIHTIAALCTNGQALVISGRKMRSIHRLRNKKVRELQILMSRCQKGSRKWRQYNRAKTYILSKSERQLGDLLHKTTRTFVDWCVEQGVGHVALGDVEGVQRHTSKRNKHKKQVRSKKVNQKLSNWSFGKVAAQLTYKLEAAGISLSKEKEAYTTQACPACGKRNKVRSRNYRCSCGYEQHRDVHGAGNILSQYLHGRFLEVMVTSITYLRPVQA

SEQ ID NO: 22467 - protein, 496 aa, unknown
  TnpB Polypeptide
MRAQTASFVVQTKLKLPTSVENYLEKSFCIVASAYNEALNFGLRRFKALKQNPLYQELLENRRKSDNQKECDKSLFELRKSYGLTEYGLQTYLSCQRKTSNSPYQKLNSGELQVIASQAYKALEKVLFYKIKPHSLRFRSKYDLNVSYRNRVNTTGTRLVKSDRQGVAYRLYLHKMSTFVDIPIKVFNRYQQESILRSKKIKYVQIIRKTIRGKRVYILQIVCQGYPPAKVTRGSETVGIDPGISTVAYASHSEVALVDLVPKNINQKEKLMKLLDRKIERSRRVNNPYCYREDGTIKKGAKFKQPSNRQLRLQVRRLKAYRSLSEERQKLQGGLVNRIISQARLIKIEDLSVKGLQQRSREIRINPKTNRPFSKKRFGKSIFRAAPSAFRNTLQTRAYQLGIDFEVISPKDVKPSQYNHITQTFEKKSLSTRIYDLSEDVTGVQRDLYSAFLIGHIEDGRYQQEKLTQDFPVFYKLMKEFLHQPPKTSRLVWYLN

SEQ ID NO: 22468 - protein, 401 aa, unknown
  TnpB Polypeptide
MRTVLTHRIELKPHQLQEALFRPCVGASRFAYNWALAEWQRQFDAGEKPNEAALRRQFNAIKPVEFPWILDLPKSVPQQAIKNVGRAYQRFFQKQSQFPRFKKRGVHDSARLDNGPGTFAFDGQRIRLPKIGGVRLREELRFDGKPLSATLSREADCWFISIPVEMDRPEPVGESPAMVGIDLGISTAITRSTGEKIDSPKPLKKHLQRLRRRSRSHSRKQKGSANRRKSARKLAKLHARITHIRQDWTHKTTTELTRRFAVIGIEDLHVRGMVANEKRARSINDIGFYEFRRQLEYKAARSGSTVVVVNRWFPSSKTCSICGVKAAVMPLSVREWTCAHCGAEHDCDVNAALNIQRESLATASWAGSHACGEEGTGRSRKTPAKPASLKQEITHGLFVHG

SEQ ID NO: 22469 - protein, 422 aa, unknown
  TnpB Polypeptide
MYGCQQNLISPDKDLKAVLEFLCSEASKLINGGVYYSRQVFFKTGKVPNRAKLHKVLGTENQNIHYKAFYSDTAQQILTSVAESFSSYLGLLTGLKEGTVTQRPRLPGYRQGGLALVTFTGRSVKLKNGMLRFPLGKQVKAWFGIDAFYLAMPSNLDHSSIREYRILPRNGCFYLELVYQKQAVQSSVTVNSVLMIDHGMDNWITCVSNIGTSFIVDGRHLKSINQGYNKQVATLMSGQDNGFWPKRLERLTENRNRTMRDAVNKAARKVINHCVSSQIGTVIFGWNKNQKNSINLGTKTNQKFVQIPTGRLKNRIAQLCEQYGIKFVETEESYTSKTSFLDADELPKFGAKPEGWKASGTRIKRGLYRTAKGWLVNADCNGCANIGRKVATILGLDLSGVGRGDLSAPVRLKLWSYESPSL

SEQ ID NO: 22470 - protein, 378 aa, unknown
  TnpB Polypeptide
MLVLEFKAYAKPNQFQSIDEAIRICQFIRNKSIRLWMDGGAKSWFDLSKYCAIWAKEFDFANKLGAMARQASAERAWAGISRFYDHVKKGIKGKKVGFPKFQKHCRSVEYKTNSWKLAEDRKSITFTDKCGIGKLKLKGTRDLNFYQPDQIKRIRLIKRADGYYVQFCIQVDRVELAPMTGKTIGLDVGLKEFYTDSYGEMVPNPRFMRRGEARLKRAQRLVSRRVKGGLNRRKARVILGRRHLKISRQRKDHAIKLARCVITSNDVVVYEDLRVSNMVKNHCLAKSISDASWYQFRMFLEYFGKVFGRITIAVNPAYTSQECSSCGVVVKKSLSTRTHICQCGCEMDRDHNAAINILNRGISTTGHVGTSIIEIVNA

SEQ ID NO: 22471 - protein, 397 aa, unknown
  TnpB Polypeptide
MIFKAFKYRLYPTKEQEILLAKHFGCVRYIYNWALNAKIEKYKTEKKTENFISLGSKLPELKKEFPWLKEVNSQSLQSALKNVDNAFKRFFKEKKGFPKFKSKKRRKDSFHAPQSGEVDWENNTISVPKLKNIHTVFSRTFEGAIKTITISRTPSGKFFASILVEINENVPTKPTIQEDRTVGIDVGIKTYATLSTGEKIDNPKYLKQTQNKLKYKQYVLSKKDRINGGKNKSGTKREQQRIRVARLHEKITNQRNDFLHKLTYRLTHDNQVDSIVVEDLSVKNMMKNHCLAGSIGDASWGRFFEFLSYKCDWYGKNLITIGRFDPSSKLCTCGVINKELTLKDREWDCPSCGRHHDRDLLAAQNIKHFGLLRQNKIGWESPELTPMESAAVVATWK

SEQ ID NO: 22472 - protein, 380 aa, unknown
  TnpB Polypeptide
MADVADGRRKMQRSHKIRLSPNNVQATYFAKACGISRLAYNWGLNKWKEMYEAGEKTSGRAVKKEFTKIKRTDFPFVIEVTKCAPEAAFNNLNSAFRCFFRNIKAGKKPGYPKFKKKGVHDSFTVDNSKFIVDGKRIKIPKLGWVHLTEELRLNGKILSATISKVADKWFVSISVEMPDEDKSKNQTLPSVGIDLGVKTLATLSDGIIFENIKTTKKFERRLRKLNKSLARKIKGSNRWKRAKLSLSRLHYRISCIRNDAVHKMTRCIADGYSTVCLEDLNASGMVRNKHLSKAISDASFREIRRQLEYKAYATSIVDRFFPSTKLCMDCGKKHDMPLSKRIFECCNGKVDRDLHAAQNILRQGLANVRHVETRALAVAI

SEQ ID NO: 22473 - protein, 361 aa, unknown
  TnpB Polypeptide
MYRSYKIRLKPTAKQRRALTTILALSCDLYNASLQERRDAWALRRKSISYQDQTASLTKIRAEDEDVRTVAVDIAREPLRRVDRAFKAFMRRCRAKEKPGFPRFRSKERYDSFTFGLPRIIVDRLVIPKLGHVKFKASQVLKGTLKTATIIRRRNRWEARIICDVGLAPKKIAISTVVGIDLGLTNFVTLSNGISIDNPHWLKRHEAKIAQANQALARKQRGSNNRVRARLALNRAYERVVDARRNFIHHVSKYLVTNYNLIAYEDLNIKGMVQSNFSKSINDAAWGELIWQISYKAESAGRWAVPVNPKNTSQMCSTCGTIVKKTLANRVHICPCGLTLDRDHNAAINILTVGLGKSLEQ

SEQ ID NO: 22474 - protein, 337 aa, unknown
  TnpB Polypeptide
MDPWRLPGRLPRFKGKNYFTTLCYNQSGFILDVDHQRIRFAHRHPSGVELEFALPWLPPLKGRVKQVELFQDRRHRWFVAITCEVAVPPYVDNSRYQAIDVGVINLATAVNQQGKFVQIRNRRADLYWKNKLREVQSRRDHCRKHSKKWYFYQQKWLKMRRKLTNQLRDFQHKMSKVVVTNTRANTFIVGDLAVKVMARKQRASGRRQQDAAARTLYHSLQNTGFLGRFVQFLTYKAKKVGKSVIRIDEAQTTKRCCVCGTVRNRQLSERVIQCNCGTPLDRDQNAAVNLMVRFLLQQPPVNGEPLQAFLHGLHRHTALPQVPRGVDSMEAPAVMQG

SEQ ID NO: 22475 - protein, 312 aa, unknown
  TnpB Polypeptide
VKAESGPVRFRPDAAQPFDDRCLSWQLDRRTVSIWTTAGRLRGIPFACSPDALETLTLYRQGESDLLHRDGKWLLIATCDVPETEPYEPSGFLGIDLGIVNIATTSDGGIMAGRKLNRYRRRQRALRCKLQAKHTASARRLLAKRRRKEARFARDVNHCIAKKIVTEAERTSRGIALEDLGGIRERVRLRKPQRVALSSWAFAQLGSFIGYKALRAGVPVVYVDPAWTSRTCADCGHAGRRNRVSQALFICRNCGVVAHADRNASRNIAARGKVAWDAGRESRAPAPARDGQRLDAAASITASGAPAASSVL

SEQ ID NO: 22476 - protein, 414 aa, Hydrococcus sp.
MAIKRITFRLYPNKAQNDKLHYWKKLHCLLYNACVYHRKTEYKKFGKNVNYFDQQNSLPAFKECWHEYKELGSHALQATVKRVDFAFQRFFKLKSGYPKFKSSRRYKGWTYLDKAGWSIESNGHHGFLSLSNLGKIKIRGKARDWGVPKTCTVMFKQGKWYASLTVECNPTRYQTDTGAIGLDFGTFQAVADSNGNLIENPRFLKAAQEKINKVAKKFRRKRNPKKGVKASRRWRKAARKVGKIQSSVGRKRQDWQHKVAVEIVSCNSLIATERLNLKGMTRKSIGKRKKQKSGLNRSILDVGIGNLKSLINYKVTEAGGLYIEISTQKVKPSQTCPNCGHQEKKTLAEREHHCEKCGYRCDRDVAAAIVMLNYARGMERASLVVESPSSTSCGSMRQLGALRRQKRQSQAQPD

SEQ ID NO: 22477 - protein, 536 aa, unknown
  TnpB Polypeptide
MFNEEYKKLLKQFHKLSDRHMLIVETDMSSCDVQKVVALSDKIRKAGNELVGLMRKNYDQLMHTKRYRKLLKLYGRAEDKKKRKVLANQLNEIQKQYNITWDFCRTSMIPIGKKYGIDAVFALTKAEDVWQGIEKCLYDNGKILHFSKYGEMPCIRAKQINRGIPMSVKDNKLQFKLGKSTFGIQIKDRFQTDEINAILSYLAEPEITNNKAIQVLLNETYCIDTYRPCYATLVPKLIRGKYRIYLHLTIEGKAKPKYDKYGNPRHKFGKGIIGADIGVQTVAYTSDTEVGLKNLSERGNSIQKSERLERLYYRAMDRSRRATNPQNYNNDGTIKKNRKSWKYSNHYKKLKTKHSELCRINAINRQLAINEDANHLRSLGDVFVTEPKNANKLMKRAKETTINSKGKFNKKKRFGKSIKNRCPSGFQSTIERKFKVSGGTYIEVPNHYRASQYDHTADDYIKKKLSDRMYYLTDGTIVQRDWYSSFLLYCYDDKTKDINRSKCITKFEECYNKEKALIKWIKTNKIKVFNSGIKIA

SEQ ID NO: 22478 - protein, 395 aa, unknown
  TnpB Polypeptide
MRLVERHIIKDNRFEEVCHKSGLLYNYVLYNVRQDIFSNSYLKEYEFSTKLNRENQFDFRNLPSSISQQVIAQVFLAIKGWMGSVKEFEKNSSKFHSKPKLPKYKSGKKQNMIVFTTASCRVKQDGYIHFIKNIIQPIKTNVEKEELKQVRIVPQATCYVVEVIYERKEQNLNLQKDNFLSIDLGLNNLCTCTNNVNQKFFIVNGKVVKSFNQWFNKTKAKWMSFVEDKGISKRLKRLICYRNLWINDKIHKISRFIIDFCKKNDIGTITIGLNKNWKQNINLGNKNNQKFVEIPFSSLIDKISYKAKLVGIDVKITEESYTSKVDHLAFETLEKHDIYLGKRKKRGLFQSFVNQLINADINGSIGIVRKVFGDSAVQQIIGSGLAFNPIRVNVL

SEQ ID NO: 22479 - protein, 290 aa, unknown
  TnpB Polypeptide
MKIISSYGVELRKQNIPIRQTLEIYRSAVRYLVEVYESVWEELAQIENSKKRFNAAEHLVHTTKRNPARFDFDFCFPKMPSYFRRAAVQHALGSVSSYRTRLEQWKAEGQKTGKPYLKSEQYAMPVFYHNVMYRENTEEKDAAFLKLYDGHDWKWFAVRLKHTDMEYLRKHWSGKKASAPTLEKKHDKYFLRFTYAEEVSLNRTPVKEQTICSVDLGINMDAVCTIICIRAVRVEWSLFVLWNLFYLTIQLRCRSLINATSFGQTTLADGFKNAKHTGGIYIGCKFRGIE

SEQ ID NO: 22480 - protein, 433 aa, Nocardiopsis sp.
LLWGETLELFSPGRNRRAVLTDPPVMGITEGCFGCVLSLAGCTMVGVSKIVVWVKLTPSPEQAAVLASTLRALNDHATWVAKVAHEQGMMRNYELRKHTYHQLREAGVGSQAAQHTIKKVCDAYRARRSNLSSGNHGPKGSARRERIESTPLIFRPESAHPYDARNLSFALDARTISLWTFQGRLKDVPFVGASDQIKTLAEHKRGEADLLCRDGVWFLAVAVEVVDAPEIDPDGFLGVDLGIVNIATTSDGQVMAGRRINRYRRRQQRLRQKLQTKGTRSAKRLLRKRRRREAGHARNINHRISKRIVAEAERTERGISLEDLKGIRARVRQRRPQRVTLHSWSFHQLGQFIAYKARRAGVPVVFVDPAYTSQTCAECGHVDRRNRVDQAIFTCRGCGVVAHADRNASRVLARRGQEAWNAGRKSHVPPANP

SEQ ID NO: 22481 - protein, 398 aa, Nocardiopsis sp.
LETQGHAARALWNTLHSWWTMSSENRRVSLKDADAAIRQARKDIPWLADLPAQAAQQVLKAYFRAWQNCWAGRAGPPRFKARLRSRMCVDVPQGRDLNIERLTRTWGAVRIPKIGVVRFRWTKDLPVGKHADAANRVTGARLVREANGWHVVLRVRTDVREPAPHTGPGVGIDRGVAKPLALSDDTFREHGPWLSPGEAERLRRLERTAARQRRHRTPGQATSNRLRRTYDQIAGVRAKAKRRALDWQHKVTHALAEEFGVVGVEDLHIAGMVRSARGTVEAPGTNVAQKSGLNRAIAGQAWGRTVTLLEYKLADRGGHLVRVPAPYTSRRCSRCRVITEGSRKSRDRFVCKAPGCGYVAHADTNAARNIAHAVRQQAPQDIVGARTWSPRCQAGCEA

SEQ ID NO: 22482 - protein, 386 aa, Nocardiopsis sp.
MLTGFRYRLALTDEQAESCQVYGDICRAVWNTGLDQRREAVSRWRRGQRLPYCGYHLQARELAEAKTEETWLKAAPSHILQQTLRDLDRACKDHGTFKVRWRAKGRWKPSFRFPDGTRMSIERLGRKWGRIKLPKLGWVRFRWSRAPRGTVRSATVSRDGAHWYVSLLCEDGQTTPEAHERPDSAVGIDRGVMVAVATSDGDLLDRTFQTPKEAERERRLRRRLARQRKGSNNRARTRAALSALTGRVRARRSDFAAQTAHTLCAKNAVVVLEKLTTKNMTASAKGTVDAPGVNVRQKAGLNRAILTKGWHGLKLACQNAARRTGTRIMEVNPTYTSQTCHSCGYVAVENRESQSVFHCGRCGHTAHADVNAAQNTLMRGWTSPSG

SEQ ID NO: 22483 - protein, 396 aa, unknown
  TnpB Polypeptide
MLVFEFKTYGKSSQFCAVDEAIRTAKFVRNSCLRYWIDNPKVNKYDLNKYCAVLARDFSFADELNSQARQASAERAWSAISRFYENCKKGTPGKKGYPQFQKDCRSVEYKSTGWKLAENRKSIKFTDKKGIGKLKLKGTRDLHFYQIDQIKRVRLVKRADAVYVQFCIDVDRSENTEPSGNTIGLDVGLKEYYTDSNGVIVENPRFLRKGEQVLKRCQRRVFRKVKSSKNRGKARQLLGKCHLKISRQRKDHAIKLARCVVQSNDLIAYEHLRIKNMVKNHCLAKSINDASWYQFRVWLEYFGKVFQKVTVAVNPQYTSQECSSCGAIVKKTLSTRTHVCQCGCSLDRDENAARNILSRGLGTVGHTGTFALDASNALGDEASTFVGEILHQQVMS

SEQ ID NO: 22484 - protein, 137 aa, Clostridioides sp.
VIVVEKAYKFRMYPNKKQQELINKTFGCCRFVYNKYLAKRIEVYKNDKETFTYKQCSSDLTNLKKELKWLKEPDKFSLQNALKDLDNSYKKFFKKKAGFPKFKSKKINRFSYKTNFTNGNIMYCGQHIKLPKLVWLR

SEQ ID NO: 22485 - protein, 487 aa, unknown
  TnpB Polypeptide
MSRATKTIRQQLNYRPEIAGWFEETQALFNRVADFYFGVIEANPEVLDLDGNGPRDTLERLTHRTKTNPEPVIPLAAVADNLPALMRRAAIQAALGTAHSFHSNLARWRKEKDQALNRGEKFKKRPPAPPSRWNKSVMFYAGMWKERTTTSILLKLWTGTSWCWVKVRIKGRELPEDWEVKSPQVVQRGKRWWLHTFLEKNASNPGTVKEQVTSMPDVRVCAVKLNVMDALAVCTIQTREGTTLATRFIRGGRQLNGLRKSSLGRIARRRADTGLIAQGEPDNTRLWERMRHLDEQVAHRVSRRIVDFAQAHGATLLVFEHLIPYHPKKGSFSQRGNEKRAYWLRSKIFRYSQYKAWAEGIITCRVSPRGTGRECASCKAQVNRYSEGQETSGYNPGAPLVLCAACGMRGNADRNASLNIGQRLFARYQRKEKPRTSPLAGRPSKEGGVPFPHAAESGERPPSEPAWQGERDGYGTARGQSRGVARL

SEQ ID NO: 22486 - protein, 371 aa, Aquisalimonas sp.
MQRTVSIKLTTTPEQSEALSVLASEFARGCNLAMGHASEKRCTNRVQLHHLAYYPVREKTRLGSQMACNVMRAVVGAYKTLKANKRLPLEGPLPEVVFGDRGAVHFDKRTYSIQGDTLSLYTLDGRIRAPMALGGFQREYLERGTPKEAKLVQKNKGWFFNLVLDVPAEAPRAGGVLGVDSGENNIAATSTGKVFGGGKLRYDRDRFLALRGRLQRNGSQSAKQLLKRVSGRERRHVTQVNHEVSKAIIAEALACGAGVIALEKLTHIRKRIQAGKRLRSRLHRWAWAQLQVMIAYKAEAAGLRVVYVNPAYSSQTCAACGQLASRNKHTLSCTCGNRAHADVNAASNLARLGETAVSSRDAVNRPDVGVA

SEQ ID NO: 22487 - protein, 334 aa, Cyanobacterium sp.
VSFKTELKPNNKQETLFAKHAGVARHAYNWGLATCFQALEKGEKLPTAIDLHKKLVAEVKSIYSWYYEVSKSAPQQALRNLSTAFKNWWVHKHTKRPRFKKKGHHDSFYLEGSIKISGNRFKLPRIGWINVHENLPLITPKNVTISRHADRWFISFRYELDKPNTPKIQGRIGVDIGINSLATCSDGTVIENRKAYRKNKRKLARLQRNLARKQKGSKNRKKAQVKLARQHKKVVQIRKDTIHKLTSWLAKNQSEIVIENLNVSGMLKNHRLANAVEDCGFFEFRRQLEYKTEWYGSKLIIADRFYPSSQLCSNCQNKQKMQLSKRVYECENRS

SEQ ID NO: 22488 - protein, 402 aa, Escherichia sp.
VKRLQAFKFQLRPGGQQECEMRRFAGACRFVFNRVLARQNENHEAGNKYIPYGKMASWLVEWKNATETQWLKDSPSQPLQQSLKDLERAYKNFFRKRAAFPRFKKRGQNDAFRYPQGVKLDQENSRIFLPKLGWMRYRNSRQVTGVVKNVTVSQSCGKWYISIQTESEVSTPVHPSASMIGLDAGVAKLATLSDGTVFGPVNSFQKNQKTLARLQRQLSRKVKFSNNWQKQKRKIQRLHSRIANIRRDYLHKVTTTVSKNHAMIVIEDLKVSNMSKSAAGTVSQPGRNVRAKSGLNRSILDQGWYEMRRQLEYKQLWSGGQVLAVPPAYTSQRCACCGHTAKENRLSQSQFRCQVCGYTANADVNGARNILAAGHAVLACGEMVQSGRPLKQEPTEMIQATA

SEQ ID NO: 22489 - protein, 389 aa, unknown
  TnpB Polypeptide
MLVQKGFKYRLRPTKEQKQKLLQHGGNARFVYNYFLKQNIDYYNKTNKFKFYYELATSLPKLKQELPFLKESFSQSLQMVTRHLDKALKDSFKKEKGFPSFKKKHFLNDSFTCPQKYRLGNGFVFIPKIGEVKWIKHRPLEGKPKSITISQDGNNWYCSVLCEYEVREQEKKSDNIVGCDVGLKNFLTLSDKTVINNPKHLKKYEDKLAKEQRKLSKKQKGSKNRFKKQVKVRKTHTKIKNIRQDFLHKTSYLIVKNYDGIVLEDLNVKGMMKNHNLAKSISDVSWSEFRRQLKYKSKLNFKHFIIIDRFDPTSKTCSNCGCIQDMPLNKRQFNCPDCSVSIDRDLNASINIKNLGLNKINTEGHSGINACGVETVVSTVRQEKECLVN

SEQ ID NO: 22490 - protein, 302 aa, unknown
  TnpB Polypeptide
MTLLSYKIKHSKDFSEELRKARQIAEFAIKTRTNTSKDVKHFGLKSMIANQILREYGRNRKAKKARQVNLIIPHQGIFVDRALKLLISIPCLKLKLQYHFSGFEKVNQIELDTEYAYITTTRSDSEPLQTEKTETYIGVDLNTTGHVAVVSNPETGKIWKLGKKANHIALKYREIRKQLSKQGKYRKVKQIKDRQKRVTRNLNHHISKKVIEIARTAGKGIRIEKLTKIRQRANKKNSKIISLFFEQLVILSTAKDDRVQSQVARYSHLLYRPTIHVKDMQQVWAYRRQRRQEFQVSFMWTR

SEQ ID NO: 22491 - protein, 430 aa, unknown
  TnpB Polypeptide
MQRLQAFKFELRPNGQQERQMRFYAGACRFVYNKALALQKERYERGEKKLSYVQLSKLLTEWRNSEELAWLANAPVHPLQQKLKDLEKAYANFFAKRADFPRFKKKERCQDSFRYPDPKAFKLDQDNNRIYLPKIGWVRYRNSRKVLGELRNVTVSFKSGKWFVSIQTRREVEKPIPKGGIVGIDLGVAQFATLSDGTFYAPINSFKRHQDSLRKAQQAMSRKVKFSKNWEKAKIKVQRIHARIANIRQDFLHKTSTAISKSHAIVCIEDLQVQNMSKSAAGTKESPGKNVQAKSGLNRSILDQGWYEFRRQLEYKLTWNGGRLILVPPQNTSRTCPCCGHISEDNRPTQDKFECVECGFKNNADLVGAINILSRGIQILRDEGQDTTDALVGMLAGSLPASARMACGSNRTGGRKQEPTETVAYGGNYA

SEQ ID NO: 22492 - protein, 401 aa, unknown
  TnpB Polypeptide
MIKKNKGYKFRLKPSKEQSIYLEKAFGCSRKMYNIYVDILYTQLQEQNFINGKIDYKLIKLPTPASIKKDYDYMKEIDSLAFANIQLDFRDAIKKYNNECDGKTYSKKAKKQVKTLGRELTFKDLKGMPNFKSKNKNQNSFSTNNQNGTVAIIGDNFVKIPRLKEPIRFVNHRQLPQNYIIKGATISKDCRNHYHISVLVEYYIEEKQIPSNNILGLDYSQHDFYVDSEGRKANYPKYYRKLEIKLKKQQQKLSMKKLKSNNWIKQKKKISKLQNKIANQRLDWLHKASYRLAENYDAIILEDINLRAMAQTLKLAKNLTDNGFGMFRNFLKYKLEDRGKQFIKIDKWYPSSKTCNNCGNINANLQLEDRIYTCEHCGLIIDRDFNASINIKEVGSTLLAW

SEQ ID NO: 22493 - protein, 349 aa, unknown
  TnpB Polypeptide
LKFATAKKRRHIRALLQAYRAAVNFYIRSLWNIPGGLDRTTLSRLRRTRLSERYKSQALKQAINIVVSTRKAAKKLGKTVALPRFHGAAVLDSKFVRIEEGKKSFDLIIRLSGLHKGHRLIIPTKRTAVLNKWMNKPGAKLIQGCALKENEIILWVELPDEPIREHGEIIGIDIGVNKLLMDSKGNQYGGSFKKIRDKIIRRVPGSKGRKRAYAERRNYIEQVLNSLPWDRLKVIGVENLKNLKRGKKKNRGKRFRRAVAPWIYRYVLRRLEDKAQENRVHLVFVSPAYTSQICPKCGKADENNRRGENFLCSRCGHTADADYIGAQNILDRTVRLLGSVESPRLKKAI

SEQ ID NO: 22494 - protein, 381 aa, Frankia sp.
MVIRVVKRAYHYRFYPNPEQAENLSKTFGCVRYVYNRALAERHRAWALEQRRVSHAETDRMLTGWKRDPGTLWLAEPSKGPLQATLRHLQTAYVNFWQKRAGYPSFKKKGKTTDSATYFRNCFAFRDGRLTLAKQSAPLEVVWSRPLPEGADPSQVTVSRNSRGQYHVSILVEDVVSDLPATGAAVGLDMGVSSLVTLSNAEKAANPRHERRDRERLARAQRDLSRRQKGSRNRARARARVARIHGRISDRRRDGLHALSTAIIRENQVVVVEDLAVRNMVRSHSLARAISDAGWRDLRAMLEYKARWYGRTVIAIDRWYPSSRTCSACGALAESLPLDIREWTCHRCGAHHDRDVNAARNILAAGLAVKACGDGVRPLRS

SEQ ID NO: 22495 - protein, 384 aa, unknown
  TnpB Polypeptide
MSTIQRAYKFRFYPTPEQADQLAKTFGCARFVYNHFLRVRADGFFKDKARIGYNETARRLTILKQQPETVWLNEVSNVVLQQALRNLDTAYQNFFQKRAKYPGFKSKHGTQSARYTTSGFRMKPDGLWLAKMTAPLDMKWSRKIKGEVSSVAISKDSAGRYFASLLSTEEVELLPVNQQKIGIDLGLKDALITSDGQTVPNPKFYRNTETKLARAQRSLSRKQKGSKNRAKARNKVARLHAQIADSRKDWSHKLTTQLIHENQVISAESLAVKNMVKNHCLAKAIHDVGWSELVRQLEYKARWYGRTFVQIDRFYPSSKRCSCCGHILSSLALSARTWACPECSTEHDRDINAAINIRDAGMAILAGAELLRQHEKSTAGLAES

SEQ ID NO: 22496 - protein, 480 aa, Nocardia sp.
LRYQYRLYPTAGQRESLARVFGCARVVFNDALAARKTAFEAELPYVSDSELSKRLTAAKATPEREWLCEVSAVMLQQALADLNTAYRNFFRSVTGKRKGPRMAHPRFRSRKDNRQSIRFTRNARFAVTTGKKLRLPKIGDVKVAWSRELPSEPSSVTVIKDAAGRYFASFVVEVVDRPLPDVDAEVGIDLGLTTFAVLSNGKRIESPKFLRRAERKLAKAQKSLSRKQKGSNNRAKARIVVAKAHARVADTRRNWAHKHTTAVVRETQAIYVEDLCVKGLARTRMAKSVHDAGWAMFTRMLEEKAARSGRYFAKVDRFYPSSQICAPCGHRDGPKPLSVRVWTCPVCGAVLDRDLNAANNVLAAGRAERLNACGGSVSPVVRTIGTSQRNRNPPRAPDRALAGIPTFRLGRTSKGPQVRDLRRVPPQEPQWQDPQTRTTYRQRPSRSRRLITRSCPHARYSPDRRGPDSGPRRTRHRESR

SEQ ID NO: 22497 - protein, 519 aa, Nocardia sp.
VNLRFRTLAEIVCVSGAQRCCVGVGPSSLEQVSDPVSASEHPAAGTVIQAYRFLLEPTVTQADALRSHRGAQRFAYNWGLARVIADLDQRHAEATYGLSSEDLTDPLSWSAYSLRKDWNQVKHTVAPWWPENSKEAYSSGLANLATALKKWDESQSGGGKGRKSGFPKFKSKRSRCSCRFTTGNLGLTDADRRHVRLPRIGIVRTGESTRKLARHVERGSARIRSATVSFAGGRWFVTFSVEIVRADMRATSPDRVVGVDLGVKVLAVLSQPVPGISNGQGLVANPRHFDRSRCELRRLQRRAARRRGPDDRAGTKPSKRWRRANARITRLQAMIANSRRDSLHKLTTALIASSTTVVVENLNVAGMLRNRRLARHIADVGFGEIRRQLTYKSLWYGGTLVVADRWYPSSETCSNCGVVKAKLRLSDRLFVCDECGYVLDRDVNAARNLAALVLSVEGGASAASCVGTKNTLAGNPCKTLTVRATGTATSRPVLGAGQPCRGNSAGRETLPYVSRTALP

SEQ ID NO: 22498 - protein, 390 aa, unknown
  TnpB Polypeptide
VPQLRSSVSTLKHRERVKVNTVYRFRIYPNKAQRELFAKTFGCVRLVYNRMLAEKKAHYEKTGKNLSLTPARYKSEFPWLKEVDSLALCNAQLHLQTAYKNFFRDDSAGFPKFKSKKKSVKSYTTNYVNGNIVLQNGKLKLPKAGWVRIRQHRKIEEGYQLKGATITQEADERYYVALLYSCEEPVHETRKAETAIGLDFSMKELYVDSNGAHTDYPHFFRKSQEKLAREQRRLSHCEKGSSRYMKQKKKIARLHAHIARQRKDYLHKESRKITNFYDLVCIESLNMKEMSQDSRFGKSVHDNGWGMFTDFLSYKLERAGKKMVRIDKWYPSSKICSCCGKLKKELKLEDRIYSCTCGNQMNRDENAAINICREGLRISGVELDTERKIS

SEQ ID NO: 22499 - protein, 276 aa, Oscillatoriales sp.
LHHNPRRAIKTKVNPDRICQVRLVPKCDAYVIEVIYNACTERSRSEPESTAKNNNFVASIDLGLNNLVALTSNQPGLIPLLINGRPLKSINQFYNKRKAQLQSQLKGRRQTSSRIQRLTRCRNQKVDNYLHHTSRTIVDILVAQQIGTLVIGKNAQWKTEINMGKQTNQNFVSIPHARLIEMLEYKAFLVGIKVIVQEESFTSKANFLGLDPIPVYGKTKTEPVFTGKRIKRGLYKTSTGQLINSDVNGSFNILRKAIPNAFGDGIRRGRSSAEAG

SEQ ID NO: 22500 - protein, 385 aa, unknown
  TnpB Polypeptide
MRAIKTVQQRYTPSPEILRMLDEFRQMLNDCVRVGVAENVSSLKSLSTKAYHQLATYNAMSYYKLCAIGKATGILRNYRKARRKNPETKDPYAQRPQLTTCYGFKIRAKAGVLLLPFKPKQPLPIPLNAHVLRVLSEPGIQVRSVTLTNEELSISYAKEVKPIQPRGLIAIDRNLNNLTTANSDGQVTRRNLAKATEVKAMYREIRSHMRRNDLRIRQRVTVKYGRKQREKVKQILHHASKQIVMHCKEKKFGVVMENLNGIRKLYGRGNGQGRIYRGRMNSWSYAELQRQIEYKARWEGIPVIYVNPCGTSVKCSICGSKMKPEENRTLKCRSCGFTVDRDVNAARNILARGMRFVPIASASEAMVAVQRRPVDADELTWRPTT

SEQ ID NO: 22501 - protein, 378 aa, unknown
  TnpB Polypeptide
MSGEIMIKIFKPINKAYKFRIYPNQEQKELIDKTIGSSRFIYNEFLAKAKENEYKSYTKYSSELPQLKKEFKWLKEVDSIALQQSLKDLDRAFKNFFSGKYNYPKFKSKKKSRLSYRTQKFIRSNGSTNIEIKDNYIKLPKLSWVKFAKPKEVKGKINNVTVSKSRTGKYYISINVREILTTVVNNNQGELGLDLGIKDFLTTSDGKHIENPKHLLKYEDKLAKLQKRLARKEEGSNNWHKLKKKIAKVHVKIKNIRKDFLHKLSTRLIKENQLLVIEDLDVKGMLKNSKLAKHISDCAWNIFTTMLEYKSKWYDCTLHKADRFFASSQTCLECGVKNPKVKELSVRTWTCECGATHNRDINASKNLLKQGKLELEIN

SEQ ID NO: 22502 - protein, 279 aa, Haloferax sp.
LELFWDENAQTFRAFQPVTIDNSRLVHPLADETAALDIGANNLVACTTTTGTQLLYEGRDLFERFRETTREIARLQSKLCEGRYSSNRIRSLYRRRTRRRDHAQVALVRDLIERLHGEGVSTVYLGSLTDVLDTHWSVETNAKTHNFWAFRAFINRLACTAEEYGISVEVRSEAWTSQECPNCGSTDRTTRHRDTLTCPCGFEGHADLTASETFLRRHQNSERSDWRTRHGVSRQRQTDVARPMARPVCLKWNDHDWSESPRSCSNEERTNPQVASVGW

SEQ ID NO: 22503 - protein, 376 aa, Methanosarcina sp.
MPKLYRYRIYPTHSQVTKLNETLELCRWVYNETLALRKNAWESEQKRISYYDSKKIIPVWKKDKPELKTVHSHTLQDVTMRVDLAFQAFFRRVKAGENPGYPRFKGKGWYDSITYLQSGFSLNENILTLSKIGDIKIKMHRPLEGNIKRLTIRRTSTQKWFVSILTDVDSYQPLEHSDKAVGIDVGILSFATLSNGTYVPNPRFYIQEEKALAKANRKFSKAEKGTPERKKCLKTLCRVYERIANKREDFTQKLSKKLVDNYGIVCFEDLNINNMTKNHNLAKHILDAAWSKLVTYTSYKAENAGRKVILVDPKNTSKMCSNCGMLVEKSLSERTHNCPFCGLFIDRDLNASINILRLGLQSDRKIGRCPSLQRGE

SEQ ID NO: 22504 - protein, 310 aa, Nocardia sp.
VSSVVLVQACQDARAAYRNWFDSLSGKRKGPKLGKPRFRSRKDHRQAIRLTRNGFGVRANRKLYVAKVGELKVAWSRELASEPSSVTIVKDSAGRYFASFVVAVEDQTLPEVDTEVGIDLGLTTFAVMSDGRKINSPRFLRQAERRLKKAQRCLSRKEKGSQNRVKARIKVAEAHARVADTRRNFAHKHSTRIIRENRAIFVEGLCVKGLARTKLAKSVHDARWAMFTRMLEEKARRYGRTFARVDRWFPSTRMCSVCGVVGDAKPLHVREWACGCGAVHDRDVNAARNILAAGLAESRNACGGAVSPAA

SEQ ID NO: 22505 - protein, 289 aa, Caldivirga sp.
LKTLRFYPDGSVKGGGYAPVVLDFKGSAIKLHQVCRNEHGYVVEVPMPKWVVDRLSEGGDVKYAMIGLKDNEPYLALITEREAEPYIPSDYMLAIDVNAWNNGIAWGLIKSSKLVKWRPERPRLREIDGLYYRSVVLSQKYGKLKRLGLHKTREGKGLWREVRGLRRRIYAKLRDYAQRLAHRLVRKALRHRALVIIDDIIEESRRELIEEKLPSGLRKIYLAETRRFVKLLIAQLEWYGVPYRFKRLPSTICPICGSELTQLPGRIMVCTNCGFKAPRDKVPMHWAMR

SEQ ID NO: 22506 - protein, 492 aa, Caldivirga sp.
MLRRAVAVELEVAKELNKLLYSVESVYLGIVREVAAYAVENNVTSATRLQRLFYRKYRWEYQGLHAHLVIQAIRQASEVAKSFIERKRRGLVGKPYPEVRSVSIRFTEKAWSYEQFASSIAPVKLELSLLGGRREIWLRPHKRFWLYWWRVLTGEAELAGTLIVKRRLNKWYAIFVFEIKPREEKPQSVVAFDINENTVAVGKIDLPSTVDKVARWDKQYTTPQLYEIRTDFGRLARRYEKIRSAIIEKLKPEFALPNGNHVNVANTREFRKRVKRLRERGRKVGRVRHVANELTKSPSIIITEDLGENPQDKMIDGVGKGELRHRIKQIPFKKLERAVEEKALERGSKLFHVSSYRDSRVCPIHFTRLEGTDDWHILKCPLGHYVNRDYASILNMAWKTTLEAWSKGVWWDLRKKMDWGEYEDRHNPLVPYGIVILLQRIMRNTRASLEKSPAMLARGSPMNHHRMQNEGGGEGASPFLREPPHPLGRGGG

SEQ ID NO: 22507 - protein, 378 aa, unknown
  TnpB Polypeptide
MLLRKAFKFEIMPNGEQIRRIKQFCGCSRFVFNRALAWQNEKYEQDNAFKFSYTKIANLLPQWKKELVWLKECHSQVLQQLLKDLESAFKNFFQKRADFPKFKKKGLKERFRFPQGCKLEQQNNRLYLPKIGWVRYRNSRDVIGEIKNVTVSQKCGRFFVSIQTEFECEIPTHKGGEIGIDMGVARFATLSNGAFFAPLNAFKTYKGKLAKLQKQLKNKVKFSQNWQKLKAKIVKLHHKIANCRKDFLHQTSSKISKNHAMLYIEDLQVQNMSASAKGTVEEHGKNVKQKSGLNRAILDQSWFEFRRQLDYKTQWLGGFLVAVPPQNTSRTCPCCGHTAKENRQTQANFECIECGYAENADVVGAINVLERGRAIVQA

SEQ ID NO: 22508 - protein, 445 aa, unknown
  TnpB Polypeptide
VQSSTLTQTLSFGLDIHTGSGDDLQTGCLEARRIRNETNRLDRQGGEWGDIKSVVVDNANHVKNTSQLIVDKALGELETYHDNKDDDWGRPYPYIDGMYPMVMNHSEGYRLFLEDDKTVRFRITATRGTHVKGELRGSPDHFDRLQTAFNDEEWRIGTAEVIHKHDEWRLHVTVTHETHRVASKHDADTIVGVDVNEDCIALAAMSLDGAVMDSVVFEYPSVKEQRHEFFTKRKRMQKANQTAFETVVKTEERDYVHDCLHKVSRKVVEWVSQFNDPVLVFEDLKDMRDSIDYGTRMNRRLHSLPFAALQEMVSYKASWDGIPSDEVDPEYTSQRCPRTECQHTERANRHKKRFKCCQCSFQDHADRKAAVCVVQEWFDEQYGNVPSLETLPRVQKVRRAASGAGGGPDSHGAIFASGVTDDDMSARDSSQAREELKTVASAVQD

SEQ ID NO: 22509 - protein, 381 aa, unknown
  TnpB Polypeptide
MTVVKKSVRVRLCPSDSQKDLIDKTIGCARFVYNQTLTDCKQSYEQSKHFPSQNERMKRLVPLKEKHVFLKEVDSKALQQSVRNFNFALDNFFKNRNHFGFPKFKSKHNLKQSYRTPYDGGNADILDDKHIKLPKLGSVKTKYFDMPEAYKMFNITVEKTPTGKYYAAICVETEVQPLPKTGKQAGFDLGLIDLLIGSDGTRFERPKFNYLNKDKLTKEQRKLSKMRTKLERANLNLDECKNYQKQRHKVAKLHEHIANRAKDFNHKLSRKLVEEYDFLAFEDLNVKGMKKNHYLAYSIADVRWSQLLNFIQYKCNWYGKEFKQVDRFYASSKICSCCGTCHKDIVNSLSVRKWTCPDCGSHHDRDINAARNILIQALSAA

SEQ ID NO: 22510 - protein, 417 aa, unknown
  TnpB Polypeptide
MLRAYKYRIYPTDDQKVLLAKTFGCCRFVYNWALNMKITAYKERKETFGNVYLTNLMKSELKAEHEWLAEVNSQSLQSALRNLDTAYRNFFRDTHAVGFPRFKSRKDRQSFQCPQHCSVNFVNGSISIPKAKDIPAVLHRKFKGTVKTVTVSMTPSGKYFASVLVDTAIQELPVTPVQGDTALGIDLGIKSLAVCSDGRTFDNPKNLQRSLDRLKLLQKRLSRKRKGSANRNKARIHVARLQEHIANCRKDNLHKIAHALTHDSQVRTICMEDLNVKGMQRNHHLAQAVGDASFGMFLTLLDYKCRWYGVNLIKIDRFAPSSKTCGKCGYVYKGLRLSERSWTCQECGTRHDRDFNAAHNIKEFGLKALPTERGKVKPVDCPLVDDRPRVLKSNGRKKQEKRGGIGISEAAKSLVLR

SEQ ID NO: 22511 - protein, 519 aa, unknown
  TnpB Polypeptide
MAKNQTYKAFAVRPSCVLDLNGEVLDARAVMAELTAEVRGISAYATYVVRNDMKLGSALAGVTASVPAEVGRQAGVMMPDFLATGCTGRSRKEKLVQYNVVASYRSWQERIDAVSGKSSKYVTQGWKRTADASAPTYGGDYINLGAVDKQYAVIESNPFITGEIVLKMVIRGNWYRLIFRFDNVRFSEGKVTLPVVKVENNQPVFIFTVVTDNPVIQFSGNYVIGVDIGINNYATVAVRNTGTGKIAYQTALSQRVHSLWNSIRASEKQVRQLRNKAKSLLYNRQAHMSALDEAKFHREAASRKKRELAILAAQEIAYLSHVWGNAVVAVEDLSWVANTMSNGRWNRGTFTQWLTHYVSQNGGWVIAVNAANTSQVCHICNNEVEHPVHEVSVCTKHGEMDRDVNAAANIAARAVPKVEKARKTRAKNRKLQPKVALKTPVARGSLKYPSRDRTKHAPTPKRKNHPQNVKEVILPSSSPARVNMTRVLADCGAYGTTETSQAAIKRGNVAYKYRLCSLN

SEQ ID NO: 22512 - protein, 248 aa, unknown
  TnpB Polypeptide
MCTVVSTLMGKFFISIVVEDGNSPPPKVTDQKSVGIDVGLATYITLSTGEKVENPRHLQNALKRLRCLHRRLSKKERGSRNREKARQRLASCYERIGNQRAVFQHKLSMRLIRENQAIMVESLNIGGLIRNRRLAQLIADAAWSQFLAMLRYKAKWYGVTLIEIGRFAPMSKRCHGCGHLNERLTMSDRTWTCPACLLPLDRDVNAAINIKMMGLGSIITPREPRAGPVELSALAEASKQETSPIRAE

SEQ ID NO: 22513 - protein, 338 aa, unknown
  TnpB Polypeptide
VYKRLPAQTAQQVLRLLDQNWKAYFTAIKDWRKNPNKYLGRPRIPRYKPKNGEILAIFTNQQCRIKRGFLCFPKKTKLTPIKTRITELFHQVRLIPRGNHYILEIVYEREPITLRLKRRRVISVDIGLNNLVTVVNNAGLAPWRVKGGGVKSINQYYNKERGRLCSCRDKQGLTGQTHRLQRLRLKRTNKITDVFHKVSRRIIKYCISNNFGRIVIGYNKTWKQQVTLGRKNNQNFVSVPFLKLVKKIQYKAAIVGIEVIMVDEGHTSKVSFIDGEEIKPHQTYVGKRVGRGLFRTSKGLIINADVNGGYNIGRKAVPEAFMVDGIEGVGLHPYSVTV

SEQ ID NO: 22514 - protein, 348 aa, Gammaproteobacteria sp.
VTVDASAARRYVGWRCRLYPSPAQDAALLSCRNGLRELANALLAASQLRYGETGRRLPLSEMRAFAREWQRKPEHRGPPASAIYRVASDLDQAFRNWFSKPGRRGQGGFPQIKRFGQEPGIYLSNQGLRFEHNRVRLPKFGWVRWKGGKLPGKRLSGSRGRKTRGLLSGRAWLDAGNRWMLSCLFECAPLTRVEPRTDKAAVRQKGNEITVSADGGSVHVVRESRTLRNARRRLARLERRLERCEFGSEGRKRALALVRNQARKVRNRRGDLQHKTTTGVVLDAREIEVEGASSELLRQLEYKAEWHGRRLKVRRGPPKPGIGKPQRARRPGSRSMKRESRTRRPKAL

SEQ ID NO: 22515 - protein, 543 aa, unknown
  TnpB Polypeptide
MWKEAYLMRTWTINYKRNSVLREYFSRATTDTRCMRNTANFYIRNTMTGLRKSPEERTKAETEVLHDVFTGIQKANLHSEERYAKKMDQLRQTGGMKSAVACSKMKRTVFAYPTREQWFLSYGTLDAIFKATGNPVYCRMDGQVNQNAIRKTEKAWVGYFHARKEYLAHPEKFQGKPKIPGYIRTTGSTAWWTIQTARLSFVHGKAYLRFVHCKEPLCIGKTSAFTGMTYIKTEVKPYHGQFCVMVTFDDHSKETPVPEHPSRILGVDVGLNNLLAVAGNFGKHPFLIKGGPVKAVNQWFNKHRAKLLSDRTRGLDSTRSEKNSHALDALSRKREDVLRDVFYKCAWYLLQYAKHHNVDVIVVGYNKEQKQEIEMGKANNQAFVSVTFEKLRQCIRVVAAKLQIPVVEQEESYTSKADMTAGDTIPTYGEDDEKKVFSGTRTKRGLYRCHDGKLMNADVNGAANILRKRYPDAFAGQDLSYLQATTNVVEIRDWYVPGGKKRPHKKHHPSSVAKIRHSERKNRRRELLQVFGKSRKTWQKKAA

SEQ ID NO: 22516 - protein, 364 aa, Solobacterium sp.
MYRTYILRLKPNKTQTKLLDKTISCVQKFDDIYFAQIKDTKIKSHREMLSIARNTDEDLKSINDNILFCEIDILKDVKNKKNFFSKFQFKTNLCKYASSIDEVIFNDSINIPSIGTIKLFNKRDYDQVEQFKSIIVYRTIDDKYFVNILFKKKENKITKELDPNNSIGLDYSSPNFYVDSNGETPDKPVIIKKYDKQIMKLQSKLKESEDDEKLHHKFSIEYANLYNDIKNERKDFIHKTSTKLANQYDYVFVENINLAKIATHRNLGKATNDNAYGKFLKVLDYKMNDRGKKLIRIDKFYPSSQICNNCGYTYQDLTLKQRKWICPECGVLLDRDINAAINIRNRGIQLVNKRTAGQSASYFA

SEQ ID NO: 22517 - protein, 436 aa, unknown
  TnpB Polypeptide
MAGHHKICGMETYLRERDGWKRRPPFCRLVSAFQGEQKNTDSMKRKQKRAYRYRVYPTDEQKRLLARTFGCVRFVYNWALRRRRDAYHQEQVRIGYPETSALLTTFKQQEDYRWLNEVSCVPLQQTLRHLDRAFRNFFEGRSGYPVFKSKRGKQSAEYTASAFKWNGTSLALAKMDSPLDIRWSRPLPKGCKPSTITVTKDPANRYFVSMLVEEEIQPLPVNNSMVGLDLGLKSLVVLSTGETIGNPTYFARDERTLAKAQRRLARKKKGSKNRAKAQLKVARIHARIADRRRDYQHKLSTRIVHENQVICVESLSVKNMVKNHSLAKAISDVGWGELVRQLEYKARWYGRTLVKIDRFYPSSKRCHACGHLLDSLSLDERFWTCPACGVFHDRDVNAAKNVLSEGLSAAACGERVRPGRAKVPAGTARRTRKLYS

SEQ ID NO: 22518 - protein, 418 aa, Thermus sp.
MRVTQAFRFELDPNRATRVLLAQHVGAALFAYNWGLNLCKKALEEGKAIPNAAQLHREWNRWKRENAPWWTEVSKCAPQEAFRDLEKALRNWRQKRARFPRFKKKKHMDDNTARLTGSIRVFPRHVQLPRIGKVRTKERTDKLLALLESNKARILSATISREADRWYVSLTCEVERPDPPQREGEPMGIDLGLSSFLVLSDGTRIEAPKPLAKSLRLLRRRSRQLSRKQKGSNNFRKASLRLARLHRRVQNIRRDFLHQVTTWLAKTKPVMVVEDLNVRGLARGPLSRPVADVGWGTFRRMLEYKAGWYGVRIIVAPRHFPSTKMCSRCGWVGGPEDAPLRSDLPVSAVWAGDRPGPECRLEPEAVRAGRPKRPYREFPGKSRLWRSLWRRNGWYQPVYELWVDEAGSGHWSAICRVK

SEQ ID NO: 22519 - protein, 204 aa, Photorhabdus sp.
MGLSHYLIQSAGEKVNNPRHLINAARNLRRKQKSFSRKQQGSANRGKARLRLAAVHERVAHARADFQHKLSRTMVDENQAIIVETLKSANMMKNHHLARAIGDAGWHGFIKKLEYKAAAAGVHLVKLDQWFASSKTCHCCGQKVPEMPLSKRLWQCPCCRVEHDRDINAALNIQRKGITELQAAGLVVSAHGGQRKSVIKTVAA

SEQ ID NO: 22520 - protein, 359 aa, Hydrogenophaga sp.
VDTIKTLKLRIRDKHASALRAMAREVNTVWNFCNETSARAVREKGKFLSGYDLQKLTDGFSKCEGVRIGSATTQQVCEEYATRRRQFKRSRLSWRVSNPKSSKYSLGWIPFKSRAARYKGGQVHFAGLQLGLRDSYGLGSYELRAGSFSEDARGRWYLNVQVKIAELVGPRVPVTRSVGIDLGLKTCATTSDGQKIEGRFYRSLEGKLGLAQRARKKRRVQAIHAKIAHQRKDLLHKFSTQMVANHAAIFVGDVCSAKLVQTKMAKSTLDAGWSMFKTMLEYKSREAGVVFEEVPEAYTTQTCSCCGVIPASSPKGRAGLGIREWTCDACGSVNDRDVNAARNILALGHERLAGGIPVL

SEQ ID NO: 22521 - protein, 264 aa, unknown
  TnpB Polypeptide
MTAVRMKLHRPISEKWKLKSVTVSREPSGKYFASLLFCCENQTAEKRPAEKFIGIDFAMQGMCVFSTGKRAEYPMFYRNTEKKLAREQRKLSRCQKGSQNYKKQKKRVALCHEKIRNQRKDFQHKLSASLAESFDAICVEDLNLKGMAGGFHLGKGVHDNDETVFIKPVIYAQNKEYCYVDCADIAEGTVLKKPSSDETYTIGETEALKGVYNINKGYTMFRLIDILYEYGDYCIVSDKTDYGVTLYDHIILNGSSVKENDIIY

SEQ ID NO: 22522 - protein, 500 aa, unknown
  TnpB Polypeptide
VSRTYPRTPYAAFDKDGDPLDLDEVLEGIRADAELVAHYALQEITEQNLALVTYFDRLKPSGAGYMMNLKLPSEVKKHLKSGSSRLERMFREQVVTNLRSWAARSGVVSRDYTGYVSAGWVRTVNGSKPTALQPRLALSATDDHYRNMSVTLERISLEMVVQGQWVTLYFPTPPQLLEQGCEPGVPDIWVDKDDRVVFGFHGRTNPGRPEFSSRYVIGVDVGVTNPTAYVVWDTDRQEIVEQSLLGQRARSLSNKIKRGQVQVASLKRKGKDEEAVSHRQHLSNRRKELSILIAQEVADAAWRYGNAIVSFEDLSHIKNTMKFGRWFRGEVLRRTRDMVEADGGRVLKVNAAYTSRKCHICQSDLDVSDYSQPYCSVCGITHHRDLNAAANIAQRANHRKACQTRKRHATKAKRIRRSKCHSRPLKHPGTKNKPTPKAPQNRPKTHTPATPSREVSKGMCPAESRVSVVDHATWFQTTSGTTVLKENQPANTVGWVHARE

SEQ ID NO: 22523 - protein, 283 aa, unknown
  TnpB Polypeptide
VDVGVTNPTAFVVWDTEKKEVVERSLLGQRARSLSNKIKRTQTQVSSLKQKGKDEEAISHREHLSNRRKELSILVAQEVADVAWRHGNALVVFEDLSHISNTMRFGRWFRGEVYRRTRDMVEADGGRVLKANAAYTSRKCHVCQSDLDMSNYSQPYCNTCGITHHRDLNAAANIAQRANVKKACQTRRRHATKTKRIRRSKCRVKPLRHPGTKNRPTPKAPQNRTKTLAYSPLPKREVSKGMCPAESRVSAVGHNAWFQTTSGTTIPVENLPTNAVDWVYPKE

SEQ ID NO: 22524 - protein, 510 aa, unknown
  TnpB Polypeptide
VKYYDTVTRHRFTTENRVDVEQVSRDLAQMVAWMAKAEQEVLASQEFHDLALKALKGDRPTGSLNSWGRKRLSRYEFSFQKHNMNEMLVTNAVGALEDYAISVGLFQVMNTHPKETSPEKILSCYRRTYPDAPQPTSGMIRAHLIRYHKKGERKASLPGVSAKLNLAVCDTYFAPKAVRDDSDPLNVVVQVKTPTYGLTKISLRLPENSERFGDGKVCRPTIRLNSKGRVVFDVAIEHEVDTRQTKNVMGVDLGKVEPFVATVVDPRAKYRSAPYHANYKKRIGSLVKKKRQRRTLAAHLYERANLCEKHNRDFHAQVLRTEAKRVSAKATRIKHEISQCIASQVVGIAEKSDAHLSLENLSWLDSQGGRWPHAEIQHRIEKTAKRYGLKVVKVSAKDTSRTCSRCGGRVSNNSKTRVGACTVCGFSLNRDVSASREIALRATSQSSRSRERMRLLLRQRTLERSSAVTRQSKPVTVLGGIQGHTGTSNNCLEATLMMVRDNLDSRGFPT

SEQ ID NO: 22525 - protein, 458 aa, unknown
  TnpB Polypeptide
MTEQNLALVTYFDRFKPAEAGRRMGLFLPSEVKRQFKSGASRLEKMFQEQAVTALRSWAARTGVVNRAYSGYVSTGWRRTVSDSKPSSMKPRLALSATDKGYHKNFRVTPERISLEMVVQGQWVTLHFPTPPQLLNPGCEPGVPDIWIDKYDRVMFGFHGTVDPGRPKFSSRYVIGVDVGVTNPAAYVVWDTEKKEVVERSLLGHRARSLNNKIKRAQVQVSSLQRKNRSKEAVSHREHLSNRKRELSILIAQEIADAAWCYDNALVVFEDLSHIKNTMRFGRWFRGEVLRRTRDMVEADGGRVLKVNAAFTSKRCHVCQSDLNMSDYSQPRCTTCGITHHRDLNAAANIAQRANHVKACQTRKRHATKTKRVRRSKCHVRPLKHPGTKNRPTPKAPQNRPKNRTVATPFREVSKGMCPADNRVSVVGHMEWFQTTSGTTVPKENQATNMVDVVYPKE

SEQ ID NO: 22526 - protein, 430 aa, unknown
  TnpB Polypeptide
MSTTSYISGIIHDTKYIIGVMSLKRYRYRAYPKKGQKQPIAALFGCVRVVYNDALAYSEEQYKDTGKKPSSKELSARLTHLKQTPEKAWLKDVSAVPLQQSLRDLDKAYTNFFTSVTGKRKGVRIGAPRFRKRSSRQAARFTSQAFKVRQTTHGVGFVKLPKIGEVRFNLSRNLPSPPTSVTLIQEADGRYYVSFVVESTPAPAPKPTAYAVGVDMGLKDLAIAVNSNGGSTVFANTRPLKQAEKKLARLQKQLSKKKKGSNRYVKQRFRVAKAHTKVRNVRTHYLHHVANQIVNENQVITLETLSITGLARTRLGKSVLDASWGHLNRLIEEKAAEHGRTLIRVDRFAPTTQICSICGTPNGRKPLNIREWACTGCQSHVDRDLNAAVNILLAAGLAESLNEYCGDDVRRLLANAVVVDAVHPPKVTTA

SEQ ID NO: 22527 - protein, 317 aa, Micromonospora sp.
VSSRRPAGELAAALRAHAEHPFRPLVVGYLGQLTVLPRLGRLKLHESARKLARRVDNGTARILSATVRRDGGRWHVSFTCEVERAERRPARPESVVGADVGIKHLAVLSTGELVDNPRHLVAAHARLRALGRALSRKAGPDRRTGQCPSHCWRRAANRLGRAHARVANLRRDGLHKLTTGLAREHGTIVVENLNVSGMLRNRRLARHIADAGFAEMRRQLTYKTEWNGGRLLIADRWHPSSKTCSGCGTAKAKLALSERDHHCEACGLVMDRDRDTALNLAALAAEFDTAGSGPVAARGADQKTRARGQVAVKREPA

SEQ ID NO: 22528 - protein, 480 aa, Moorella sp.
MITVPGRIYPDAIAREELVSFMGRFQAAKRSAYQALRRGEEAGEIVKALYEKFFPNARWCQWAVEDAKSTIESQQELVKMYVSDLKAKIEKSEEKLERARDRLHRQGIHTRLNKLRAKLAYWEGFLERGEVPPAVFGGKKNLLLLQEGKLSKEKWRELRSNSFYSVGQANMKGLEGQHGNANTEIVYHDLTGAFHLNVYIPPEPENKTGRRRKEEEWITVPLEIPARYRDLLILRLLKGEAYTVRVVRKDGRFECLISFPLGDTASVDKNSVMAGIDLNPEVAAVTVVSPDGNFKASHCFWCPELVHVSHEKREWLAGNLVKEIAAWLKDIGVKQVALEELSFAQDHDTNRYFNRITHNFCKKLLFNRIVVALRKRGIAVFTVPAKFTSLIGYFKYSRVYGLSTHQAAALVIARRALGFTEKIPKEILKMLAPGEGWQHFKLWGRLFGLFKAARKRAIRKDCLFRRWNPEDWLSFMFNSS

SEQ ID NO: 22529 - protein, 281 aa, Lachnospiraceae sp.
  misc_feature (230)..(273): Xaa can be any naturally occurring amino acid
MVKAIKAMLIPNNVQKTKMFQYAGASRFAYNWALAREKENYEKDGKFISDAELRKEFTKLRHSDEYAWLLSISNNVTKQAIKDACTAYKNFFKGLQKFPRFKSKKRSMPKFYQDNIKIQFSNTHVKFEGFSSSRKRNKQKLNWVRLAEHGRIPTDAKYMNPRISFDGLNWWISVCVEFPDCIEKLNDDGIGIDLGIKDLAICSDGAKYKNINKSQKVKKLEKQKRRLQRXXXXXXXXXXXXXXXXXXXXXXXXXXXXXXXXXXXXXXXXXXXXKVTAKQIM

SEQ ID NO: 22530 - protein, 378 aa, unknown
  TnpB Polypeptide
MMHHLWIAKNLWNELLFHAKQTYANYGRFPTRNSLQIMVKKSGLYSQTQQEIAHRIEMAIWRYCRLKRECKKAGFPRFKSFDRMKSVVYSQKDFWLDKKLEVIPFGAIAIVKHRNVSGVIKTLSLKRESSGRWFAIFSVEEPKGLKATNDGPSIGIDLGLRTFATLSDGTRIANPRHIRRYEEELSFRQRKVWRKKRRSRNRKKAIIRLARTYERLKNSRKDFLHKITRKMAATYSMIALENLACQEMAEQRFGKHINDAGWDTFADMLCYKAENAGCKVVFVNPKETTKKCSNCGKIQDMPLSARSYQCSGCGMLKDRDLNAAENILARATAGHAGSNACGEEREGMPLNETRNREQDSRCATTSLSHEKREPAERI

SEQ ID NO: 22531 - protein, 303 aa, Clostridioides sp.
  misc_feature (294)..(302): Xaa can be any naturally occurring amino acid
MYPNKKQQELINKTFGCCRFVYNKYLAKRIEVYKNDKETFTYKQCSSDLTNLKKELKWLKEPDKFSLQNALRDLDNAYKKFFKEKVGFPKFKSKKINRFSYKTNFTNGNIMYCGQHIKLPKLGMVKVRDKQVPKGRILNATISKEPSGRYYVSLCCTDVDIGAFENTNNHIGLDLGIKEFCISSCGEFIENPKYLKKSLNKLAKLQRELSRKTIGSLNRNKARLKVARLQEHIANQRNDFLQKLSTKLIKENDIICIEDLQVKNMIKNRRLSRLISDVSWSEFIRQLEYKANWXXXXXXXXXT

SEQ ID NO: 22532 - protein, 360 aa, unknown
  TnpB Polypeptide
MLAFNAACQYISDTAWEAQEFRRVPVHRLTYYEARALFGLPSQLAVRAIGVVTDSYKADKERKHTFGQRSAVVYDERLCKVGSTTIALRTLDGRQSIKWAGGGYQKSQLAAALRIGECDLIYRADKDRWRLAATIDVPDVPPASAVDVIGVDQGIVNVATTSDGTMYGGAGVLGVRRRYYHMRQKLQKKGTESARRLLKRRSKKEKRFQADVSHTITKRIANHAHATGRAVGCEDLKGIRSRVQVSRSQRRTHSSWAFGQFTAYLAYKCQERGVPFVLVDPRYTSQTCSRCGHCEKANRHSQSSFLCRSCGFAANADWNGAENIRVKALDVLSAGVRSTTRTLGATDVVAYEQASGLSRG

SEQ ID NO: 22533 - protein, 183 aa, Ruminococcus sp.
VTFDGINWYISVGIEVNENTSKPLNDGIGIDIGIKTLAVCSDTKEYKNINKTAKVKKLKKKKRRLQRRISKKYSKNKKEVCYCKTRNIIKSEKQLLKITHRLTNIRHDHIHKATSEIVNRQPKFIVMEDLNVKGMMKNKHLAKAVQEQCFYEFYRQIQYKCQWQTDIIRQAKNVFVVEVSRKI

SEQ ID NO: 22534 - protein, 409 aa, unknown
  TnpB Polypeptide
MQRLQAFKYARMPTGEQQRPLRRLAGSCRFVFNKALALQKERYERGEKKPGYAGLCKELTEWRNSTETAWLSDAPVHPLQQALKDLERAYSHFFAKRTDFPRFKKKGRSDRFRYPDPKQVKLDQANRRLCLPKLGWLHYRNSRDVLGPVKNITVRTSCGKWFVSIQTEREVEPPTPSGGAVGIDLGVARFATLSDGTFYAPLNSVKRHQNRLRKAQLSLSRKTKLSSNWTKSKAKIQRLHARIGHARRDDLHNATHTISQNHAMVCIEDLRVRNRSKSAAGTTEEPGRNVRAKSGLNQSILDQGWFEFRRQLDYKLAWNGGWLVAVSPHNTSRACPACGHVSADNRQTPAQFLCVKCGFEENADVVGAINVLRAGHARFACEVSDAVRSPAAGTHRSDSGTAQCRVWAL

SEQ ID NO: 22535 - protein, 382 aa, unknown
  TnpB Polypeptide
MIRSYRFRLQMSDRIGRAFEAAMSSSNQIYNAALEERISAWKKTRKSIAKFDQFKSLTQIRSDDPAMASYAITMLRAPLVQVDEAFQGFFGRGMRGGGKVGFPRFRSIKRLRSFGFTEASGWKLKGDVLRMKGLPAVRLKMHRPMEGIPLKLTIRKDGRGRWFASIAVRLPDVFGPTSKGALGIDLGVENIATDSNGGVYGKVCPDRSARRKHIEHALARQKRGSRRWRQTQKRLARQRSREASARRTRHFQLASKIVKSGPQIICVENLQLRNMTRSAKGNIEEPGKNVRAKSGLNRSILDAGLAQFVQILTDKAESAGRLVVMVDPRGTSQECSDCSKTVTKPLKQRWHSCSCGAEYHRDHNAARNVLHRGVVAPLRQAA

SEQ ID NO: 22536 - protein, 381 aa, unknown
  TnpB Polypeptide
MIRSYRFRLQMSDRIGRSFEAAMAASNQIYNAALEERMDAWRKAGRSITKFDQFKSLTQVRADDPAMASFAATMLRMPLEKIDEAFVGFFDRVKRGQTPGFPRFRGLKCRRSFGFTEASGWKLKDDVLRMKGLPAVRLKMHRPLEGEPLKLTVKRDGRGRWFAVIAVRLPDVFGPTAHGAVGLDLGVENIATTSDGIVYGKVSPDRSATRQHIEHAISRQKRGSRRWRQTQKRLARQRSREASARRTRHFQLASQIIETGSQIICVEKLQLRNMIRSAKGTVKNPGSNVRAKSGLNRSILDAGLSQFIQILTDKAESAGRLVVTVDPRGTSQECSDCGEAVTKTLRQRWHSCPCGAEYHRDHNAARNVLQRGVVAPLRQAA

SEQ ID NO: 22537 - protein, 407 aa, unknown
  TnpB Polypeptide
MSNETTHHKTFKYQLEPTPEQEQALETVLWRCRELYNAGLQERKEAWEKCSVSITFARQSAQLPAIKQARPEYGDVNAQVLQDALHRLDKAFERFFRRVKNGEKPGYPRFQGKDRYHSFTYPQVGAHGGAQIDGCLLSLSKIGCIKIRLHRPVEGIPKTVTISKEADGWYACISCEGVLTQPLPQTGKVTGIDVGLKVFYVTAQNEVCENPRHFRKAEAALRRKQRKLALCEKGSKNREEVKQQVAKQHQQVKRQRADFHHKESLHLIREYDTIYLEDLQVKNMVKNHHLAKSISDAGWAQFRRILACKAAWAGKRVVAVPPHYTSQVCSRCGAYVQKSLSVRTHICPECGLVLDRHHNGALNVLQVGLELDQQAIQRIAEQSQAGAPPSGGNVVGCHKRSPRSPVR

SEQ ID NO: 22538 - protein, 265 aa, unknown
  TnpB Polypeptide
MLPHGTSGTLRIPLPETVSLPGRLMEVRLSYGTVRLVCKVPEAPRPQQAIIGVDLGVNTLIAASDGGTVFLVSGRGVKAVIQWRNKTLASIQQAQSSTSTGSLRWKRLQRRKYRVLGKTKRQVRDATHKATHAIAAAFPGATCYVGEPFNDAARRLGRVHAQQVSTACTRKIIEQLEYKTAGAITLSEAYSSQTCPVCGERSKHRRIYRCPHCGTTAPRDAIGAVNILALGTHGAMLPGRAVPQHIKYLRPWRSSSGGHPARSSA

SEQ ID NO: 22539 - protein, 206 aa, Anabaena sp.
LQNRKRKQKKLSRKKDKTSNKRRKAKRLVAKVSSKISRVREDFLHKLSRKIAYENKVICVEDLAVKNMVKNPNLAKAISDQGWGMFLTMLKYKAERFGHTYQEVNRFFPSSQLCSETLLPIPMLQNGYDSLGVRFVDCPHCQKQHDRDINAATNIKNEALRLLVLGTTTSAQGGNVRPKTSGRKKSTKSEAVPNDLGSLHRTARSM

SEQ ID NO: 22540 - protein, 388 aa, unknown
  TnpB Polypeptide
MDITLTAKQQIFPDEKQVQTFKDTMNTYTRALNFVSEWIFNHNFNLKQFSIHKEIYHTVRETFSLKSQLTQNAIRDVIARYKAVETQLKSKGGQLEHLWYPLNFKTPQLTLTRDRDYSFLKTGQVSINTNNKREKVDITFKNREHFLEGHRLGEAKLITKNGRWFLYISATKEYSEFQKEKVQHVVGIDRGLRFLATTFDEKGNSHFINGKEILAKRRHFKKLRQSLQKKNTKSAKRRIRKIGQRENRWMTDVNHRLSKALVDCYGPNTLFVLEDLTDVRFATEKHHKDRRYEAVSWAFYQFEQHLAYKSRMNQSEVLKVDAHYTSQRCPKCGTIDKENRLNREHAFCCKNCAYKSNDDRVAAMNIQKLGTEWISGTERPCYKKVEIN

SEQ ID NO: 22541 - protein, 412 aa, unknown
  TnpB Polypeptide
MNMNNHKNSMESVKAYKFRIYPDTTRQEEINERLILAQQFYNKILEKSITSYQNEKAKVSMAQLNRFVKEIIQKDKKYLKLYSQTRCEIEFRLLKAYQNFFRRIKEGNKKTGFPRFRSRDRYKSITYPQDNGSFSIRKGRLRVSRIGTMPIDLHRKIEGTIKTLAIKRKGKKYYAVFTTINEIKVPEVKNTNPVGIDLGLDSFIAVSDGTKIQKPKFMQQKIKKITHWQRIVARRNKGSKRREKAKMRLQETYEYSTNQSDDYLHKLSSTLVNSGYTSFAVEDLNIQNMMKNHRLAGSIHDASWNRFIQLLSYKAESAGLGIVKVNARNTSRECSNCGNIQDMPLSERAYNCQRCGMSKDRDINASINILKRTTLGQRGSHAQGENVRPKQEAVLEELRTDKTHPLLDAVIA

SEQ ID NO: 22542 - protein, 370 aa, unknown
  TnpB Polypeptide
MILIRTVKLKLNVDQNIILPTFKAYTDSYNYICSVGFKDRNFNKIDLHKKTYKYCREQFKLPAEFVIQSREQAAESIKSVTQAERKKHKKFKCPKSKLMSLRLTKNSFNIWFDRSEVSVLTINGRLRCKVFLPDYFQQYFSWRRKGATLSLKKDYIFLNIVFEKEVEDIQLDNPLVLGIDRGIKNIATLSDGMVYSGDKIFKIKQRYQTIRAKLQSNGSKSAKRHLKRLSLKENRFVTDTNHCISKDIVKRCNPGTIIVLEKLTNIRENSRKIRKAERAKINSWSFYQLEQFLKYKALAKGCDIQYVDARYTSQKCSRCGYIYRGNRKTQEHFKCAKCGYENNADLNAALNIANNFRASVNKPIVASSNA

SEQ ID NO: 22543 - protein, 341 aa, unknown
  TnpB Polypeptide
LTNDTQLIKRFDTSRLVTVSSVGRGKLGWMSRYTTFKFCLDPTVEQHHMLARHAGASRFAFNQCLQIVKTALTHRKTGPSVDVPWTGFDLINTFNAWKKTESAGRVFAVGTESTIDTVVTGLAWRDEVCQQVFEEAAVDLGKGLKAWSDSRSGKRKGKRIGFPRFKKKTGAVPSFRLRNKHPKDKPPAIRIGDSQRPRSITLPGIGQIGVHDDTRRLRRMLTKNRAKILFATIAQHAGRWWVSLNLEAAELRPAHQHPPRPDSDPGDWVGADRGLSAFLVAVRPDGTEVDRITDAPKALTTGMKRQQWLAKSLSRKKKGSHNPCETSPDDAGTDVHTAPAA

SEQ ID NO: 22544 - protein, 363 aa, unknown
  TnpB Polypeptide
LTRKNFRCILSSFKIVFVIPKRNYLMEIRLSHKICLDPTYKQEQYFRQACGIARFTWNWALAEWKSKYEAGFKPSAFELKKQFNAVKPIEFPWMYEVTKYASQQPFIHLQTGFNRFFQGLGAYPKFKKKGHHDSFYIGNDHIKLDGKHLKLPKLGWVRMREVLRFSGKVISATISRVANKWFVSLNVELDQAPKSCDSQAGVGVDLGIKALATLSNGDAFEAPKPLKKFLKKLKRMQCSLSRRVKGSQNRQKLRQKIALVHAKITNIRQDSLHKLTHYLTDSFGGIVIEDLNVSGMLKNSKLSRAIADIGFYEFRRQLEYKSQVKGNYLLIADRWFPSSKTCSNCGQKKEKLKLSFRGKSFCE

SEQ ID NO: 22545 - protein, 378 aa, Clostridium sp.
MNTVIKGFKYRIYPTEKQEIQLNKTFGCVRFVYNQILAKKIDLYKEDKDNKQLKNKTTCNNYCNRELKKEYPWLKEVDKFALTNSIYNLDNAYKKFFTEHIGFPKFKSKKNHYYSYITNFTNNNIKVDFNNNKIQLPKLKWIKAKLHREFKGKILFATVSKTPSGKYFVSFNVECEHQELKQNNNKIAMDLGIKDLLITSNGTKIDNKKLTYKYEQKLAKLQRQIAKKKIGSQNWKKQRIKIARLHEKITNTRKDNLHKISHKMIKENQLIFSENLNIKGMVKNHNLAKSIHDCGWYELTRQLTYKSEWNGRKYHKVDRYYPSSQLCNVCGYKNEDTKNLNIRFWECPQCNTKHDRDENASINILNQGLKELELEKVS

SEQ ID NO: 22546 - protein, 460 aa, Caldivirga sp.
MPGEGVYEVKPTNRRTNVVRLLPNGAQERKLRKLADACARLWNELNYERRQQFFRGEGIDFRGTWSKYYEKYKGILGVNAQAVMQKSNEAWNAFFSLLKLKKENKLPPFMKHVSPPGYWKDSVTKQRRLILVVRQDRYVVDEQRHVLILKDFKMAIKFTGRLRWYGKQGRLEIIYDETRNAWYACIPVEVGVEETKTGRKSKHIVKGERKVIQVESPKGNKVASIDLGINNLASVVVDDGTWLLYKGVRVKEDYFYMQRLISRIQSLRDTLKGKLLSDAIDELNREVRRLSGKLRRRLLHLYRNLASHLVKTLHELGVSTIYLGYPFNIAQQKGNKFNTNMWSYSKLMEAIELKAQEYGIRVFEVVEYNTSKYCAYHGVEVKRHPRGVVSCPFGHKLHSDLNGALNIMRRAIGKIPPVIKKPLSFIVDHNKVAPTKREVTPKTPEHPHPLRRGGGQYTPE

SEQ ID NO: 22547 - protein, 400 aa, Cytophagales sp.
MKMIHKSYKFRIFPSKKQEELLSKHFGHCRFVFNRFLHERKEAYEADKTSLNYYANAKSLTGLKKETEFSWLKEVNSQSLQASLKHLDTAYKNFFKQQNRFPRFKSKHERQSFKVPQNVFVVDEKLIIPKFSEGIQLKQHRPLEGKILFATVSKTTTDKYYVSITCEQAYIPYPKTGKAVGIDTGIKELVILSDGSRHENIKSLKTSLKKLKYEQRQLSKKQKGSHSRLQQKRKLVSVHEKITHIRKDYLHKVSTEIIKNHDILVVEDLAVKNMLKNHRLAQAMSDVSLGTFYTMLEYKAKWNEKDYVKIDRFFPSSKTCSNCGWINQELKLSDRKWMCSDCGEIHDRDLNASKNILNQGLKILSGYGTQSDIKQKREEALSLDKSANPEALPISFAVGG

SEQ ID NO: 22548 - protein, 242 aa, unknown
  TnpB Polypeptide
MIVLEFKLAGAASQYAALDEAIRTTQFIRNKCVRKWMDERGVKPYDLNRYCAILAKEYAFAGKLNSQARQAAAERAAAAIVRFYDNCRAKKPGTKGYPQFQKDCHSVEYKTTGWTLDAARRAITFTDGFKAGRFTLKGTRDLVGYALAQIKRVRVIRKADGYYSQFCIDAERRASVEPSGRALGIDLGLSHFYTDSEGATVENPRHLRRSERALKRLHRRVSSKVKGSRNRAKARGRLSRNT

SEQ ID NO: 22549 - protein, 402 aa, Planktothrix sp.
MLDVLKVRLYPNKEQQTVLAKSFGCCRFVWNYYLEKTNTQYRETGKGLNYNEMSKDLTQLKKQPDYLFLQEATAAVLQQSLKNLEAAFKNFFQKRARFPKFKSKHKKQSIRYPESCSIRGNGVKLPKLGVVKARIPKAISGKIKSVTVSKTSTDKYFAAILFETDDFILNKTGKISGIDLGLTSLVTIFDGETYSKVDPIKPTRKYAKRLRRRQQALSRKTKGSNNRKKQVKKVAKVHEKIANTRQDFLHKLSRKLVDENQVIVVENLCIKGLARTKLAKSVLDAGFGMLINFLGYKLEREGGKLIEVDRFFPSTKLCHCCQFKNNSLNLSIREWVCPSCQTHHDRDENAAHNIREEGIRILSTNTAGHTEIQACGEDVRLVDACIKKHSSVKQESPVTAQA

SEQ ID NO: 22550 - protein, 432 aa, unknown
  TnpB Polypeptide
MTRVTRTVVVKSVRLPRKVFRVFVEFEGMYRNMVEQLTMYAVRNNVRSFTRLKALKYYEMRNLHPQLPSHYVYTACQDASTRAKSFLRLKKLGIAEREYPEVRRVSIWLDAHLWKPNGLTSIRIATHKGRVRVELEPHKQYWKYVNRGRRLVSEAKIKLDRRNRQLIIYLSFIKEVKEYKPRGHLPVDVNENNVTILLEGVAYLFETNQEKLILGYYYRRRRIQERYDRHYGVKSRIKRKAMTRLREREKKNDNRWKIANIIVRIAYEKRYAIVLEKLGKKPANSMIKRIKNRQLRHRTFQASFRGIQRAVEEKAKEYGVPTLYINPRNTSRLCPVHGVPIKYSNGSRIGRCSKGGELWHRDVAACWNLLLKALRGDGSDAPSPAGHSLDGSSVPLSSTATHEPITLKKGLWTRWNSLDVTINLYKMIGMTT

SEQ ID NO: 22551 - protein, 414 aa, unknown
  TnpB Polypeptide
MKVYVAYKTELKPNNVQASQLNQAFGGARFAYNWGLAYRKDLYEREKKSINSIGLHKVLNSLKPTEFPWMYESSKCVFQEALRDLDRGFDNFFRNVKQGKKAGFPKFKKKGVSKDSFRLTGSIHPDESSIQLPRLGEIRLKESKYIPFNGKVLSATVSKHAKRYFVSVLVEKDLPTEFSLTQDTFGVDLGIKTLATVSNGMTFENPKAYRKFLQRLKRQQQILSRKQKGSNNRRKQRDKVARLHFKIANIRKDVIHKMTTKLVKAKPAKIVIEDLRVWNMIKNHCLAGAISDAAFGEIRRQLVYKTMWSGIELLVANTFYPSSKTCSKCGHVVDSLGLEERIFTCPVCGHSLDRDFNASINLQNYQPKINIVSSTGIKASGEKTSAKRTYTLRKVVSMNEEHSRVVACQLSTSL

SEQ ID NO: 22552 - protein, 375 aa, unknown
  TnpB Polypeptide
VKAAFKYRLYPTKAQAQFLDRELREACDLYNCAKQERDDAWKTCHKRINYYDQANQLKAIRADGCLTLANFSCCQDVLRRMDRTYKAFYARVQRGEKKVGFPRYRSARRYDSITFPSYGDGCRLLDTGKLRVQGAGHIKVKLHRPVEGAIKTVTIKREAGRWFVVFSVERDSSSLPASTAEIGIDVGLTSFAVLSNGAEIENPRYYRKAEARLRRCQRKVARRKKGGNRRRKAVRLLQCAHVHVGNQRRDFQHKISRKLVNKYGIIAVEDLNVKGLAGGMLAKSVHDAGWSQFLNYIAYKAADAGREVVKVDSRGTSQTCVCGARVPKTLADRWHDCPACGLSAGRDHVSAQLILQRGRSARSSANVEVVVSCVA

SEQ ID NO: 22553 - protein, 493 aa, Mycobacterium sp.
MARHTTFKFCLDPTVEQEVVLSRHAGAARFAFNQCLRIVKTALTDRKANPDIEVPWTGFDLINTFNGWKKTEDAGRVLTVDTTGVATPVVTGLAWRTEVCQQVFEEAAVDLGKGLKAWSDSRCGKRKGKRVGFPRFKKKTTSVPSFRLRNKRTKAGRAAIRIGDGVRPRSVTLPVIGQIAVHDDTRRLRRMLTTGRAKILFATVTGHGGRWWVSLNVEAADLHPDRQHHPDEDGGWVGVDRGLSAFLVAATADGTEVARITDAPKALATGMAKQRRLAKSLSRKKKGSHNRKDAAARLGRHHHRVAGVRRHFLHQVTGELVKTHDRIVIENLNVAGMLANHRLARAISDAGWSEFARLLKYKQAWSSGQLVEADRWYPSTRLCPECGVIDSAMTLADRVFTCGCGHTADRDTNAARNLAPWGHTHHDLHRTPDPQAGGRATTPADGTALTNTLVLVKPARTTRESTFTPHQPPEPTTPEKGGAEHPPESFDTL

SEQ ID NO: 22554 - protein, 417 aa, Methylobacterium sp.
MPDALSLSRTELPEEIVEGSIVRGFRYKLKPSPEQEISLNQFAGVCRLVYNLALEQRKTWGRRYRISYEGQAAELTKLRAEFDWIRAVNVSCQQQALRDLDKAFKDFFAGRMSYPTFRRRGENDSFRFMGRDVPVKRFNGKWSSVKIPKIGWVKFRNTRPTRGVIRNATISLDGQGWHVSFVCEFAHKTPVPLPKVVGIDRGVATTIALSTGEMWTIPSSIERLEVLKRRAQRIASRRKRGSNRRHRALTRANRLQAKQRRIRRDFHHKVALDIATRFGVAALENLNTRAMTASARGTREQPGNKVRQKSGLNRAILNSGWFLFKSILTYKVEERGGQVVTVNPYLTSQTCAECGVVDAKSRKSQARFVCISCGHADHADVNAAINIKRRWSTPLLDVEGCGCVPVEASTGGVQQCL

SEQ ID NO: 22555 - protein, 350 aa, Methylobacterium sp.
MLRDMCDLYNAGLQQRIEAYRRRNVRLRYLDQASELKACRAAAPDGVARWSFSALQQVLRRLDQAYADFFRRGRGFPRFRASSRFRSVTFRVGGGLTLKKDGRLSVVGVPGGIRVVWHRDLPANARLGTAILTHQQGKWYVVLSVEAEFAEACGVGTVGIDLGLNSLIATSDGDLVGAPRFERKAQKAQKRRQRALARCQRASKRRLKVKARLAAGSAKIARQRRDHLHKISRSLVSRHQGIAFENLNLAGLKRGMLARSVHDAAWSTLVQLTTYKAESAGASVVMVDPRGTSQTCPSCGTIKPKTLKIRTHTCDCGVSMDRDVAAAIIVHQRGFGPGHGPRDISQRVAA

SEQ ID NO: 22556 - protein, 102 aa, Geobacillus sp.
VEDLRVKNMQKNHKLAKRISDSAWGRFLKMLEYKAKWYGRTVVRVASTFPSSQLCSCCGHRQIEVKSLDIREWVCPNCGAEHDRDENAARTILQEGLRLLSL

SEQ ID NO: 22557 - protein, 372 aa, unknown
  TnpB Polypeptide
MRKTLKYRLFPTKKQQRILQEQLNECRWLYNHFLEERKNAWEEDKRNITYFQQCNSLPALKKKRPSLNIVYSQVLQNVADRIDKAFQNFFRRVKQGQKPGYPRFKGFDRYDSFTYKQASFGWKIDDNHLFLSKIGSIKIKLHRPIIGIPKTCTIRRQAGKWYACISVEYEPKPLRKSNKAVGIDVGLENFATLSTKEKIVNPRFFKTDEKALAKAQRKLSKQSEGAPERQKAKKVIVRTHERISNKRHNFIHQESRKIVNRFGIICIEKLSIRGMMRNHFLAKSIVDAAWNQFAQALASKAEEAGRRFIAIDPRDTSQICSQCGTVVKKKLSTRWHRCPVCGIRLHRDINASRNILALGLQSLGLVPRSPFR

SEQ ID NO: 22558 - protein, 473 aa, unknown
  TnpB Polypeptide
MPRRRDPAAPPVVHRTARIGLRVTPGQRRRCFGLLRSAGDVWSCVLEVNGWRRGRGAAPLVGYQDLCRELAACGPGTFGELDSTGARSVLRRFSDGWFAAAKRRHNGDGSARFPRRRRHLMPVRWYHGTFTIAGQRVRIPTAQGTPRLWLRLARQVPYPPGQIRSITLLCEDGRLWLDVTAEIAVATYQPGSRPDPRRIAGVDLGIIHPYAVADGDGHGLLVSGRAIRAEHRMHLADGKHRRRAVAARSPKPGQRGSRRWRQYRRRLRLVEGRHRRRIRQAQHEAAKTVIGWAVAHKVGTLHVGDPRGVLTVQAGHRHNLRLRQWQIGRLLQLLHDKAAQAGISVRLVDERGTSSTCPGCRRRIPKPRGRTLSCPHCACCGHRDLVAAATIATRHPGGGPTTTAAVVLPQVVTHRRAGRHLPGAGQSRCDPRRPPHPRTVRGSVGPRWPAPQRGESLANNSEDPQHHRKPGER

SEQ ID NO: 22559 - protein, 425 aa, Moorea sp.
MISAYQYRLRLTKSQITKIEKWLDMLRHQYNYLLADRFNWFEQNRCSINSCPLVCHLPDLRNNPDYFSQKRTLPQLKKDRPWYSDIHAHVLQDCVKKVDLAFKRFLKGDSNGKKSGRPRFKSKNRYKSFTFPSLSNNPINGNILTLPKFGKVKMIYHRPIPEGFKIKTATITRKADGYYVTLSIQDGTVPDIISVDSIENPVGIDMGLKSFLTKSDGSEVPIPQYYRKAQKRLKKIQKAVSRSKKGSNNSKKAVIKLGKAHKKVADTRKDFHFKTAKSLLDEYDLIAHEKLNIKGLARTKMAKSVLDAGWGQFLSILSNKAENAGLLTVAVNPRNTSQNCSNCGTKVPKKLKDRIHSCPHCGYTKDRDVNAAKNILNLAVGRPVRSKACRVTEGVPGVGKKPALSRQGNVGSTSLLGSTVCKVRK

SEQ ID NO: 22560 - protein, 265 aa, Thermus sp.
VEYERVREVSIIYDKGSGQFEARLVVEVKARGNHGQGRVAVDLGETVLLAAAFEDGTVLLYSGRFIKAARRYWQKVRARVKPPSQENPRMSRRFRQIARKESRQVGHLLHLATSHFIRECVQRGVKEIVIGNLTGIREGMDYGPRVNQRLHAWPYRKILHMLRYKAALVGITVRNDVEERGTSRTCHACGQVRKANRVHRGLYRCSCGWTAQADVNAALNIYERAFHVSPVKGSSGRVARPVVLSFRLGWHTVHEPKRKECLRAS

SEQ ID NO: 22561 - protein, 419 aa, Nocardiopsis sp.
MLSGRRYRLELTGVQAQSCAEFGDVCRAVWNTALDQRRQYVDRYTRGRGGEFCGYHLQAGQLAEAKAEEEWLKAAPSHILQQTLKDLDRACREHGTFQVKFRAKGRWSPSFRFPDAKQIRVEKLNRKWGRVKLPKLGWCTLSMSRPLGGQVRSATVSHKSGRWFVSFLVEDGQLAPEHHPGTPVGVDRGVVVAATTSDGQFHDREFATEGEKTRYRCLQQRLARQRKGSANRRKTLAAMNRIMGRVTDRRGDFCAWTANRLTCKHSVVVLEDLNTRGMTASARGTVEDPGKRVRQKAGLNKAILGKGWNRLEAALNNAARYTGTTIVKVNPAFTSQTCHECDHTDSASRESQARFRCTKCQHECHADVNAAKNVCRAAGHAVPACGDLGVTRSEKQEPVGIREVVPHQPALPLVGIPRL

SEQ ID NO: 22562 - protein, 599 aa, unknown
  TnpB Polypeptide
MELEEQQHLLLTPQVVKKAIELYRTNPKERFFTRQLCKTVGKSPNIAQSAFHWLYIAIKGKIDKEKKVQGLLSFLAKKPQQLIEWVIFGRSPYSERSLENYWGVKRRYIINLLTSSRFQTDSYWRKKHKNTYFTDFLQFNDSLPFSTQTDILQALDDTLFYYKHEFSLIPQLTKNQKAFLKKLQLLKKEQNTVVPFLTSWINSHQTSRWKSLKELAEQLATIIGKPSRKLFSAVRLIIVFTLFDHYMQSVPQLIKALPIANIVPPPFKRKKKGRLPIKLLIKKDYVIIREGNAQELTEQFKKQGWTEFGFPRKGKQRLTAQVHFPPKVLEYLNNGAHIKVFQVSSGKAPSFKPCVDVVLEGIPACFYSSMLLHHYLSQIPSKKTSIIGIDINRLGQYMVAFNTLVDLPPDLLALATHYDHLSTKVIDELNRGYLRKRKERDTYGSCKLKGELNRVYIRRRRILREITRLLPHFLAAVLVKKQCKVLKIERLTADPTGTKGALAKAIYTMPDNLFIYKKAVWLASLKLGYNVKLETINPYHTSTIHHRCGGSLTRQKGQYDVAPCTKCSQQVNTHLNAAKNIASLQGTLLPLDPFPSSHA

SEQ ID NO: 22563 - protein, 288 aa, unknown
  TnpB Polypeptide
MKARYQYRFYPTIQQQQSLAQLFGCVRVVWNDALALCKQSEKLPSNNDLQKLVITQAKKTAEREWLSEVSNIPLQQSVADLGIAYKNFFDSLKGKRKGKKVGRPKLKKKTNQQSARFRIGGFSIKGNEVYLAKIGNVKPIWSRELPSSPSSVTVIKDCANRYFLSFVVEVEPVNIDAKNQSIGIDLGIKTFAIMSNGEKAQSPDYSKLDRKIRKLQKKLARQPKDSKRRNKTRIKIAKLHNQITDTQKDFLHKLSTKIISENQVIVLEAMLQYSSSHFVLENLCRKSL

SEQ ID NO: 22564 - protein, 404 aa, Ferriphaselus sp.
MKRLQAFKFELQPNGEQVRSMRRFAGNVRKVWNLALDKQQKNHDAGEKFSNAFGMNNWLPAWKAEYSYLTESPSQTLQQVTGDLARAYKNFFEKRAAFPRFKKKGQSDSFRFPQGFKIDQVNSRIFLPKLGWIRYRNSREILGVAKNITVSANGGKWFVSIQTEREVEQPMHPAARIVGIDVGIARFATLSDGSYIEPLNIFRKHQQRLARYQRAMSRKTKFSSNWKKAKARVQKIHTRIANARRDFLHKTTTTISKNHAIVCIEDLQVRNMSKSAAGSSDSPGRNVKAKSGLNKSILDQGWFEFRRQLEYKQVWLGGDVLAVPARNTSRTCPACGHVSADNRQTQAKFACVDCGYENNADMVGAINVLERGHRLLACGELAQSGRSVKQEPAEVTQEVAQCHA

SEQ ID NO: 22565 - protein, 492 aa, Ferriphaselus sp.
MQIGNKFRCYPTSAQEQTLLRWIGCQRNIYNSKVREDQYFRRFAQKSLQHVGQYAPIDQQYSQFKTDLTPYLSEVPSVLLRNGAVLWKQAYGRYFSKLGGRPVIHKKHGKQAVWLTSELFKFVPVTDTETGKITGHQLYLGTKKFPVGILMFKAHKDYKLPASLHISIHAGRWHVSFNYDDGIQEPTDKDTTDWLIQFDEAELRKMTAGLDRGVTLPLAGSDYQQFGFSEVQDKRLLAQERHKKCWQRRQARRTKGSAGWVKAKRKVARYQRYGADVRRDVAHKTSHILAAEPRYKLFVFEALKVKNMTAKAKPKQDEQGRWIKNGAAAKSGLNKSILASTWGQTRLYLQYKARRQGKLVIEVPAFYSSQECAACGHVHQDNRVSQSEFVCLSCGNTDHADHNAAKVIAMRGVRQLLSGKCVQKEKKRCRITRIKVGAEGSEPVAETRPTLGETLVSRGGGNTPTLWSLTQEAPPLQRVYALSGGRLHSWDA

SEQ ID NO: 22566 - protein, 485 aa, Helicoverpa sp.
MKRCDTLPDKPDVLNFFYAIKGKGPYAACYKHLAGDRVYDGKLRSFVVQELAKQYETLIHTNIETHAYSRLARYFGVKKNDHGLFLAYYKKDFSQATEDMIRVCQIINVDSCKKNWWSTVPLWLKIQQDLFDRDNVESFRLFPQPSYGLKHLTYTSRGWHELLRRVKPDSVPSHWPNIQDHIKELWAPWLKSTKNFGCCLQTDGVSVSLSMNRWVKRVTKSDGVIKEVVIKKWKPSYDKLIAVDPGSRVPVAAYDSNGVYKRVTSKFVKSHSLEWKRDRVRTKHTKSSELAEAKDRESINQACNIVLSSKNTSHVVEYTVFRLKWFNVRQTPYDTHSKLTRLKFDKYINTAKLQEKIAEEVFDGGGVEKTLVLYGAGSKFMNAAQFSGRKFKHDALLKKLRHRSNIHVEIVDESYTSQACSTCNQQTGEFSKIVMDHKKRVGVCPNCASRFDRDQNAAKNILINFMRSAVCRPRCSYTKKGIVAS

SEQ ID NO: 22567 - protein, 392 aa, unknown
  TnpB Polypeptide
MIIAIKIKLKPTKEQEVLFWKSAGTARWAYNYFLCESENHYSEYLKGNRKTKTISEGEVRKYINNILKKTTHKWLDEVGSNVMKQAVKDANLARQRWFDGISGKPKFKCRRKSKISFYVNYESLKRTKEGFQGEKLGIVKTYQPLPKLQAGQMYSNPRISFDGKNWFLSVGYDKKFEMFELTGASLGIDVGIEKLAVCSDGEFKKNINKTKRVKHLEKKLRKEQRKLSRKLEDNIKSYDINRKPIYEKPLKDMKNIQKQNQMIRNLHKKLTDLRTNYLHQCSNEIVKTKPSQIVMEHLNVRGMMKNKHLAKSIATQKLSEFKRQMKYKCEKYGIKFVEADRWFASSKTCSCCGKIKSDLKLKDRVFICECGFKMDRDLNASINLANYQIQRA

SEQ ID NO: 22568 - protein, 431 aa, unknown
  TnpB Polypeptide
MKEPETGKKENTGKSGYSITTWRLHLWCRHPEWLRTTQEFYNRIAEFYYKLLLDHTELWELGSQQTLRELEIMSIPGRGGRIPSDPLPWQKVPLYFRRAAANEGIASAKSYLSRFTQDEKIGRAEKLNAAVTYYKGMYQDFSAKEITLRVWTGDTWTWMHCRLSGRDFPENARLMSPSVVFEYKYDMLHVPVRQNNENTATVRQRMQAGCRILCIQFTNSDAFAAGVVLDGTGQEIAVKFWKGGNEYSHHCRKLLEKIQKSQEATGGRQTGRVDQKYWMHLKHLSEHYGHQITSQILSFAVEQDVSVIVLPRYNQEYSRNVMKGSGNWSPLHLSTRIRQYLDYKAWKNGIIVIEVHATGISKICAKCGAEIIRTDNQNRTMLLCQRTSDEPVSECCEKSREKVPDTVWTQSMKGRTKETEQNISMKSKQVD

SEQ ID NO: 22569 - protein, 358 aa, Fervidobacterium sp.
VWNYFLAWREERYKEQKLATTEAECRKHLNSVLKEQYSWLREVDKFALEDALIRIDFGVMAKDKTKNRCWGKIRLPKLGWIKARIHRTFNGKIKTATVTLLPSGHYYVSIAVEVDKVNNKNQTPEPINYAIALDLGLKSFHVDSNGNRVEAPKVLAKYEKKLKKLQKALSRKKVKSKNFEKARIKLARLYQKISNIRNDFLEKLSLQVINENQVIICEDLRVKNLVKNRRLAKSIHDASWSKFLQMLKYKAERRGRIFMQVSPNFPSSQICSDCGYKNEEVKELSVRVWECPSCGSVHDRDLNAARNILAEGLKLLSEINKPVGLGRSEPEGDACGGETSTISGIPLVESLVSEAGSS

SEQ ID NO: 22570 - protein, 413 aa, Haloarcula sp.
MYYAYKYRLNPSEVHREELDRHRDICRQLYNHTLYRLNEYQDEHGEIPSMTALRSELPDLKKWWDDLSDVYSKVLQTVVERLFDNLKGLSALKKNGYGVGQLKWKPPREFRSFTYSQSGFKLDKKGGQTVLSLSKLADIPIRLHRAIPDDATLKQVTLKKEPTGEWFATFGVEMDREPPEPPENPEKCVGIDVGILKYAHDTDGTAVGSLDLSDERERLEREQRKLSRKQHGSNNYEKQRRRVAECHASLKRKRRDFLHKLSNYYAREYDLVAVEDLNVKGMMESRSNSRNRASAAWRTFLSLLEYKCEREGTHFVAVNPRGTTKECASCGVSTDKPLWVREHSCPACGFEADRDVNAAWNILSRGLQDVGVGYSESTPVETGLPVDTPVSAKRVVEAGSPTLTERTASAVSE

SEQ ID NO: 22571 - protein, 459 aa, unknown
  TnpB Polypeptide
MTRFEVPDGWCVQAFRFTLDPTEEQACALARHFGARRKAFNWTVATLKSDIEAWRETGAETEKPSLRVLRKRWNTIKDNVCVNADTGQVWWAECSKEAYADGIAGAVDAYWNWQQSRSGKRAGKRVGFPRFKRKGRDGDRVCFTTGALRVEPDRRHLTLPVIGTVRTQENTRRIERLIQAGRARVLAISVRRNGTRLDASVRVLVGRPQRPNVAQPGSRVGVDVGVRRLATVANADGVVIETVPNPRPLEAALRELRQVSRARSRCTKGSRRYRERTTELSRLHRRVNDVRTHHLHVLTTRLAKTHGRIVVEGLDAAGMLRQKGLAGARARRRGLSDAALGTPRRLLAYKTGWYGSQLVVADRWFPSSKTCHVCANVQDIGWAEDWKCDRCATSHQRDDCAAINLARWEEPSTAVGPVRAAVKRGADRKTRPSRAGGCEARKGRSRKAAEQPRDGVQVA

SEQ ID NO: 22572 - protein, 438 aa, Okeania sp.
LKARYKYRIYPNHVQITKLNQLFGCCRYVWNQSLAHCNQLYANGQKKPTYVDLTKQFITQVKQELVWLKAVASTPLQQSLKDLDQAYKNFFDGCKGKRKGIKVKPPKFKSKKSRQSARFVGDNYKIGQDKIYLPKVGNIKIVWSRELPNKPTSLTIIKDSANRYFASFVVDINPEPLPKTNNSIGIDLGISTFATLSNGDKINAPKPLKQNLKKLAKFQRKFARTEKGSKRRERRRLRVAKLHAKIKDIRTDFLHKLSTDLVKKNDIIVLEDLNVSGMVKNRKLAKAISDLGWREFRTLTEAKCDKYGREFRVIDRWEATSQKCSNCGFKGGKKELNIREWTCLNCGAFHDRDLNAAINILEIVQPKTKVEIFEETVEENPVPPAEELRYQLSLFNEVAEGHSETIKRTRRKRQTGKPAFFSEVSTRSESFVQLSLFE

SEQ ID NO: 22573 - protein, 393 aa, unknown
  TnpB Polypeptide
VLKEKKDKWIEFMFMLENAYKYGAWFLYSVRLKVKNGNVYAFISVEEKLPPVTIKKDNGIIGIDINAYPFHLALATASKDGNLENYQAISLHELLDVSSEKRQYLEWQIAHQIIEIAKKENKPIAIENLDKLPKGKRGDGFAKLRQKLQKWIYKRLLNKIEITAKRNGIEIRKVNPAYTSLIGKLKYAPQFNIDKDIAAAYVIARRGLRFKESLPKNYKGLLNDKDFLLFSEASIEDKIAKLKKEIKEEKNEYKRNKLKSKLSRLRKELKALQKHLSFVIESEKSKSVSQQPVNQRKEQVRGLPVGRYKNWQVLFTAFAFCCLEKSYRDFSPLKQLIVSRDWIAVVNRLVPVLGAGSMILPKYRLLGLEVSEMAEYKYPNSSCAEQYSFVQFD

SEQ ID NO: 22574 - protein, 433 aa, unknown
  TnpB Polypeptide
MDSYRRYNYRAYPTGEQRRALSRLYGACRFVYNWTIDQRRLMFARRGKPQSAGQLSHMLTLLKRDPDHRWLTEVSSIPLQQAVRHADTAYRNFYRLYKAGKTRLVTNQRTGKRHRTGLPRYKSRRDGEQSASFTRSAGFKVEHADGCRWMFLTLPKVGRVRLRWTRNLPSRPSGVAIMLHADGSYEASFTVLVDEDAKTPEPVHEACGIDMGLESLMSVVYDDGSRERIPHPRTLKHKARKLRRLDKQLARRKRGSNNHAKTRLLKAKTYGRIRNQRRDMAYKLASKVAVENQAVAMESLNVKALARTRMAKSLSDANWGRIIGRIRRLCLQYGRVFRQIDRWYPSSQVCSQCGFRSGRKPLDVREWECPNCRAFLDRDWNAALNILDAAGLAESLNARGGDVRRRLAQAGRNADAHEAGTRRTVGLHQGPTA

SEQ ID NO: 22575 - protein, 371 aa, unknown
  TnpB Polypeptide
MTQRGAGQMMGSGATRLKRRGRRWNVRINRAHRYELDPNVVQFTLLAKHAGVARFAYNWGLARRIALWEQEKKCTNAIEQHRELNRLKRTEFPWMYEVSKCAPQEALRDLDRAFRNFFRGLKTGRKVGFPKFKRKWRRDSFRLTGVIRVLERHVQLPRLGNVRVKETTAVRGRILSATVSREADRWFVSFTVEQEIADPEPVAGPAVGIDVGLTHFATVVGSDGEVVKVEPPKPLNRYLKLLRRRQRKHSRKQKGSHNRQKSALRLARLHRRIHNIRGGFPPQALHGTGENQVSYRGGGPERQRVAEEQELCQAHCRCRLGRISSATWVQDRALRIQARCRKSLLPQQQNVFRLWRRAGQDGCGCSGVDLS

SEQ ID NO: 22576 - protein, 467 aa, unknown
  TnpB Polypeptide
MEKLSTLGIQQVSDCIKENNSSGFWNKQASEMSKKLWLPTEIGSADLDLNSLNGSSLNTMLNSWFSMIVKVPHKQNLSQIYSQSLPFSPVGFTDSGNTLKRSRKIRFYPTKQQKILLFKWFGVARYSFNKTIEYLRQPDTKANWYVIKTEIIHNLPEWSKKVPYQIKSIGIKDACDAVKNAKLTFKQTGKIQKVKFRSRKNADFNLYIPKQSLTEAGFYHTLTGVINLRERIGEVKHDCRVILENGRYFVIKPEDRAVKRPDNQRLSVVALDPGVRTFQTMYSNELVVKAGCSDFSRIYRLCYVLDSLYSKRKKESTNKYNVKLKRIRCKIKDLISEIHHKLALFLVKTYEVVLIPSFETSNMVTKLHSKVARAMLGWSHYRFKQFLKNKAAEYSCNIIEVNESYTSKTCTNCGKQQNIGFKKSMKCSCGTELDRDINGARNVFLKNISLASKDSSILDVYSGMNLS

SEQ ID NO: 22577 - protein, 413 aa, unknown
  TnpB Polypeptide
MFGTIKQKIKHLSKEDYKNLRYLCRVSKNLVNETIYNIRNHYDIFKEFLPYNRNYHMLKHSENYKILNSTIAQQIILNVYESFKNYFVQLKIIKQGDKWVRKASLPRYLDKKGFYTLIINDICIISGKLMIPYSHKFSKGYSRIFINIPPLLENKIIKEIRIIPKSKARFFEIQYIYEKEAKEKDYKIKNVLAIDLGVNNFCTCVTNTGKSFIIDGRRLKSINQWYNKESARLNSIRDKQKIKGYTLKLDKVAYNYKNKVNDYINKAVRYIVNYCKNNDINVLIIGYNKDFQRNRNIGRSNNQMLSQLPLSKLIFKLEYTCKVEGIDTLVVNESYTSKASFFDKDPIPNYGDKNISEFSGKRVKRGLYRTKNGYEFNADVNGALNILRKSNVVSLEALYARGEVDTPIRIRIK

SEQ ID NO: 22578 - protein, 216 aa, Catenibacterium sp.
VSVLIEIKNKRIVSNSSEGIGIDLGLKDFAIVSNGKTYKNINKSAKLRKLEKKLIREQRSLSRKYENIKKGESTQKRNIQKQRLKIQKLHHRIDNIRTDYINKIIAEIVKTKPSHITIEDLNVSGMMKNRHLSKAVASQKFYEFKTKLEAKCKENGIELRVVDRWFPSSKTCHCCKRIKKDLKLSDRIFICDCGYIEDRDFNAALNLRDATTYEVA

SEQ ID NO: 22579 - protein, 397 aa, Archaeon sp.
MLRAYRYRLYPSKKQRVALEATLDTCRHLYNDALGSRKLQAELYRLPIAKQWITVKSQSKALPVQKQTNKYLHLVHSQVLQDVLRRVNKSFENFFRHLKNHEKPGFPRFKSYTRYNSFTYPQTGFKIVGKKLELSKIGKVNIKLHRNMTGKIKTCTIKRDIDIWYASFSVEIDDSLPEKTVIKSAVGNDVGINPLVALSNKEKKEPPKFLLQSEHKLAKEQRKLSRKDKGSRNRNKQRIKVAKVHRHIRQQRADFHQNLSKKLVEKYDFIAFEDLKIKNMIRNHHLAKSISDVSWNMLQSFTAYKAEWAGKVVTFVNPKNTSQECSSCGKIVKKNLSLKTHKCPYCGLVLDRHVNAAINILHRGLKKIGLGYTDLMPVRGLALNTPMTQEAHEFSRG

SEQ ID NO: 22580 - protein, 295 aa, Lachnospiraceae sp.
MNTAYRFRIYPNREQEVLLAKTFGCCRFLYNQMLGDKIREYEASKKMLRNTPAMYKKEYPFLKEVDSLALANVQMHLEKAYNNFFMDPKIGFPKFKSKHRSRKSYTTNVVNGNIQVEDHRIKLPKLKWIRMKKHRDIPEKYCLKSVTISMEPSGKYYASLLYEKSDCENQAEEFDYEDTKILGIDYAMRGMAVFSEDIDMKAMSRCMHFGKSVMDNGYGKFRELLEYKLIWRGKKLVHVDRFFPSSKKCCKCGSIKKELKLSDRVYICSCGNQMDRDLNAAINIREEARRMLLAG

SEQ ID NO: 22581 - protein, 834 aa, unknown
  TnpB Polypeptide
VCVVGWEYSLHDWHNGLVSQSKKKMITERVVKCAISKRINGSHSEKKKIKQIIDDAVKPMTHIMIVTTRVMNHYVLRKIEECRNLEEQQRQDLLQQPYDNDEDRAAALTQLQQEQKVRRQDVPKPCRTFINRLAKHLAPRPGSWPSNDVVVEAYCGAYGVNDDDQVPKIRNTPNLVRIISLASETHAVSVINHVTKNFYDRVKSCLCIVATQIWPRFNKGRKNKSGLNQAVCYTAKFMMEGKDGVPGLTVGGPILEENAIAELNRLLQNCLGDDAETKQAVSRALWQYAVEALRKYGTADNVYGRLNKDKFHTLYHWLYQLNFEIGNHNRYIEYLRDLAEAERVAGRPFDDVRLLLKRKKNFTILPVANSNKPQHIQIDTEALFYLFRGVCRFPGKLKDYQGEHAERADELWTKVFNCRDIQKNGDRWKRTHYITTDGVSFNVNFRRDMTPVEVAAARAAAAHQFRNQSKTRLPPDDVSLYPPWHEVDSSKVVGLDPGGKDNLTVVAVAPDGQDNLRPSSCQPPSRKAKARNKNKKKPDGHRISRNTNNRQHKHGGRRKQNRNNHAERVFQCSNRRWTHETGSKQAENSSLQRLALTPVYYGDDDIEYETTLYAVKVTIPTAKVVTSQEFLHHCHHVFFFLEDIVNDLMVRKVRRERFDRYMKRQAALDMLCHEITFGMNDAIVVFGNCIGQKNYFPFPTKEFIRHLQHYKDTTVIIVDEFRTSKCCSKCAFNQDLRESRGDPMVGENKKRGKKKGYWPIYGVRVCKNCGMRWNRDINAARNMRLIFLYMVENRIWQRGQIPVRPFPFSRLAQGAALAQERAQQLAQAQAEAHP

SEQ ID NO: 22582 - protein, 399 aa, Nostoc sp.
LVEKVKISYQYRLKPTREQAAHIDKTLDMLRCQYNYQLAQRFDWYEQNRCSIDRCSLVACHIPELKDKPNRFNQQATLTQLKKDRPWYKSIHSQVLQEVPKKVEIAFDRWIKGDANGKRSGKPRFKAACQYKTFTYPQFKKEHFINKRITLSKIGDIKVIVHRPIPDGFDIKTVSLTKKADGYYVTLSLDDKSIPQVLPDFDAKNIVGIDVGLIDFIVTSDKERIAAPKFLRKAERKLKSAQRKVSRRKKGSSRRKKAINKLGKQHKKVADTRKDFHFKTANSLLKRYDVIAVEKLNIKKLAKSRLAKSISDAGWGQFLTILSNKAENAGLKVIAVNPNGTSQECSSCGHKVKKPLAQRMHNCPNCRVSLCRDLNASLNIKNRGTHDLKAQIMSSTKSL

SEQ ID NO: 22583 - protein, 375 aa, unknown
  TnpB Polypeptide
MLAYKFKLYSTKQSKHLDKMLGEASWVWNTCLATQKRYYKIFGKYASSNDMQKHFCKRWKVKYLHSQSVQEIIQRLDCAYQRFFKKLSARPPKFKRTTEFASFVFKQGGYRLVDNKLTINKIKKIYKFSKSRDIDGNIKQLIVKRNRLREYFIFAISDTKSKPYIKSHNGASVGADFGLKKYLTLSDGNSIDCPQYLKDNLLKYKRLSRNLSKCVKGSNNRERKRKALCKLFLDIKNHREEFQWQLSHKLCRTYDNIFLEDLNIKGMAQHKNWGRKMNDLCFSDFVLKLEQVASKYGVVVHRIDRFYPSSQTCSECGGLFKGTKNLALREWTCPHCGAKHDRDLNASKNILRKGISELESGSKTSVVMRQAEQSR

SEQ ID NO: 22584 - protein, 398 aa, unknown
  TnpB Polypeptide
MVLTRSVTVKFISDFNFLPTFQAYAKAFNHTCKIGWDQKEFNGVRLHHLVYSHLKQSLPSQLCISARMKATEALSSVNARLKKNKKTLCPKTNLCPIRLDENSYNVWFDKNEVSILTISGRVKGIKFASYDYFDQFRTWKRKSAELIYNKGRVLLTFCFEKLVPDSELSNSSDIFVGVDRGIRRIAVTSNQLFFGGGRVRTVSHRYQGLRARLQSCGSRSAKRHLQRVAKKENRFRRDQNHCISKEIVQSIPVGSTIILEDLKYIRERCRHGKRQKREFHNWSFFQLEQFLIYKAEAHSCSVAYVDARYTSQKCSHCGHVSRSNRKNQTQFKCIHCGYTLNADLNASFNIRNNYLDSIRHPSRAPVNEPIVSGGTALCESTDGSTGSDTSPRSCASGS

SEQ ID NO: 22585 - protein, 450 aa, unknown
  TnpB Polypeptide
MEIKTNNLLIYPLITEYATNIFSSFIRDGSKKSFIGRESKKAPHLWDYFVGVCSSASAFFKVSMRVVAHGLVYFKDPSAICRIKKLMTHWGSCKRSAYQAIHKMGLKGNDIKIYCKNNYMSLLNGRYVSDAVTEASKINQEHALFGGKKLWNRFIKGSISKKKWLHDRNNTLYSRGEKSHKGNPNIRVVGNQLWINDPVSGWLKGKLWLNKPVNLICYESRIQLKNGKFHVTFSWEEPDPPKITDISKGVIGVDTNPNGEALTEINSTGNIQSHIFLKNERIQFSSTGKRDYDIKQMAVKTVSIALQARKPIVLEQLNFKNKKMGKKFNRMSHNFIYGKMIEAIKSCALKNGVEIIEVPAAYTSIVGKLKYQDMYSLSVHNAAALVIGRLGFLNLSDKVVIDVSGSEERPKLEARGQSVTLKKKSFLWFKSKFRICQKQPALTGPCLVPG

SEQ ID NO: 22586 - protein, 404 aa, unknown
  TnpB Polypeptide
MNKVITGTIHAGDLEALRQLMRDWSSCMRYAYQRIHKDGLKGNDTVKACKPLYMAKLNQRYIQDAVLKAKSIDKEHVVFGGKKSWIKMLSGLITKTEWHTVRDSELYSRGDVTKQGNPNIRVVRTPEGYKLRVGLPGARQFLIFTLYIPEKFQDEFDLNSECYDVRIKYRDNKFYAFIGITIPDVSPYYKFESGAVGIDTNPDGLAVVNIGFDGNLLEHFYLHADRLQFARFEKRKNDIEELAVKIVDYAISKEKGIVIEDLKFNNKSSKSKKFNRMRHNFIYASLLQAIERRAIKYGVLVKKINPAFTSKVGILKYQEQYSLNRHTVAALIIARRGFGIMETLRVRLEPLKKDMLNLAGRGVSIALTKKAYSYLCHLYRVLEIETPGLTAPRLTPLLGNYGTG

SEQ ID NO: 22587 - protein, 407 aa, unknown
  TnpB Polypeptide
MLLAHKIELYPNVAQARYLRQCMGARRYTYNALLTHFSQDGVKWSKRAAYDVFMTKVRQPWMAEVTSRAPRNAIDDLHRAYEGFFRRVKAGKRPYGYPKFQKRGQRDRFSLREKPKFSVDGRRLRLERAPGRIKLREELRWRGIPHSVTVSYKAGKFFAAIVVDTHDYETHAATRESSVAGVDLGLTSFAVLAHDGGYEHIPPNQKLKASLTRLRRLQRQLSRKEKGSQRYERAKRRVARLHLRVSDQRNAMLHETSDDLTRRFDTLVIEDLAVKNLSRNRRMARAVMDSGWGEFRRQLTYKAALRGVDLIVVPRYFASSKICANCGTAKADLTLKDRTYACDICGHRRDRDENAADNLEHEAYGLHTLPADLKCALEVDQTDGVEPRRTTDKDRREEVYPEIMIDF

SEQ ID NO: 22588 - protein, 352 aa, Lactobacillus sp.
  misc_feature (322)..(325): Xaa can be any naturally occurring amino acid
MVKTMAQLPYHYGVKVRVFPSTEQKRLIKRNSDASRFIYNQMNGMNNDLFRLKQVKIPITLVLNRIADLTERLKKPSTAISNIHGWLNHPDFDSLMKANAIKNYKTAWKLFRQVHQAGTPKFHKRGYTQTYQTSCLYSAKVTGPTMRNGSVRLNDNHYLQLPKLGRLRFRGLPSKILGQTDAIRIGTTTVSMDAVGHYFVSMQLGSEHPFVSEQSVVKSKVGIDLNLENFLTDSNGQVIDNPHYYRTIRGKLAKAQQKLSRRARRAKKSQRRLSESKNYQKQRLLVAKLQLKVANQRKNFLHHVSTALIKNHDLVVAEELRXXXXYVAEPRFGNEYLGCRVANFAEHVSLQS

SEQ ID NO: 22589 - protein, 443 aa, unknown
  TnpB Polypeptide
MEVISGLPPTMWEQPVTSVHKLLGITLKGLNISKGAGKLVGRKIDVRTACVILEVSEEDAKKLHQTRLRYGQACNSLVPVVVGDTERKERLWQRFNLHRAAYATLRKDFPDLGSQLACNVIRSVSSMYKSWISNHPDFALDKEMELPEISFRHPVIHLDKNTITFSKDYSEASIYTIQGRVHVRLCPGKFQREMMADFFAEEAAGTPKKDRLSKLGECDLVWKSGVKGSPSRWELHIAVEKKLKGVTLEKLTRDEVMGVDVGENNIATLSIGRVFKAGKMKNDRDKYLNSRARFQRNDSKSAKQALRKASGREKRHVRQINNEVSSIVVAEAIASGQRVIVLEDLTHIRSRIRAGIKVRSRLHRWPFRELQQMIVDKAARNGIEVIFVDPHYTSQICSHCGAIGSRQKHRFVCKNCGNRAHSDINASQNLQGLGYQLITQGLV

SEQ ID NO: 22590 - protein, 422 aa, Halorubrum sp.
MARRTNTFVVRPRSEQDAELLHELLDASASLWNELTYERRQNYFDGNSIWDTADYRKQYVDVLGSATAQQLIRKSKSAWKSFFSLKEKGERCSPPGYWGNEEDGRTLRTYIRNDQYTLEMGDRSRLEIPVGKELKEKYDLGYAERLRLEVAGVLKWGGKQGRLELYYDESSNQFRAFQPVTVDDSRLDTPLASEEAALDIGANNLVACTITTGQQYLYEGRDLFERFRDTTREIARLQSKLREGRYSSNRIRQLYHGRTRRRDHAQNALVRGLLERLYDDGVSRVYVGDLTDVLETHWSVRANEKTHNFWAFREFIDRLACTAEEYGITVEVRSEAWTSQTCPNCGSTTDTIRHQDTLTCSCGFEGHADLVASESFLRRHTDADVPRPMARPVRFEWDSHEWLESPHSPRPKEVRTDRSIHG

SEQ ID NO: 22591 - protein, 350 aa, unknown
  TnpB Polypeptide
MEVPRTESIWLGPDKGLGYLCHLSKNLFNEANYKVRQEMFATGRWVRYYELWTALKNSPNYKGLPAQTAQQTLRTVDACWKAYRMAMEDYKVNPEKYLAMPRLPKYKKKDGEFILVFSNQQARLKNGLFKLPKAIGLEVKTRLPKGTKVTGARIIPKGVGYNLEITYDKEVKEKREQENERPIEGEIANDPKELAKPCRALGIDPGLENLLATVNNIGAPPIVQGRASQVHEPILQQEEGRYPKPVRQTGDRDGPEDAEIVPQKEQEDQLLLPSGQPSADLVLQDVGDRHDRSGQEQALETGYQPRKEDQPELREHPILQAVSDDQVQGRGSWNKSDRDRGGLHEHVQLS

SEQ ID NO: 22592 - protein, 415 aa, unknown
  TnpB Polypeptide
MQMRYRYRIEPTRAQQRMLAQVFGCCRVVFNDALRLRDEAFRAGVKLSDSEIQRRVITQAKKTTERRWLCQVPSVALVQSVNDSRQAWRNFFNSASGKRRGGRVGRPRMKSKKDNRQSFRLTRNGFSLRANGGLFVAKVGEVRVRWSRELPNEPSSVTIVREPDGHFYASFVVSIATCPLAIVDREAGVDVGIARLATVADSDGQRTDIANPRHLGRKLRKLRRLEREKSRRQKGSANRNKSRRKVAITHSRVARARRDYHHKQALALVRENQVIHVEDLNIVGMVANRRLAQAISDAGWGQFVRIIFDKANLYGRTLHSVSRWLASSKICSACGHRLDELPLGVREWTCPQCRAIHDRDHNAAKVILAAGRAERLNASRESGQDHVSGGPGEVRVRPQRVVAVDLEAGSDPTAA

SEQ ID NO: 22593 - protein, 367 aa, Mycobacterium sp.
MPKFEVPDGWTVQAFRFTLDPTEDQAKALARHFGARRKAYNWTVATLKADIQAWHASGTVTAKPSLRVLRKRWNTVKDDVCVNTETGVAWWPECSKEAYADGIAGAVEAYWNWQTSRAGKRAGKRVGFPRFKRKGRDQDRVSFTTGAMRVEPDRRHLTLPVIGTVRTHENTRRIERLIKAGRARVLAISVRRNGTRLDASVRVLVQRPQQPKVVHPGSRVGVDVGVRRLATVATADGTAIEQVENPRPLGAALRELRHVCRARSRCTKGSRRYRERTTQISRLHRRVNDVRTHHLHVLTTRLAQTHGRIVVEGLDATEMLRQKGLPGARARRRGLSDAALGTPRRHLSYKTVWYGSALVVADRWFPS

SEQ ID NO: 22594 - protein, 554 aa, unknown
  TnpB Polypeptide
MITLQCLIEFKNEKDKEIVLDLMRRFSSAMRYAYKRLLESEKRKDLKKNISRLFNINTRYSDDTILLAKQTIEIYKSHNKNPKKVIFGSRALFDKLNKKHLTGKSRNSLIKKWREKRQGNLYSRGDKSKQGNLNLRLQWINDELYLRINIGDRQYIYAKVIRTVSRKNDKWIDFMFILLKAKESGSWFPYSVRLTLKNGNVYAFISVEEKLPPVTIKKDNGVIGIDINAYPFHLALAAVNKEGNLERYQSIGLNELLEVNSEKRQYLEWQIAHQIIEIAKKENKAIAIENLDKLPKGKRGDGFAKLRQKLQKWIYKRLLNKIEITARRNGIEIRKVNPAHTSLIGKLKYAPQFNIDKDIAAAFVIARRGLGYKEKLPKNYKELLNDKDFLLFSEASIDVRIAKLKKEIKEEKNQYKRNKLKSKLSKLRKELKALQKHLSFIIESEKSKSVSQQPVNQRKEQVRGSAYAGHKNWQVLFTALAFSCLESYRDFSPLKRILLAGDWVRMANRLVPVLGAGSMTLPKYRLLGLEVSEMAEYKYPNPNCTDQYSFVQFG

SEQ ID NO: 22595 - protein, 472 aa, unknown
  TnpB Polypeptide
MLESCLQEPSTRIYGTDGKNREVFHPSRPVNGFQARLYLFEKPMDIDKRLAKNARIKATRALTKQRRKTKDCKVYSCKIDKSHLSDFSLSFLKNIFLEAKWFCNDVIRSGIFDYDYKTKTVAVMNRDREWEVRLLRVLSSQIRQSLVERIKGDVINLSKLKKATGRRVGRLRFRKVVRTLPLNQFGSVFRIMNSKYAQVQGCRKSLRIRGLSQLPKDAEVARAELVNTCGDYYLKVTCFVDKEVHIKMGKKVGLDFGIETTVTTSAGEKFNIKVPETKRIKKLRRGFHMRTKKGSRNRWNRNEKIKKELERIDNRKRDQKNKLVRYLVDKYDVIVCQDENLSGWKQRFGAGVQMSCMKGIISDLKNKSETFIQVDKWFPSTRTCDVCGNVREVVPLLERTYHCSVCGNDTDRDTHSALNILQEGLGTKFPRLIRNVEDVKSPVELTTSICVAVQNTDKLLTEKREALAFRHG

SEQ ID NO: 22596 - protein, 401 aa, Shewanella sp.
MQRLQAYKFELIVTGEQQRQMRRFSGACRFIYNKALALQKERHEQGEKKLSAFELNNLLPQWKAEPETKWLSDSPSQTLQQSLKDLDRAYKNFFAKRADFPRFKKKGQSDSFRYPQGVKLEQGNNRLFLPKLGWLRYRNSRTVEGEIKNVTVSQVCGKWYVSIQTEREVEIAVHQGDAIGIDMGIARFATLSDGRFYAPLNSFKRHETALRKAQQAMSRKVKFSNNWKKAKAKVQRIHSNIGNSRRDYLHKISNDISKNHAIVCIEDLQVKNMSKSAAGTAEQQGRNVRAKSGLNKAILDQGWFEFRCQLDYKLAWNGGHLIAVPPKNTSRTCPCCGHISKDNRATQARFACVECGFEENADVVGAINVLRAGHARLACEVSGATMPPAAGTHRSESGVRA

SEQ ID NO: 22597 - protein, 392 aa, Cyanobacteria sp.
MAELAITLKLPFYRLNQVKALEFERLTAVNTQVANDLPNVDTKERKKLTSAAFKHIEIGSMWINQTIRNTNAKTKAKHFNRMWLEVNNQGYEVLKSGDLYTLSFSLYRGRKGRIPLEVHSASQTEVLDKLIAGEAKLGTLKLCKSKKGIWYALVSVSMEVPDAVAVESWIGVDRGQNKIAVAALPKGFGKFWKGGRVKGLRRQFQRTRKKLQEAKQLKEVKRLEQRERRIMTHINHVISKELVQFAKDFEMGLRFEDLTGIRQPSKQRQRTKSDAGNNRDSWAFYQLEQFTRYKAIREGVPVQSVPAPYTSKSDHRNGVLGKRNGDWFRGFDGYRCNADWNASQNIGQWLGFSCSLSLQSAVATMAMADAEGAVNDSPLTSEASKRADLSPA

SEQ ID NO: 22598 - protein, 409 aa, Planktothrix sp.
MLVLEFKVRAKEQQYKAIDEAIRTAQFIQNKCLRYWIDNKGVGRYDLNKYCRVLAHDFKFANELNSQARQSSAERAWSAIARFYDNCKRKIPGKKGYPRFKKNCRSVEYKQTGWQLNLESRKAITFTDKKGIGRLRLVGSYDLHFYQPEQIKRVRLVRRADGYYCQFILSVDVQIKTEPTNKTIGLDVGLSAFYTDDQGNKIDNPKFLRMGEKKIKRLQRQLSRKQKGSNNRKKARQKLAKAHLKISRQRKEFSKRVAYSVIQSNDLVAYEDLKIKNLVKNHCLAKSISDAAWYQFRIWLEYFGRKYGKVTIAVPSQYTSQNCSNCGKTVKKSLSTRTHVCSCGCQLDRDENAAKNILRRGLSTAGHTGTFGLEPINALGELTSTLAGEILLGQVDSLNKESPVTSLCD

SEQ ID NO: 22599 - protein, 558 aa, unknown
  TnpB Polypeptide
MHTLRLKLEMDKNTAYIMEKRFRILAHISNQIRKHVKKLLSRLENDKQYQQALDEYIRLKKLESDDKQVMADMKRLSKFMNETRESIGLTKNGLEKYASVMQRRYKKNISSHQVQAEVAHIVKGVDAVLFGNGKDVHYKKESDFHTIPEKSLSGVAICFDQNNEKRQIDCYIKWNGLKIPVKYDISKPDMPDEKNYINESLSIGVIKYCEIERLWFKSGWHYYVKLYMTENVPKKITPGKSTMGIDEGPSTIAAVSESSVFLEELSPKCKDYNKQIVSLQRKIDKSTRMTNPDRFNDSVNLRSPSPDVDGVFDSPYTSSNHQTDGQPEVGRGLPSIDEDGTAKKKTKDLPPWKFSKTCQRNKARVRELYRRKAEYTKCQHETLLNSMIKDSSIFINEPMDFKALAKKARETKRRDKASVIKNADGTEKTVYKYKRKKRFGKSITDRSPSFLIARLKQKCEQYGMIYLETDKWKYKASQYNHVLDDYIKTALSERFKNIGAITVQRDLYSAFLQSCMDTVEKPDRKKCIQLFDNFVKMQNDLITEMKVSGKSYPACFGF

SEQ ID NO: 22600 - protein, 371 aa, Lysinibacillus sp.
MTTITAKIQIYVPDHDVEILKSTTNTYRQACNWLSEKIFQTKVLNLVNLNNLYYKNLREIFGLKSQMAQSAIRTVVARYKSAKSNGHKWSQVHFQLPEYDLVWNRDYSLNQDVFSVNTLSGRLKLKFEKKAMKRYFNGTWKFGTAKLVHQFNKWFLHIPMTKKFAKLDQRNVNHVVGIDLGVNFLATTYDSHGKTTFFSGKQIKQKRGQYKALRKQLAKKQTASARSRIKVIGSRENRYVTDVNHQITKALVERYPRGTCFVLEDLTGVRKATEKVCVKNRYVNVSWAFHQFREMLTYKAAMNGRLVIVVNPAYTSQTCPKCGHREKANRNKRTHTFCCKNCTYTSNDDRIGAMNLHDKGIKTLRGGTILA

SEQ ID NO: 22601 - protein, 379 aa, Lysinibacillus sp.
MLRHKAYQFRLHPNKEQEILIAKTIGCARFVFNHFLDLWNRSYTETGKGLSYYACSAMLPKLKANKDTCWLKEVDSIALQSSLKNLADAFSRFFKKQNNKPQFKGKMNPVQSYTTKNVNNNIELKGKKIQLPKLGLVKFTKSREPKGRILNATIRKYASGKYFVSILCEEEINELPKTNTAIGIDLGITDFAILSDGRKIDNSQFSSKMEEKLKREQRKLSRRAVVAKQNGIKLLEAKNYQKQKRKVAKLHEKVMNQRTDFLNKLSTEIIKNHDVICIEDLNTKGMLRNKKLAKSISDVSWSSFVTKLEYKADWYGRKIIKVDRWFPSSQICSECGVQDGKKLLNIRRWTCPTCKTEHDRDINASRNILYEGLKTLIRV

SEQ ID NO: 22602 - protein, 448 aa, Lysinibacillus sp.
LIRKTKRKWLRKKAKNKDNIQHFTQVQHLGGRSLSAKAFRTLNRMTHSTKALRNVALYTWKQYYKENGTAPSTKIIDTAMKKDMNYWGASANAVQAIRRTLLSEIKSFFEAMKDWKINPDKYKNCPKFPNYSKSTTKRIIELYEPGKIDEDGFWTVPMNKDFKAKFGEVNIKMPANLRHQKVTYIEIVPKHNGRFFEVHYTYEIQKPQMKKAPTTTKKALSIDIGVNNLMACATNTGETFLIDGLKLKSINQYFNKALSRQQESNLENGLSKRIVSKKQAALWTKRARQIKGYFTQAIGLLFKKAKALNVDTIIVGINKGWKQKSAMGKKHNQQFVSIPFKQLLSAIENKCLKEGIRFIEQEESYTSVASFLDRDKLPVYGEKNSAVHVFTGKRMTRGLYRSSMGTCLNADINAALNILRKTEVISLDENLKPMIPKRIAVQQRKSVA

SEQ ID NO: 22603 - protein, 246 aa, unknown
  TnpB Polypeptide
MYKTLKLRIYTKHTPKLVKLASAVNFVWNYVNDLSFQMWRRKHVFLSAYDIHEYTKGAGEELGLHSQTLQAVGETHAKARKQAKRSRLHWRTNRKDAKHKSLGWIPFKASAVKHIRTYQTGQTALKSQVQLSCGKEKLILTVFDQYDLRQYTEIKTASVVEDSCGNWYLCLTVKVNPVAANIATGEVGIDLGCKTAATCSNGDKLETKFTQQYAEKLATAQRARKKKQARKTNRKIRNARANATHQ

SEQ ID NO: 22604 - protein, 478 aa, unknown
  TnpB Polypeptide
VVFGGKRLFEKLCKNHLSGKAREGLKKQWREQRQGTLISIGSKSDRGNRLTRFEDLNGQLHLRITTGNREFIYAKVLREPSNSKDKWLTFMAMLLESWQTKNYVAYTVELKLRNGEVYGSVSFELPTPKVKYTKEKGVIAIDTNASPIHLAIVEVSKTGELLGYQTISLHNLLGLSQNSKDHQEWILAHQIVDLAIQKGKAIAIENLKKLKKGVRGDGKAKLRKRLHQWNAKKFLQKLKRVAMLKGVEVVEVNPAYTSVIGMLKYAPQLNIDKDVAGAYVIGRRALGFKEDMPENYEKLLKDKAYLEFALERYEEREEELRELLEEETNQYKRNALESELRNVEYAKELLINLIQSLQSESSSCEGAYGKNPEQGRGSIASSVAWLVLKVALLFPILGRVLPRDLSPLKPVLVEGVWDRVRRSNGLVPLEAGGTVPMRDFLEQPPALVGMSKLKHLEENLELFEKPKVEENKFLSLFD

SEQ ID NO: 22605 - protein, 172 aa, Enterococcus sp.
MERLKAYKFRLYPTEEQEIFFAKSFGCVRKVYNLMLDDRKKAYEEVKNDSSKKMSFPTPAKYKEEFPFLKEIDSLALANAQLNLDKAYKNFFRDKSVGFPRFKSKKNSVQSYTTNNQNGTVALIDNKFIKVPKLKSLIRIKLHRQPKGIINSRPKWKKNSNVNNVSCQDVPY

SEQ ID NO: 22606 - protein, 432 aa, unknown
  TnpB Polypeptide
MTRVLRTVLIKSVKLSRKVFRAFVELEGMYRNMVEQLVLYAVRSEVKSFTKLKALKYHKMRSLYPQLPSHYVYTACQDASARVKSFLRLKKRGLAKREYPEVRKVSIWLDDHLWRPDSLTSIRIATHRGWVRVELEPHRQYWRYVNREWKLASEAKIRLDKRNRQLIICLTFAKETKEYEPRGYLPVDVNENNVTTLVDGIAYLFETNTEKLVLGYYYRRKKVQEKYDKLYGKRSRIKKKVLRKLKEKKKKNDIKWKIANLIVRTAHERQYAIVLEKLGKKPASNMIRRISNKQLRHRIFQACFRGVQKAIEEKAREYGVPVILVDPKNTSKLCPIHKAPVNYNNGSRIGECSKGGELWHRDVVACWNLLFKALRGDGSHAPSPVGHDLDGSPVPLGSTATHDPVGLSKSLWARWKSLPQIQYATALNKMKR

SEQ ID NO: 22607 - protein, 380 aa, Pyrococcus sp.
MKRTVTVKLQPSKAQEETLKELAIISSKAWNKVNYLRRQEFFEGKPVDFLKTEKIVYEEFKSEIGSATVQQICRKNADAWRSFFSLIRSKRNGELPKWFKPKPPEYVKEGGLIILRNDQYKIEGNKLILKGLGKFKRLEVQFKGRIHLKGKQGKLEITYDPIKRKWYAHISYTVKEKLYGGEWVEVPRQPLGNLSAGIDLGVNNLMAVYVENGESFLVNGRPLKSIDFYWRERIADYQSKLNKSGAKKSRKLSRMHEKAKLQAKHYINTAVRQTVERLYHLGVSRIVVGYPKGISRNSNRGKKQNYLLSHVWRFNYVIKRLREVAEEYGIQVLIVDEAFTSKLCPVCGKPHKGQGLFEDYLSVPRRGLPLMPTWLELSTF

SEQ ID NO: 22608 - protein, 376 aa, unknown
  TnpB Polypeptide
MDTKDRKTLPMLKTHKIALDPNNVQATQFAQHCGYARVAYNHVLADFKDGLTNGEWCSHIELNKRFNSVKREQYEWCDALNQRAAHNAIYFNFHNAVKRWQSGESRFPKFKKRSKGQSFQADAGRGTTIIEGQRIKLPKIGWVRMFQTLRHLGTIVKVVISKTANRWFASITVDTFDNDTIADNGHLPVVGVDVGIEHLAVTSEGVYHENPNALNRYERKLKRLQRQLSRQQKGSRNWHKTKAKLAKLHYRITCIRQDTQHKATTGIVNGASRIGIESLNVAGMLKNHRLAKALSDVSLSSFLSMLTYKAERIGVKIVEAETFYPSSKTCSACGAKDKDLSLSDRTYHCSDCGHTQDRDLNAAINLRNVAVGHTET

SEQ ID NO: 22609 - protein, 408 aa, unknown
  TnpB Polypeptide
MKKTYEYRAYPTTKQRQLFTVWLALLRSIYNQALAWRIEAYQTAGLTVKWTTQANALPDLKQASEAFAGLHSDVLQDAMRRLDKAYKAFFRRAQNGEAPGFPRFKGEGRYRSMTFSHLSKHLVRNVRRKFAKVVVPKIGHLKIRYHRPLPDGKIRNLTILKRASGWYVTICVEVPDPIEVHVHTTIGVDVGLNSFAVDSDGEHIPNPRHYRQAEKRLAKHQRILSRRKKGSKRRAKQREIVARCHQRIANQRKDFQFKAAHRIVERCDEVAVENLTITNMLKNHYLAKSISDAGWGSFRLKLQSKAASAGKQFTKVKPHHTSQKCSGCNEIVPKTVSDRLHDCPHCGLVIDRDHNAAINIKKAAVALRGGVSVVNDPEIPRQGTEARNSVRPVGRTLQTSPVPSGRGN

SEQ ID NO: 22610 - protein, 324 aa, Oscillatoriales sp.
MPCKNVKIGIIRDRKTSPALQRINAQALQQVLRRLEKAFVSMWEQNHGFPRFKKRGTMRSFVFPQLSLNPIQNSSVKLPVIGWVKFWQSRAIPDGGIIKQARVVNRASGWYLMLTVEWDVKIPDVMPHGNPLGIDVGLTNFIATSNSLLVKRPRFFIDAERKLKLLQKRVSKKRIGSNNWRQAQKKVALLHEYVANCRRDWHRKISHQICNDVGMVFVEDLNLVGLSRGMLGKHCLDAGWGQFLTVLEQTCLKRGVYFQKVDARKTSQICPNCGVETGKKELFERTHNCSNCGYTTDRDVAAAQVVLIRGLAAVGHTVKMLASR

SEQ ID NO: 22611 - protein, 437 aa, unknown
  TnpB Polypeptide
MAITAEQLPDGTFRFHGRANDITIQKNKALEPFGKQVLNYGQVLRLLPTPEQAQDLNQQIGNARFVRNRYLEERIRLYQEKKLSLGVETFKKEYLPKLKEENPFLRRSDKFALEAALQSVDSAYRNFFSGRSGFPKKASRFKPNGNRYTTKHTNNNLSLALDKDGLPCIKLPKVGKVRIVLPAGKTFSGLCPSGTSIKKATINRQGDNYEVSLGMETVIDQIHPVEEVSVSDILSADMGLKDFAVLGDKEGFLKIRNPRWIKIHERRLRRFQKALSRKQYDRKTHTGSKNWYKAKKKVTKEQRKTADQRKDFQHKLSRCIADSCRVFVCEDLNIKGMMKNRHLSKAVASVGWYGFFQKVKYKLERTGGRFLQVSRWFPSSQTCSCCGYKNIDVRNLTVREWTCPECGSCHDRDGNAQQMILKEGIRLLKEMDVKVTM

SEQ ID NO: 22612 - protein, 300 aa, unknown
  TnpB Polypeptide
LFYDVNNFIHLATKSKYPIHSQSVQAVYEKFLRARENAHRAKIKGYTNIRYPWRQKKHYNTTWKKDGFKIHSNGKIELSIGTWRGKRQKTLMVQVKELPAYPVKEIELIWDRKLMLAISYDDGLEANKNNGLNLASIDPGEIHSISAVCENNQGLIITGRKLRSIKNLRNKKLKELQKKMSRCQQGSRQWKKYRKAINYVLSKSEAQLKDGLHKTSRCFVNWCLENQVKEVVSGDVEGVQRNTANKKINPKKKCRNKKQNQKLSQWQFGKLYKYLEYKLASDGIIIRKVNEAYTSQTCPA

SEQ ID NO: 22613 - protein, 388 aa, unknown
  TnpB Polypeptide
VSKTKRAYKYRFYPTQTQKHILAQTFGCCRFVYNWGLNTRKMAYAHGAKLTYNDLSAMLPELKKTHPWLGDVSSVPIQQSLRHLDKAFKNFYAGRAKYPTFKKKQGNQSATYASNAFTWDGHTLTLAKMDEPLDIHWHRPLPKDCKPSSVTVSKDCANRYFVSILVEEDIKPLAVINKQVGLDLGLTSMVILSTGKTVGNPKFYAKDEKRLAVAQRRHAKKKKGSKNREKARRKVARIHARIHARRRDYQHKLSTRIVHENQVICVESLAVKNMVKNHCLAKSISDVGWGEFVRQLEHKSQWYGRTLIKIDRWYPSSKTCHECKHVVEDLPLDVRQWVCPECGVCHDRDINAARNILAEGLSASACGGGVRPAAGRKGNPQRSRKAHS

SEQ ID NO: 22614 - protein, 428 aa, unknown
  TnpB Polypeptide
MKTISFKISYEDSNHSIKNDERIYSSIVRYSLERFYENKDQTSIRRDCVSKFNFTSYLITCAVKEAYGIYKKVKDQEKKVVFGDFKRYLKGLISKDEYKKSKNRGVYSEGDYMHYGNQLFQIDIENYSVVYKRKRNEHIVLNLCEKLSHKRKRILELLYLTMRNKQSPVSFRIKNDNLYITYDETVIESFKKFKELKSNRILGIDLNPNYIGLSILEFDDKDEFKIIHKRVYDLSSLNEDCSTNKVRYEIQQINNEILKLCKHFKVSKLAIEDLKFKKNNKFWSKKLNRLCKNKFRYSSIKQHLQTLCNVHGVEFIEVNACYSSFIGNFCYGSDSTPDMVAASIEIARRGYKKFQKEWFYPPIVTLERIKEVLRNQWKKELKLDFKFWKKLFEKIKESKLSYRFQLMEVAAVFRQNYYKKKVKAYIFA

SEQ ID NO: 22615 - protein, 392 aa, unknown
  TnpB Polypeptide
MYSVYKIQVKKNEYLDKVTTLSNNLYNFALYNVRQFFFENGEYLNYYGNYPLCKNNENYKQLYSQTAQQVLQQVDNSFKSFFKANKAYKKHPENFSGKPKLPKYKEKGSKSIVTLPGQHLKIKNNYLIFPKSNYKLFLGELKFDKIVEVKIKPYKTYYEILITYENNVQYKKLETNENYISIDLGIDNFVTITNNIGKKPILVKGRRIKSVNQFYNKKKAKLMSNVKNKGNSNKLDQLTKNRNNKIENYIHNVSSFIVKYCLENNIANIVIGKNKNWKQEVNIGKQNNQNFVSIPHSSFIFKLQYKAQRHNINVILNEESYTSKCDALAIEDIKKKDEYFGKRIKRGLFKSKCGLINADVNGSLNILRKVIGNDFISLLNRGLVMNPEVIVI

SEQ ID NO: 22616 - protein, 379 aa, unknown
  TnpB Polypeptide
MQRSHKIRLVPNKTQLVALKKAAGTSRYVYNWGLEQWEKQYAAYKEKKAERPDAYSLSRRWTKEKPDWAKEVNTSCQTHALLNLGSAWHNHWNKGTGKPAFKSKRGKQSFYVSNSKAYVQNSRVHLPKIGKVKMREALRFSGKVTAYTVSCEASQWYVAVQVELSDKAPSDNKSVVGVDVGIKDIAVASDGTVCDNPKALKEMERKLKRLQRKLARQQKGSLRSLDTLNKLQKLNLTAVSKRQDRIHKFTSALAKNHGLAVVETLDVQEMKESGSRWLRRLLQDTAMKEVHRQLEYKMRVEHAPKYYRSSKTCSNCGEVKLDLPLHIRVYCCEKCHSVKDRDVNAADNLKNMRWVTASMPAESPKETMKRETETDSLRV

SEQ ID NO: 22617 - protein, 390 aa, unknown
  TnpB Polypeptide
MLKSYKYKLNPSEEQIVLLNKHFGSIRFTYNFFLNERKKEYEINKNTINYYDNAKSLTELKKQEEFSWLNEINSQSLQDSLKNLETAYKNFFRFKKGFPKFKSKHDKNSFCIPQFVKLENGKLKIPKFKQPIDLILSRSFTGTIKQATISRTPTNEYFVSILVETEHNILPKTGKSIGIDLGVKDFVITSDGYKYKNNRYTKTYAKKLKEHQQHLSRKTKGSNRYNNQKLKVATIYKKITNSRLDNLHKVSTELIKKYDLIVLEDLNIKGMIKNHKLSKHISDASWSKFIKLLIYKAEWNDKKIIKIDRFFPSSKTCNSCGYINQKLKLDMREWSCPSCKTKLDRDLNASINILKEGYKQISSGTDDYRRGDEIRPTSVGTICETSKILD

SEQ ID NO: 22618 - protein, 415 aa, unknown
  TnpB Polypeptide
VQLVEKHIVKLNNINYEMFDKLTRLSKNLYNAGLYNTRQHFFATEKHKSWDKIEKEFISTDNIDYRALPSKVAKEIMRSMGQDFNSFFGLLEKKKQGLYDEKINIPHYKDKNGKHLIKFEKQTISKQVVELPNNLFEHTLCKRELNIKIISKQPNIDYVRILPRYKHFVVEIIYTKQEQRQPKIKQKDRKIATIDPGIRNLLTITFNDGRKPVIIKGGPIKSINQYYNKQRAYLQSKLPNDVYTSNKVNQLTTKRNRKLEWTFHNISKNIVNFLVQNEVDTLVIGKNINWKQNVNLGKKNNQNFVMIPFNKLYKQLEYKCELIGIKVKYQEESYTSKANCLNFDKIPIYGKNDENYKFTGKRNRGLYKSDCGKIINSDVNGSYNIGRKAFPKLYIKDGIEDVAGHPTLMNFLKCS

SEQ ID NO: 22619 - protein, 351 aa, Candidate divison MSBL1 archaeon
MRVRKTIQGGVVNLTRVKRGILTEEYEDLQRFLHGDNDVDLYSANKQQAERYYKKIKQGKEYPISIRKDLIDVQECDSDVCDYFVKVPVAGRHGGLKVPIKTHTRIKRDWEVCESKLYRKNGKFFINITVEIEVEEVKEYAGVLGIDLGLRNPVVSVALPSRETKFQGQKIKRIRAKYFYLRRQSKTGKGWHRREYNKVRDQLHKMTTEIADYAEENKLAVAVGDLSRIQKRDNGRKMNRKLHRFPHYSVRKMLEYKCKERGILYVEVSEAYTSQRCSRCGELGDRNKGVFKCSNCGLEIDADVNGARNIASRALGKPEIRPLVRAGAPVTVPRTLSREATSGASWEVISC

SEQ ID NO: 22620 - protein, 445 aa, unknown
  TnpB Polypeptide
MDVTKTLKIPIHYGTTKHKTDILERLTARISFCICLISELVEKAVMADFDGFELDRPTVRKLVKCSDVVERTGMSAGFVDQCIDKVVWEWKSYKTHHHKWESSLDSFLKTFDKTEDPEVRLENLLKREPEPPDFTGNKVPCRIDVRTGKVWFSESSSFSPLWMNISTLKKQKTIDVPLNPCKYHLKWLKKSEIRDFELVKFEGKFFANVSIRYTVEDREPSSIGGLDQGLNITGAIVLLPNPEDKCQIPVERIVTDEKRREVVFKYEEIRASLQRAGNLRKLKKLRHKIHNVAVDYDRHLAIKIADETEGSYLAIGDARFRQTQFRGNGMPTLRKDICKWAYGRQRTLIALKRAERGDTTVLKDEYMTSKIHHECGSRYTVRKYAVGQDGMKFSYLICYNCGAKIDADINAAYNIALRCRDDRLKAQMKGSKKPLSVQNGYPSIY

SEQ ID NO: 22621 - protein, 396 aa, unknown
  TnpB Polypeptide
MQITNKFRLYPSKEIENKLLDNLELHRQTYNILLAELNNQKEIDKAQIQGVIPDMKICDSRFKKLHSKAMQYECYRLFSNLQALRKSKKKRKVGRLRFKGKGWFKTFTYNQSGFKLTQTGKRHQTLWLSKIGNIPIRCHRNINGKIKQITIKKESSGKWYASVIEEKNITIPRQEIKKVVGIDLGLTDVVYDSDNNKITNPRHLKKTADKLAKVQRRLSKKEKGSNNRVKARLKVARQYERLTNIRDDFIHKLSRYYVNNYDAIGMEDMPIINMVHNKRLSKHILDACWGRFRQFISYKAENAGKLYLPINYRGTTKRCSQCGTNNPKELWQREHKCHNCGFIAPRDYNSALEIKRLMNMKIGQELPESTPMEMEALPMVTSVIEVGSLFQNKVFV

SEQ ID NO: 22622 - protein, 321 aa, Thermoactinospora sp.
VKFVVQVRLFPTHAQHVIKKVADAYTTVRAQVKAKLRDPLTKPIGFRKDAAQPFDDRCLSWQIPDRAISIWTVHGRMKGIRFGCSDEQARLLAAYRKGESDLVRRDGMWLLIATCDVPDTDVTEPGGFLGVDLGIASIATTSDGTRHSGKAVNAVRHRNRELHRRLQAKRTKSAKRLLKRSRRTEARFARDLNHVMSKRIVTEAARTGRGIALEDLSGIRDRVRLRKPQRATLHTWSFHQLGSFIAYKAARAGVALVHVDPAYTSQGCSACGHVDKRNRPDQETFCCTSCGFAEHADVNTARNIAARGVAGWAAVMQPDAA

SEQ ID NO: 22623 - protein, 405 aa, unknown
  TnpB Polypeptide
MTQRGSIYQLTPTTAQAANFAQTIGACRWVYNGCLTIWKQVFTTTGKSPTFGMLGKWLTWNRAALPWLRALSVDAQQQAIRDLRDAYRRFFKGQNRRPGFKSRRRARAAFRVPNRVMGFERLSKNVGRIKLPKVGWVTLRWSRPLHGDIVNATVFREAGRWYVAIQTKKESVPPIPKTEGAFVGLDMGVTQTVTASDSRTFQAPTPNLAKQRKLQRSLSRKVTFSKNWYKALVRLQCHRQHETNRLKDFHHKTSTALVSESQAISLEDLKVVNMTTRARGRGRRAKAGLNRSILAQGWGRFREMLEWKGAAAGCEVKRVDPAYTSQTCAECGVVAKASRKTQASFVCIACGHSDNADVNAARNILRAAGWAVLVCGANVRPPTPTGAVAVAVKQEPTGRQLSLVG

SEQ ID NO: 22624 - protein, 402 aa, Escherichia sp.
  misc_feature (38)..(38): Xaa can be any naturally occurring amino acid
  misc_feature (41)..(41): Xaa can be any naturally occurring amino acid
  misc_feature (43)..(43): Xaa can be any naturally occurring amino acid
  misc_feature (69)..(69): Xaa can be any naturally occurring amino acid
  misc_feature (80)..(80): Xaa can be any naturally occurring amino acid
  misc_feature (92)..(92): Xaa can be any naturally occurring amino acid
  misc_feature (95)..(95): Xaa can be any naturally occurring amino acid
  misc_feature (121)..(121): Xaa can be any naturally occurring amino acid
  misc_feature (135)..(135): Xaa can be any naturally occurring amino acid
  misc_feature (139)..(139): Xaa can be any naturally occurring amino acid
  misc_feature (146)..(146): Xaa can be any naturally occurring amino acid
  misc_feature (158)..(158): Xaa can be any naturally occurring amino acid
  misc_feature (173)..(173): Xaa can be any naturally occurring amino acid
  misc_feature (188)..(188): Xaa can be any naturally occurring amino acid
  misc_feature (204)..(204): Xaa can be any naturally occurring amino acid
  misc_feature (209)..(210): Xaa can be any naturally occurring amino acid
  misc_feature (223)..(223): Xaa can be any naturally occurring amino acid
  misc_feature (237)..(237): Xaa can be any naturally occurring amino acid
  misc_feature (239)..(239): Xaa can be any naturally occurring amino acid
  misc_feature (241)..(241): Xaa can be any naturally occurring amino acid
  misc_feature (247)..(247): Xaa can be any naturally occurring amino acid
  misc_feature (251)..(251): Xaa can be any naturally occurring amino acid
  misc_feature (256)..(257): Xaa can be any naturally occurring amino acid
  misc_feature (264)..(264): Xaa can be any naturally occurring amino acid
  misc_feature (272)..(273): Xaa can be any naturally occurring amino acid
  misc_feature (276)..(276): Xaa can be any naturally occurring amino acid
  misc_feature (282)..(283): Xaa can be any naturally occurring amino acid
  misc_feature (313)..(313): Xaa can be any naturally occurring amino acid
  misc_feature (318)..(318): Xaa can be any naturally occurring amino acid
  misc_feature (329)..(329): Xaa can be any naturally occurring amino acid
  misc_feature (336)..(336): Xaa can be any naturally occurring amino acid
  misc_feature (340)..(340): Xaa can be any naturally occurring amino acid
  misc_feature (343)..(344): Xaa can be any naturally occurring amino acid
  misc_feature (365)..(365): Xaa can be any naturally occurring amino acid
VKRLQAFKFQLRPGGQQECEMRRFAGACRFVFNRALAXQNXNXEAGNKYIPYGKMASWLVEWKNATETXWLKDSPSQPLXQSLKDLERAYKXFFXKRAAFPRFKKRGQNDAFRYPQGVKLXQENSRIFLPKLGWXRYRXSRQVTGXVKNVTVSQSCGXWYISIQTESEVSTPXHPSASMVGLDAGVAXLATLSDGTVFEPVNSXQKNQXXLARLQRQLSRKVXFSNNWQKQKRKIQXLXSXIANIRXDYLXKVTTXXSKNHAMXVIEDLKVXXMSXSAAGTXXQPGRNVRAKSGLNRSILDQGWYEMRRQLEXKQLWXGGQVLAVPPAXTSQRCAXCGHXAKXXRLSQSKFRCQVCGYTANADVXGARNILAAGHAVLACGEMVQSGRPLKQEPTEMIQATA

SEQ ID NO: 22625 - protein, 406 aa, unknown
  TnpB Polypeptide
MIKGYKYRLDPTSEQIVQMEKTFGCCRYVYNWALDLKIKTYQSEKRSMSAVDLCKQLTLLKKDDDRLWLNEVSNECLQQSIRCMDSAFTKFFREHTGFPKFKSKHRDKSVFKNVNSVRFDFKNNRVKIPIIGWIKFFANRSFEGKIGTITVSKSSTGKFYASVLIDDGIPNPDKFIINPDTTVGIDVGIKDFAVLSNGQIFSNPKYLESAQKRLGCLQRRMSRRKKGSNRYKKVKHDVAVCHERIRNRRQDFLHKVSKKIVSENQTIIIEDINVRGMLKNHCLAKGIASVSWSEFFRMLQYKSDWLGTNLIRIGRFEPSSKMCGCGYIHRDLKLSDRVWTCPECGAVNDRDLLAANNIKKFGLEKQNLLTQENINKTPVVNREGDVESLAIAGAVKRQIISVQTGI

SEQ ID NO: 22626 - protein, 708 aa, Nonomuraea sp.
VVGQQADRRVVADVAQPPQRHGRLRLVVDRRHHAPARHGEGDRHHVGPPARVGRGQPGHRLPGEPLPCPLRVHQNLPRGPAASAVGGIGSGRAVKAQACPDLPRPRITDVLPGFAGAGRYRGRLVTERGRWECAGRSGSCCAPPASRPPRSRSAWRITGSCTTRPSSTAAPPTAHRHRPMRGRVKTISVKREGNRWYVVLSCDDVPAEPLPAAGAVAGIDLGVAALVTTSDGVHVANPRHLAATADRLAAAQRDLARKRRGSTRRLKEVARIAALCGKVGRQRVDYAHKVANALVRGYDVIVHEELRIANMTRSASGTVEAPGRNVAAKSGLNRGILDAGWGVFLTILSHKAESAGRELIAVNPAGTSRTCARCGHCVRENRATQAEFRCRPRPGGVSGTYKSAPRESGHDERMNVNLSVIPAFLAGHARLLDRRRHDLLMGDGDATGVLAALEGYRNADGGYGWGLEPDLRAPESQPGAALHAFEVFEEIAPATAPQAAALCDWLESVTLPDGGLPFVLPIGDTAATAPWWAGGDPAVSSLQITSVSAAAAHRVAVHDPAVAAHPWLEQATRYCLDAIQAMKEPPHAYVLAFAVRFLDAVHDTRPRAAELLKRLGDHIPEDGRVRVEGGTEEEALRPLDFAPSPGRPARTLFEPEVIAADLVRLAGQQRDDGGWAVDYARISPAGAMEWRGAATVNAVKILRANGLV

SEQ ID NO: 22627 - protein, 498 aa, unknown
  TnpB Polypeptide
MPNKTQVELMSDWLITLRKHRNYALRERETGYNTNNRDAESSISYAWGSFCDIKTRVEYGSCCPLTCPILKHGVVPPQLELAVKTSKKTGTERWDSASGIQMKVTTTLRHERQNFARINSDVLQRNIARLDDAFTNFWKHGRGFPRPDRVLDSFEYKPGQIKIFDVTENYATVYLPGIGNVRMHNSRDLTQIQDIRTVTVSRKASFWYVSMLVEIPETIPNVKPIEESLSVVGIDVGINKLVAISDGSFVENIHPATNPRTVRRLAMRQRAASRKQKGSQNKRKAYDRIGKLQHKIAKAREGYLWQAASLIVKTADTIAREDLNICNMVKRAKLSRDGNGGYLKNGATAKTRLNKQILDAGWGTLFQMIAWIATKAGKPVIAVNPKYSSQECPKCHYIDKFNRDGEKFLCVECGYTEHADTKASITIVKRIGLIFPKKVKKILPADCGKVTPRKLSAPGCVESRNHAYEMSNTQLALFDVSEYNSSDSRIFRRYGRNS

SEQ ID NO: 22628 - protein, 476 aa, unknown
  TnpB Polypeptide
MLRAYRFALDPTPAQVRALASHCGAARKAFNEGLAHVKRCLDQRAAERSYGVPDERLTEVAWTLPALRRWWNASKDDLAPWWRENSKEAYSSGLDVLARGLAAWSGSRSGKRRGPKAGFPRFKSRRRARVSCRFTTGAIRVDDRSHVVLPRIGQVKTHESAAGLLDSVTAGSARILAATVRFDGRRWYCAFTVEAGREPGRPAHVAADRVHPVAGVDLGVRDLLVAAAPDGTEVARMPAPRPLAKAQARLRAVQRKAARQDGPDRRTGGRGSKRWARTAARIGRIHARAADLRRDALHQATTRLAQRHQVVVVENLNVAGMSRRKPGAGRGGRGLNRAIADAAPGEVRRQLGYKTTWYGSQLVVAGRWYPSSKTCSACGAVKAKLALADREYQCDSCGAVLDRDLNAAINLARLSEHAPRVEGRPAGSGPVAGRGAIRKTSPPTGAAAGGDEPSTPHSGQRAAGQTGTAPPQGEAA

SEQ ID NO: 22629 - protein, 420 aa, unknown
  TnpB Polypeptide
MRAEPPFFVSIGISLGVFYWKHGMIVSYKYRAYPDAAGEARLHEALDTCRWLYNTLLEECNTARENGSSLTMQETQARIVTLKEEHPALKEVYSKVLQMVNYTLWSNIRALSETKKNGRKIGKLRFKSAARYRTLNYNQSGFTIDCEGEFITFSKIGTIPFSMHRPYSGEVKGVLITRSGDEWYVIIQADQEVAAPRREGRSVGIDVGLNSFAVDSDGRVIANPRFSERSRARLKKLQQRVARKQRSKNRENAKKKLEKAYAHITNQKNDFLHKLSRRYVDAYATICVEDLNVKYLKENGKSRGLRRSIHDASWGRFLAFLSYKAESAGTEFIRVDPRDTTQMCSNCGRIVKKDLSVRVHECPYCGFVADRDYNAAVNIHRVGMEQPLEPVERIPLHHISVMQVLSMKQEAPPKRRGVVH

SEQ ID NO: 22630 - protein, 259 aa, unknown
  TnpB Polypeptide
MQWRMQSHEAYKALPAKVSQQVLMQLHHDWDCFFKGRAAYEQDPSKFLGRPKLPGYKHKSEGRNLLVYTMQAVSRGRRSLDRGMIKPSQLPIVIKTKQEPATIDQVRIVPRKGFYVVKVVYEKTVKQAEVNPAYYAGIDIGLDNLVALTSNKPGFESVIVNGRPVKSINQYYNKRKADLQKQLGHTGTTKRIERMTNKRNRRIDHYMHTVSKQVIDLLVQDGIGVLVIGKNDGWKQGRTWARKRTKTLCKCHMHALSRC

SEQ ID NO: 22631 - protein, 383 aa, Lactobacillus sp.
MIKGIKLRLYPNQMQQNLLFQMFGNTRFVWNQMLAMAKARYKNNPSSRFIDEYGMNYLLKPLKEEYPFLKNSDSTSLQVTNHNLAQAFKMLFQHKGGYPHFKSRKISKQSYTGRNGCRVEAKRRIKLPKIGSIRTSKTTHLIGCNIKRYTVTYEPTGRYYVSFQVETEINQLPKTGDAVGIDVGLVNLAITSDGKKYGNFNAHWEEKQAQIWQSKFSKRKHQATVAVRQWNHNHQDSQIELNDYQNWQRARVQRARYQKKIADKRKDYLHKVTTDLVKRYDVIVIEDLKTKNLQKNHHLAKSITNASWYQLRMMLEYKSQWYGKQLVVVRPNYTSQICNKCGYHSGSKPLEIREWTCSQCGTHHDRDINAAINILNKGLKAIG

SEQ ID NO: 22632 - protein, 457 aa, unknown
  TnpB Polypeptide
MLTGIKTHFYPDDNLAEMLSQWIGCARVIYNAKCDEDAYLRTFAKKYLPVGTFPDINKSTSQYKDKALTPWLYQCPSQILRNSATIWAKTYQRFLKGLGGRPKRKNKAKGNYIWVTKELFRIRWEGRTCVLTLGTEANPVGSVRIKWNKSRIPKCPPASVWIKKTAHRWYVSFSYDDGHILEDVSNKEHLNHLRQFSEDELAAMITSVDRGVAKPLHTNNAIYFLSNKEKNQMADRERKLKRYQRKMARQVKGSSRRKRTIQRIAKLHEKTANVREDFWHKATRSLVDNSQVVVIENLKLKNMTKRPKAKQCEKTGKWLKNGASAKSGLNKAMLNVSLGRFEVLLKYKMEKACKPLFKVAPHHTSQECTCCGYTHPDNRENQADFKCKSCGHQDNADHNAALVIRKRAIKLILDSGTELVGKDKNTLQPRTSANSRKTRGVKTPVATNCLSKKKIAA

SEQ ID NO: 22633 - protein, 384 aa, unknown
  TnpB Polypeptide
VVKPKTIHRAIKYRLFPDEEQEIQINRTFGCVRKVYNMGLEMQMGLYASGFKTMSKTDMNNYCNRAWKTEFPFLREVDKFALTHSIYDLDAAYKNFFEGRAKFPRFKSKKNPRNSYTTNFTNKNISVTGGKNGKGSIKLPKLGSVDAKVHRVPPANWNITGATISKSASGKYFVSILFSIQAKIPAPQLDEDNAIGLDYSSPDFYEDSDGNKPNVPHAYRKSERRLAKEQRKLSRMEYGSQNYLKQKKVVAEIHEHVANQRRDFCHKESRKIANSYDIVCVEDLDLHAQAQALRFGKAIGDNGFGMFRTALQYKLDEQGKAFVKIDKWFPSTKTCHHCGTYNPDVVLGQNKWICPGCGKIIPRNKNAALNIRDEGLRVYRQRAR

SEQ ID NO: 22634 - protein, 363 aa, unknown
  TnpB Polypeptide
MLRAYKYRIYPTDEQKVLFAKTFGCCRFVYNWALNLKIEAYRQEKRSVAYKEVQDRLVNELKKENQWLAEVNSQALLNSIRNLDIAYKNFFRDTHAVEFPRFKSRKNRQSFQCPQHCSIDFAKGTITIPKAKDIPAVLHRGFKGTVKTVTVSMTPSGRYFASILVDTAIQEQKTSEPVHDTAIGIDLGIKSLAVCSDGRTFGNPKNLSGSLDRLKVLQKRLSRKRKGSSNRNKARIRVARLQEHIANCRRDNLHKITRYGVNLIKIDRFAPSSKTCCKCGYVYKGLKLSEHSWTCPECGTRHDRDFNAACNIKEFGLKALPSERGDVKPVDCPTVDDRPHVLKSRGRKKQEKRRDNSLRSLCL

SEQ ID NO: 22635 - protein, 374 aa, unknown
  TnpB Polypeptide
MNKAYRYRLYPSAEQAILINKTFGCVRFVYNKLLANRKTIYEQYKYDKEVLKQQRYSQPADYKQEFEWLKEVDSLALANAQLNLNTAYKNFFRDKAVGFPNFKRKHGDRKSYTTNNQKGSIRLIDSKTIRLPKLKDIRIKLHRELPLNSIIKSATISQTPTGKYYIAILVEFEAKIEPVKPTVETTLGLDYSSKSLVVDSEARSADYPRFYRKAETKLQQEQRKLSKRLKGGKNRNKQRRKVAKLHEKVAHQRKDFLHKLSRQIANAYSAVAIEDLNMRNMAQCLKLAKSTNDNGFGMLKTFLAYKLAEQGKQLVTIDKWYPSSKLCRYCQTIFMELTLADRTWSCKNCGAELDRDINAAINIRNEGCRILGIA

SEQ ID NO: 22636 - protein, 272 aa, Ammoniphilus sp.
MFTKSRKRSKPSFYNDNIKLKVRPGEVLVEKAGWIKTSEQVPMDVKYTNPRVSFDGKYWYLSVGIEQELEKPILTDEVIGIDVGIEKLAVCSNGMTFKNMNKTANERKIEKRLRRLQRNASRKYEMNKEGGRFVKTRNLIKIERTIRLLHRKLTNIRNNHIHQTTTAIVKTKPSSVVMETLNIQGMMKNKHLSKAIAKQCLYDFKTKIQYKCERYGIRFIEADKWFPSSKMCSGCGDIKKDLKLSDRVYQCGCGLKIDRDLNAAINLSKLAG

SEQ ID NO: 22637 - protein, 418 aa, unknown
  TnpB Polypeptide
MEVRRTVPVTLDVDSDDAALLEDTVDTFLWSAQYVIDHAFQGEYVTTSKTTLDDETYDDVREATNGFNGGLVQAARNKAAEACKSVVARWKKGKKASKPRMTSPHVVYDHRTATFHDEYVSLATVDGRIEADYVLPDKDSDTPHSEYLFSDEYETTGAELHRKHGEWQLHIHCKKEVESDTPEQATTTYGTVLGVDLGVNNLAVTSTGTFWTGDEFDHWRREYENRRGDLQERGTRWTHENIQSMGRKEEGRFKMTLHRIANELVAEARDHDCSVIAFEDLTDIRERTGSSWEHKWAFNRLYEYAEYKAAEYGIDVAQVDPENTSRRCSTCGFTHPDNRESKSFKCQKCGYQNHADYNAAKNIGLRYLRRNQTGGGEGAPLGVRLNSGTLNVNGDYESPAEVSARTGVHAESHPFTGG

SEQ ID NO: 22638 - protein, 415 aa, Chloroflexi sp.
MKILRAFRTELDLNDKHVTLCLKHAGAARFAYNWGLAQKKMAYEHGEKIPNAIDLHKRLNLLKKSELAWMYEVSKTTPQEALRHLDKAYANFFRRVKQKKQGNLSGKAGFPKFKSKKKGIGSFQVWGSIHIFEKAIQLPRFGKIRLKESGYLPTEDVKVLYATVSEKAGRWFVAVQCEVEMPEPLVDSSKPVCGVDLGIKTLATVSDGTQFANPKALQSALKKVKRLHRIVSHRQKGCKNRKKAVQALATAYAQTTNIRNNTLHQFTTWLTKNKSAVVLENLNVAGMKRNRRLSLAISDVGFGEFRRQMQYKGAWYGCQVILADRFFASSKICSHCGHKKDVMLLSERVFRCEKCGLEIDRDLNAAINLEHLIKYNTTASSAGSYACGEDVRPVFNRQPSVKQEQNNKSTMCRFV

SEQ ID NO: 22639 - protein, 451 aa, Haloarcula sp.
METTQRTLVTKPRNQMQVKRQVDPHAWDASKLWNVGLYQLFEWLDNSNLPSGDLDHALKRKLKTHERYNGLHSQSSQQVLEGLATAFNNWLESDDDRDNPPSYRKQWYHDSEGRLVHEEHPRSTVTWKSTAIRHDEQNHRLRLSKGDNHKSSPGAWEYILVHYEKPEHYDLGEISEVRAVWNDGSYEIHIVHEVEIASESPGDGVAGIDLGICVPAAVAYPDEAAIYPGNTLHEDRHYFTREEYQTEGGNGPSNRAQRARETLSRRTTDFRHKLSHEIAETCAEKGVGRVIIGDLSGVEDDDWGRHGNKMLHNWGFSELSSLIEYKCRERGIEVELKDERGTSSECSRCGHEEDSCRVERGLWKCSSCGTVIHGDVNGADNIRQKAISVTPPLAEVVDSANGCVAQPVVYLFNRTRGFQPRHSEGSCKPKHSNSASESPNNATPEAGSPPL

SEQ ID NO: 22640 - protein, 218 aa, unknown
  TnpB Polypeptide
ISVVKSVPIKETGTIMGVDLGIKNIAVTSTGKFFKAGVLNDKRRQYAERRSKIQRKGTRSAHLLLKRMSKRENSFSRWVLHNISRRIIEEAKRVGASVIAMENLKGIRERTKKRGKSHRHRISLWAFSKLQKFIQYKALEEGINVQFVDPKYTSQRCSKCGSVCQSNRNGSVFRCRMCGYQVHADYNASKNIALEGKSSFLGWVVCKPAWNREPVVVH

SEQ ID NO: 22641 - protein, 523 aa, Moorea sp.
MPKKVGATRKISTQIVPIVGMTESVKAELLSTMKKLGIVRSESYNKLGSISHWGLDWKKAIPEIKSFRTPETLGLPAKIMDWTINDVAKAITAQQAACIDAVAKKIYRRFPGKENQNKRKELCKQLKTLAFLDNSLLHRLVRKEFKRGHSWVKNQIVYQQVGYKCKRLSRNTYQLELAGLRRGKRNRIVIRSNRKIKGQIRLIHNQILQRFEIHFLVDHGTVEIPSERRSIGVDKGYTEVFYDSEGQAHGKGLGKATTKKSDRICAKNRNRGKLWALHRKLEKIDPAKSARILENNLTRKTENRRYRQNQAELAAIIGAASKSLFNGEALKVFAEDLTQPIKGKRQSKAVSRKLNNWMKGAIRDSLQKWANWTGSVVTEVQPSYTSQIDSRTGTLLGERTGDNFTGIDGVVLQADDNAAQNILARGTDKEIGKYMSKTEVQAVLLRRTARFLRGMGLSLVDGVELGWLDPKHTKTKAFKQLLVEMPGSPKQTSGRFNSNYRLTTSHLGSNKLHLDRFIPDCPD

SEQ ID NO: 22642 - protein, 459 aa, Metallosphaera sp.
MTLPSGQLQYHEEREPISPAMPEGNVRTTVVRLFPSGAQQKKIRRLADASARLYNEVNYERRQQFFKDKRVDFKGTWDKYYEKYKRILGSANAQAVLQKDNEAWSSFFSLLKNKDSLPPFTKHVSPPGYWKENEKRKLILVVRQDRYEVDEERRVLILKDWKMEIPFAGRLRWFGTQGRLEVHIDGDKFYAHIPVDVGRVTTKKSKRPMKESLIVHGERDRVQVKTPKGEKVASIDLGINMLATVTVDDGTVLFYRGSTVKADYFYFQKKVAELDKLKAEAEKVQETEAREEVLSERERLFKRLYRRLLHHYRALSSHLSKTLWQLGVSTVYLGYPYSISQDKGNKFTSNIWSYRKLVEAITDKLHEYGIKAYLTVEYNTSRLCALHGVVVERKPRGVVSCPLGHRLHSDINGALNIMKLGIKRTVNVLKKPLSFLVSSNGVTPVKGSNTSDLGGTLAL

SEQ ID NO: 22643 - protein, 373 aa, Metallosphaera sp.
MGRRAKKGGNEIRATVSMKVSPTAPLLNLVSNYEKGLRFVLEWLRENRPKKLLKETHDGTYETLRQKFNLPSKLAVDCYRDAIAKYKSWLNNPKRGKYPTVRSVSVWLTPVQSYFIDFDKMSVRIAGVGEVPIEGYPRNLSFYKDWELREARLVLRDGKAFLKVSFLKESKEPEASDGIAVDINMAEVVVGKDDRQYVRIPTRLDDAHYYKSLAEDLQKKYEKRWKENDRILNRVRSYHRKARDVLEDSAKKVGKWIAEVAESFNVSAIFLEDLNNLIKNVKKLPSEFRDRLYLMQYRRLQYWIEWQAKKHGLKVMYVDPHYSSTKCPKCGSKMEEVVHRYFRCPCGYENDRDVIAVMNLYGRGSLSLSTAPT

SEQ ID NO: 22644 - protein, 440 aa, Metallosphaera sp.
MVLGSTRRWRSASRRLRINSFAPPEESIYLTYAVKNDKKEETLLLIREYKKLLGKALDYLWNKTRVETESTTVKRGRHKRVKVIIPKKKEVYKGLREGLEEVNPLASHYVDKAISDAFSVLKSWRKRAIKGRVSLGKPRLKRAYVRVKSTLRKVVNDEVRVTVRPHQYLTFSWGKEWFKDRVNGLELGEPVIKEDKVYLPFRYKAPTQTPLDFLAVDSNLSTLDAYDGEKFVTFSLKGLYSLKYSIVKKKGKVQSFASKHGKRGRELLRKYSHRERHRVLDYVHKFVNALLELYPLTTFAVERLDKQSMFKDASGKLSRKISRTVWRSIHKVLKYKAPLYGSRVLEVNPYLTSRSCPRCGYVSRKVGKTFVCQRCGFKLDRQLNASLNIYLKMCGFPHLDGIPSRWVGVTPLMGRRRMKEGPLDSREAQGLRIDIKYEIR

SEQ ID NO: 22645 - protein, 276 aa, Metallosphaera sp.
MKEKLVEAKIVDYGKLKQIYSDIMYYIEYSKALEKSGVKTKPSPPPYLKEMNVILSKPRLGPVKLIGDGPSFRLEKLNAVVESEEYGKPIYALVDFTNGIKVFLAYQFDDPIVGIDLGIRHIFTVVAVVRDGKVYKSKYIGSSGIFDTFTKYMSESQGLSYVAEIKSKVRVAMKELIAFLNEINPKMVALEDLRLYDARIGRGLKIIEDELERELMEKGIRFKRLDPRNTSKVCSHCGYKKGEVLGSIFVCPACGYKVDRDFNAAYNLALKCYYTC

SEQ ID NO: 22646 - protein, 399 aa, Metallosphaera sp.
LIREYKRLLDKVLDHLWNKTRVEVESITDRRGRHHKRVRVTLPKKKEVYKGLRDQLEEVNPLASHYVDKAINDAFSILRSWRKRAIRGRVSLGKPRLKRPYVRVKSTLRKVVKDEVRVTVRPHEYLTFSWRGAWFKDRVKGLELGEPVIKEDKVYLPFRYKVPKQTPLDFLAIDSNLFALDAYDGEKFVTFSLKGLYSLKYGMVKKRGKVQSFASKHGKKGRELLRKYSHRERDRVLDYVHKFVNALLELYPFTTFAVERLDKQDMFKNASSKLSRKISRTVWRSVHKVLKYKALLFGSRVFEVNPYLTSRSCPRCGFISRKVGKTFACERCGFKLDRQLNASLNIYLKMCGFPHLDGIPSKWVGVTPLMGRRRMKVKNSLDSREAQGLRIDIKLYEIR

SEQ ID NO: 22647 - protein, 432 aa, Metallosphaera sp.
VLKSLRIDNFTPPEESIYLTYAIKNERREETLLLMTEYKKLLDKALDYLWNKTRIEVKSTTDKRGRHNKKVKVTLPKKKEVYKEFRDQLEKVNLLASHYVDKAINDAFSILKSWRKRVLKGRASLRKPRVKKPYVRIKSTLRKVINEEVRITVKPYEYLTFSWRNTWFKGRVKGLELGEPVIKDDKVYLPFRYRVQPQTPLNFLAIDSNLFTLDAYDGEKFVTFSLKQLYSLKYGMAKKRGKVQSFASKRGKKGKELSRKYSHRERDRVMDYVHKFVNVLLELYPFTTFVVERLDKQNMFKDASNALSRKVSRTVWRTIHNVLKYKAPLHGSRVVEVNPYLTSRSCPRCGHVSRKVGKTFTCERCGFTLDRQLNASLNIYLRMCGLSHLDGIPSKWVGVTPLMGRRRMKAGNPLDSREAQGLRVHIKLYEFQ

SEQ ID NO: 22648 - protein, 382 aa, Metallosphaera sp.
MGRRAKKGGNEIRATVSMKVSPTAPLLNLISSYERGLRFVLGWLRENRPKKLLKETHDGTYETLRQKFNLPSKVAQDCYRDAIAIYKSWLKNPKRGKYPTIRKVSVWLTPKLSYSIDFDKMVVRITGVGELPILGYPRNLSEYKDWEVKEARLVLKDGKAYLKVSFLKDWKEPGAKDGVAVDINMAELVVGKDDEKYVRIPTRLDDAHHYKSLAESLQKKYEKRWKENDRILNRVRSYHRKARDVLEDSAKKVGKWIAEVAESFNVSAIFLEDLNNLIKNVKKLPSEFRDRLYLVQYRRLQYWIEWQAKKHGLKVVYVDPHYSSTKCPKCGSKMEEVGYRYYRCTSCGYENDRDVIAIMNLYGRGSLTLSTAPQMRDVTPNR

SEQ ID NO: 22649 - protein, 382 aa, Metallosphaera sp.
MGRGAKKSGKEIRATLSMRISPTAPLLSLVSNYEKGLRFVLEWLRENKPKKFLKDTHKGTYETLREKFYLPSKVAQDCYRDAIAKYKSWLNNPERGRYPTVRNVSVWLTPGLSYSIDFDKMVVRIAGVGELLIEGYPRDLPEYKDWEVKEARLVLKDGKAYLKVTLLKDWKEPEVKDGVAVDINMAELVVGKDDEKYVRITTRLDDAHHYKSLAESLQKKYEKRWKENKRVLNRIRSYHRKARNILEDSARKVGKWIVEVANLLNVSAIFLEDLNNLIKRVKKLPGQFRDKLYLMQYRRLQYWIEWQAKKHGLKVVYVDPHYSSTSCPKCGSKMEEVGRRYFRCINCGYENDRDVIAIMNIYGRGSLSLSTVPHMRDVNTNR

SEQ ID NO: 22650 - protein, 423 aa, Microcoleus sp.
MPEVFSIPVPLSGIILVMKQVLTIVVKLQPTPEQVAKIEATLQAFADACNYVNEHTAPKLTNKIAIQSLTYQTIKNEFNLVANMAVRACARVAANRKVASQRGKPVKSFAPSSMDCDKDLFRFREQDWTVSLATIHGRERIELKAGNYQRGKLKGTNPTSAQLCKHRDGQYYLHIQVKDDAPDPKDASKVLGIDLGRRDIAVTSEGEKWDGTGIQQVRDKFSRVRASLQKKAPKGTRTTRRRCREVLRRLSGRERRYQQWLNHNISKSVVRRAVSLSASIAIEDLSGIRERTNEQPRNKTERRRSNSWAFYQLRTFIEYKALAKSVRVIPISPAYTSQMCHNCLHIHPVKGKSYRSGKTFRCGHCKWHGDADFNGANNIALVGLFINQPGGTGLSCKLNRTIEYVQLNLFDNFRATENPDLSS

SEQ ID NO: 22651 - protein, 411 aa, Glycomyces sp.
VSYPVFSIERVGKQVVQVKLVPTPVQAAALAATLSAVNVAANWTSGVAFVHGVPREYALRQHTYAELKARGLGSQIAQLVIKKTCHAYATIAGLIKTGRLQGKRAAKATAKPVAFRAEAAQAFDDRCLSWQYDARTVSIWTVAGRMRGIAFTGHIDQLKLLEEHRRGESDLVFRDGSWYLMATAEVADAAPNTNPGDFIGVDMGIVNIAATSDGDNYEGEGLRRYRRRMAKVRAELQAKATKSAKRKLKARSRREARAVKDNNHRIAKQLVAKAERTGRGIGLEELKGIRDRVRLTAAQQGELNSWSFYQLQAFIAYKAKRAGVPVVVIDARNTSRRCPLCGHTEKANRPTRDVFACVGCGLAAAADQVAAVNVRDRARMTWAFVNTPNVADTPQPAAGTSDKLPASTGSS

SEQ ID NO: 22652 - protein, 289 aa, Bacillus sp.
MKLNSRFEIHPTEEQQHTLERGISICRQQYNSALLDKQRYYKQNKKDLTRYELQDQQKLDKKIYHFLKKVPSQPLQEVFARLEKAYKKFFKKDAGYPKRKSFKEYRSITLIQFGMFKYKKKDGSFGTSRRMCSLTKGGKLLISKLGVIDIKWHRKLDGRVKQVVIKHQGNRWFATFCVEKHVNQGSICDANKTTGIDVGIKKFAVLSNGEEVQNPTFLRKEERKLKRAQRNDFLHKLSFRLTNSYGGICIEDLKIKNMVRNRHLAKSIHNAAINIEKAGLTQIAYQPAY

SEQ ID NO: 22653 - protein, 393 aa, Nocardia sp.
VQLRYSFRVYPTSTQKIALARAFGCARVVYNDHLRAREVALASGEKLSDNDIQRLVVTEAKRTPERAWLDSVSSVVLVQACQDARAAYRNWFDSLSGKRAGVRLGRPRFRSRKDNRQTIRLTRNGFRIRRNRKLYVPKVGELSVRWSRELPSAPSSVTIINDASGRYFASFVVQVDQEPLSTSNVEVGIDLGLSTFAILSNGKTVASPRFLRQAERRLKKAQRALSRKKMGSRNRAKARIRVAKVHARIADTRRDWTHKHSTAIIRENQAVFVEDLCVRGLARTYLAKSVHDAGWGMFIRMLEEKAARYGRTFGKVDRWFPSTQVCSACGTSKGKMSLNVREWTCTCGATHDRDLNAAINILAAGRAESRNACGGAGSPTAWRMAGPIEAGTR

SEQ ID NO: 22654 - protein, 371 aa, Lentzea sp.
MTLGQRRQRFLTKGIRTSYRETDNALTEWKRTEGLAFLSEVSSVPLQQTLRHQHTAFQNFFAQRAQYPRFKSRMGRQSAHYTRSAFRMRDGLLTLAKNATPLKFVWSFNDIDVVELDPTMVVISRDPDGRWYATFAVDTDAPVSAEPTGRSIGVDLGLSDFLVTSDGERIANPRHLAVKARNIARYQRRMARCQRGSSNRRKAKAKVARAHRKVRNARQDFLHRSTTRLVRSADVIVIEDLNIRGMVRNRHLARAISDVSWGEFRRQLEYKCSRTGRALVVIDRWFPSSKLCSTCGHRLTQLSLSSRHWTCPSCRTRHDRDINAAKNILAAGQAVARGDSGDACGADVRRKGSPLPQSAAKQEARVVGEVK

SEQ ID NO: 22655 - protein, 584 aa, Lentzea sp.
MFKGWAQRVVPRDGVVSVTEQRRGDTGRREARRPDRPPVDAGSGEGRFVQVGGSHVGTAQVRVREVGGAEIGTFEAGAAQGRLAQGDSSQVSAAQVDVGQVQRRAGLSGEDRQGRLDVQFRAPASGQRRVLRSRPGRSFAQEVPDGDVHEQAALRGLLRDLFEQVQPADPELGLVALQQLDGAAVPVDELAVPDLEPGQGTGRDDQQRSGERRQHRARSGRRHQQGDTQREQGDRPEPDHPLAHGESSSRPQPPGGIRCWSSQSGCREWSGCTGRATCDQEGRGRLHGATREHSSREPRQASFEAPGEGRVETDRVPAGCGAAVRRPVPVVEPGRGQRVDLDHGGPDEGRAVRRFSSPAQDLREYRKGESDLLHRDGMWFLMATCEVPEESLFEPVDWLGVDRGIVNLATTSDADNFQGRGLNRYRRWHARVRSELQARRTKSATRRLKRRARRERRHAAHVNHKIAKQLVAVAERTGRGIAFEDSSGIRDRVTVPRHQRATHSSWPFHQGHLLLSLVRSRWTRRRRRRRERPKPGTVGVGARQRTRTRRRISGGLMRPARHTQWRTENATRLEGSSITLVLQN

SEQ ID NO: 22656 - protein, 336 aa, unknown
  TnpB Polypeptide
MEKAYKFRIYPNKTQESLLQKTFGCVRFIYNYFLDKRIKAYEQNKKTISYNECSKELTQLKQEKKWLKEPDKSSLQNALKNLDTAYKNFFNRQKVGFPKFKSKKNRYKSYKTNMTNNNIVFLENKIKLPKIGKIKTKDKYRQIEGRILSATVSQTPSGKYYVALCCTDLPQPEFIKTNKYVGLDLGIKDFVITSDAVKYSNPKYLQKSLTRLAKLQRELSRKTKGSSNWEKARVKVAKLHDRIVNQRHNLLHQVTCQLIRNYDVICLEDLQVENMMKNHKLARNIADVSWSEFMRQLTYKAKWFGRVIVKIDKFYPSSQLCHVCGYKNTEVKDLKC

SEQ ID NO: 22657 - protein, 330 aa, unknown
  TnpB Polypeptide
MRKESYEEGKKIGYTQTSAMLTELKRQEEFAFLKAADSIALQQSLRDLDRSFVNFFQKRASYPTFKSKHNRFQSYRTVNQKDNIRIVGRYIKLPKLGFVKIRQSMEVGKINHVTIEYTPAGKYFAVLNIDFEPEPRPNAGGTIGIDVGIKAFYSDSNGNTVSNPRYLERSMRKLIREQRRLSRKQKDSHNRGKQRLRVARVHEKIANQRNDFLQKQSTMLVRENQTICIEDLNVKGMIRNHKLAKSIASVSWAKFFKMLEYKAIWYGNEIQRVPMMYPSSQTCSSCGYRNPRIKNLSIRIWECPKCHAVHDRDTNAGINILKKALQMQSA

SEQ ID NO: 22658 - protein, 384 aa, Lachnoclostridium sp.
MLHPNNKQKTKLFQSAGVARFTYNWALCREQENYNEGGKFLSDKELRKELTILKTKEEYQWLNDYSNNITKQAIKDACNAYKRFFKGESKFPKLKSKKKSKPGFYVDTDKIQFTNNKVKLEKITTSKKQNKQKQNWIRLAEKDRIPVDGRYVNPRITFDGINWWISVGIEYPEQKEAAKNEGIGIDLGIKDLAICSDKNKYQNINKTEKVKKLEKRKRRLQRSISRKYEKNKKGESYCKTSNIIKKEEELLKLNHRLTNIRQNYLHQTTTGIINRKPKFIVLEDLNVKGMMKNRHLSKAIQQQCFGEFRRQIEYKCRCNTIPLIIANRFFPSSKLCSCCGKVNRYLKLSDRIYKCVCGNIIDRDYQVALNLKKYGENVLKQSVV

SEQ ID NO: 22659 - protein, 441 aa, Clostridium sp.
MRITSSYGVEIKKQNIPIRHTLRIYRSAVSYLIQVYAESWEELSQIDNAKKRFNAAEHLVHETKKNHARYDFDLHFPKMPSYLRRAAIQHVLGSVASYETRLDLWKNGLLTGKPKLVSENHAMPVFYRDVMYREAEPQEDVAYLKLYDGHDWKWFRVKLLHTDMEYLRKNWVREKASAPTLEKRHHKYFLRFSYTEEVSLTKTDIKEQTICSVDLGINTDAVCTIMQADGTVLGRKFIDFPSDKDRLHHVLGRIRRFQRQHGSGQTQSRWAYAKRLNMELARKTAAAITAYAAENHADVIVFEYLEMQGKISGNKKQRLHLWRKRDIQKQCEHQAHRQGIRVSRISARNTSRLAYDGSGPVVRNPENHSLCIFQTGKQYNCDLSAAYNIGARYFIRELLKPFSETERSLLEAKVPSVKRRTSCVYADLRLLSAELASQKAA

SEQ ID NO: 22660 - protein, 253 aa, unknown
  TnpB Polypeptide
MGRYQAERFTAAKGQCDLVRRKDSKWFLLVTVDLPDGTKPPITDFLGVDLGVENIAADSDGQRHSGAHVEACRMRHHALQRDLQKAAVGRRRRGLRPKNIRRKLKSLAGREARFRKDVNHVISKTLVAKAKGTGRGLALENLQGIHNPTRFRKQQRAKMGGWAFRQLRSFIDYKAKQAGVGLVVVDPSNTSRQCSVCGHIAKANRPSQSEFRCVVCEHADHADVNAARNIRFRARAAVNQPIVSEQRMELHAA

SEQ ID NO: 22661 - protein, 367 aa, unknown
  TnpB Polypeptide
MEKAYKFRIYPNNEQIKQIQQTFGCCRFLYNHFLAERIKRYTEAGENLNYYACSAMLTSMKQEFIWLKDADSTALQSAVKDLDTAYANFFRRVKHGEKPGFPQFKSKKNRRKSYKSKGNIQVLNKHIKLPKLGNVKAKTSKQVQGRILNATVSQSPSGKYYVSICCTDVEIPKYKSTGAVIGLDMGIKKLLSTSEGVIYPNHKYIRKSERRLAKAQRQLSRKQIGSSNRDKARVKVARVQEHIANQRADALHKLTTQLVKDYDIICIEDLAIKNMIRNHKLAKSIADVSWGELVRLLQYKCDWQCKKLVKVDRFFASSQLCNACGHKNAELKNLQIRHWICQSCGTEYDRDINAAKNILSEGLRLIA

SEQ ID NO: 22662 - protein, 377 aa, unknown
  TnpB Polypeptide
LGNGEYVWAKVSRSVKRKTDKWIGFISSIEHAEKTGDWFPYTVRLKLRNGKIYAQFSREEKFPEVAIKKDNGVIGIDINVYPFHLALVHVAKDGNLEKYEPISLDKLLEVSSEKREYLSWQVAHQVVEIAKRERKAIVVENLEKLPKGRRGDGLPKLRQKLQKWVYKGLLQKIEIVARRNGIQVIKVNPAYTSIIGKLKYAPLYNIDKDTAGAYVIARRGLGFKERLPKKYKELLKDTEFLSYTIAKIEGKIARLKQEIREEKNEYKRNRLKSILWKTRKELDTLLRYLRESGESESAAQQTVNRKMERVRGLTHVRQKSWQVLSVALAFSCLESLRDFSPLKRVILTRDWVGVAKRNGLVPLPGQGTNALNMYSFV

SEQ ID NO: 22663 - protein, 434 aa, Vulcanisaeta sp.
  misc_feature (434)..(434): Xaa can be any naturally occurring amino acid
VRTVRLRLLPSGAQERRLRKIADATARLWNELNYARLMQFREGGEVDFEGTGYEFYHRYRDRLGVNAGQVVNLNNNAWKSYFELSRLYKQGKLPKFMNKPSPPGFWKDKVLGKRILRILVRNDRYYLEPINNGEGYLVLKDWGLRIKYAGRIKWSGKQGTLIIKLEDNRWFAYVPITIGEKPARSNPKGYIRGIYEKIQIDKPRGSNKAFIDIGLNNLFAVVFNHSDTAILIKGSTIKAEYYWWKREIKTYQSIRDWLRNHGFESWRKFHAYWLHAKYKQHERLRHYYRTAIRFLARTMHEMGVDEVFIGYPYLVSQDYGNEYNTNIWWFNKIIKWLSEVLQEYGIRLNVVNEYGTSKQCSICNMEHENGRVKRGLYVCKLTGIKINADINAARNIAKKAGYKTPIPRKILSYIVTSNGVKPITPKEGVTTETX

SEQ ID NO: 22664 - protein, 369 aa, unknown
  TnpB Polypeptide
MLKGMKFRIYPNKTQLHIIEKTFGCCRLVYNYGLSLRIKSYEDGVSISYKETNAMLTDMKCSIDFSFLKEVDSIALQQFLRDLDKAYKNFFSKRASFPKYKSKHNHHKSYRTQNVNGNITVVDKYIKLPKLGFVKAKITMPVIGKINNATIECTPSGKYFCVLNVECDTPVHTNKGGMVGIDVGIKSFYVDSNGYECPNNKYLDKTMSKLNKEQRKLSRMVKGSSNYNKQRIKVARLHEKITNQRNDFLHKESLKLVRENQIICTEDLNIKGMVRNHKLAKSINDVSWSKFFSMLEYKAYFYGTEIIKVPRFYASSQTCNCCGFIDPKVKNLSIRVWSCPSCNTTNHRDLNAAKNILSKGLEIKLHSVA

SEQ ID NO: 22665 - protein, 425 aa, unknown
  TnpB Polypeptide
MKLVYKFRKPKSEHLDLLCSISKKLYNHANWYIRQDFFHLENWLRYQDLDFILKRSDTYRLLKAQTSQQILKILDKNWKSYFNSIKEWNKNRKKFNGHPKPPKYKQDDCNLLVYTNQNSKIENNKIVLTMSRLFKDIFPEFETPLEITIPLYKKKNFEEYQQIRILPRKKFYEIEIIYRSSIKKSKLNKDYYLSIDFGLNNLITTVENKNSKPIIVSGKVLKSINRQWNKRKARLSSIKDKQKLKWTTQLDSITLSRNSVITDYLHKTAQLIVGYCLKHEIGHICLGKLKEIKQNIRLGKQNNQNFVNIPIQKLKQIITYKAHLVGIKVHEVDESYTSKCSSLDLEPIQKHNKYQGKRIKRGLFRGSNYLLNADVNGALNILRKVVGDDFIRDLSDRGCWFQPVRIRDLFQTSHEQFLLKSYNIV

SEQ ID NO: 22666 - protein, 389 aa, Streptomyces sp.
MVKRAYRYRFYPDAEQEALLHRTFGCVRYVWNRALAERVRRYKDEGQSTSYVETAKWLTAWKRDEESAFLREVSNVPLQQALRQQQNAFTNFFAKRAKYPRFKSRKRSRRSATFANNAFTFRGGQLRLAKTSAPLDVVWHRRLPEGADPSSVTVSCDSADRWFVSILVEETITAPASAEAVVGIDVGLEHLLTLSTGEKIANPRHERADRRKLAKAQRRLSRKAKDSNNRAKARKAVARIHARIADRRRDHLHKVTTRLVRENQALAIEDLAVRNMIGNHSLARAISDASWTELRSMLRYKTSWYGRHLLLVDRWYPSSKLCSTPGCSHMNQRMSLSVRSWTCPMCGTAHDRDVNAARNMLAAGLAESENACGGLVRPAPESSGGGATR

SEQ ID NO: 22667 - protein, 411 aa, unknown
  TnpB Polypeptide
MSELITATRVEKHVIKSSCSYFSMLMDFCHKSKNLYNHANYIIRNKFTKENILVSYGELDKILKKDYDYPDYQSMPTAQTAQQTLRLLCKNWKSFFKSIKDWKKHKDKYLGRPKLPKYLKKDGQYILILTNQNCKLQNGKIKFPKTFCGFEITPEFIKNDNAVSFQQVRFLPRRNRIVVEVVYTVAVLEEKSDNNRYIGIDIGVDNLATVCNNISDNAFIINGKPLKSMNKYYNKKISHYREVAKRMNNNDYSLRMHKLTVKRNSKIEDYLHKASRYIVDYCRENNINTIVVGNNKEWKQHADIGRKNNQTFVQIPFTRFIDMIRYKAEEYGVAVIETEESYTSGTSFIDNEEPVKENYNKSRRVHRGLFRSNENKLINADLNGAYQILKKVFPIKWDIGCVLHPVVVNLG

SEQ ID NO: 22668 - protein, 394 aa, Chloroflexia sp.
MLHTRSSSGIMKTMKTFEFRLYPNRKQRQHLDSVLMGSRVIYNEMLTHTRQVYQETGKFAFKYALTKAFAGRGKGTVPASTVQMLANRLDKALTCFMRRKEADQTVGFPRFKTPNRWHSIQLRQHAVDFDVDGRFLRTPALTGGRIKIKRHRPIIGTPQTCHLVKRADGHWYALIVCELPEPEPPTEPPAPDERPAIGIDVGLKSFLTDSDGNTVANPRYSRTSQAKLRRQQRRLMARTKGSQRRRKMARSVAQTHLKIERQRRDFHFKTAKHYADTYRLMVVEDLNVRGLARTRLAKSILDAGWSAFLTILTDKAASAGGQVIRINPRFTTQTCSNCGELVPKSLSVRTHICPSCGYVADRDHNAAINILRAGAPPSGTVADRLPDEPRSPIL

SEQ ID NO: 22669 - protein, 367 aa, Aneurinibacillus sp.
MVKHKGFKFRIYPNEEQATLINKSIGCVRYVFNHFLAKRKEAYETEQKTLNYTACSALLTTLKKEVSWLKEPDSTALQNTLKDLDAAYQKFFNEKKGYPKFKSRKNPRQSYNTTNNKDAIRIEGTHIRLPKLGLVPFAKSREVEGRILSATVRRHPSGKYFVSVLCKVEMQPLPKVGKQVGVDLGLTRFAILSDGETFANPKYLRKYETKLTHLQRVMSRRTKGGSNWNKARIKVARLHEKITYCRTDFLQKLSTTLIRENQTICVEDLQVSNMQKNHKLAKSISDASWSEFRRMLEYKADWYGRTLSFVGKTFPSSQLCSACGYRNRDVKNLNLREWCCPECHTHHDRDVNAAVNILQEGLRLLET

SEQ ID NO: 22670 - protein, 328 aa, Streptomyces sp.
MCEVTSVQLRYSFRLYPNGPQRVARVAEPRFKSRKDNRHSIRFTANARWKITPGQDLSLPKIGEVRVKWSRAMPSVPSTVTVVKDAAGRYFASFVVETEPGTLPEVTPQVGIDLGLGHFAVLSDGRKIDAPRFLRRAEKKLKREQRRLSRKAKGSNNRDKARIKVARAHAQVADARREFHHQLSTQIIRENQAIAVENLAVNGLARTRLAKSVHDAGWSSFVAMLEYKAQIHGRRFFRIGRFEPTSQVCSACGAQDGPKPLHIRVWTCGACGAVLDRDINAAVNVAKAAGLAVSACGAQVRPGLVPAQRVEAGTHRDGQPTVVGIPAH

SEQ ID NO: 22671 - protein, 497 aa, unknown
  TnpB Polypeptide
MARKKQPTFVLELPLVVSPHEARILAARFEAGRQLYNAVLGEALRRLDLMKESRYWAFARKLPSGAPQSPEQKERAWFFSWVAFRAHFTDDALQSYATRCKNACWIGDHLDAHTTQKIGTRAFQAAQRYQFRTAGRPRFKPKWKALESMEAKSNATAIRWRDDHVEWGKLSLKVRFDHKDKHGVQTFALQKPVRFCRIVRRTIRGKTLWFVQLVIAGFPKWKEKNPIRNGKSAIDIGPSTIAAVSETDAFLEKFCANVPDLQKAIRRIQRAMDRSRRGSNPENYNKDGSVKKPTSGKRLQWVFTHGYLRLRARLKEVHRRLAAYRRTEHGKLANRIVAMGNTVMAEQLSYKAFQRMFGKSVRDRAPGEFMDHLRRKAESAGGEVIEFPTRTTKLSQTCHCEAVVKKPLSQRWHVCPCGVCAQRDLYSAYLALHVRSYKKDENQVWRLDTESARKGWCAAEPLLGKAMSDVVQTAKGGPLPASFGLNSKKARDRVVLS

SEQ ID NO: 22672 - protein, 395 aa, unknown
  TnpB Polypeptide
MYLTKKIRLLPTKEQEILFWKSVGVARWSYNYFLSESYRVYQEWLADNSKPKHISEMEVRKYINHHLKKTTHTWLTEVGSNVMKQGVKDANTALQNFFKIKEGYPKFKSKKRSKPSFYVNYETLKRTPNGFQGEKIGVIKTRDSLPKIPKGQKYANPRITYDGRFWFLSVGYTVKTKQVELTDEKIGIDVGLKDLAIVSNRNNSYTKKYRNINKGYRIKLLEKRLKRSQRRLSRKILNNIESYNKNCISTYTRPLEDCKNIQKQKHIIQSLYRKLSNIRTNYIHQVTAEIVKNKPSRIVLEDLNIKWMMKNRHLSKSVANSKWNEFRRQIEYKAELYGIEVMVADRFYPSSKTCSCCGNVKKDLKLSDRVYRCDCCGNVIDRDINASINLARYQI

SEQ ID NO: 22673 - protein, 364 aa, unknown
  TnpB Polypeptide
MNKSFKVRIYPTKEQQMLLEKTFGASRFVYNHFLKLKQYLYQEFKIKITYNHTSKMLTELKRQKPWLRVPDKWALGNALKDLDTAYTKFYKGAGYPKFKRKGDKNSYRTNDYIKVDNSFIKIPKVGLLRYKDAYKLGKENILKIYNVTISKTTSGKYYASISAEVYIPCFERTNQNVGIDLGLKDFAIFSSGVKIKNPRILKSLEKKYKRLAKAVSRKKLNSNNRNKAKLKLARFHEKISNIRKDFLHKLSTNLVKTCDIICVETLMVSNLMKNHKLSKSFQDVSLYEFVRQLEYKAKWYGKTLSKVDTFYPSSQLCSNCGYKNSNVKNLNIREWVCPKCGTHHDRDVNSAINILNERLRILDI

SEQ ID NO: 22674 - protein, 365 aa, unknown
  TnpB Polypeptide
MYKSFKVRIYPTQEQQVLLEKTFGANRFVYNYFLNLKSKLYEFYKIRLSYTNSSKVMTELKKQKTWLKEVDSVSLQQTLRDLDSSYQNFFNGRGKYPKFKKKQDKNSYRTNHHIKIDNQYITIPKIGLLGFRDNYNLEDKNILKIYNVTISKSSSGKYYASISAEANIEHFERTNQNVGIDLGLKDFTIFNNGMKIKNPRILKHLEAKYRRLSKSLSRKVKGSSNYRKSRIKLARFHEKISNIRKDFLHKLSTNIVKTYDIICIETISVSNMMKNHKLAKSFQDVSLYEFARQLEYKAKWYGKTISKVDRFYPSSQLCSNCGYKNKDVKNLSIREWTCPKCGVHHDRDVNSAINILNEGLRVLEV

SEQ ID NO: 22675 - protein, 417 aa, unknown
  TnpB Polypeptide
MYLTIKQQVKHLTKEEYNILRELCRVAKNLTNQAIYNVRQHYFQEKQYLRYESNYHELKNSENYKLLNSNMAQQTLKNVDSMFKSFFALIKLAKQGKYSFRCIKLPNYLPKDGYANLIIAEFKIKDNGILTIPYSNTFKRKYENKIQIKIPKVLEDRKIKEIRIIPKFNARFFEIQYTYEVQEENINLSTNNALAIDLGVNNLCTCVTNIGKSFIIDGRKLKSINQFFNKQNARLRSIKDKQNIKRQTEQQYLISNKRKNRVDDYINKTCRYIINYCLFNGIGTLVVGYNQSFQNKTDLGRRNNQIFTQLPFGKIREKLEYLCRRYNINYVLQEESYTSKSSFFDNDELPTYGKDSPQTYEFSGKRVKRGLYQTKNNYLFNADCNGALNILRKSKVVDVTVLCSRGELDTPKRIRVY

SEQ ID NO: 22676 - protein, 370 aa, unknown
  TnpB Polypeptide
VNTNFNKSFKIRIYPNEEQKVLIDKTFGCTRYVYNYMLNLKQILYKKFNITLSYNHMSKILTELKRNKLWLRDVDKWSLQNALKDLDKAYQKFFKGNGFPKFKSKKRDKLSYRTSSNIHLDIDTIMIKIPKVGWIKFRDKSNFKGLTKINNVTISKTPSGKYYASISAEVDIAHFEKVNQNCGIDLGLKDFCILNDGTKFENPKFLVNNEKRLRLLQKSLSRKVYGSKNYEKAKVRLARFHEYIVNSRKDYMHKISTFLIKNYDIICAETLRVKNMIKNHRLAKSIQDVSWYEFCRQLEYKCLWYGKKFVQIDTCFASSQICSNCGYKNEDVKNLNIRKWTCPVCGTHHDRDINSAMNILNEGLRTLKLV

SEQ ID NO: 22677 - protein, 412 aa, unknown
  TnpB Polypeptide
MRSQKIRLKLTKEQENLAWWYSKVSRNFWNLLVDIDKRNNKGEFDGILNKNGNNTYHSKFHNRDIYKLNQSDYLNLAKIVVAKNSEEDGEKWSWYYQGNQSSIYNFLSRELVKIRRLNKGKLNFRTVDKIQPNFNVRCDVFPNNKRPSRIYMKDNGKLQIPTIGDVEFGSVRKGFDLSCKKQVANISFDGKYWYLSYTENIKTSVENLPDYTDGIGIDLGVKTLATVSDGTTVPNIKTFRRVRILNKRLRRLQRKVSRKYLINKCNKHNKTKNIIKLERQIKLIHRSIRNIRINHIRKFVSELVKKQPQYIAIEDLNVKGMMKNKYLSRDIANCSFFTIREHLIRKATERRIAVRLVDRFYPSSKTCSNCGSYQKDLKLSQRVFHCNNCQEKTDRDFNASLNIAKTDKYKLA

SEQ ID NO: 22678 - protein, 439 aa, unknown
  TnpB Polypeptide
MAKAHKYTIVTQLHENLNNDIIEYFDKTVAVYSVAFRRTFHKINNDPKINTSKLNTEIQKEYKVTKRTANSIIKDAKGRISAIKELKKFELKSIIQKIEHLETVVIPELEEKLVNNILKINSGKSVDLVKHKNLRHSIVAKKRKLNRLKQRKLNIEYQLETEKFKLCFGTKKLAKKDKEQFLAQRDSNMHYVGCKSEPARNQNFKLSYNKKNNQFKITLRKDFCDTDSDKHLYGQVYFRHHKNKLVKFLKLKDSPLSYKIIRKNGRYYLYCTFEIQYDDEEFITRNSYGTIGLDFNKGFVTISETNECGHLINTNIINYRFKQGNSTQTDFEKIANILIDLALKSGKDVVIEDLDFKDKKAKTESKRVRKYNEMIHSLAYRIFANIVENITYRNKVWVRKVNPAWTSWIAKTKFCPHMKLNIHVGASYVIARRGQYFKD

SEQ ID NO: 22679 - protein, 400 aa, Microtetraspora sp.
LIVMSLFRLQPTPAQQAALAEHCAHARFVWNLAVEQHAHWKPGRKSAPSFAEQCRQLTEARAEFGWLRAGSVIVQQQALKDFAQAMASFFGGTHRRPTWRRRSQNEGFRIVAVKDGDIRRLSRNVGEVKVPKVGWVRFRWSRAVPDGVKSFRVTRDRGGRWHVAFAAIPEPIPAPGAGDVVGIDRGVAVSVALSTGDLLYVPALREAEAKRLGRLQRKLARAARGSNRRARVKAAIAKLKAREADRRRDWVERTSTGLARDFDVIGVEDLKIKNMIRSARGSIDVPGRNVRAKSGLNRAILAAGWGQLVERLEHKAPGRVVKVDPRYTSQTCNACGHVARESCESQAVFWCVACGHQANADVNAARNIRDTAVGHTVAARGGSGLPGPVNREPQPVLLPA

SEQ ID NO: 22680 - protein, 394 aa, Microtetraspora sp.
VRRSYTFLLRPTRHQQIALAACLEDHRQLYNGALEHRRTVYRKGGVTVRYGDQSGELTHIRSDDPGGQGRWSFSSQQATLRRLDKAFAGFFRRAKAGGRPGFPRFKGRGWFDTVEWPKDGDGCRWDSQPDHPTATYVRLQGIGHVRVHRHRPVLGRVKTIGVTREGDRWYVVLSCADVPAMSLPVTGAAVGLDMGVAWLVTTSDGEHLANPRHLEASAGRLAAAQRDLARKKRGSTRRRKAAARVAALHGTVRRGRLDGAHKAALTLVRAYDVIVHEDLRIANMTRSASGTIEAPGRNVAQKSGLNRSILDAGWGVFLTILAHKAESAGRELIAVNPANTSRTCARCGHCAKENRPTQAEFACMACGHTAHADVNAAVNILRAGLALRQAAEAA

SEQ ID NO: 22681 - protein, 402 aa, Escherichia sp.
VKRLQAFKFQLRPGGQQECEMRRFAGACRFVFNRALARQNENHEAGNKYIPYGKMASWLVEWKNATETQWLKDSPSQQLQQSLKDLERAYKNFFRKRAAFPRFKKRGQNDAFRYPQGVKLDQENSRIFLPKLGWMRYRNSRQVTGVVKNVTVSQSCGKWYISIQTESEVSTPVHPSASMIGLDAGVAKLATLSDGTVFGPVNSFQKNQKTLARLQRQLSRKVKFSNNWQKQKRKIQRLHSRIANIRRDYLHKVTTTVSKNHAMIVIEDLKVSNMSKSAAGTVSQPGRNVRAKSGLNRSILDQGWYEMRRQLEYKQLWSGGQVLAVPPAYTSQRCACCGHTAKENRLSQSQFRCQVCGYTANADVNGARNILAAGHAVLACGEMVQSGRPLKQEPTEMIQATA

SEQ ID NO: 22682 - protein, 395 aa, unknown
  TnpB Polypeptide
MYLTKKIRLLPTAEQEKLFWKSAGVARWSYNFFLSYNQEKYSEYLKDNTKEKFVSENDVRKHINNELKKTTHTWLNEVGSNVMKQGVKDANIALQGFFKLNKGYPKYKSRKKSKPSFYVNYESLIRTPNGFRGEKIGIVKTRESLPKIPKGEKYVNPRITYDGKFWYLSVGYKVEPKQVKLAGNRIGIDLGLKDLAIVSNADNSYIKKYKNINKGYRVRLLEKRLKRAQRKLSRKILNNIESYDEKRVPTYIRPLKDCKNIQKQIYIVQNLYRKLINIRNNYINQVTTEIVKTKPSKIILEDLNVKGLMRNKHLAKSIADSKWYEFKRQILYKAELYGIEVILADRFYPSSKTCSCCGSYKKDLKLKDRTYICNECGLKIDRDVNAAINLANYQI

SEQ ID NO: 22683 - protein, 385 aa, unknown
  TnpB Polypeptide
MERAYKFRLYPQQEQTIVLDRTLMLCRHLYNNALEERILAYGMAGKTINYYEQKRELVKVKDELPEYSDVYSHALQDVVSRLDKAYKAFFRRVKKGETAGFPRFKGRNRFNSVTYDRYGFRLRENGNLYATGIGTIRMFKHREIVGMPKTCTIKRDAVGDWWATITATIPDVPKREPKTAIGIDVGLKNLAMLSTGERIEPPKLLMASEEKIKIIQKGVSRKVKGSNNRRKCVRRLAKAHRRVERQRDDYLHKASRSLALKADTIVFENLNINGMLKNHHLAKSIGDAGWGKLMQYTAYKAEEAGGSVVFVNPNGTSQICSRCGEMVRKSLAERVHVCTKCGFSTDRDLNASLNILGRLGTGSVELHNKTPVEMLPLQLSKGGCK

SEQ ID NO: 22684 - protein, 378 aa, Anaerolinea sp.
MKLNAQVKLLLTPQQADALRHTLEQANAACQFVNNTAWETKTFRQYDLHHKCYKSVREQFNLSAQMVVRVIAKVADAYKLDCKTKRIFRTTGSIAYDDRILSWRLQDQSVSIWTVNGRLRIPFVCGERQLELLQRRQGESDLGLYKGIFFLSATCEVDEPKPVDIESVLGVDLGVVNIAVDSDGQTHSASHISNVRYRHRRLRAKLQSKGTRSAKRKLKRLSGKERRFAKDTNHCISKKLVAKAKDTNRAIALEDLEGIRSRVTVHRKQRANLHSWAFFQLRSFVTYKAKRAGVPVFLVDPRNTSRTCPACGHVDKTNRTSQSKFSCVVCGFAGLADHIAAVNIGRRAAVNPPIVARDEAKANLSLELRQSAVTSHSL

SEQ ID NO: 22685 - protein, 428 aa, unknown
  TnpB Polypeptide
LKNVRTFKERESKMTKNEKIKKTLNETKEKRKNQIPVVYQLKVNLKSVDKMARKRLFLLFLEAKWFYNYLVADIQNRVSDDAYKIEKVTIKVGDTYEERNILNLSSHMKQSIISRIKQNLYSLHKKKEKGQKVGKLKFKKKVNSIPLKQYGNTFKFKNKNKTQIKIQGFKKPFRVLGGHQIPQDAEIAKAEIVKKGPSIYIYVTCYINKQKYDKTRKNIVHNFGISAGIDFKPSGIVLSSGIKVEWRIEETKRLKKLQRKLSRQKKYSKNWYKTIEKINKEHKKIDNIKADIINKVTAFLSYYKKVVFQDDDIASWKEDKFSKSVHYSSVGEIKRRLRNSLYPAVEVVDKYIPTTKTCSQCGNVQEISLAERTYKCSKCGLQIDRDLNSAINMLKVVGLDRPEVTPVERKTSARILGSSPYILVSFLQ

SEQ ID NO: 22686 - protein, 419 aa, Nostoc sp.
MRIAYQYRLRPTKQQIATFEQWLELCRRQYNYRLGERFNWWEQNRCDIDRCSLEVCHLPRLKDKPSYYSQKRELTNTKTLFSDYKELPSHTLQDVIARVEKTFDRWLKGDSNGEQRGLGVSPSRATANPKGKKSGRPRFKGKGRYRSLAFPDPIKPEHIQGKFIQLPKIGKIKMILHRPIPDGFKIKTATITCKADGWYISLSLEDVTVPSTKTYVIPALDNTVGIDMGLKSFLVTSDNQEVEIPQHYRKSEKRLKRLQRQLSRKNKRSNRRKKAIKRVAKVHLKVANQRKDFHYKTAIWLLTKSQVIAHENLNIKGLAKSMLAKSVNDAGWGQFLQILNTKAASAGCLVVAVNPNGTSQECSDCGATVPKVLADRWHSCQCGASYDRDHNAARNIKHRAAGHPVLQSSGNVRRVAGSH

SEQ ID NO: 22687 - protein, 430 aa, Nostoc sp.
VYTKNIALIYKGGDKQLRTAYQYRLRPTKQQVTEMDRWLSMCCAQYNYLLADRFNWYEQNRCPVNACPLVCHLPELRDNPDYYSQKKTLPELKKTHPHYGDIYSQVLQDVVKRVKVTFDRFLKGDSNGKRSGKPRFKSRTRYKTFTYPQMKDGCLQGNLIDLPKLGKVKVVLHRPLPDGFKIKTASITKKADDYYLTLSLEDSTIPEIKPDINPESITGIDMGLKEFLTTADAETVAIPQHYRKAQKRLRVIQKRVSRRKKGSKRRQKAVKQLSKQHKKVADKRKDFHFKTANNLLKKYDVIAHEDLNIKGLSRSRLSKSVHDAGWGSFLSILTNKAENAGLLVIPVKASGTTQECSNCGVKVPKKLHERWHKCSCGCSLDRDHNAAIVIRKRAEGHPVLKAKSLLRNSRIVLEAYTVCVRGAFRRKASV

SEQ ID NO: 22688 - protein, 448 aa, Nostoc sp.
MWLIGRTTLSFALALGSKAIYAELLCQEKAMIVYEFKVKGKEKQYQAIDEAIRTSQFIQNKCLRYWMDNKDSKVDKYALNKYCAVLAAEFPFADELNSMARQSAAERCWSAIARFYDNCKKKVKGKKGFPKFKKNCRSVEYKSTGWKLTLNRKSITFSDKKGIGTLKLKGTYDLNYYDIKQIKRVRLVRRADGYYAQFAIDADARIETQPSHQLVGIDLGLKYFIADNKGNVEPSPQFYRKSEKQLNRANRKKSKKFSQEKKKAHARQSNNYHKARNRYARKHLRVSRQRKEYCKRLAYSVIQSNDLVAYVRRSRCRRLDLNVKGLVRNPQLAKSISDAGWSTFREWLEYFGQKYGKVTVAVPPHNTSQNCSNCGEKVQKSLSTRTHVCPHCGYVEDRDINAAINILRRGLSTVGHTGTYATGDLPSWAIGCGLSSNGESVNVESPRL

SEQ ID NO: 22689 - protein, 430 aa, Nostoc sp.
MYGCQQTLIHAPPDVQAIIEYLCTESNKVWNCSVYYARQIYFKTGKVIKRAEICAEMFRSKNKHFGAMYVSSAQQTCNNVAEAFKSFQELTKLWKRGELPDKPSLPKYRKTGLFTVTYPKRWLKLTDDGIRIPLGNQVKTWFGVDAIYLPMPSNLKWEDIKELRILPRNRCFYAEFVYPTEDVKSQLNKSRVLGIDHGIDNWLTCVSNVGTSFIIDGKHLKSLNQWYNKRVATLKENKEQGFWSKQLATITEKRNRQMRDAVNKAARLVINHCLENSIGRIVFGWNQRQKDSANMGRKANQKFVQIPTAKLKERIFQLSQQYGIDFVETEEANTSAASFVDSDSLPKYGEKPEDWKSSGKRVKRGLFRTASNWYINADANGAANIISKVAATLGINLSGVSRGALTTPLRVHLWTLKNPPTFCLNERSEI

SEQ ID NO: 22690 - protein, 542 aa, Nostoc sp.
LFGSLHFRELDDYQSFHYNFAPNSVEMLIELRVVMRKAPKYEAQNLLVLCLICLLSGGYKRKSGIYPASGIVLSLVQTYCTIYIQKNNLRLRLHQRIKNHFSYCGGGVMYGCQQVLIKSSNELAATLEFICSEANKLTNCGIYLARQVFLKTGKIISKFDLHKEYKQNKHFQALYSQAAQQVLTTVGESFQSFKQLRKAHFEGKIKQKPRLPNYRKKGGLTLLAYPKQHLKLINGQIRIPLGSLIKTWFGIDSFTIPMPSNLDYLKIKELRILPRNGCFYAEFIYKLEASKPDLDYTLALGIDHGIDNWLTCISNAGTSLIVDGRKVKSLNQWYNKEVARLKTNQPQGFWSKKLAYITEKRNRQVRDAVNKTARIVINHCLENKIGNVVFGWNQRHKDSIELGRRNNQTIVQIPTARLKARIKQLCELYSIKFHEVEESYTSQSSFLDGDTIPKFCEKPEGWVSSGKRVKRGLFVTATGKQISADLNASANMLIKVSTQLNIILDLAKVVRGLLTVPPRIFLWEKNCKTQKATVLTSLFVTV

SEQ ID NO: 22691 - protein, 415 aa, Nostoc sp.
MLVFEAKLEGTDKQYQSLDEAIRTARFVRNSCLRYWMDNKGIGRYDLNKFCAVLAANTEFPWVAKLNSMARQASAERAWSAIARFCDNCKKSRPGKKGYPRFKKEQTHGSVDYKTCGWRLSDDRRYVTFSDGFKAGTFKLWGTRDLHFYQLKQFKRVRVVRRADGYYAQFCIDQERVERRDPTGKTIGIDVGLNHFYTDSNGETVANPRHLRKSEKSLKRLQRRLSKTKKGSNNRVKLRNKLARKHLKVSRQRKDFAIKTARCVVRSNDLVAYEDLQVRNMVKNHRLAKSISDASWSLFREWVEYFGKVFGVVTVAVPPHYTSQNCSNCGEVVKKSLSTRTHVCPHCMLTLDRDWNAARNILEKGLSTAGHVGTNASGDIDLCLGGEIPPSKSSRGKRKPKERSLESPTIFGTPN

SEQ ID NO: 22692 - protein, 345 aa, Nostoc sp.
MWGKHLNCAKLQSHIAKMRKRNPFWQSVGSQSVQDICQRIEKAYQLFFKHNKKGVRPPGFKKVKKYKSFTLKQAGYKFLGGNRVKIGSRVYQFWKSREIEGTVKTLTIKRTPLGELFMVIVVDVRSLFVSEREGSKSEIEIKTGKIAGFDFGLKTFLTCSDGTIIGSPQFFKQSLNAIKKANRQHSQKLKGSANREQSRKNLVRRYEDISNRRRDWFWKLAHELTDKFDVLCFETLNLKGMQRLWGRKISDLAFGEFLQILEWVAKQKHKQVVFVDQWYPSSKTCSHCGHILESLDLSVREWRCPSCQSVNGRDENAARNIQMVGASTIGLGDVRLATPAIAVLA

SEQ ID NO: 22693 - protein, 423 aa, Nostoc sp.
MSKVKRVERHFIKANHKFYSECGRLALASKNLFNYAQYNCRQSFIYGYDLPSLSQLNTLLKDTPQYQALPAKVSQLVLKQVCDAWQSYFKSLQEYKISPSKFTGKPKNPGYALERNLVKFNYQALSKTEFQKNRLLKPSKTNIFIGVSANINFDDINEVRIVPKVGGYVIEVVYDVTEFINPRESGIVAAIDLGLDNLATVAFNQAGLQPIIINGKPLKAVNQFWNKRRSLLQSLLITGIVKSQQLDNLTCYRNNYVDNYLHQSTKKLVTEFVRLGVSKVAIGNNKGWKFQSNMGKKSNQKFVQIPHQRFIEILTYKCQNLGITVIVSEESYTSKASYLDWDNIPTYNPNCTEKHIFSGKRIARSWYKSADGILIHADVNGALNIGRKVFPMDFVRRDRGCLVVHPRRITPVSVPVRETIGVA

SEQ ID NO: 22694 - protein, 559 aa, Actinomadura sp.
MLQSVAEGGVPSGGGAGTRVGSFSAPFVAAGPSGVAVRDRLKGLTEQDERVLRLVGAHLGSLCARDLKARCADGVEHGPDGWAARKRNLTAGSSARWAGSITKATNDQWALARRGHLAHLRSLEAGMRTLEHRLSLPIGAKGGEGAPGGYRTRREWFAKSRRLALMRERLVAARADWDAGVVRVVRGGRRLLTSRHHLDKAGLTEAEWRQRWQASRWFLQADGESGKRYGNETIRVTPAGEVSIRLPGPLAHLANAPHSRYVLTARVAFQHRGAEWADRVEGNRAVAYRIHLDIGRGRWYLTASWRRAAVSGIPLETARARGIVGVDTNADHFAAWRLDRHGNPVGRPRRFDYDLSGPAPHRDAQVRHAITRLLHWAASCGVAAIGIEDLDFTAERTREKYGRRARFRQLVSGMPTGKLKARLAAMAAEVGLAIVAVDPAYTTKWGAQYWREPMGTPHRKVSRHDAASIAVGRRALGHPVRRRTAPPRHHQSDDAGYRTVQADRGDRRRERSRHPVTEPAHDACPRTRAMRKRETSASSTVRDARSPGRRARSPLPDTV

SEQ ID NO: 22695 - protein, 464 aa, Actinophytocola sp.
MGSYEAPPGWVVQAFEFALDPTPEQAAMLRRQFGGRRYAYNWAVRTLTADLVAYRSTGMETEKPTLYGLRKRWNAVKSTECTDTDTGEVWWPEVSKEAFADGIRGAVDAYWNWQSSRSGNRAGRRVGFPWFKRKGRDRDRVTFTTGAIRVEADRRHVTVPRLGTLRVHENTRRLQRLIANDRARILAATVTRRGTRLMVAFRVAIARPIQPRVRNPGSRVGVDVGVRVLATIADDTGRVVERVENPRPLAAALKELRHLGRQRSRRTQDSRRYAQTQARITRLQSRVADIRAHHLHVLTTGLAKTHGNIVVEGLDAAGMLQQKGLPGARARRRGLSDAALGEVRRQLAYKTTWYGSTLIVADRWFPSSKTCHGCRHVQDIGWSEHWTCHGCGVRHQRDDNAAINLARYEAPTAGGVGVLSPVGAAVKRGADRKTRPRRAGGDEARKNHLAPQSQVGQPRDGVPA

SEQ ID NO: 22696 - protein, 504 aa, Symploca sp.
MVQLELPLFATVESLQLNNETTLPDKLSLCDSSIEDHKSSKTLAQESTLKEHDCKPYWSDLCEAISSQLLLPVETDCVDLSLKYLSLWRSKTVEKSWFSQTLFTARKRNSQQMFSPSLMYSVAECMDSEATARSSRKIRLFLNPEQKALLKQWFGVSRYVYNTTIKYLQEPGTKANWMAIKSGILNSLPEWSKPVPFQIKSIAIKDACLAVKAAKKGFKEDGKVRQCRFRSRRDTRQSIFVPKTAIKDCGVYHTKLGKCRLKESLPESFSDGRLTRRYGEYYLIVSLKVQPSVTENQGRMVALDPGVRTFMTFLSEESYGWLGNDSNLHIQKLCFRLDKLVSRISFGKSVLKRRLKKAASRLRCKIKNFVKELHQKTARFLVDNFDVILLPTFETSQMVSKSRRKLRNKSVRQMLTLSHYDFKTFLKWKAWENSKLVIDCNEAYTSKTVSWTGEIVKNLGGSRTIKSLSTGLKMNRDLNGARGIFLRALVDTPWLREHLNLCVC

SEQ ID NO: 22697 - protein, 337 aa, Burkholderia sp.
MLLFYRCRVKSLNGLLNKQSRVENTAWSCCNDTHKHALKWNKRWPTGFDLNVLTTGSSKALGIHSGTINATCEQYAKSRSQHRRRYLCCRGRKPLGLVPLKGLDLTREGGAFRFAGNTFRVFNSRPLPEGEIKDGTNFAQDARGNWCLNIVIEMPDVQARPIRFGVGIDLGLKDFAVLSTGEKLPNAQRARKHKRHVAKLHAKVANARADFQRKLALDLVRRFDYIAVGNVSATKLARTRMAKSVCDASWSSFRNKLRYRALAHGATLEEVDESGSTQSCSACGSKDGTTRPKGIAGLRTREWTCSDCGVVHDRDTNAAQNILRFGRASPGAGIPRL

SEQ ID NO: 22698 - protein, 160 aa, Fischerella sp.
MWVIKKYKSFTLKQAGYKFLGGNRIKIGNKIYQFWKSREIEGTVKTLTIKRTPLGELFMVVVVDDGSKSEVEIKTGKIAGFDFGLKTFLTCSDGTKIDSPQFFKQSLNAIAKASRQHSKKLKGSANRERARLNLVRKYEDISNRRSDWFWKLAHELTDRS

SEQ ID NO: 22699 - protein, 392 aa, Calothrix sp.
MRISYQYRIKPNKKQREIINNTLDMLRCQYNYQLAQRFNWYEQNRCCIDRCSLLCYLPELKDKPTYYNQKVSLTQLKKDRPWYKTIHSQVLQEVPKKVEIAFDRWLKGDCNGKKSGRPRFKGVGQYKTFTYPQFKRHHFVSNKITLSKIGDVKVIVHRPIPDGFDIKTVSVTKKADGYYVTLSLDDKSVPTVKPDFNPDNIVGIDVGLIDFYVDSDNNHVSAPKHLRKSERKLKSAQRKVSRRKKGSNRRKKAIKKLGKQHKKVADTRKNFHFNTAKKLLNKYDIVAVEKLNIKGLARTRLAKSIHDAGWGQFLSILKNKAENAGLSVIEVSPNGTSQECSNCGHKVKKSLSQRIHNCPVCHTSLCRDLNAAINVRKRGTHALNKKAQLMSS

SEQ ID NO: 22700 - protein, 418 aa, Streptomyces sp.
VIVKLVVQVKLLPTPAQAAALEATLQACNEAASWVGEVAFERGEFKNFALRKHTYGQVKDRWRLGAQATQHVIKKTCDAYATLKGNLKAGNLGRPGSKRYRRATEKPIAFRPQGAQPYDDRMLSWQTTERTVSIWTTGGRMKHVAFTTSPEQLATLALYRKGESDLLERDGMWFLNAICEVPAAPLNNDPVDFLGIDLGIANIATTSDGQIMAGRELNRGRLRERSLRAKLQKKNTPSAKRRMQKRRRKEARRARDINHKIAKHVVAEAERTGRGIALENLTGIRERVRLRKPQRATHSSWSFAQLGAFIAYKARKAGVPVVHVDPAYTSRTCAECGHIDKANRVSQALFVCRNCGFVDHADRNSSRNIRARAWELWRRGVESTAPAPPGNPRMGLDANAASPPVMLVVQDQDLVPDS

SEQ ID NO: 22701 - protein, 375 aa, unknown
  TnpB Polypeptide
MYQTAIKYRAYPDSEQEAFFVRSFGCCRKVWNLMLADKEDAYKRDKTILHPTPAQYKKDYPFLKEADSLALANVQLHLQAAYKNFFTIKGTKHPKFKSKKTARASYTTNNQKGTVSIDLENGTIRLPKTGNVKIVIHRIPEPAWDLKSATVSMERDGSYYISILFEANEALPETREHPELNAVGLDYKSDGLYADSDGNVSGSPKYYRKAQKRRTHIQRGLRNKEEGSNNYKKHNLKRAKIEHHVANQRKDHLHKLSTAIAKRYDLVAVETLDMKAMSNKGFGNGKATLDNGWGMFVRMLEYKLARRGKVLIKVDKWYPSSQLCHCCGTQNPELKDLSIRKWICPSCGSEHDRDTNAAINIREEGIRLYLSGVSV

SEQ ID NO: 22702 - protein, 379 aa, unknown
  TnpB Polypeptide
MRTAQKHFMKCRKRNFLICSWSFRSDMLQNHWSIVSQKLRFVSVPLDLRLMKIEQSTDTKMPYVIIITNPLKTRQRITIPIDTSSHFLHKIQNNKMAGTVLMQIRKGNLRIGWSYDSTRQQPATTNCIGVDTGISDCFHTSDGRAIGSMSPVIDFYHEEVEPAFAELASLRNKKRKIKHFLRKHDLPEDVRRSLIKKMDRLERMIQTAKASYRKKRCYYARLDHEIKKSVTTYVDSISKDTLTAIEKLDIKEFNKSRKVNGMFSTFARGKLQRKLMEALNQKGCDFFEVAPDFTSQVCPVCSNMNAENRHSKGFCCTSCGYHDDADHVGAVNIRKRAGDREILELCKEHQYSHKNLQNAIRIVYEKRHIAYKTKQAASA

SEQ ID NO: 22703 - protein, 382 aa, unknown
  TnpB Polypeptide
MIKSIKIMLKPNNKQKSLLFQCVGTARFAFNWALAREEENYKAGNKFISDCDLRKELTQLKKTEEFSWLKNYSNDIPKQAIKDACDAYKKFFKGLSKKPKFKSKRKSRPSFYGDTIKTKFGERHVYLSKIGYIRLAEHNRIPEGSKIMNPRITHDGLNWWISVGIEVLEIDTTDECTEPIGIDLGIKDFAVLSDGKVYKNINKSRTIKRATKALKRLQRRASRQYKRLKNNKKEGENRYKKSANLIKLEKKILKLYKRMSNIRDNYIHQITTALVKTKPEYIVIEDLNVSGMMKNRHLSKAVMNQKFYEFRRILTYKCSLYGIPLFIADRFYPSSKTCSECGHIKKDLKLKDRTYICPECGIVLDRDLNAAINLREYPRSVA

SEQ ID NO: 22704 - protein, 478 aa, Nocardia sp.
MSRHTTFRYCLDPTVEQLAVLARHAGAARFAFNQCLHMVKTGLSHRATDPRYPVPWTRFDLINAFNTWKKTDAAGRIFTVDPHGVTEVQVTGLAWRNHVCQQVFEEAAVDCGRALAAWSDSRTGKRRGARVGFPKFKKKHRSAQSFRLRNKHTRTGRTAIRIGDHDIHRSVTLPGLGRIRVRDDTRRLRRMLASGRAKILYATVSLRAGRWWITIAAEAADIHAAHRHRPRATGDRGGWVGIDRGLSAFLVAATADGRELARVDTPPKPLAAGLHQQRRLAKTLSRKKKGSRNRQQAAARLARHHHRVADVRRHFLHQVTNTLVKTHDRLVVEDLHVAGMLRNRRLSRAISDAGWADFARLLRYKQQWRGGTVVTADRWYPSSKRCSACGTVNTGLTLSHRVFTCGCGYRADRDLNAAANLAAWAATHYKAVSRSPDPSAGGRVTNARRREGADRHPVGVGETVPVDAGTEVHTPIGV

SEQ ID NO: 22705 - protein, 199 aa, Enterococcus sp.
MLDDRIKAYEETKNDSSKKMSFPTSAKYKKEFLFLKEVDSLALLAKQKSINLFEAKNYQKQKCKVARLHEKVMNQRTDFLNKLSTEMIKKHDIICIEDLNTKGMLRNHKLAKSISDVSWSSFVTKLQYKADWYGQEIIKVDKWFPSSQICSECGYNDGKKPIEIRKWTCPICHTHHDRDINASINILAEGLKLYSMGLA

SEQ ID NO: 22706 - protein, 392 aa, unknown
  TnpB Polypeptide
MIQKGFKFRIYPNLEQETFLMKSFGCSRFVYNWGLQLKNESYVKTKKSPNYYELNKRLKELKKEYPWLNEIYSQSIQSSLRHLDNAFTRFFKEKKGFPKFKSKNKNDFSFTIPQGTHIIENKLYIPKVKQGIKIKQHRELDGKIKTVTISKNPVGQYFVTILLEENSNLIKPKKVKKETAIGIDLGIKDFAVMSDGERISNPKYLKKKLKRLKKIQRRHSRKVKGSNNRSKHRIKVAKIHNKITNQRRDFLHKLTYDLTHKNQVSTIIIEDLAVKNMIQNHCLAQAISDVGWGEFKRQLEYKCNWYGKNLIVIGRFEPSSKLCNQCGLINDKLTLNEREWVCECGAKHDRDLLASCNIKNFGLEKYRRNFGNLRLQRDSGTSRLVEARSPYL

SEQ ID NO: 22707 - protein, 196 aa, Sulfolobus sp.
VKTTTGLSQEPQGLHDLEDEEARLIVKGDNAFLKVVFDKPLERDEPRESVAVDVNMGEVVVGNDDTHYVRIPTRLEVHHCKSSAENLQKKYPRRWRENERILHRIRSLHQKAKRITEDARKVGKWVVEVAEDFGANVIKLENLKNLIKNVDKLSKEFRDKLYLMQYRRVQYWIVWQARKRGGRRIRESQLLFRFMP

SEQ ID NO: 22708 - protein, 287 aa, Sulfolobus sp.
MEIEFVGRLKWYGKQGRLEIIYDETTNHWYAHIPVEVGVEETKTGKKSKYIVHGERKSIQIETPKGNKIASIDLGINVLASVVVNDGTWLLYKGVRAKEDYFYLQRKIADAQSLADKTKNIGEYEAYEELVRGKRRLFKKLYNRLLHLYRNLASHLVKKLHVLGVSTIYLGYPFNIAQDKGNKFTVNMWSYRKLMEAIELKAQEYGMKVYEVVEYNTSRLCAYHNVEVKRHPRGVVSCPLGHKLHSDLNGALNILKKAIDKVVLTVKKPLSFLVFHNGVAPVKGCNP

SEQ ID NO: 22709 - protein, 290 aa, Sulfolobus sp.
VYPQSGWKVTYVREIRKGKKKLMTLTLSHLGIFHVVVHRDFPLDRVKRVVVKLTKSEKVYVTFIVEDVTIPSLPKTGKVVALDVGVEKLLVTSDGEYVPNTRPYEKALWRVKHLRKGLSRKKFLSHNLFLAKVKVARAYEHVRQLRRDLYMKLGKYLATHYDMVVMEDIHVKQMVGKSLRKTRASLHDVAFHELRTVVHYQLQKYGKSLTLVDPAYTSRTCANCGYVKEDLTLQDRVFSCQRCGWVAGRDYNASLNILRRSGSERPAGPVEFRPLPFVGKVGGVNQEAPP

SEQ ID NO: 22710 - protein, 412 aa, Sulfolobus sp.
MWRAKEKSNTIQLSFKYRIYPTREAEEKLLRVMEIEAKVYNALLDAVNNARKERKKITPKDTQAMLKDLKIEGKELVYSKVPQMVNNQLWYNINALHELKKKGKKAGKLRYKKIMKTINYNQSGFKVQGDRLVLSKIGEVKVLFHRPLEGEVTGVIIKRGATGWYAIFQVEVEKKPLEKTGKVVGIDLGVEKLVTTSDGIVIENPRVFDKVEGKIKILQRSLTRKKRGSRNYEKTRKKLVKLHEHVKNLMSDYIHKVTSWLVEQYDEIYMEGLDVKEMVENNESKTLRKHILHSNFSKFMSYLSYKAERAGRRVVKVNPAYTSRTCARCGYVKKDLTLDDRIFVCPKCGWVADRDYNASLNIFHAGSGLPLKPVDRKPLLYIPFSEGVYSKFPGRSRKSPSRGGDAPSVRAG

SEQ ID NO: 22711 - protein, 195 aa, Sulfolobus sp.
LQRSLTRKKRGSRNYEKIRKKLVKLHEHVKNLMSDYIHKVTSWLVEQYDEIYMEGLDVKEMVENNESKTLRKHILHSNFSKFMSYLSYKAERAGRRVVKVNPAYTSRTCARCGYVKKDLTLDDRIFVCPKCGWVADRDYNASLNIFHAGSGLPLKPVDRKPLLYIPFSEGVYSKFPGRSRKSPSRGGDAPSVRAG

SEQ ID NO: 22712 - protein, 348 aa, Sulfolobus sp.
MPRPLGRGWKFKYFFLEILLMARRSKKAIRATVSMKIVLSEPLLDLVNNYVKAIRFSLFWLKEDVRNPEEKGVLGKVHEGLYRKLRKEYNLPSKVAEDCYRDALATYKGWYNNPKRGRFPRVYKPTLWLTPKASYSVDFETRSVKIAGVGELPILGYPRNLKEYADWRMREARLVVKGDKAFLKVVFEREEEKVEVKGSIAVDVNMGEVVVGKDGTHYVRIPTRLEEAHRFKSLAERSQKKYQRRWKENKRILYRIHSFHLKAKMVMEDYARKVGKWVVEIARMMGANVIKLENLKNLIKNVDKLSKEFRDKLYLMQYRRVQYWIVWQARKRGGRRIRESQLLFRFMP

SEQ ID NO: 22713 - protein, 545 aa, unknown
  TnpB Polypeptide
LYKVTIYSERIYEDSNKISAVDIDNICKTIKTYCRTKYAIYNLSLLKITDNAKYLDILNGNSLHVYTKSRYGLNDYYANSIVRNVEGLIKSCRSNKDNYIKQYEEQIKDVKTNLKCAEKDFDKYIDFRQVFILARTFIKNNSDDKTNKKLIKELNKHFKHIKLTDSEIIVSKPFSKNKIIYGFYEFEYKYLNHKIKELRNRVRKYKYRINNLTNKIENLKKHKRCIFGSKQLIKKYIRQECTKQDLYNAKYKEFEISGRDNSKHGNFTFKTTYNTDTKDFTFIINLLHDKVLNLHNIKFPYRYQELADILKYNLDTEHKKKRTISYSIIRKKDCNNKYYFQIKAVFNIDYDKPHINFDKSTGIVAIDFNYGHLDMTELDAKGNLINSKTVYYSLDFNSHQNEISLRKAIDEIAEYANKQHKCIAIEDINIYKANQKANKDKHKQKILNYTLHRLPYEKYLQIMDYVTVKHSIDVIKVKPNFTSIIGKLKYSNNMKLNTHISASYVIGRRAMNFKEKPLSSQNLLLTSIINKSEWAKWSYLNKALK

SEQ ID NO: 22714 - protein, 372 aa, unknown
  TnpB Polypeptide
MDNKGVGKGELSKLCAVLAKEFEWAGKLNSMARQASAERAWQSIARFYDNCKKKKPGKKGFPRFKKNTRSVEYKTSGWKLSDDRRSIAFTDGFEAGLFELWGTRDLNFYQISQIKRIRVVRRADGYYAQFCVDVEREIKHEYTGKIVAIDLGLEFFYTDSNGQTVANPRLLRKEELRLKRLQRRVSSKKKGGKNRKKAINRMARQHLKVGRQRKDFAVKTASTLVQSNDLIAYENLQVRNMVRNHKLAKSISDASWSMFITWVEYYAKLHKIVTVAVPPQYTSQDCSSCGNRVQKTLSERTHQCLKCGLKMNRDHNAAKNILVKGLEVLGHKHSTEGHSETLNAWGENHLWLVEGNFGWVSGLVYGIPRYIA

SEQ ID NO: 22715 - protein, 394 aa, unknown
  TnpB Polypeptide
MIVLEFKLAGAAHQYAALDEAIRTTQFVRNKCARKWMDERGVTPSDLNRYCAILAKEYDFAGKLNSQARQAAAERAAILRFYKNCRAKTPGKKGYPRFQKDGRSVEYKQTGWKLDESRTRLTLTDGFTAGTFKLRGTRDLLDYALDQIKRVRIVKRADGYYGQFCLDAERRVSVEASGKAVGIDLGVSHFYTDSAGATVENPRHPQRSEKALKRLQRRVSAKVKGSNNRAKARGRLGRKHLKVRRQRRDFAVKTARALVMSHDVIAYEDLRVSNMVQNRRLAKSISDAGWRSFVTWLDYLAHVYGKVVVAVPPAYTSQDCSGCGARVKKTLSERTHVCPHCTTVLDRDHNAARNILAMGLRALAETTAGHAERNAWGQSALYLAGETSSGMVAG

SEQ ID NO: 22716 - protein, 286 aa, Fischerella sp.
MKARYQYRFYPTDQQQVSLAQLFGCVRVVWNDALALCKQSEKLPGYNKLAAMLTQAKKTESRHWLANVSSVPLQQSLRQLEAAYKNFFESRNGKRKGKEVGLPKFKKKSNRQSATFATTAFKISSGEVYLAKIGNVKPIWSRELPSIPSSVTVIKDCANRYFLSFVIEIEPNQTDAKNQSIGVDLGLKTFAVMSDGSKSESPNYSEQDRKIRKLQKKLARQQKDSKRRNKIRLQIAKQHNRIADTRKDFLHKLSTKIVNDNQVIVLEDLNVSAMVQNRRLARAISF

SEQ ID NO: 22717 - protein, 282 aa, Fischerella sp.
MRGKARNWGLPTTCTIMFRNGAWFASITVQCSPSRETGAESVGIDLGCKDAVTLSTGEKIAKPDFIKEGQQKVKVASKKLRRKRSPLRNKKVKGSRRWKRERQKASKLQRKVARQTEDWLHKTTSNIVSGNSLVAGEKLNVKGMTAKAKKGKPKAQKAGINRSILDVGFGMIGQMLEYKLAEAGGFYVESPTQTLKPTQRCSKCWELTPKTLADRVHFCSNPSCNHTEDRDVNAAQVNIAWARGQELSSIHAESPSSTPCGSMRQLGALRREKLRVQRSNPE

SEQ ID NO: 22718 - protein, 170 aa, Photorhabdus sp.
MGLTHFAIKSDGNKIANPRHLINASHNLRRKQKALSRKKKGSANRCKARIQLAAVHERVANARADFQHKLSRAIVDENQAVIVETLKAANMMKNHRLARSIGDAGWAGFITKLEYKAAETGVHLVKLDQWFASSKTCHCCGHKMPEMPLHKRLWQCPACHTEHDRISTLR

SEQ ID NO: 22719 - protein, 423 aa, unknown
  TnpB Polypeptide
MLLEGGDNMYRAQKNQLRNLSKQDYTALKELCKLSKNLYNSTLYAIRQYYFAEKKYLRYESAYHVCKENENYQLLNTDIAQQTMKVVDRNFKSFFALISKAKDGNYRFSDVRLPHYLPKDGYFMLIIPRFKVKDGFFKVPMSNAFKKEFGEVKLPFPERLNNRQVKEIRVFPKHGCKFFEIEFVYVQEEENLNLNPDNALAIDLGLDNLATCVTNTGASFIVDGKKLKSINQWYNKENARLQSIKDKQGIKGITNLQYANTVNRNNRVNYYMNKTARIIVNYCIKNDIGSIIVGYNLDWKRDINIGKSNNQKFTQIPHGNLRLKIQSLCERYGINYIEQEESYTSKADFFANDILPVFNADNPQEYSFSGKRISRGQYKTCQGTVINADCNGALNILRKSNLVDLTVLQSRGCLDQPERIRVS

SEQ ID NO: 22720 - protein, 369 aa, unknown
  TnpB Polypeptide
VFVQTLTLRCTLKPTPEQAAALEATVRLFAQGCNHALRVAKERGEFRRFRLHHLVDSDLRAMGLSANLAVQAIARVGQKKGSRARFDQPTSCTFDQRTLSLRGESVSRTTTAGRLVIPLKLGHYQRGLLARAKSVQGGVLTKGPKGKWYIHLTLRLEPPTPPPGGGKVVGLDLGQKALATLSSGVQFSGGPLKEKRLHDLKKRAEVRSKLDSPSERTKGMKRLWERLTGREARFVSHTLHILAMEDLRGLRGRTTQRGKKERHLHNLWPYGKLRFLLEYKAALKGVRVVAVDPHHTSQECPRCGHTARKNRKSQALFRCTTCGFQHNADWVAATNIARRAGSTGMGRCQPAQILRVSSLHRPPLESSRL

SEQ ID NO: 22721 - protein, 405 aa, unknown
  TnpB Polypeptide
MWAILDKMFECHVIALCPQRARKQCCGITARTPASYRNLAVEQQLWWHPGRGSAPGYLDQCRQLTEARAEYGWLRAGSQMVQQQALRDFSQAMANFFAGTHGKPSWRKARHDEGFRIVAVKPGQVHRLGRKIGEVWIPKAGWVRFRWSRTVPKATSYRVTMDRAERWHIAFAALPEPIPAPGDGEVVGIDRGVVVSAALSTGEMLTVPRLSPARRRRFCHLQRRLARAMRGSKRRERIKLAMARLKAQEADARKDWAEKVSTDLARRFDVIRVEDLRITGMTRSAKGAVGQPGRNVRAKAGLNREIMRSGWGLLVRRLADKAPGRLERVHPAFTSQRCSACRHVATGSRESQALFRCVACGYVCNADVNAAKNIAAGHAVTARGGFRGAGPVNREPQLFASLAGT

SEQ ID NO: 22722 - protein, 435 aa, Salinarchaeum sp.
MTETQALTKTLVFALDVQSDNESLLHDARLECRRVFNEVLRLTYDGWDWNRIEDVVEQNADLVQNTAQRIIDKAFDALTNYYDNDDWGRPWYKHEMFPLRMNYGEGYNLFLEDCGTVRFRISAKPYKHVKGELPSTRDQFDLLTQAIEDDDWHVGTAEALVRNGREELHVTVTNKSAEVGAKTAAENVVGVDINEDCVALAALTESGIEDSIVIDYPEIKEQRHRYFTMRKRMQEAGQTAFNDVFRDKEQRFVHDQLHTVSRRVIEWIQRFDSPVIVFEDLKDMRDGIEYGTRMNRRLHSLPFAKLRDFITYKAAWNGIPSDDIDPEYTSQQCPVCGHTERANRHKKRFKCCECEHQDHADRGAAISVAQKWLRKQEDRNVPALNILPQVQKWELRRQASGPVNGPTVTHHTARGNQTDGVSGVSDQSTGRSSGA

SEQ ID NO: 22723 - protein, 312 aa, unknown
  TnpB Polypeptide
MSSNKFRVWLNNEYLPQHPEYSWIKEAYSKAVTQAVNNGQTAFTRFFNHESAFPNFKKKGRSDVKMYFVKNNPKDCRCERHRINIPSLGWVRIKEKGYIPTTKDGYVIKSGSVSIKADRFYVSVLVEIPDNKITDDPNEGIGIDLGLKEFIRKQRSLSRKYENLKKGESTQRANLQKQKRKVQKLHHKIDNIRTDYINKTIAEIVKTKPSYITIEDLNVKGMMKNRHLSKAVASQKFYEFRTKLQAKCREKGIELRVVDRWYPSSKTCHCCGAVKKDLKLSDRIFKCSCGYVEDRDFNAALNLRDVTTYEIA

SEQ ID NO: 22724 - protein, 239 aa, Okeania sp.
VDVQNILTLRKSAPGGSAEFTKSAFKWRNGQVYLAKCLEPLSIRWSRQLPPDCVPTTITVKLNPSGRWSVSLRVNDTRDLTLKPATKLLGIDLGITSLITTSDGKKVANPKNLHKLHKKLRLAGKSLSRKNKGSNNYQKARLKVSRIHAKIKDSRLDYTHKLTTQLIKRYQLIVVEDLAVKNMVKNHNPPPSPPVRGARGVGSDANWGELVRQLEYKADWYGRELIKIARYFPSSRALF

SEQ ID NO: 22725 - protein, 189 aa, unknown
  TnpB Polypeptide
MAILSTGEKIKNLKFRKQLEEKLKREQRKLSKRFLIAKKAKKKLSKAKNYQKQRIKVAKIHEKIMNMRTDFLNKLNINIIKNHDIICIEDLNTKGLLHNHKLAKSIADVSWASFINKLEYKAKWYGKEIIKIDKFYPSSQICSVCGNRDGKKTLDIREWTCPFCHTHHDRDINASKNILAEGLRIRETA

SEQ ID NO: 22726 - protein, 462 aa, unknown
  TnpB Polypeptide
MNGSIYYPNTDISLTQWLPSLTKPYIDLPTNAWFHSVRQNNPKPKSFDHYIIAAPVIPDESYKQQLAAIRNFKQDRVPEFITTSKIRIFPNFNQRIILDEWFRVHIQMYNKTVEYVNSQIFVNKKIDLALAKKIASFRKLRPLLKVFRSNIIQNMEDKIPVHILDEAIKLAVANFKSCITKMENFSIKKFRVRNISYNKKQKILIIESNLFNGTTFCSRTFKTMKSSKPLDDIDRTVTLQFDARTGKYILLVPITTPEKQSIAKKIDCGADPGGRTFMTLYSNNNTYSIGTGINECLKKYYKKITKIQDLLQNYVLTSKKRSRLKKGLNKYHLMITNMVKDLHYKTALLMVIKFDNIYIGKLSTSQVLSKRNRLPKKAKWNLQMLSHYLFRTRLIHMGHKYGAKVYEVNEYLTSKTCSNCGNIKNVQGEIYECDRCKIKTGRDENAAKNILKVGYVESERKS

SEQ ID NO: 22727 - protein, 401 aa, unknown
  TnpB Polypeptide
MVIFEYKLDGSKKQYAAIEEAMRVVQFIRNKCLRLWMDEQGISKNDLQVYCAVLAKEYPFATHLNSQARQASADRAWFAISRFYDNCKSHKPGKKGYPKFQHDNRSVEYKQTGWKLEPDGKHMTFTDGCGIGRLRLVGNPKQRIADFSTEQIKRVRIVHRADGYYVQFGVKAERVIEHVPTGKQVGIDVGLKAYYTDSEGNTVENPRHYRKAEQKLKRLHRNVSRKQKKSSNRKKARKQLARACLKVQRQREDFARKMASTLVSSHDLIAYEQLQIRNMVKNHHLAKSIHDAGWGTFISWVKAYGLMHTIPIIAVAPQFTSQECSACGAMVKKSLSVRTHICTSCGVILDRDHNAALNILAKALERTLGHRETSSSSEEGNASGQTASPRLSKQKTSKRAG

SEQ ID NO: 22728 - protein, 419 aa, Nostoc sp.
MLLTYQYKLNPTSEQIVILEVWGELLRRHWNYALGRILDWLRRTRSQVDRCSLVSEPIGEIPDKPDYYTQASDLKRTKELFPDYKNIYADCQQQNLMRLDKAWKRWLIPDKKGKRGGRPRFKKRGDISSFTFPRVNHPKAGAHLTGNTLKLSKIGEIEVILHRPIPEGFEIKQATILVKADGWYVSFSLEDKTVPAVLPIDEIKTATGIDVGLEKFLTTADGQSIEVPQYYRNAQATLARQQRKLSGKVKGSKNYNLQSNKVARLHLHVARQRKEFHYHVAHWLINSYDLIVFENLNIRGLARTRLAKSILDVAWGAFLQIMQAVAVKRGKHSKGVDPRGTSINCSSCGERVEKTLDIRVHSCSCGLVIDRDWNSALNILKLGSVGLPIPVCGGLGDTQPVKQNVSYVNLRCSRYTACS

SEQ ID NO: 22729 - protein, 352 aa, unknown
  TnpB Polypeptide
MGLAGPDIRTFPRLGFSGRFGRGRPSCIPYRNRQGRGKTQAERPALRRPFVYIPKSLLKVDGDGEGLTVTFPVTPRDLEAVVLSFWPHYGCGRLLDAWKAGKATMGEPTWTPNSISIPLKFPKVQPYWPRTVIGIDSHETNLTAYVVASGEMREIDTSYAARVSRDHERRARRGQRGKQNPRVRRKVAAKHGRLRREKVATFWQGVALMAWAASLGAALVLEDLKGMKGRLARQAKSRRLRRRLLNFWSVMTFHGVLASKAAFYGVPLIFVDPRDTSRTCPVCGRVEERLRGQVLACPCGLRMGRHEVAAVNIARRGRGRWATPVVRPLASDSCRGVRGHDGNAQATAQVLT

SEQ ID NO: 22730 - protein, 419 aa, unknown
  TnpB Polypeptide
MNNLVSRNITFRLYPSRVQAQILWEWLGEHCDLYNVALDHRREAYEKHGIMISYRDQQNELPEIKKELPVLIPLGSHALQETLKRLDRAFQAFFRRVRMGETPGYPRFKSKSRFDSFCYPDPAGWRAVQKEGKSAVLHIAHCGEIRMRGRSRVRIFKGEPRTLTIKRVGMYWYATICVRYEESLLYRRVDSDRMAVGIDAGCKNLAYISDGNIIDNPRPLAKAIKRLKHQQRELSRKQKGSKNRFKTRSILQHMHRHVAYQRINFHHQISARLVRQYSFIAIEDLQLKNMSRSAKGTIEQPGKNVKAKSGLNRSILDASIGMLFQFIEYKAAEAGTWLEKVAPHGTSQLCSQCGADVPKSLSTRVHRCDCGFIADRDYNAALNILARGLKQVGLEQANVWRGGVSPPEKHETSASKVVV

SEQ ID NO: 22731 - protein, 464 aa, Mycobacterium sp.
  misc_feature (89)..(92): Xaa can be any naturally occurring amino acid
  misc_feature (357)..(367): Xaa can be any naturally occurring amino acid
  misc_feature (377)..(436): Xaa can be any naturally occurring amino acid
MARLKVPEGWCVQAFRFTLNPTQTQAASLARHFGARRKAFNWTVTALKADIKAWRADGTESAKPSLRVLRKRWNTVKDQVCVNAQTGQXXXXWPECSKEAYADGIAGAVDAYWNWQSCRAGKRAGKTVGVPRFKKKGRDADRVCFTTGAMRVEPDRRHLTLPVIGTIRTYENTRRVERLIAKGRARVLAITVRRNGTRLDASVRVLVQRPQQRRVALPDSRVGVDVGVRRLATVADAEGTVLEQVPNPRPLDAALRGLRRVSRARSRCTKGSRRYCERTTELSRLHRRVNDVRTHHLHVLTTRLAKTHGRIVVEGLDAAGMLRQKGLPGARARRRALSDAALATPRRHLSYKTGWYXXXXXXXXXXXPIVENLPCLXXXXXXXXXXXXXXXXXXXXXXXXXXXXXXXXXXXXXXXXXXXXXXXXXXXXXXXXXXXXRRVAVKRGRQPATRPANNPETGCKSSDH

SEQ ID NO: 22732 - protein, 498 aa, unknown
  TnpB Polypeptide
MVEKTNNIDDAEIKYKQALKNYHKESNRHVLVLEADVTEEQKRMILHTSNLIRIAGNCLATVMKRNYEQLVRTKRYRNLKSLYKKAKDTDDKKLLASVTAQIQEIQESYNVTWDFCRKEMNKIKDIYHINSIFARSKAEDVWSGIKKCLYGDGNTIHFKKYGDYPEIRAKEIKRGISVYPVVSDNGNNSLKLHIMKSEFNLTVNKPKHNKTRSGNIISDILEPHDRFAEDEVNAVCRYLENPDVIDKAAVDLYEKTGELLDSYRPCYVSLVIREIRGELRIFAHITIEGTAKTKFNKDGTRRHQYGKGFIGCDIGPQSIAYTSKEEVGLKNLAKRGASIKAREQKEARILRKMDRSRRAMNPENYNDDGTVRRGKKTWKKSNRYKKLHSQYRNICRIAAENRHLAINEEVNHMRALGNVFITEPKNAKKLQKRSKKTERQDKPSVVQKSDGTEQLIYKYKRKKRHGKSIKNRCPGYFQAQAKAKFERTGGVYIEVSAT

SEQ ID NO: 22733 - protein, 280 aa, Nocardia sp.
VRRTNSNRLPGVLARYRYRAYPNDGQVRMLARTFGCARTVYNDALRCRDDAYHAGIRLSDADIQKIVTTDAKRTPERAWLTDVPAVVLVQAVNDADRAYRSWFDSMAKRGKRGRVGKPRFKTRRSRRQSIRFTRCGFRVTTRGVRLIKVGEVRLEWSRALPSTPSSVTLIREADGSYYVSFVVEIDETPLPECATVAGIDLGLTNLVTVVRSDGERQKIASPRHLRTAQRRIAKAQKALCRKQKGSREPREGTGSGGAPPSEGTRHPARSPSQTRATADS

SEQ ID NO: 22734 - protein, 481 aa, Nocardia sp.
MSHSLVMSRHTTFRYRLEPTAEQHATLARHAGAARFAFNQCLHLVKTALTQRDTDPEHSVPWTRFSLINAFNAWKKSEAAGRVFTVDAAGTAQVRVTGLVWRDQVCQQVFEEAAVDCGHALTGWSNSRNGRRNGKRIGFPRWKCKRSTLPAFRLRNKPSKNGRPSIRIGDGDIPRSVTLPGLGVLRVREDTRRLRRMLAKGRARILYATVTQRGGRWSISVATEAADLHPAHHHRPRDPGDEHGWVGVDRGLSAFVVAATTDGSEVARVTAPKPLAAGLARQRRLSKALSRTQKGSRNRDRADARLARHHRKTTAIRRHFLHEVTGMLVKTHDRLVVEDLHVAGMLRNHTLARAISDAGWAEFARILRYKQQWRHGIVVTADRWFPSSKRCSRCGTVNPELCLADRVFACACGLRIDRDVNAAINLAHWPTIHQSVSRSPDLPAGGRVTNARRREGADRHRSGVGVTGPVDAGTGTRPLAV

SEQ ID NO: 22735 - protein, 494 aa, Nocardia sp.
VWGVSAGWGRLRAGRLTCRWCPLGSPGVRVVQAYKYALDPNTTATAALFGHCGAARFAYNHMLARVKAVLDQRTAETSYGLTGDALTPALNWSAYGLRKDWNRRKNTVAVDRDTGMPWWSEYSKEAYASATADLAAALKNWSASRSGRRAGKPMGFPRFKRRRGDAVGSVRFTTGTIRLEGRTRVVLPVIGPVKTHESTRKLARRIEAGTARIMAATIKRERRRWWVVFTCEVDRCDPPPRLSGTAVGVDLGVKTLAVTSDGIAHPNPKHLTRHLARLRRESRRVSRRRGPDRRSGFTGSARWHRANRTRNRVQYRVADARRDSLHQLTSHLTGAYGAIGVEDLHVAGILRNRRLSRAIADAGFATLRHQLGYKTAWRGSVFAVAERWYPSSKTCCGCKAVKTKLPLHVRVFECEFCGLVLDRDVNAARNLADQVYTLFPEWPGEVKRGRGGDVRPTRWAVASETSTRRPPLAVQGPPGGNARITEHHRYSSER

SEQ ID NO: 22736 - protein, 499 aa, Nocardia sp.
VYQPRPGRVVQAYRFALDPNAGQQAALRSHCGAARASYNWAVRWITASWSQRSAELSYGIAEPQLTPWRSWSVPSLRKAFNLVKREDPRFSSWWAENSKEAYNTGFANAAAAFDSYVKSKRVESRRSGIPRLKSKHHAPMACRFTTGAIRVDTDRRHVTLPRLGTVRTHESTRKLQRRIANGTARIMSATVRYERGRWWVAFQVEVEREPRVAERADAIVGVDLGVRNLAVLADSRGRVRVVPNPRHYDTALVRLRKLSRRVSRRRGPDRRRGVEPSNRWRKANAERNRVHHRVANARADALHKLTTSIRAEYGTVIVEDLHVTGMLRNRRLARRIADAGFGRIRHQLTYKGEWCGGRTVVADRWYPSSKTCSTCGAVKAKLRPGCRVFTCECGLVMDRDENAARNLAALAAAHSTTGTGVAGDRGAPAPKPRGVDRKTRNGRLGTPAERSRAGDAIRSSGQKRETVIRTPPAPSDSGDTVTDLPRSKGWNADIHKGNR

SEQ ID NO: 22737 - protein, 534 aa, Nocardia sp.
LADNVIRCTNYAICPVPAPTVWRASHAHCLFVNWSFRVVRCWSDRPRVCCQWRVPHSPVMSRHTTFRYRLEPTAEQHATLARHAGAARFAFNQCLHLVKTALTQRTTDPEHPVPWTGFGLINAFNAWKKTEAAGRVFTVDTAGVARVRVTGLVWRDQVCQQVFEEAAVDCGRALTNWSDSRTGRRKGRRVGFPRFKSKRRAPRAFRLRNKPAKNGRPSIRVGDGDTPRSVTLPGLGVIRVRDDTRRLRRMLAKHRARILYATVTERGGRWWVSVATEAADLHPAHQHRPRDPGDEHGWVGVDRGLSAFLVAATAEGSEVARITAPKPLAAGLARQRRLSKALSRKKKGSRNRDEAAARLARHHRKTAAIRRHFLHEVTGMLVKTHDRLVVEDLYVAGMLRNHTLARAIGDAGWAEFARILRYKQDWRHGSVVTAGRWFPSSKRCSTCGTVNPELVLADRVFACGCGLRLDRDVNAAVNLAHWPATVKDVSGSPDLPAGGRVTKARRREGADRHRSGVGVTGPVDAGTGTHPLAV

SEQ ID NO: 22738 - protein, 435 aa, unknown
  TnpB Polypeptide
VYYAYKYRLKPSDAHREELDHHQDICRQLYNHTLCRLNEYQDEHGELPSMTSLRSELPDLKGWWEDLNDVYSKVLQTVVERLFDNLRTLSALKEQGYGVGQLKWKPPREFRSFTYSQSGFKLDKKGGQTVLSLSKPADIPIQLHRPIPDDPKLKQVTLKKEPTGEWFATFGVEMDREPPEPPENHEKCVGIDVGVCKYAHDTDGTAIGSFDLSDERDRLEREQRKLSRKQHGSNNYEEQRRRVAECHADLCRKRRDFLHKLSAYYAREYDLVAVEDLNVKGMMESPSNSRNTASAAWRTFLSLLEYNCEREGTHFVAVNPRGTTEECASCGVSTEKPLWVREHSCPSCGFTADRDWNAAWNIFFSRVQASGRGTLRINVTRNRRVLVGERIAKRFVNGCGDCAPYGNHYGSCKARLGSRKPYTQGANGISRERVG

SEQ ID NO: 22739 - protein, 383 aa, unknown
  TnpB Polypeptide
MQRTGSFKLLATPQQAEAFSVLAHLFAEACEAMVPFVQEHRCWNRVSLHHLVYYPMRERFPTLGSQMVCQAIHRVADAYKTLRANEGIPKDQPVPALHFAPASVNFDHRTYSIKGGGFTLFTASGRTAVGFTFGLLQKELLATGKPKEARLIKRKGTWYLNLVFDLPDSQPLSGVLAMGLDVGENNLAATSTGKLFGGGKLRHDRDRYLAQRRRLQSNGSRASKRKLQAVSGREQRHVRHVNHEVSKAIVAQALQAGASTLRMEDLTHIRDRVKAGLRMRARLHRWAFRQLQDFVRYKAEATGLKVEFVEPAYTSQTCNACGGLGKRVKHRFTCPCGNLAHSDVNASRNIAMFAELSSSARGVVNRPKFAHRICPGVAESSFL

SEQ ID NO: 22740 - protein, 383 aa, unknown; identical to SEQ ID NO: 22739
  TnpB Polypeptide

SEQ ID NO: 22741 - protein, 411 aa, unknown
  TnpB Polypeptide
VGLFLQLIEERKMNVNGYGEFTREDLDKIATATKLSSAYIQQCRDQALWMWRSHRGQHHMWKIRLRKAKGKWREKLLKREPSPPLSNGLRRKVPIRIDARTGIVEQSKQIKLCPYVLRLSTLKKNYRITVPLNPARYHLEVLRMGRAVDFQLIKRNGRFHAHICVKYDVFEHPVHSIMGIDLGVRRAMATVLLAPETRIRRGDLLIFRDAQGKRRLRALSKKIAQLQRTKKWEGLRQLRRKRAHVAEYFDRLNAKKVAEMAVAKNAMVTIGDPKGIKYENYRGNGKPRLRRMLQQHFPYARRIRLIVEECTERGVRTKSVSEEGTSKRCHRCGSSKTHRPSQSLFWCSDCGLQYNADWNSAINIGSVFLPEALSRRAIEGLAHSGDELTHKSLNPEVPDSNINSHKFGAAS

SEQ ID NO: 22742 - protein, 371 aa, unknown
  TnpB Polypeptide
MNETLIRTICIKLDIDGHEASLAATQNAFNEAATWIADVCWREGITNTNTAHHRVYGETRSRFGLGAQLAVCARAKAVEAIKAVKTNGKETCPTFGPRGSIRYDARTYRLMSLDRVSLNTLAGRVICRLMPGPRQHEMLVDPTWTIGGADLVWKRRTYYLHVTQSQEAPDVPTDDGTHLGVDLGIVNLATDSDGQTFSGELVRKSRKRYHRRRQILQKVGTKSAKRRLKQNSGREQRFMRDTNHCISKALVKKAASTRKALALEDLTGIRQRGTVRRAQRYERHSWAFFQLRSFLAYKAAWAGVRLVLVDPRNTSRTCSACGHCEKANRQSQASFHCQRCGRQMNADVNAAMNISRAAVKPPMVATGLRAS

SEQ ID NO: 22743 - protein, 393 aa, unknown
  TnpB Polypeptide
LYPNKIQRERIRKNTDACRFVYNWALETKMRVYDEDGKSLSWYDLNHLLIQLKQDHPFLKHVNSQSLQQAVKRLHLAFKHFFQRANHDEKRYGYPKFKSRKQHRQSFDIPQFFTVDFDTRRVRLPKIGQVKTVFHRRFEGIPKTCTVVSTNTGKIFISIVVEDGKSPPRKRRVTTKSSIGIDVGITTYATLSGGEKIDNHRHLRCALMRLRCLHKRLSRKKKGSKNRTKARLRLARCYERVTNQRVDFQQKLSTRLIRENQAIIMESLNVQGLIRNRRLARHISDAAWASFHRMLKYKAEWYGVTFITLGRFEATSQLCSACGFKYNALTLSEKEWTCPKCHKQHDRDSNAAQNIKMIGLRSIMAPREPREEPVELSALAEASKQEAPSFRAG

SEQ ID NO: 22744 - protein, 414 aa, Streptomyces sp.
MGELVTRHRGFRARLHLTAAQEAQLDQQAHAARALWNLLHELFTIAGARRPPFSRMDSEIRWARANVDWLAVLPAQAAQAVLKTYRRSWLNCWEGRSSAPTYKSRARAVPAVDVPQGRDLHVARVHRRWGMVNIPKIGRVRFRWTRDLPGVTRSGPAGRITGARLIKDALGWHIVFRAECKTPAPNKPTRDAPHVGIDRGVAVPLALSDSTFYVHGPWLDEGEEACLLRVQQQAAHREQYRKQGERASKRLSAVYGQIRDLRARAKRRVLDWQHKVTSAIAENYALVSVEELDVVRMVKSASGTVEVPGVHVAQKSGLNRAIASEAWGRTVELLAYKVAERGGCLVEVPAPGTSLRCSECGVVSPGSRESQSRFRCRNPECGWTGNADFNASRNIDQAGLVLASAAGRAVVRQT

SEQ ID NO: 22745 - protein, 277 aa, unknown
  TnpB Polypeptide
MEITSSYQAEILTNADMKNTVQIYRKALAFFIDVCNKEWTNISPIDTQQKRQRHIERLIHPTKSNPNPKYPFDIKGSEYYKFPSYLRRAAINDAIGAVSSYRSNYTNWQNDGKKGNAPILQHDRHSMPVFYNKNMYKETAPKNAKYPKGISPDEENVRWLKLYKNKDWIWAPVKLRRTDINYINKYWGACEDKSAPVLEKIHNKYYLRFSFTETVILSDTPIAKQIICAVDLGINTDAVCSIMKTDGTILARKFIDFTSDKDRMIHAMNRTRRKQSK

SEQ ID NO: 22746 - protein, 239 aa, Leptospirillum sp.
MASAGKIGEARLVRSGAGSFALRLSCFMRVLPETNPTDWLGVDIGIVNLAADSEGHRYSGAKVECVRTEHVKTRSRLQKAASEKAKKGQRPKNIKRKLKTRSGKESRFMKDVNHRISKDLVAGAQGTGRGIALEDLQGIRGRNRLGKQTHTRVNRWAFAQLRSFVVYKALLAGVAVVFVDPRNTSRECSECAYTDKRNRKTQAEFRCLACGFTTHADLNAPCVIRKRAAVSRPIVSRPA

SEQ ID NO: 22747 - protein, 448 aa, Leptospirillum sp.
MAGKDSADGRAVHALAFGAGFSGIIPDMKRMKAFKFRLVPTPEQETLLSRHAGCVRFVWNKALDLQTRRLDAGIPLLSYGDMAKLLTLWRSSEEYGFLALGPVHPQQQTLKNLDRALWEALDKTNPKRFPRFKRKGEGDSLRYPDPLQIKIDLATRDPQGRNLLPRIFLPKVGWVKVRVSRDIEGDLRNATVTRTAGRWAVSLQTEREIPEPEIRTRPEVGVDLGVAFFASTSDGFRIHPSPDLSMAMKAAKKKLVWEQRKLSRKDRKGPKSQNFRKQKIRVARAHERVANMRLDFLHKASTTVGETQAVVYVEDLKIRNMTRSARGTKESPGRNVRQKSGLNRSILSQGWGTFLSLLAYKLERRGGRLVQVDPRNTSRTCFACGHIAAENRPDQTAFRCVSCGYEDHADTNAAKNILRAGHARCACSPGQPGEFVALPFSRRINPRE

SEQ ID NO: 22748 - protein, 385 aa, Leptospirillum sp.
MKISCAYKFRFYPTPDQESLLSRTFGCVRFVWNAVLAAREASWKDFGVSSSFQDASALLTAMKTEPDLAFLGEVSSVPLQQALRHQQRAYDNFFSGRAGKPQFKRRDSSQSATFMANAFTLDKQRLVLAKMKEALNIRWSRVLPKAAEVSSVNVTKDLVGRYFVSLTFEDEVSEKPVLDTKVGIDLGVASFATLSTGEKIDAPDFFRKEEQKLAFWQRKLSRKNKGSNNRQKTRRKVARIHARVADRRNDFLHKLSTRLVNENQVLAVESLSVKNMLKNRHLSKSIADASWSEFLRQVTYKSAWYGRNLLKCGRFFPSSKKCSACKHVLDELLLDVRTWTCPICGVEHDRDVNAAKNILEECWKQYTAGLAGRACGGSVRLSLPA

SEQ ID NO: 22749 - protein, 376 aa, unknown
  TnpB Polypeptide
MQRTIKLTLPSNDFLMETIKLYNVACNEVLKVGFQARTYSKNKVHRLTYYGIRQKYPMLQSSMIQCLRDQACDMLKHERLEHLSVKKPYSAIRYNQRTFKPYLKKGVVSLSTVEGRIRIAISVPKYYEQYIDWKAKSATLSYDARSKRFRLHLVVEKETPAKIKATSVLGVDSGIINHAVLSNNMFFASNHIRNVKGRYQFLRQKLSAKGTRSALRLLRKRSGREKRFMANVNHCIAKLVVKQPFDAIALEKLEVRKEKKNGKRFNKKLGNWAWRQLQTFVEYKAEAPGKTVVYVNPAYTSKICSRCGQKGIRKGLVFKCKHCSFELNADLNASRNIASLGKSELGRLPVNEPYATPQASQPKRGSCKPLNLLGGS

SEQ ID NO: 22750 - protein, 178 aa, unknown
  TnpB Polypeptide
VTVSDEAQATPTGTDVAALDIGANVLVACTTAAGDQYCYSGQEPFRQFRETTERIADAKAKLPDGQQTSTRIQRLYRKRSRRRDHAVNALLRDLVQRLYDDGVETIYHGDLTGVLGEYWSVEANLKARTFWAHRQCLDQLANVCEECGIDVAATSEAWTSQTCPGAASASRRAAIVRR

SEQ ID NO: 22751 - protein, 372 aa, Bacillus sp.
MINKAYKFRIYPNKAQAILINKTIGCSRFIFNHFLSLWDNAYKETGKGLTYGTCSAKLPAMKKEFVWLKEVDSIAIQSSVRNLADAYTRFFKKQNSAPRFKSKKNNVQSYTTKQTNENIAVLGNKMKLPKLGLVRFAKSREVKGRILNATVRRNPSGRYFVSLLVETEVQELPKTNSYIGMDVGLKDFAILSDGTTYKNPKFFRSLEEKLVKAQRVLSRRMKGSSRWNKQRVKVARIHEYITNARKDYLDKVSTEIIKNHDVIGIEDLQVSNMLKNHNLAKAISEVSWSQFRTMLEYKAKWYGKQVIVVSKTFASSQLCSCCGYQNKDVKNLNLRKWDCPSCRTHHDRDINASINLKNEAIRLLTARTVEIA

SEQ ID NO: 22752 - protein, 385 aa, unknown
  TnpB Polypeptide
MNLVERHIIKKSDTRYKELDNICFLSKNLYNATLYAFRQHYFNTEEFLGYLSLNKEFVLSDNPDYRALPSKVSQATMKIVENNYKSFFALKKKGEKDAEIPKYLKKNGRFPVYFTYQAVSYKSRERYLKLSGTSVYIKTDRKAIQVRVIPKGDHIVVEIVYKANECKAKEDNGIYAGIDIGLNNLATIGFNNGKGLIINGRPLKSINQYYNKKKSELSSELERRNKSKNSKRLNRLTTKRNNKVKDYLHKASTMLVNQLIFNNVCKVVIGKNDGWKKEINIGKRNNQNFVNIPHAVFIEMVCYKCKLNGIEVVLREESYTSKCSLSEQHGIIYRFQINNKKYVFMFSNNYDGKRDLIQNADEDVDCMTYAKDTSLYSNNSFFVFV

SEQ ID NO: 22753 - protein, 448 aa, Prochloron sp.
MYGCQQNLIADPECLPFLEYLCTTANKLINCGIYLARQRYFKCGYIPRKYELEKQLKQNQNFKFIFAQAAQQTLRGVAESFKSFKELSRKYKKGELENRPRLPNYRKKGGMGAITYPKQALKLKEGKVRIPLGLKVKAAFKVDAFFLAFPTNLDFKKIRQIRILPRNGCFYVEWVYKLETQQIEIDKEKVLGIDHGLDNWLTCVSNAGKSFIVDGKHLKSLNQWYNKQIATIKEGRPQGFWSKRLSCIAEKRNRQMRDAVNKAARLVINYCLLNGIGRIIFGWNKGQKNGINIGAKNNQKFVQVPTAKLKERINQLCEQYGIEFVETEESYTSQASFLDDDFLPTFGAKPESWKPSGKRVKRGLYRSANGSLINADANGAANILKKVAATLGLCLEGVSSGTLTTPVRVHYWAACESPSMQERGESNSNPHATNARFSSTPNPSQEGN

SEQ ID NO: 22754 - protein, 531 aa, unknown
  TnpB Polypeptide
MPLRSVFTGVQALLVFPHREDERAVRDLMRRFSAAVRYAYKRLLEGKVREELKKADGPLTTLFRLNTRQADDAVLKAKAVLDSAKERGQDPRKVVFGGRGLFEGLKRRHLSGKRYRALKRRWKEARQGTLYARGDASKKGNPNLRLGVEGGALWLEVNLGERGRKARALVRTSHPHLDRLLERAYSGLPYTVELSLKDGRVYAHFTWAEDLPQPRHTRSGGVLGIDANAHPYGLALALVGPDGNLKAHRTLSLEEVDRAPNRGAKELVLWEVAHRIVAAAEAHGAAIATERLKRLRKGRRGDGSGRRFRGLQHRFAHASLLRKVHALARRRGVEVVEVDPRDTSTIGMLKYAPLLSLSKDVAAAYVIGRRALGLRERLPKVYQSLLQEEGFRNGALAFYEGLIRELEERRKGEKNPYLKRRWSRELRKAQRALGMLSSLQGSLGSRWGATEGRNPSGANPWRVLRVGLFLPLLGREVPRDLAPLKPILKAPGSWEGWKTGLGPHPGGGPPPVARADAVAGLPVGVGNGGKG

SEQ ID NO: 22755 - protein, 407 aa, unknown
  TnpB Polypeptide
MQRLQAYKYELMPTGEQQRLMRRFAGSCRFVFNKALALQKERHAQGEKKFGYAGLCKQLTGWRNSAETPWLADAPVHPLQQTLKDLERAYSNFFAKRADFPRFKKKGQGDSFRYPDPTQIKLDQANSRVFLPKLGWLRYRNSREALGTVRQVTVSSNGGKWFVSIQTEREVATPVHPSTSVVGIDMGVARFATLSDGTFYAPLNSFKRHATALRKAQQAMNRKTKFSSNWKKAKARVQRLHSRIGHARRDNLHKISTTISQNHAMVCLEDLQVRNMSKSAAGTTEKPGKNVRAKSGLNKSILDQGWFEFRRQLEYKLQWQGGQLIVVPPQNTSRSCPCCGHVSADNRQTQARFACVACGFKEHADLVGAINILRAGHARCACEVSGAVMPPAAGTHRSDSWTAQCRA

SEQ ID NO: 22756 - protein, 372 aa, Photobacterium sp.
MLLAHKIELRPTEEQADYLNRACGSRRHAFNQLLAHFNQEGVKWSKKEANAVYKAIREQFPWYAEVSQRVTRNAVDDLHNAFSHFFRRIKNGEKAGYPKFKRKGQHDSFALREKSKFDVDGRTLRIEKLKTRIKLRQGLRFTGTPCQVTISKRAGKFFASILVDTSDYDPKDQQCGSVGVDFGIKDMAVCSNGHTFKANQKLKYAIKKLKRRQRALSRKKKGSNRYAKAKLAVAKLHYRISNQRLAVLHEISDYLTKNFKVITIENLNVKGMIRNRKLSRAIADCGFGMLRQFIEYKADFRDCTVVIADRFYPSSKTCHLCKTVNNELILKQREWRCECGARHDRDFNASINLDIYGRDTLQLDLKPYTIAT

SEQ ID NO: 22757 - protein, 286 aa, unknown
  TnpB Polypeptide
MLRSHKIALRPTDRQRRWFAMQCGYADVAFNFALSAWHAGVPKSQLRKTFNARKHQEFEWCKEMDQRAAMYGIMNLEDAITRYHKGQNNRPKRKKRRSRQSYQMESAKITIDGSRVKLPKIGWVSMHEEVRFKGEVVNRVTISRTAHRWFISVSVETEDTQIVVDPTARVIGIDVGINTLATLDDGTKFDNPRPLRRYERKLVREQRKLSRMQYQSNNSYKQKLKVEKIHYRISCIRQDAHHQATHRILKRASKIGIETLKVTHMLKNRKIAKALSDSALGGSLRC

SEQ ID NO: 22758 - protein, 347 aa, Lactobacillus sp.
MRQNAKQMSNHYQFLEDKRIDSLAKANAIQNYRKAWNAFRKVHTAGVPKFHRKSYRWRYQTNCQYPGQKIALLTNGTVCFLDNSHVKVLKIGLLRVAGSQARLLKRMCETRIGTVTLTKDPADYFFLSMQLASDESFVKVSKANHGHIGIDLNTDNFLTDSDGNTVPNPRYYRTIKGKLAKKQRILSRRQRRVKKEHRSLRDSKNYQKQRLLVAKLHAKVMNQRHNFLQQISTVLIKNHDLVVAEELRSKNMLKNHALALSISDVGWRSFLGMLAYKADLYGRQFITISPRNTTPTCHNCGFVMGTNGTDKLTLADRKWTCPNCGTHHIRDWNAAKNILDKGIVKLA

SEQ ID NO: 22759 - protein, 437 aa, unknown
  TnpB Polypeptide
MILRISCPVVPFVPPVSTAALNTLRNPCVIENGARNPGLQAWGGIAPYPFTYLTIRTICAILLSMKLTATVKLKPTPEQRQLLFETLQTANAACNAISEVIWREKVWSQYNVHKLVYYPIREQFNLTAQLVIRCISKAVDAYKVDKKTKRQFKKHGSIAYDSRVLNYRIPDSAVSIWLMGGRETIDFVTGEHQLALLQYQQGESDLVYRKGEFYLFATCEVPDEVPFDPDGFLGVDLGVVNIAVDSDSEVHSASAVNNVRFRHRRLRTRLQKKSTLGTHRRLKKLAGKEQRFAKHVNHTISKHLVAKAQGTGRGIALEELTHIRDRITARKPRRAMLSSWSFHQLRSFIQYKAQRAGVPVTAVDPRNTSRTCPACGCVDKANRPTQSTFSCVQCGCVGLADHFAAVEISRRAVVNRPYCSDAPQNLAGAAPEQSPHL

SEQ ID NO: 22760 - protein, 413 aa, Actinomadura sp.
MRSVLTRPIVPMSTLSTRGTMSTVQLRYNFRLDPTPGQRMALARAFGCARTVFNDGLRIRREAHAAGLPHIRDTDLQKQVITTAKRTPERAWLAEVSSVVLVQALADLHTAYRNFFASLSGERKGRNVAPPRFRSRKDNRQTIRLTRNGFRLRPDGRLNIARIGDVRVRWSRGLPSDPSSVTIVKDAAGRYFASFVVQTSDEPLPDTTGEVGIDLGLTHFAVLSDGRKVTAPKFLRRAERKLRRAQQNLSRKARGSGNREKAVVKVARAHARVADARRDHHHKLSTALIRENQAVYVEDLCVNGLARTRLAKSVHDAGWSAFVNMLEYKAARYGRVFQRIDRMFPSSQLCSACGSRDGPKPLAVRTWTCRDCGTVHDRDINAARNIRAEAQHMVAAGRAETPNACGGPVRPSA

SEQ ID NO: 22761 - protein, 402 aa, Nocardia sp.
LTGRGYRLNLSDEQAARCEEFGRVCRAVRNTGLEQRRAYRRRGAWVNYRQQAAELAESESEHEWLNAAPGHCLQQILMDLDKACRTHGTRKVRWRSARRWEPSFRFPEGNKMLIERLNRRWGRVRLPKLGWVTFRISHPLGGVVRSATVSRDGNHWYVSFVVDDGKTTPKEHAWPDPGVDRGVVVAVACSDGWMRDRRFTTRGEIKRHRRLQQKLARQKKGSASRRQTLAAMRSIRGRERDRRADFCAWTAHRLTERNALVVLEDLRTRNMTRNAKGTVEQPGSNVKAKAGLNRSILGRGWWQLATALKGRAHYSGTTVVEVPARFTSQTCSACAAVDPGSREGQARFRCTHCGHTMNADVNAARNILAAGLAVTACGDLDAGRSVKQEPAGNREELLLQPT

SEQ ID NO: 22762 - protein, 444 aa, Acidithiobacillus sp.
MPNRKVTYRLYPNAEQEARLQETLGLHQRLYNTSLEERIRVYQETGKGLSFAAQCKVLTQWRKAVPALAGLNAQSEQVTLKRLHLAFQHFFRRAKNGEKPGFPRFKSIHRYPGWGYKTHGDGWKLHPSQGANSSQSGAHGKIYLQGIGLVPMRGKPRTAGEPVTCEILHKAGKWYASVTLEMAAIQRERGTEMGAFDWGLKEFLTVATPQGIETVVNPRHLRNQLAELKRLGQEVSRKIRMAQKLSGRQRGFSVSANLCRAIQHLARLHAKVARQRKDFMHQTSAWLVKRFGAIGTEALAVKNMMHNGGAHKKGLNREIHAAAPATFLKMTRTKAEEAGSWYEEAPTREIKPTQRCHACWELPNEKKMLSDREHQCPHCGVTCGRDENAALVLLRWLEMRLAGDSGLCSPQGICSPQGAGREPSEMWSGGSFAAMKHKTHAIAV

SEQ ID NO: 22763 - protein, 603 aa, unknown
  TnpB Polypeptide
MVKKKKHDEVLLPKVKVVRQDVKDRKEANKDTEFTCVKMSFNSLVENNYLNGGIQEIVLNVNKISFLSYQLLNYHFTRLIQENKPLPEITQNLFYQACSTVSVMKERNETIDSTDEMYISFSHYKEHLGELPFRDRMGNLINNLNRQQITMTNNHITMNFYKRFHTYLELKTGETRKTVIYKWLKDIYAVEYKGKNFFIMKMRQLLKYPPTEANIKLHSNHFVSVYYKILQEFEKYPYTKKVRTFNLLPTKNSFTLSSIEICSSCLKDIISYFTKQPAPKDFDENKLVYWYELFKIEKYETKQRKFAYTIYTDGKVAVVRLRKPKFETVKAKDIKKGNYEQLVGIDPGVRSLQTSCNDNGRVIETTTPSYRHDCKMKYACKKREMWYKKWEHYEMWRKIPSFKTSNTEKMKNYFKYVYPHTNVIFKFHLYKNFRGLSFRSYCRGKATMHKICESIVGKKNTLVGFGDFSQQHGLVKKHPTAPIKKFRNELRKYCHVIEIDEYNTSKTCNCCHNPIELYKNKVIYKKKDGTYTKAKKSIINSVIRCKLNECKLCCMDRDINASKNILYLLQLQKAGKKRPECFLPSSKDEENPTIINCDTPLGR

SEQ ID NO: 22764 - protein, 316 aa, Scytonema sp.
MRQRGRGRVRKRTIVCISDLTLSFYYPQNVKLMPKDSVIKFPGLLGMVKAVFHRELPDGKFTTVTISKNADGRYYTSILFNQKDNPVVSVNEAIGVDLGLKNFAVTSNGSKYDLPKKQLANLEKNRKRKQKKLSKKTDKTSNKRRKAKRLVAKFTSIIARLREDFLHKLSRKIAYENQVICVEDLAVKNMVKNPNLAKSISDQGWGMFLTMLKYKAERFGHTYLEIGRFFPSSQLCSETLLPMPMLQKGYDSLGVRFVDCPHCQKQHDRDINAAINIRNEGLRLWALGTSASAHRGDVRPKTSGRKKSTKDRGNPQ

SEQ ID NO: 22765 - protein, 431 aa, Rhizobium sp.
MIYRAFRYKLAPTGEQEVLLRQFAGVVRLVYNLALEQRRDWWRHYRRQTGNRLNYIAQARELTALRAAFDWIAAVHVTPQQQALRDLDKAYANFLAGRAGYPSRRKKGVNRAFRFQGREIEVKRLNGKWSAARLPKIGWVKFRDTRLLRGKTMNVTVSLAANGWHIVFACEIDHAVPQNDLPAVGIDRGVANTLTLSTGEHWWMPAGLAEIERRKRRAQRVLARRKRGSRRHAKARRRVAALQARAARIRQDWRHKASLAIARRFATVVLEDLATRNMTRSARGTVDAPGTNVCQKAGLNRAILEQGWHGFETVLAYKLEERGGYLCKVDPRHTSQTCSACAAVDRQSRESQASFRCCQCGLRAHADHNAAINILRRNTASMIVEEGQRLSVEAITIGGASRPLGNPPLQAGEDVNHHCQTTIGVLFGTRS

SEQ ID NO: 22766 - protein, 363 aa, Rhizobium sp.
LNDIAQARKLTALRAAFDWIAAVHVTPQQQALRDLDKAYANFFAGRAGYPSPRKKGVNGAFRFQGREIEVKRLNGKWSAARLPKIGWVKFRDTRLLRGKTMNVTVSLAANGWHIVFACEIDHAVPQNDLPAVGIDRGVANTLTLSTGEHWWMPAGLAEIEPRKRRAQRVLARRKRGSRRHAKARRRVAALQARAARIRQDWRHKASLAIARRFATVVLEDLATRNMTRSARGTVDAPGTNVCQKAGLNRAILEQGWHGFESVLAYKLEERGGYLCKVDPRHTSQTCSACAAVDRQSRESQASFRCCQCGLRAHADHNAAINILRRNTASMIVEEGQPLSVEAITIGGASRPLGNLPLASGGRC

SEQ ID NO: 22767 - protein, 188 aa, Nostoc sp.
VDVGLTSFIATSNGLTVKRPRFFVDAERKLKLLQQRVTRKRLGSNNWRKAQKKVAKLHEYVANCRQDWHRKLSHQICNDAGMLFVEDLNLVGLSRGMLGKHCLDAGFGQFFRILEQTCFKSGVYFQKVDSRKTSQICPNCGVETGTKELSQRTHACSNCGYTTDRDVAAAQVVLIRGLAAVGHTVSQP

SEQ ID NO: 22768 - protein, 525 aa, unknown
  TnpB Polypeptide
MARAPKPTFITELPMVASRAHDAVMLDRFEAARRLNNAVLGDGLKALALMRESKAWAFAQAMPKGEPKSPVREARNEAFKACNQHFGFTEYALQALATAHKNAAGFENRLGAHETQKIASRVFASLQEYAFGKRGRPRFKGKHRPLHSMEGKSNAAGPRWHADTATVSWGRGFVMPVAMPTKSKDPYIHACLKAKTKYCRIVWRMEGAKRRWFVQLVQDGVAPAKYEYLSSGQVVGLDIGPSTVAIVGGDAVGLERFAPSVEQPGKQMRVWQRAQDRSRRAMNPDNFNADGTAKKGAKRWAKSGRYERRQHKLGDLDRCLAAARKRDHGELANKVLGLGNLIQIEKLSYKGMQKNYGRSARVRASGMFVSLLTRKAESAGAKVVELNTWKLKMSQYDHVTEVCTKKPLKQRWHTLGESNTLVQRDCYSAFLARNVIENQHKPSQLREDWATAQLLLRRAGLCVEQSGSAERLRLPTVEFKTLPSDRIARLKRFVRGHARDVVAEAARSLREPANPSQSASRTPRL

SEQ ID NO: 22769 - protein, 170 aa, Chthonomonas sp.
  misc_feature (113)..(135): Xaa can be any naturally occurring amino acid
MSIQTAYAPLGRLKRPEVALHTAQQAMSRKEKFSNNGKKAKARVSKTHSRIANGRRDLLQKLSTAIRKNHAMVCIEDLQGRKKSKLAAGTADVPGSNVRAKSGLNKSLLDQGXXXXXXXXXXXXXXXXXXXXXXXQAKFACVECGFEGNADVVGAVNILSCGMRLLRDAG

SEQ ID NO: 22770 - protein, 412 aa, Halobacteriales sp.
VYYAYRYRLKPTETHREELLWTVDTCRQVYNHFLFRLNQHDEIPAMTTLRSELPDLKQWWTDLADVYSRTLQVVVERLYDNLSSLKRLKEEGYRVGSLNWKPPREFRSFTYSQRGFKLDKKGGRTVLHLSKIGDIPIELHREIPDDGRLKQVTVKQEPTGEWYATFGVEVNREPPTKPDEPERCVGVDVGVLKFAHDTDGFALGSLDLADERNRLDRERRKLSRKEHGSANWERQRRTVAERYADLKRKRHDFLHRVSAYYAREYDLVAVEDLNVTGMMESPSNSRNTASAAWRTFLSFLEYKCEREGTHFVAVEPAGTTKECASCGVSTDKPLWVREHSCPACGFTADRDANAAVNILSRGLADVGVVHSKVTPSETATATGTDGSTVPASRVTEQGSPALNEASAQARVE

SEQ ID NO: 22771 - protein, 413 aa, Halobacteriales sp.
MRYAYRYRLSPTPTVERELHRHIDICRQAYNHFLHELRGADEYLSRYEMQSMLPNMKKWWDDLSDVYSKVLQMVAKRLSDNLSSLQQLKKNGYNVGELRWKSPTEYRSLTYNQSGFDVDKNTGRDGWGELHLSKIGTVPIRLHRDIPENATVKQVAVKKEKTGKWYATVAVEFGQEPPAKPNDPERVVGIDAGIIKQTHDTDGVAVKPPDLSDERNRLEREQRNLSRKEHGSNNWNKQRQTVARRYADLKRKRRDFLHKLSAYYAREYNLVAVEDLDAKGLMEEPGNSRSRASAAWAMFKRLLEYKCEREGTHFVAVEPAGTTKECASYGVSTDKPLWVREHSCPACGFEADRDANAAWNVLSRGLNQVGAGRSESTPPETALPADTVVSAKRVIERGSPCLKEPPTAASRQG

SEQ ID NO: 22772 - protein, 398 aa, Acidimicrobiaceae sp.
MARETTKRCRTFRFRLHPTSRQTQTLLRQLDLQRELYNAALEERIGAWKWERRSVSYVDQCRTLTGLSDLRPEVTASGVTLCRGTLKRLDRAVIAFYRRVKRGETPGFPRFKPAQRFNSLQWEDTSGWKVKAADRRLYLLGVGEVKVNYHRPLQGTPKAITVQREGTKWWLSVRCVDVPAMLLTPTGREVGIDLGVTNLVATSDGKRVEGEHFGSRARDQLADAQRKLATKQRGSRRRRRQVEEVARLHHRVANQRMNAAHELSRQLVNDYDLIVLEDLAITKMARAPRAKPDPDRPGAFLPNGAKAKAGLNRSIHDAGWGTLASLLSYKAESAGRIMVTVNPRYTSQTCAECGHVEAGNRVSQAVFRCLSCAHVAHADVNAARNILRAGRARQALPA

SEQ ID NO: 22773 - protein, 430 aa, Escherichia sp.
  misc_feature (251)..(254): Xaa can be any naturally occurring amino acid
VKRLQAFKFQLRPGGQQECEMRRFAGACRFVFNRALARQNENHEAGNKYIPYGKMASWLVEWKNATETQWLKDSPSQPLQQSLKDLERAYKNFFQKRAAFPRFKKRGQNDAFRYPQGVKLDQENSRIFLPTLGWMRYRNSRQVTGVVKNVTVSQSCGKWYISIQTESEVSTPVHPSASMVGLDAGVAKLATLSDGTVFEPVNSFQKNQKKLARLQRQLSRKVKFSNNWQKQERKIQRLHSRIANIRRDYLXXXXNWQKQKRKIQRLHSCIANIRRDYLHKVTTAVSKNHAMIVIEDLKVSNMSKSAAGTVSQPGRNVRAKSGLNRSILDQGWYEMRRQLEYKQLWRGGQVLAVPPAYTSQRCACCGHTAKENRLSQSKFRCQACGYTANADVNGARNILAAGHAVLACGEMVQSGRSLKQEPTEMIQATA

SEQ ID NO: 22774 - protein, 367 aa, Lachnospiraceae sp.
MLKAYKYRIYPNKDQEEVLAKTFGCCRFVYNQTLAYRKEKYEKEKKSMSRTDCNNYCNRELKTQYEWLKEVDKFSLTNAIYNMDSAYQKFFKENAGYPKYKSKHDSRKSYTTNFTNGNISVGFETGKIKLPKLKQVRAKLHRKFTGQIKSATVSWAPSGKYYVSVLVETEHEALAETGGKIGLDLGLKDLCIASDGRKYKNPQTLAKEERKLKKLQRQLPHKEKGSNNYNKTRKQIALCHEKITNTRKDYLHKISHEIISENQVIVSEDLQIKNMVKNHRLAKSISDASWYELTRQLEYKAEWNKRKYIKIDTFYASSQLCSGCGYQNADTKDMSVRKWICPKCGAEHDRDVNAAKNILAEGLRQIA

SEQ ID NO: 22775 - protein, 380 aa, unknown
  TnpB Polypeptide
MLKAIKYELRPNATQRSLIARTCGCCRFVYNEALAFTRENRVSNYGLIKRLPALKQQYEWLREVPSQALQQSIIDLGKAFKNKWNGHNGWPVFHRKGHRDSFRIPCTCEIDYERYRIKIPKLGSVKFYRDKPIDTIRIHSYTIVREPSGRCYVSLLYEAPDKVPLANGKAVGIDVGIKDFAVCTDGTVFENQRHLAASLRKLRVLQRTMARRYDKTKDIYDTDGRKIGVREPQSKGWYKARLAVAKCHEKIRNQRKDYLDKVSSEIASKYSVVCVEDLNVKGMVRNRHLSRAIADCGWRTFKDMLRYKCDTLIEVDRFFASSQTCGQCGIKNAKVKNLAVRQWICPQCGAVHDRDKNASKNILREGLSRYSLSSSSEGFE

SEQ ID NO: 22776 - protein, 474 aa, Ardenticatenales sp.
MAQAVKTHRSEIENRPGLVGWYDATRVLYNQVVMFYFDLYQAHPGLLGLNQKDALTQAEKLTHRTKENPTPLWPLDKAIDADIPTMVRRAAINAARGAFQSFRSTFKRWQKQKAKFEAKGKRFHPRPPVPPRTFNFNLPFYKKMYKERTDSSIMVRLYSGSSWQWVKLRLKGTTLPLGWEPGSPIITRHRGRLRLHTPLEKPVQKPVKALEQVAHNPQLRVCAVDLNLGDALAVCTILQADGTEVATRFMRGGQELHARRRRLLGKVAVKRSQSGILTEGEVDNVKLWQKIQAIDEYEAHRVSRRIVEFAQAYGATILIFEHLDNLKPQKGRYSQRGNEKRAYWLKGKIVKFARYKAWEQGILTSRVSPAFTSQDCSACGHRPVARYATGEAPLEYRPGGPLYLCPNCLMHGNADHNAALNIGFRFFHRSFRYLSESLSSKGPGVPVVNPIVRQQFAGWQDRRNGLALPSFFLA

SEQ ID NO: 22777 - protein, 365 aa, unknown
  TnpB Polypeptide
MNRAFKFRIYPNSEQEIFFAKTFGCTRFVYNKMLGEKIEYYKETNKMLKNTPAQYKEEFEWLKEVDSLALANAQLHLETAYKNFFRDPKIGFPKFKSKKSNQFSYTTNNQNGTIYIKENYIKLPKLKTLVKTKQHREIPEDAIIKSATISKTATGKYYISILVEIEEEKTERKVDVNKAIGIDFSMKELIVTSMGTKPDYPRYYRQAQDKLSKEQRKLSLCEKGSNNRNKQRQKVARLHEKVKNQRQDFLHKLSRQITNECDIVCIEDLNMKAMSQCLNFGKSVADNSYGKFVEYLTYKLDEEGKKLIKIDKWFPSSKTCSNCGRIKEELLLSERIYSCGCGYIEDRDINAAINIRNEGLRIMLA

SEQ ID NO: 22778 - protein, 394 aa, unknown
  TnpB Polypeptide
VYKTLIVPVKCSKRDYQYLLNCNRLSAEVWNLCLKIDKEYQEQNNGQWIDRNQLQKLTKKCVHLHAKGIHHVVHKYLFARDSARRAKEEGKKDIFYPYKEKKYFVTGWDYQSIKIEGNKILLTKPMTNIKINGKYRKQKPVVCYVKNIPQNIVEIELIYRNKLYLAIKYKEKSQYRQIKSDNHAAIDLGEIHSITSIDSRGNAVIITGRKLRSVKYLRNKHQADIYRRMSKCKQGSRQYLKYMNALKNLKYKTDRRVNDAVHKITKLYLDFCIQNNISTVYYGDLDSATRNTKQNKKGNEFVRQKLSQWNFGEIIKQLENKLSRYGIKLIKVKEYYTSSRCPNCGRIYKPKSRNYSCECGYEQHRDLVGAINILNNNANTNLKYYTSKKYLRIA

SEQ ID NO: 22779 - protein, 465 aa, unknown
  TnpB Polypeptide
MISGIWPSGTCAERQSLRSRVRRIERRLAVPAGQQQGRARGYATQAERHSGQQRLQVLKARLARAERRAGAGQVSVCRGGRQLAKARHNLGAAGLAPEQWRQRWEARRLFLTADGEKDKFLGNETIRWHPGELWLEVKLPAVLGHLANRPHGRYRLSCPVGFSYRGDEVAAQAASGAVRYDITSDPAKNRWYLDASWRMPQVPSPSLEELSQAPLLAADLNHGHLAAWVLTPDGNPRGAPVTVPLGLAGLPAAQRDGRVRAAISMLIRIAREHGCRAIAIEDLDFAGARSEGRERSGNRPSRGTRGKAFRRIVAGIPTARFRDRLTQMTRNQGLAVITVDPAYTSRWAAEHWLAPLREQNEITTGHHAAAVVIGRRAHGHRARRRAGVTQPRPEDRGVRATPTAPAARCADRDGGTRQAPRLPPRWRKTGQAQRDHPPNQAVHDRSGPPDSREHLLLSQLGTVLP

SEQ ID NO: 22780 - protein, 282 aa, Escherichia sp.
VKRLQAFKFQLRPGGQQECEMRRFAGACRFVFNRALARQNENHEAGNKYIPYGKMASWLVEWKNATETQWLKDSPSQPLQQSLKDLERAYKNFFRKRAAFPRFKKRGQNDAFRYPQGVKLDQENSRIFLPKLGWMRYRNSRQVTGVVKNVTVSQSCGKWYISIQTESEVSTPAHPSASMVDQGWYEMHRQLEYKQLWRGGQVLAVPPAYTSQRCAYCGHTAKENRLSQSKFRCQVCGYTANADVNGARNILAAGHAVLACGEMVQSGRPLKQEPTEMIQATA

SEQ ID NO: 22781 - protein, 502 aa, unknown
  TnpB Polypeptide
MAKATTTIRQVLNHQAEHAAWFAANAALFNRVASFYFDVIATHEKILDLGNQDALTALEKLTHTTQSNPTPVMPLSQIQEDIPAMFRRAAIHAALGSARSFSSNLSKWRSRREKAQAKGKKFTERPPVPPRSWNKAATLYAGQWKERASSSIMIKVWTGSVWSWIKVRITGREIPDDARMGSPSLIRRGNGWWLHTPIEKQLKSPAKIEKQITTNEQTKICSVDLNITEHLAVCTIRTVEGSILATKFISGGRRVNGLRKKQLGRIARNRGMTGICASGEQDNADLWRKITNVDEHIAHLVSARIVQLASQHEATILVFEHLGNLKPAKGKYSRRGNSKRAFWMKGRIFKYAKYKAYNEGILTSRVSPRNTSRECARCHGLVARYAEGQPAEGYTYGAPLVACAHCGMKGNSDRNASLVIGQRLVERYQKPSKEKPHTPLVAERAEQSAGGVISQDAKRVGSRPSSARARHGDHNEHGTAQDVSLRMEEPTSDIACQLRFPF

SEQ ID NO: 22782 - protein, 304 aa, unknown
  TnpB Polypeptide
VSKTKTSTYYASLTLEKQLDSSLLMHLFFSKIADFDMSAKDFLVNDLMEMENPRFYRAEEKRIAKDQRILSRKQEGSKNYENARLKVARLYKRLYNRKKDCTHKLTRTLADEYQAIILEDFNIKGIQKFNSGLSKSVTLDFSWHQVVMFLRYKMRRNRHHLLKIDRFHPSSQICFACGEKTNHLTADMRERTYSQCGTHHDRDVNASQNLLYQGLLELVSENPLMIIHDDTTVGTTGIHASGEIVKPVTILSDLYGHVSRNEEAPPRRRGSHESPSLGRSSSSKWLYIKPLQVVSYFEALYLRV

SEQ ID NO: 22783 - protein, 385 aa, Lactobacillus sp.
MIKTQVVKLKVNKTMQKHLDALCDYRRYCWNKGLETWQLMYEAHSLNKQDNLSPNERRVRDELVANKADWQYDLSARCLQLAVKDLANAWKNFFDKAQPDWGTPSFKSKKAPRQGFKTDRAKIVNGKLRLDKPRSISKEFWFDLVSYESLKMSEVKVVSIFKEKGSYYAALPYEEEVSGKAKTHQETAVDVNVGHFNYTEGQIKVLPAKLQKLYKRIKHYQRVLARKREVNGKLAIKSNNYFAVRTKLQKDYRKGANIQNDLLQKFTTKLVDNYDQIVVEDLAVKEMMMTHVASKGMQRSLFSKFRQILTYKCDWYGKELILADKRYPSTQRCAKCGYVKKGDEKITLQGNKKHGTKHNEYICYQCGYSNDRDENAVLNLLALAK

SEQ ID NO: 22784 - protein, 418 aa, unknown
  TnpB Polypeptide
MAKQVVTRTYTASIQNQSQVSDDLDSLGFSASKLWNVGRWVCDRVWSEIGHIPEHTELTAYLKSHERYGDLHSQSSQRVLQELAEAFNAWYGKRRNGDTRANPPMYRKHNDKHPRSTVTFKAAGFKLDTTYERVRLSKGSNLKEYWSDFVLCEYQTRPDVDLSTVESVQQVRAVWTGDEWELHFVCKVELETNDSAGDGVAGIDLGITNIATVAFPGEYVLYPGNSLKQDKHYFTRAEYDTGGENGPSEQSEWARRTLTERETHFYHTLTDAIITECAERGVGTLAVSWPEDVRESDWGKTGNKKLHSWAFDRIYQYLNYKGEVRGVEVLKENEWNTSKTCSACGDDTKSSRVERGLYVCSSCELVGNADCNGAENMRQKITPSPHGEDRSNGCVAQPSTYLFDRESGTFQTREQVVS

SEQ ID NO: 22785 - protein, 495 aa, unknown
  TnpB Polypeptide
MIITTNSKFDTKDKNENLVHSKLVNLGYKYRLYPEQEQQNNLNHQMFVYNQSYNICLNLWNKESISNQKLDKKDKIYRKAVSYDKVIKRVLSIRKIKFSTVVTQQARINFLKAVAKTFSKDVVSKRLNAIEKALTPKEKVKAYSLGFPKFKSSKDINQSFSWNNQGYQIKDHQNNKFKIFRLLKMNLKLRYHRDLPKNYKLCNITVSRDVSGYYVSFGIEFEKEIINPINVHSSNFDVNNSIGIDLNAYNIAVSRPINKLISSVGISNLNKIGLIDNGATSRKGLKYNKKIKNLHKKQSRRSKLCMKQKTKHGVNYKKTQKKINKLNNYITNSKKDLYHKISTSLTNTFDMIVVEDLKTKNMSKSSKGNEINHGKMVKQKTGLNRTILNASFYQFVAMLQYKQSMLNDKLLVKVNPAYTSQECSKCGCRDKLNRPKQHIFKCIGCGFETNPDIQASHNILKKGVELLKIKSIGAGIALEDSKLKAFRSETLVSAS

SEQ ID NO: 22786 - protein, 540 aa, unknown
  TnpB Polypeptide
MPRKTTPSFTHEFRLKTQYWKTRKALKKLNATRDLYNGCLGEGFKRLNKLRKDPRFDILVKEYQIQAKIFNPINLKIKELKKSNLKITKEFESQYKIEKTKRDEISNKIKELEKEYGFTQGDLQKFSTAMKNHSYMKDHLDGNTPQIISDRAFHALDKYRYGKMGRPRFKSKEKGLKSIQGKANTCLRFTKQGKFKWLDLEFDVIYDQNDKYGVQAHALSCNVKYVRFVHKVKKGKDCFYMQLILEGIPKEKSNYVTKEGVVGLDIGVSTVAAFGEDEALLSPLCDEIEPIHQHIKQLQRQLSRKLRLNNPQNFDENNAIIKGKKEWIKSNSYLNLQCEIKEKHTKLTNKRKHSQYLLVKEVLSMGNNLHIEKNNYKAWAKGLFGKTIAHRAPSQFESILTRKALQTGGDVKWIDSWSAKLSQYDHVSNTYVKKSLGDRIHLLGDNKTIVQRDLYSAALAYAYDFDKKLVNSTMISDDWLSFDTRLKVALLTLREKYANSKNKGLYPSCLRDKRLLNELDRIATRSFIETNELHLQSNFV

SEQ ID NO: 22787 - protein, 280 aa, Bacillus sp.
VPRFKSKKNQVQSYTTKETNSNIAIVDNKIKLPKLGLVKFAKSREVEGRILNATVRRNPSGKFFVSILVETDVQPLKKTDSSIGIDLGITDFAVFSDGHKVDNHTFTAKMEKKLRREQRKLSRRALQAKNKGIHLFDAQNYQKQKRKVARLYERVRNQRDDFLHKLSTDIIKNHDVICIEDLNTKGMLRNHKLAKSISDVSWSAFVSKLEYKAKWYGKTIVKISRWFPSSQICSECGHQEGKKSLEIRDWTCPICHKHHDRDINASKNILAEGVRTLDLA

SEQ ID NO: 22788 - protein, 390 aa, Deinococcus sp.
MQNDTTVRVYRFRLYPTKPQEAAMFETLRLTRTLYNAALEQRREAYRKHGKTLSAYDQQRELTALKEACPEFNGVYSHVLQDVFDRLDKAYKAFFSRVRKGAKRAGFPRFKPRQRWDSFKFKQCWDNMRNDWTPCGRPMDDGRRINVPKIGSVKIKMHRPLEGKPKNLQIVHDCGQWFAVYACEVPKMALPNTGSSVGIDLGTTWFAVTSDGEFIENPRYLEQALKKLRVQQRTVARRKKGSNRRRKAVQQVARTHRKVRRQRLDFQHKTARKLVNAHDLIAHENLQVSNMAQSNLARSILDAGWAGFLFQLSSKAESAGRRVIAVDPRYTSQRCNACGHTGKENRVNQATFRCVQCGHTANADHNAAKNILGRAVPSGVNDSGVSHVVA

SEQ ID NO: 22789 - protein, 479 aa, Persephonella sp.
MSRKVKRNLRIELNNADPTTNIVLGYLTYHAGKLWNEANYLVKNKLAKPNKFDLYNKLKDTSIHKKSLQSRTAQIVLDELSRGWQNFFKYLQKPEKYPSPVKPPKYNKKKSPHRPVIYDKTGLTIEGNTIRLSLSKELKQHLKEKHGIDIDYLRIETGLDLSQLNILNIQITPYKAYGNITYRLNIVYEKEIDKSLIWATEKEQETKPKTDKALATDYGVSNFATIVIENQPVSYIVDGKGIQSILRKYLKKLAKWQKKRDNLLNKGLPTSRVDKILHRIQKRINNLIRDFSHKVSSLIVELAKRYNVSTIVIGKLQESKNKESKLTSIVDQMLSLLPHGKVSKQIEYKAEEYGIKTILVDESYTSGVDSLLNQTVSKENYTPEARKHRGIFKSILGLINADVNGARNILKKFKKRFHDYITGLKKVIRIRVFGKLASSPKFVRVYGQIGVARCGDHLSGIRLSQDSKLPVKPPTLVGV

SEQ ID NO: 22790 - protein, 467 aa, Persephonella sp.
LKNLKVKRSLRIELNNADPTTNIVLGYLTYHAGKLWNEANYLVKNKLAKPNKYDLYNKLKDTSIHKKSLQSRTAQIVLDELSRSWQNFFDYLQTPEKYPSRVKPPKYNKKSLSHRPVIYDKTGFKIEGNTIRLSLSKELKQHLKEKHNIDINYLTIETGLDLSQLNVLNIQITPYKAYGNITYRLNIVYEKEIKETKPQTDKVLATDYGVSNFATIVIENQPISYIVDGKGIQSLLRKYLKKLAKWQKKRDNLLNKGLPTSRVDNILHRIQKRLNNLIRDFSHKVSNLIVELAKRYNVSTIVIGKLQESKNKESKLSSIIDQMLSLLPHGRVSKQIEYKAEEYGIKTILVDESFTSGVDSLKDVAVSKENYTPEARKHRGIFKSILGLVNADVNGARNILKKFKKSFYDCITGLKQTVRIRVFGKLKSSPKSVRVYGQIGVARCGDHLSGIRLTLSKQTPCEALKFI

SEQ ID NO: 22791 - protein, 342 aa, unknown
  TnpB Polypeptide
MSVENKSNKTGLRIKDLKIIWGNLSIPFKVKKNDKYAQLALLDKTKYVRVLKREIRGKERFFVQLIQEGLPPKKHQISTVENRVGIDIGTSTVAVVSDNEVFMNELATIKTPYKKLRKLDRAMDRSRRSTNPQNYNDNGTVKKGYKKWNYSNRYLKLKYKRKELFRKIASIRKQNHEQTANFILSLGLDVRVETMRFQSLQKRAKKTTRNKKNGKINKKKRFGKSIANYAPAMLLEIINRKLKYQNLDLKKIDTYSVKANQLDHTTGECTKKFLSNRWNNIDDKLIQRDLYSAFLIQNTTNTLDVVDIDLCNLKFDNFVKLHDIEIQRLKNLNNKKLNWFVA

SEQ ID NO: 22792 - protein, 366 aa, Bacterium sp.
VKTIAKIHLKTDEKGKKVLLKTMSTFNEACTDIAEVCHREKTASKFKIQKLVYQDIKERYGLTAQLVIRAIAKACEAYKVNRKAKPKFKRYGSVVYDQRILSFKLRNFKPEVSLATVEGRKKYEIEVRDYFRGRMERVKGQVDLVFVNGEFWLYATCDMPEDTPISPDHMLGIDLGVVNIATTSDGESYSGDKLEQVRLRCQTQRERLQKKNTKCAKEKLKRVSGKERRFRTDTNHVVSKKLVGKAKDTASAIALEDLTHINERTTVRKSQRARRHSWSFYQLRRFIEYKAKLAGIPVFVVDARNTSRTCSSCGHCEKSNRNNQAEFCCKICGHTENADHNAAKNIAARAVSTGLLPSVKPLLKVA

SEQ ID NO: 22793 - protein, 411 aa, unknown
  TnpB Polypeptide
MPIKAIRQNYLPNSEQLQMMEIFRQMVNHCIRIGLENNCSTLKKLSLLSYHQLKEYPIQSKYKLTAISQACGRLSLMKREIKKGKKTKSPFVQKTYLVSCYGFKVNGMLLSFPIGDNRYTNILLNSHTASRLSEKGIKPRSFTITPNSLSISIRKDVKEIIPLNTIGIDRNLRNVTISTPSQNIMYKTNKLFSIKENTSHVIASFKRVDIRVKKRFQKRLGNRRTRRIQQYLHIISKDIVKRAVETSSMIVLEDLKGIRKLYRKGNGQGNKYRRKLNSWSFYELQRQIQYKSAWEGIPVRFVNPKRTSQLCPICGDRLQEDKFNRRKLLCNNCKKSMNRDVVASLNISYKGWLRFIHPRGDTGEGQSDTFESAMSESRLLNSDSLVIRILDVSKSGTRQNQVTLRQIGYNF

SEQ ID NO: 22794 - protein, 320 aa, unknown
  TnpB Polypeptide
MRVNISNNVTKQAIKDACTAYKNFFRGLQKFPRFKSKKRSMPKFYQDNVKIRFSNTHVKFEGFSSSRKANKQKMNWVRLAEHGRIPTNAKYMNPRISFDGLNWWISVCVEFPDCRETLNDDGVGIDLGIKDLAICSDGTKYKNINKSQKVKKLEKQKRRLQRSISRSYEKNKKGESYCKTNNVIKKEKLLLKRNHRLTNIRKNYLNQTISEIVDRKPRFICIEDLNVSGMMKNRHLSKAVQVQGFFWFRKQLEYRCSDKGIQLIVADRFYPSSKLCSCCGNIKKDLKLSDRVYRCECGNMIDRDFQASINLKTYGEKFAG

SEQ ID NO: 22795 - protein, 388 aa, Enterobacteriaceae sp.
MKRATKVRIYPTDEQAAFLNAQFGAVRFAYNKALYISRHMYKRHGVSLKPIRDIKPLLAVAKKSRRYSWLKEYDSLALQQAVINLDKAFANFFNKKLKASKPKFKSKRGQQSSYHPNGKVLTDAIQLPKIPPVRANIHREIIGKVSSITITRSAAGKYYASILADDGQKAAAKPDYITTVAGYDLGLSHYLVSNDGGRVANPRHLVNAYRRLRRDSKALSRKKPGSANRRKAHLRLAAQHERVANARADFQHKLSRRIIDENQAVIVETLKSANMMKNRRLARYIGDAAWSGFVAKLTYKAESAGVHLVKLDQWFASSKTCHCCGHRMSEMPLKVREWRCPDCSANHDRDINAAINIQHKGITELMAAGHVVKAHRGLRNSGSVPVAA

SEQ ID NO: 22796 - protein, 518 aa, unknown
  TnpB Polypeptide
MMEFERERKEASSMAKASKTMQQTMQYPPQYAAWFTATQTLFNTVASFYFDVITAHDQVLLLSSQKALNALETLTHATEENPNPVMPLGAIASSIPAMFRRAAIHAALGSARSFSTSLRKWRVRKEKAEAKKKRFTERPPVPPRTWNRSTTFYAGLWKQRSTHAIMLKLWTGTCWSWVKVHLLSRDLPDGYEPGSPSLVRHGKQWRLHTPVEKQFTSPTKAVEQLTSTETRICAIDLNLDHHLAVCTIQDAKGSILATTFISGGKRVNGFRKTQLGRIARNRRKTGILAEGQQDNAALWAKIRQVDEQVSHLVSTRIVQFARQHRASILVFEHLGNLKPQKGKYGRRSNAKRAYWMKGRIFNYAKYKAYHEGIITCRVSPRNTSKECARCHGLIARYDAHHTPEGYTPGTPLASCPHCGMKGNADRNASLVIGQRLLARSHPSHSQEKPPTPLLQATERNEKSSGVTRSQDANSTDGPSTHRVRRRGIGQGHGTAHEDRAGMVAHARSIPTQLRLFNE

SEQ ID NO: 22797 - protein, 386 aa, Brasilonema sp.
VLKAYKYRIYPTSEQSILLAKSMGCARWFYNYALNLTSETYKTTGKGLSRNEIINLLPSLKKEHEWLTEPPSQCLQQVALDLSSAFLNFFEKRGLYPNFKKKGQKQSIRFPQEIKLDGSYLTLPKLGKVYCKVSRKPDGKLKSVTVSLTSSGEYYAACLYDDGKDIPVSSSEGKAVGIDMGITHYAITSDGTKHGNPKYYRKYETKLAQKQKLLSRKHKGSNNRNKARIKVAIVHTKITRCREDFLHKLSRKLVDENQVIVVENLAVKNMVRNHKLAKSISDAGWGQFCTMLKYKAEWKRKTYIEVDRFFPSSKTCSNCLHQVDHLSLDIRSWQCPRCQTLHDRDVNAAINIRDEGLRILAGGHLATASGQRVRPSKGTAFRGYVG

SEQ ID NO: 22798 - protein, 354 aa, Mycobacterium sp.
LTANQWRDCWDAARYRITANGSPDEPFGNLTITVTAAGVVSVRLPKPLEYLANAKRGRYILSGVAAFTHRGDEWAARICTGNSVSYTITRRPGRAGRYPTAAWAIPALPYWVSPGNDATPQGDLFATGPVVGVDLNDGHLAVRRLDAHGNPVGGAHRIDIDLRGSSARRDAQVRHAITRLIRYTQRHHINAIAVEDLDFADARATGRETMGRGGRGKRFRRTVAGIPTAVFRSRLAAQSHTAGIELFAVNPAYSSIWGDAHWRTPYKNVTRHQAAATVIGRRAQGLKARRRKGVTRQRPEDRGVRATNQAAPQNQQANTDSRHRPGTRGAKSRAPHRIRTRLPDRATATPGNGQ

SEQ ID NO: 22799 - protein, 196 aa, unknown
  TnpB Polypeptide
MRTSLYNETTNHWYAHIPVEVGVEETKSGKKSKYIAHGERKVIQVETPKGNKIASIDLGINVLASIVVDDGTWLLYKGVRAKEDYFYLQKKIAEIQSLADKTKNLGEYDAYEELAREKRRLFKKLTRRLLHLYRNLASHMVKTLNELGVSTIYLGCPFNIAQEKGNKFTVNLWSYRKLMEAIELKAQEYGIKVFER

SEQ ID NO: 22800 - protein, 387 aa, Rhodococcus sp.
LYGAGVQLRYQYRVYPTPGQQDMLARSFGCARVVFNDALRARQDAYAAGVRVSDTDVQRWVVTAAKKTPQRVWLAEVASVVLVQACQDARRAYRNWFDSLSGKRKGRKVGAPRFRSRKDNRQSIRLTRNGFSIRGNRKLYIAKVGELKVAWSRELPSEPSSVTVIRDSAGRYFVSFVVETTDEPMPELDREVGIDLGLTTFAVLSDGKVIESPRFFRRAERRLRKAQQNLSRKEKGSKNRAKARLEVAKAHAKVADAHKDWAHKHSTTIVRENQAVYVEDLCVAGLGRTRLAKSVHDAGWGMFTRMLEEKAARYGRTFQRVDRWFPSSQLCSVCGVSDGPKPLSVREWTCPGCGVVHDRDLNAAENILAAGRAERRNACGGTVNPAA

SEQ ID NO: 22801 - protein, 230 aa, Chromatium sp.
MRQPLRFTGQTKQVTISKKASQFFASILIDTDDYNPHAPEQASVGVDFGIKDLAVLSTGAVIPANHTLKKNLKLLKRRQRNLSRKQKGSHRRAKAKLRLAKLHQRISNQRQAVLHELSDKLTRQYKVITIEDLNVSGNDEEPPSCPRRLRCRLWRVTAADRIQGRLARRNRHHRGSVLSIQQDVPRLRSAPRHALVATHHDLRLRQRDRPRPQRGLELKPVRSQRAQAGP

SEQ ID NO: 22802 - protein, 488 aa, unknown
  TnpB Polypeptide
MKEMRVRFKNVIPSSFDAQVYTQVFTSYQNKFKAIQRKLVFETRTLKGFELYKHDTKNHKKDDLKRVIIERNQTPLTICLTYLARYGNENTINYIKANINHRDDKKRDFYNNILRCCEKFDFDRLYNLALSKRERAIKRYSEHHIEFKSLTFSGRCRKKKIIDYNSRFGSKINSFVSLSGLGRKSFDIPVTFNKGWHGNMRDYRKKNPDYEYVLTFDEKKHQVKVNLCKDEERYIPEPNGKTVGIDVNCKHNLFSLSNKTTYDYDRKLVNDFCKLSLEIDKLKSDKSYTVGKSKQRKLDVMKTKMIKSEQQLIANMCKTLQLKGVGHIVMEDLDNSFGKCYVKDKDNEDINYNRKVKFLGLSSLKQEVEHIARKYDIAVSTVQASYTSKMCPVCGCIEDENRPTQETFECVECGYKDNADFNAAKNIRNRVLVTVLRESLLKQLDNGAFEPKKLKREKVKEVLLSFRRSLQNVGSECRESGLTTFDYV

SEQ ID NO: 22803 - protein, 406 aa, unknown
  TnpB Polypeptide
VNCLKHYGSEIAHGLAQLFKKIINIKMLRAIKIRLYPNKAQEQTLNKVLGCYRFVYNQMLARKQNAYKADKTNLSVTDLSKWFHGTMLKDEQYAWLKEQNTKVMKQAIRQVDGSYQKFFKQHNGFPKFKTKKDKQSALFPIDAISKKNTFETKHISLITSLKNIKFRCSDLYFRRLKKYNKDIKSATLSKTKSGNFFLSIIVEMDDTELKKFEHTNKQVGIDLGVKDFVITSDGEVFENKHLFKKKEKQVKKLQRQLSRKVKGSNNRRKVQIRIARLFEGITNKKVAYIHYVTNELLTYFDTIFMEDLNVKGMLRNHHLAKAIQEVGFSKFKETLLSKALVNDKKVVFIDRFYPSSKTCSQCGYNKRDLKLSDRFWVCPECGTKHDRDINAAINILLEGQRMLTAV
